United States Patent Application Publication US 2018/0126003 A1 - sequence listing, part 108

SEQ ID NO: 191250 - DNA, 3111 bp, Artificial Sequence
  derived and/or modified sequence
atgtatcttgtcgctggcgaccgcggactagctgggtgtgggcaccttctggtatcactgctgggcctgctcctcctcctggccagatctggaacacgagccttagtgtgtctgccatgcgacgagtccaagtgcgaggagccccgaaactgcccaggctccattgtccagggagtttgtggttgctgctatacctgcgcttcacagcgtaatgaaagttgtggcggtaccttcggcatttacggcacatgtgaccgaggactccgttgtgtcatccgcccacccttaaatggggatagtctgaccgagtatgaggccggagtgtgtgaagatgagaattggactgatgaccaactgctgggatttaagccttgtaacgagaacctcatagcagggtgtaatattataaacgggaagtgcgagtgtaatacaatacggacatgctcaaatccctttgaatttcccagtcaggatatgtgtctgagtgccctcaagaggatcgaagaagagaaaccagactgcagtaaggccagatgcgaggtccagttttccccaagatgccctgaggattcagttttaatagaaggttatgctcctcccggagaatgttgcccgttgccaagtagatgtgtttgtaatcccgctggctgcctgagaaaagtatgccaacccggaaatctgaatattctggtgtctaaggcatccgggaaacctggtgagtgctgcgatctttatgagtgcaagccagtattcggagtagattgtcgcacagtggagtgcccccctgtgcaacaaacggcttgtccaccagactcttacgagacacaggtacggcttacggcggacggatgctgcaccctgccaactcgatgcgagtgcctttccggcttatgcgggtttccagtgtgtgaggtgggatctacaccacggatcgtgagtcggggagatgggactcccggaaagtgctgcgacgtgttcgagtgcgtcaacgacaccaagccagcttgtgtttttaataacgtggagtactacgatggtgacatgttccgaatggataactgccgtttctgtagatgtcaaggtggagtagccatctgcttcaccgcccagtgtggagagataaactgcgaaaggtattacgtgccggagggcgagtgttgccctgtttgcgaagatccagtgtaccctttcaataacccggcaggatgctacgcaaatggcctaatcctggcccatggcgaccgctggagggaggatgattgtacattttgccagtgcgttaatggtgagagacactgcgtcgctacggtgtgtggtcagacttgcaccaaccccgtgaaagtgcccggagagtgttgccccgtctgtgaagagccaactatcatcactgtggacccacccgcatgtggggagctgtcgaactgcaccctgacaggcaaggattgcatcaacgggtttaagagagatcataatggctgcagaacatgccagtgtataaatactgaggaactgtgcagtgagagaaagcagggatgcaccctaaattgtccctttggcttcttgaccgacgctcagaactgcgaaatttgcgagtgtcggcctcggcctaagaagtgccggcctatcatttgtgataagtattgcccgctggggctcctgaaaaataagcacggatgcgatatttgtagatgcaagaaatgtcccgaactctcatgttctaaaatctgccccctgggatttcagcaggacagtcacggctgccttatttgcaagtgccgagaggcgtccgcatctgctggaccaccgatcctcagtggcacatgcctcactgtggacgggcaccaccataagaacgaggagtcatggcatgacggctgccgcgaatgctattgcctaaatgggcgagagatgtgtgcccttattacttgccctgtcccagcctgcggaaaccccactattcatcctgggcagtgctgtccaagctgtgctgatgactttgtggtccaaaagccagagctatctaccccttcaatttgtcacgcccctggcggagagtattttgtggagggcgagacctggaacatagacagttgtacgcagtgcacctgccactccggcagagtattatgcgaaaccgaagtgtgtcccccattgttgtgccagaatccaagtagaacacaggatagttgctgcccccagtgtaccgatcagcccttcagaccgtcactgtctaggaacaacagcgtcccaaactactgcaagaatgatgagggagacatcttcctggccgcagagtcctggaagcctgacgtgtgtacttcctgtatttgcatagacagtgtgatctcatgctttagcgaaagctgcccctcagttagctgtgaacgaccagtcttgagaaagggacagtgttgcccatattgcatcgaggacacaattcctaagaaggtagtatgccacttttcaggcaaagcgtacgccgacgaagagaggtgggatttagattcctgcactcactgttattgcctgcaaggccagaccttatgctccacagtcagttgtccaccgctcccctgtgtcgagccgataaatgtggagggaagctgctgtcccatgtgccccgagatgtatgtgccagagcctactaacattccgatcgagaaaacaaatcacagaggagaagtcgatctggaagtgcctctgtggccgacccctagcgaaaatgatatcgtgcatttgcctagggatatgggccacctgcaggtggattatcgggataaccgccttcacccctccgaagattcttcactggattctattgcaagcgtggtagtccctattatcatttgcttatccatcatcattgcctttctgttcattaatcaaaagaagcagtggattcctctgctgtgctggtatcgtacacccaccaagcccagcagtcttaataaccagctcgtctctgtggattgtaagaagggcactagggttcaggtggactcgtcacagcgaatgctgcgcattgccgagcccgatgccaggttcagcggtttctatagtatgcagaaacagaaccacctgcaagctgataacttctaccagacagtgtag

SEQ ID NO: 191251 - DNA, 5912 bp, Artificial Sequence
  derived and/or modified sequence
gccgccggcccgggctggagccgagcgcagcagccaccgccgccgccgcgccagaagtttgggttgaaccggagctgccgggaggaaacttttttcttttttccccctccctcccgggaggaggaggaggaggaggaggggaagctgccgccggcgccaaggctcgtgggctcggggtcggcgcggcccgcagaaggggcgggggcctcgccccgcgaggggaggcgcgccccgggggccccgagaggggcggtgaggaccgcgggctgctggtgcggcggcggcggcgcgtgtgccccgcgcaggggagggcgcccgccccgctcccggcccggctgcgaggaggaggcggcggcggcgcaggaggatgtacttggtggcgggggacagggggttggccggctgcgggcacctcctggtctcgctgctggggctgctgctgctgctggcgcgctccggcacccgggcgctggtctgcctgccctgtgacgagtccaagtgcgaggagcccaggaactgcccggggagcatcgtgcagggcgtctgcggctgctgctacacgtgcgccagccagaggaacgagagctgcggcggcaccttcgggatttacggaacctgcgaccgggggctgcgttgtgtcatccgccccccgctcaatggcgactccctcaccgagtacgaagcgggcgtttgcgaagatgagaactggactgatgaccaactgcttggttttaaaccatgcaatgaaaaccttattgctggctgcaatataatcaatgggaaatgtgaatgtaacaccattcgaacctgcagcaatccctttgagtttccaagtcaggatatgtgcctttcagctttaaagagaattgaagaagagaagccagattgctccaaggcccgctgtgaagtccagttctctccacgttgtcctgaagattctgttctgatcgagggttatgctcctcctggggagtgctgtcccttacccagccgctgcgtgtgcaaccccgcaggctgtctgcgcaaagtctgccagccgggaaacctgaacatactagtgtcaaaagcctcagggaagccgggagagtgctgtgacctctatgagtgcaaaccagttttcggcgtggactgcaggactgtggaatgccctcctgttcagcagaccgcgtgtcccccggacagctatgaaactcaagtcagactaactgcagatggttgctgtactttgccaacaagatgcgagtgtctctctggcttatgtggtttccccgtgtgtgaggtgggatccactccccgcatagtctctcgtggcgatgggacacctggaaagtgctgtgatgtctttgaatgtgttaatgatacaaagccagcctgcgtatttaacaatgtggaatattatgatggagacatgtttcgaatggacaactgtcggttctgtcgatgccaagggggcgttgccatctgcttcaccgcccagtgtggtgagataaactgcgagaggtactacgtgcccgaaggagagtgctgcccagtgtgtgaagatccagtgtatccttttaataatcccgctggctgctatgccaatggcctgatccttgcccacggagaccggtggcgggaagacgactgcacattctgccagtgcgtcaacggtgaacgccactgcgttgcgaccgtctgcggacagacctgcacaaaccctgtgaaagtgcctggggagtgttgccctgtgtgcgaagaaccaaccatcatcacagttgatccacctgcatgtggggagttatcaaactgcactctgacagggaaggactgcattaatggtttcaaacgcgatcacaatggttgtcggacctgtcagtgcataaacaccgaggaactatgttcagaacgtaaacaaggctgcaccttgaactgtcccttcggtttccttactgatgcccaaaactgtgagatctgtgagtgccgcccaaggcccaagaagtgcagacccataatctgtgacaagtattgtccacttggattgctgaagaataagcacggctgtgacatctgtcgctgtaagaaatgtccagagctctcatgcagtaagatctgccccttgggtttccagcaggacagtcacggctgtcttatctgcaagtgcagagaggcctctgcttcagctgggccacccatcctgtcgggcacttgtctcaccgtggatggtcatcatcataaaaatgaggagagctggcacgatgggtgccgggaatgctactgtctcaatggacgggaaatgtgtgccctgatcacctgcccggtgcctgcctgtggcaaccccaccattcaccctggacagtgctgcccatcatgtgcagatgactttgtggtgcagaagccagagctcagtactccctccatttgccacgcccctggaggagaatactttgtggaaggagaaacgtggaacattgactcctgtactcagtgcacctgccacagcggacgggtgctgtgtgagacagaggtgtgcccaccgctgctctgccagaacccctcacgcacccaggattcctgctgcccacagtgtacagatcaaccttttcggccttccttgtcccgcaataacagcgtacctaattactgcaaaaatgatgaaggggatatattcctggcagctgagtcctggaagcctgacgtttgtaccagctgcatctgcattgatagcgtaattagctgtttctctgagtcctgcccttctgtatcctgtgaaagacctgtcttgagaaaaggccagtgttgtccctactgcatagaagacacaattccaaagaaggtggtgtgccacttcagtgggaaggcctatgccgacgaggagcggtgggaccttgacagctgcacccactgctactgcctgcagggccagaccctctgctcgaccgtcagctgcccccctctgccctgtgttgagcccatcaacgtggaaggaagttgctgcccaatgtgtccagaaatgtatgtcccagaaccaaccaatatacccattgagaagacaaaccatcgaggagaggttgacctggaggttcccctgtggcccacgcctagtgaaaatgatatcgtccatctccctagagatatgggtcacctccaggtagattacagagataacaggctgcacccaagtgaagattcttcactggactccattgcctcagttgtggttcccataattatatgcctctctattataatagcattcctattcatcaatcagaagaaacagtggataccactgctttgctggtatcgaacaccaactaagccttcttccttaaataatcagctagtatctgtggactgcaagaaaggaaccagagtccaggtggacagttcccagagaatgctaagaattgcagaaccagatgcaagattcagtggcttctacagcatgcaaaaacagaaccatctacaggcagacaatttctaccaaacagtgtgaagaaaggcaactaggatgaggtttcaaaagacggaagacgactaaatctgctctaaaaagtaaactagaatttgtgcacttgcttagtggattgtattggattgtgacttgatgtacagcgctaagaccttactgggatgggctctgtctacagcaatgtgcagaacaagcattcccacttttcctcaagataactgaccaagtgttttcttagaaccaaagtttttaaagttgctaagatatatttgcctgtaagatagctgtagagatatttggggtggggacagtgagtttggatggggaaatgggtgggagggtggtgttgggaagaaaaattggtcagcttggctcggggagaaacctggtaacataaaagcagttcagtggcccagaggttatttttttcctattgctctgaagactgcactggttgctgcaaagctcaggcctgaatgagcaggaaacaaaaaaggccttgcgacccagctgccataaccaccttagaactaccagacgagcacatcagaaccctttgacagccatcccaggtctaaagccacaagtttcttttctatacagtcacaactgcagtaggcagtgaggaagccagagaaatgcgatagcggcatttctctaaagcgggttattaaggatatatacagttacactttttgctgcttttattttcttccaagccaatcaatcagccagttcctagcagagtcagcacatgaacaagatctaagtcatttcttgatgtgagcactggagcttttttttttttacaacgtgacaggaagaggagggagagggtgacgaacaccaggcatttccaggggctatatttcactgtttgttgttgctttgttctgttatattgttggttgttcatagtttttgttgaagctctagcttaagaagaaactttttttaaaaagactgtttggggattctttttccttattatatactgattctacaaaatagaaactacttcattttaattgtatattattcaagcacctttgttgaagctcaaaaaaaatgatgcctctttaaactttagcaattataggagtatttatgtaactatcttatgcttcaaaaaacaaaagtatttgtgtgcatgtgtatataatatatatatatacatatatatttatacacatacaatttatgttttcctgttgaatgtatttttatgagattttaaccagaacaaaggcagataaacaggcattccatagcagtgcttttgatcacttacaaattttttgaataacacaaaatctcattctacctgcagtttaattggaaagatgtgtgtgtgagagtatgtatgtgtgtgtgtgtgtgtgtgtgtgtgcgcgcgcacgcacgccttgagcagtcagcattgcacctgctatggagaagggtattcctttattaaaatcttcctcatttggatttgctttcagttggttttcaatttgctcactggccagagacattgatggcagttcttatctgcatcactaatcagctcctggattttttttttttttttttcaaacaatggtttgaaacaactactggaatattgtccacaataagctggaagtttgttgtagtatgcctcaaatataactgactgtatactatagtggtaacttttcaaacagcccttagcacttttatactaattaacccatttgtgcattgagttttcttttaaaaatgcttgttgtgaaagacacagatacccagtatgcttaacgtgaaaagaaaatgtgttctgttttgtaaaggaactttcaagtattgttgtaaatacttggacagaggttgctgaactttaaaaaaaattaatttattattataatgacctaatttattaatctgaagattaaccatttttttgtcttagaatatcaaaaagaaaaagaaaaaggtgttctagctgtttgcatcaaaggaaaaaaagatttattatcaaggggcaatatttttatcttttccaaaataaatttgttaatgatacattacaaaaatagattgacatcagcctgattagtataaattttgttggtaattaatccattcctggcataaaaagtctttatcaaaaaaaattgtagatgcttgctttttgttttttcaatcatggccatattatgaaaatactaacaggatataggacaaggtgtaaatttttttattattattttaaagatatgatttatcctgagtgctgtatctattactcttttactttggttcctgttgtgctcttgtaaaagaaaaatataatttcctgaagaataaaatagatatatggcacttggagtgcatcatagttctacagtttgtttttgttttcttcaaaaaagctgtaagagaattatctgcaacttgattcttggcaggaaataaacattttgagttgaaatca

SEQ ID NO: 191252 - DNA, 3111 bp, Artificial Sequence
  derived and/or modified sequence
atgtacctggtggccggcgacagaggcctggccggctgcggccacctgctggtgagcctgctgggcctgctgctgctgctggccagaagcggcaccagagccctggtgtgcctgccctgcgacgagagcaagtgcgaggagcccagaaactgccccggcagcatcgtgcagggcgtgtgcggctgctgctacacctgcgccagccagagaaacgagagctgcggcggcaccttcggcatctacggcacctgcgacagaggcctgagatgcgtgatcagaccccccctgaacggcgacagcctgaccgagtacgaggccggcgtgtgcgaggacgagaactggaccgacgaccagctgctgggcttcaagccctgcaacgagaacctgatcgccggctgcaacatcatcaacggcaagtgcgagtgcaacaccatcagaacctgcagcaaccccttcgagttccccagccaggacatgtgcctgagcgccctgaagagaatcgaggaggagaagcccgactgcagcaaggccagatgcgaggtgcagttcagccccagatgccccgaggacagcgtgctgatcgagggctacgccccccccggcgagtgctgccccctgcccagcagatgcgtgtgcaaccccgccggctgcctgagaaaggtgtgccagcccggcaacctgaacatcctggtgagcaaggccagcggcaagcccggcgagtgctgcgacctgtacgagtgcaagcccgtgttcggcgtggactgcagaaccgtggagtgcccccccgtgcagcagaccgcctgcccccccgacagctacgagacccaggtgagactgaccgccgacggctgctgcaccctgcccaccagatgcgagtgcctgagcggcctgtgcggcttccccgtgtgcgaggtgggcagcacccccagaatcgtgagcagaggcgacggcacccccggcaagtgctgcgacgtgttcgagtgcgtgaacgacaccaagcccgcctgcgtgttcaacaacgtggagtactacgacggcgacatgttcagaatggacaactgcagattctgcagatgccagggcggcgtggccatctgcttcaccgcccagtgcggcgagatcaactgcgagagatactacgtgcccgagggcgagtgctgccccgtgtgcgaggaccccgtgtaccccttcaacaaccccgccggctgctacgccaacggcctgatcctggcccacggcgacagatggagagaggacgactgcaccttctgccagtgcgtgaacggcgagagacactgcgtggccaccgtgtgcggccagacctgcaccaaccccgtgaaggtgcccggcgagtgctgccccgtgtgcgaggagcccaccatcatcaccgtggacccccccgcctgcggcgagctgagcaactgcaccctgaccggcaaggactgcatcaacggcttcaagagagaccacaacggctgcagaacctgccagtgcatcaacaccgaggagctgtgcagcgagagaaagcagggctgcaccctgaactgccccttcggcttcctgaccgacgcccagaactgcgagatctgcgagtgcagacccagacccaagaagtgcagacccatcatctgcgacaagtactgccccctgggcctgctgaagaacaagcacggctgcgacatctgcagatgcaagaagtgccccgagctgagctgcagcaagatctgccccctgggcttccagcaggacagccacggctgcctgatctgcaagtgcagagaggccagcgccagcgccggcccccccatcctgagcggcacctgcctgaccgtggacggccaccaccacaagaacgaggagagctggcacgacggctgcagagagtgctactgcctgaacggcagagagatgtgcgccctgatcacctgccccgtgcccgcctgcggcaaccccaccatccaccccggccagtgctgccccagctgcgccgacgacttcgtggtgcagaagcccgagctgagcacccccagcatctgccacgcccccggcggcgagtacttcgtggagggcgagacctggaacatcgacagctgcacccagtgcacctgccacagcggcagagtgctgtgcgagaccgaggtgtgcccccccctgctgtgccagaaccccagcagaacccaggacagctgctgcccccagtgcaccgaccagcccttcagacccagcctgagcagaaacaacagcgtgcccaactactgcaagaacgacgagggcgacatcttcctggccgccgagagctggaagcccgacgtgtgcaccagctgcatctgcatcgacagcgtgatcagctgcttcagcgagagctgccccagcgtgagctgcgagagacccgtgctgagaaagggccagtgctgcccctactgcatcgaggacaccatccccaagaaggtggtgtgccacttcagcggcaaggcctacgccgacgaggagagatgggacctggacagctgcacccactgctactgcctgcagggccagaccctgtgcagcaccgtgagctgcccccccctgccctgcgtggagcccatcaacgtggagggcagctgctgccccatgtgccccgagatgtacgtgcccgagcccaccaacatccccatcgagaagaccaaccacagaggcgaggtggacctggaggtgcccctgtggcccacccccagcgagaacgacatcgtgcacctgcccagagacatgggccacctgcaggtggactacagagacaacagactgcaccccagcgaggacagcagcctggacagcatcgccagcgtggtggtgcccatcatcatctgcctgagcatcatcatcgccttcctgttcatcaaccagaagaagcagtggatccccctgctgtgctggtacagaacccccaccaagcccagcagcctgaacaaccagctggtgagcgtggactgcaagaagggcaccagagtgcaggtggacagcagccagagaatgctgagaatcgccgagcccgacgccagattcagcggcttctacagcatgcagaagcagaaccacctgcaggccgacaacttctaccagaccgtgtag

SEQ ID NO: 191253 - protein, 948 aa, Artificial Sequence
  derived and/or modified sequence
MVFLPLKWSLATMSFLLSSLLALLTVSTPSWCQSTEASPKRSDGTPFPWNKIRLPEYVIPVHYDLLIHANLTTLTFWGTTKVEITASQPTSTIILHSHHLQISRATLRKGAGERLSEEPLQVLEHPRQEQIALLAPEPLLVGLPYTVVIHYAGNLSETFHGFYKSTYRTKEGELRILASTQFEPTAARMAFPCFDEPAFKASFSIKIRREPRHLAISNMPLVKSVTVAEGLIEDHFDVTVKMSTYLVAFIISDFESVSKITKSGVKVSVYAVPDKINQADYALDAAVTLLEFYEDYFSIPYPLPKQDLAAIPDFQSGAMENWGLTTYRESALLFDAEKSSASSKLGITMTVAHELAHQWFGNLVTMEWWNDLWLNEGFAKFMEFVSVSVTHPELKVGDYFFGKCFDAMEVDALNSSHPVSTPVENPAQIREMFDDVSYDKGACILNMLREYLSADAFKSGIVQYLQKHSYKNTKNEDLWDSMASICPTDGVKGMDGFCSRSQHSSSSSHWHQEGVDVKTMMNTWTLQKGFPLITITVRGRNVHMKQEHYMKGSDGAPDTGYLWHVPLTFITSKSDMVHRFLLKTKTDVLILPEEVEWIKFNVGMNGYYIVHYEDDGWDSLTGLLKGTHTAVSSNDRASLINNAFQLVSIGKLSIEKALDLSLYLKHETEIMPVFQGLNELIPMYKLMEKRDMNEVETQFKAFLIRLLRDLIDKQTWTDEGSVSERMLRSQLLLLACVHNYQPCVQRAEGYFRKWKESNGNLSLPVDVTLAVFAVGAQSTEGWDFLYSKYQFSLSSTEKSQIEFALCRTQNKEKLQWLLDESFKGDKIKTQEFPQILTLIGRNPVGYPLAWQFLRKNWNKLVQKFELGSSSIAHMVMGTTNQFSTRTRLEEVKGFFSSLKENGSQLRCVQQTIETIEENIGWMDKNFDKIRVWLQSEKLEHDPEADATG

SEQ ID NO: 191254 - DNA, 2847 bp, Artificial Sequence
  derived and/or modified sequence
atggtgtttctgcctctaaaatggagcttggcgactatgagctttctcctgtctagtctcctggcgcttctaacagttagcacgccaagttggtgccagtcgacagaggcgagtcccaaaagatccgatgggactccttttccatggaacaagattaggctcccggaatacgtgatccccgttcactacgaccttttgattcacgccaatctgactaccctgaccttttggggaaccacaaaagtcgagatcacagctagtcaaccgacaagcaccattatcctccatagccaccacctccagataagccgagccaccctgcggaagggcgccggcgagagattgtccgaggagcctctccaggtgctggaacaccctagacaagagcagatcgccctgttggcaccagagcctctgcttgtcgggctgccctacacagtcgttatccactatgcaggcaacttaagcgagacctttcacggattttacaaatccacgtatcggacaaaggaaggagaactgagaatcctagcctctacacaatttgaaccaactgctgctcgtatggcttttccatgtttcgatgagcccgctttcaaggcctcgtttagcatcaagatcagacgcgaaccgagacacctggcaattagtaatatgcctcttgtaaagtccgtaaccgtcgcggaaggcctgatcgaggaccacttcgatgtgacagttaaaatgtccacatacctggttgcattcataatctcagatttcgagtccgtgtcaaaaatcactaagtctggggtgaaagtcagcgtctacgccgtgccagacaagattaaccaagctgattacgcactggacgccgccgtcactcttttggagttttacgaggactatttctctatcccatacccgctgcctaaacaggatctggccgctatccctgatttccaaagcggagcaatggagaactggggactcacaacatacagagaatccgcactgctgttcgatgccgagaagtcttctgcctccagtaagttgggtattacgatgacagtcgcgcatgagctggcgcatcagtggttcggaaacctggtgactatggaatggtggaacgatctgtggctgaatgagggcttcgccaaatttatggagtttgtgtctgtgagcgtcacccacccggaactcaaggtgggtgattactttttcgggaaatgttttgatgcaatggaggtggacgcactgaactcttcccatcccgtgtcaaccccggtcgagaacccagctcagatccgagagatgttcgatgatgtatcttacgataaaggtgcttgtatcctcaacatgcttagagagtacttgagcgctgacgcatttaagagtggaattgttcagtatctgcaaaaacacagctataagaacacaaagaatgaagatttgtgggactccatggcctctatctgtccgacggacggtgtgaagggaatggacggattttgttcccggtcccagcactcaagctccagttctcactggcaccaagagggtgtggatgtaaaaacaatgatgaatacctggacactgcagaagggttttcctctgatcacaataacagtacgggggaggaatgtccacatgaaacaggagcattacatgaaagggtctgacggcgcccccgatacgggttatctttggcacgttcctctcaccttcatcacgagcaagagtgacatggtgcatcggtttctgctcaagaccaaaactgacgtccttatactgcctgaagaggtggagtggatcaagtttaacgtaggaatgaacggatactacattgttcattatgaggatgacggatgggactccctaacaggtctcttgaaagggacgcataccgccgtctcatccaatgatcgagcctccctcataaacaacgcatttcagctcgtgtctatcggaaagctgtccattgaaaaggcactggatctctctctgtacctgaagcatgagactgagataatgccagtgtttcagggcctgaacgagcttatcccaatgtataagctgatggagaagcgagacatgaacgaagttgagacccagtttaaagctttcttgatcaggctccttagggacttgattgacaaacagacgtggactgacgagggttccgtcagtgaacgcatgctgaggagccaactgctcttactggcttgcgtgcacaactatcaaccctgcgtccagcgcgcagagggctattttcggaaatggaaggagtccaatggaaacctatctctcccagtggacgtcaccctcgctgtgtttgctgttggggcccaatcaactgaaggctgggatttcctttactcaaagtaccagttttccctgagttcaaccgagaagtcccagattgagtttgcgctgtgccgaacccaaaataaagaaaaacttcaatggctacttgatgagtcgtttaagggggacaaaatcaagacccaagaatttccacagatattaacactgatagggaggaaccccgttggatacccgcttgcatggcaattcctcagaaagaattggaataaactcgtccagaagtttgaactcggcagttcatcgattgcccatatggtgatggggaccaccaatcagttctccacccggacccgcctggaggaggtgaaaggctttttctcttctttaaaggaaaacggctcacagctacggtgcgttcaacagacaatcgagacgatcgaagagaatataggatggatggacaaaaatttcgacaaaatccgtgtgtggttgcagagtgagaagttggaacacgacccagaggcggacgccaccggttag

SEQ ID NO: 191255 - DNA, 2847 bp, Artificial Sequence
  derived and/or modified sequence
atggtgttcctgcccctgaagtggagcctggccaccatgtccttcctgctgagcagcctgctggccctgctgactgtgtccacccccagctggtgccagagcacagaggccagccccaagagaagtgatggcacccccttcccctggaacaagatccggctgcctgaatatgtgattcctgtgcactatgacctgctgatccacgccaacctgaccaccctgaccttctggggcaccaccaaggtggagatcacagccagccagcccaccagcaccatcatcctgcacagccaccacctgcagatcagccgggccaccctgaggaaaggagctggggagcggctgtctgaggagcccctgcaggtgctggagcacccccggcaggagcagatcgccctgctggcccctgagcccctgctggtgggcctgccctacacagtggtgatccactacgccggcaacctgtctgagaccttccacggcttctacaagagcacctaccgcaccaaggagggggagctgcgcatcctggccagcacccagtttgagcccacagctgccaggatggccttcccctgctttgatgagcccgccttcaaggccagcttcagcatcaagatccggcgggagcccaggcacctggccatcagcaacatgcccctggtgaagtctgtgacagtggccgagggcctgattgaggaccactttgatgtgacagtgaagatgagcacctacctggtggccttcatcatcagtgactttgagagcgtgtccaagatcaccaagtctggagtgaaggtgtctgtgtatgctgtgcctgacaagatcaaccaggccgactatgccctggatgctgctgtgaccctgctggagttctatgaggactacttcagcatcccctaccccctgcccaagcaggacctggccgccatcccagacttccagagcggggccatggagaactggggcctgaccacctaccgggagagcgccctgctgtttgatgctgagaagagcagcgccagcagcaagctgggcatcaccatgacagtggcccacgagctggcccaccagtggtttggaaacctggtgaccatggagtggtggaatgacctgtggctgaatgaaggatttgccaagttcatggagtttgtgtctgtgtctgtgacccaccctgagctgaaggtgggggactacttctttggaaaatgttttgatgccatggaggtggatgccctgaacagcagccaccctgtgtccacccctgtggagaacccagcccagatccgggagatgtttgatgatgtgtcctatgacaagggggcctgcatcctgaacatgctgcgggagtacctgtctgcagatgccttcaagtctggaattgtgcagtacctgcagaagcacagctacaagaacaccaagaatgaagacctgtgggacagcatggccagcatctgccccacagatggagtgaagggcatggatggcttctgcagccgcagccagcacagcagcagcagcagccactggcaccaggagggcgtggatgtgaagaccatgatgaacacctggaccctgcagaagggcttccccctcatcaccatcaccgtgcggggcagaaatgtgcacatgaagcaggagcactacatgaagggcagtgatggagccccagacaccggctacctgtggcacgtgcccctgaccttcatcaccagcaagagtgacatggtgcaccgcttcctgctgaagaccaagacagatgtgctgatcctgcctgaggaggtggagtggatcaagttcaacgtgggcatgaatggctactacatcgtgcactatgaagatgatggctgggacagcctgaccggcctgctgaagggcacccacacagctgtgagcagcaatgaccgggccagcctcatcaacaatgccttccagctggtgtccatcggcaagctgagcattgagaaggccctggacctgagcctgtacctgaagcatgaaacagagatcatgcctgtgttccagggcctgaatgagctgatccccatgtacaagctgatggagaagagggacatgaatgaggtggagacccagttcaaggccttcctgatccggctgctgcgggacctgattgacaagcagacctggacagatgagggctctgtgtctgagaggatgctgcggagccagctgctgctgctggcctgtgtgcacaactaccagccctgtgtgcagagagctgagggctacttcaggaagtggaaggagagcaatggaaacctgagcctgcctgtggatgtgaccctggccgtgtttgctgtgggcgcccagagcacagagggctgggacttcctgtacagcaagtaccagttcagcctgagcagcacagagaagagccagattgaatttgccctgtgcaggacccagaacaaggagaagctgcagtggctgctggatgagagcttcaagggggacaagatcaagacccaggagttcccccagatcctgaccctgattggaagaaatcctgtgggctaccccctggcctggcagttcctgaggaagaactggaacaagctggtgcagaagtttgagctgggcagcagcagcatcgcccacatggtgatgggcaccaccaaccagttcagcaccaggacccggctggaggaggtgaagggcttcttcagcagcctgaaggaaaatggcagccagctgcgctgtgtgcagcagaccatcgagaccattgaagaaaatattggctggatggacaagaactttgacaagatccgggtgtggctgcagagcgagaagctggagcatgaccctgaggctgatgccactggatag

SEQ ID NO: 191256 - DNA, 2847 bp, Artificial Sequence
  derived and/or modified sequence
atggtgttcctgcccctgaagtggagcctggccaccatgagcttcttactgtcctccctcctggccctgctgacggtctcgactccatcgtggtgccaatccaccgaggcctctcctaagcggagtgatggcacaccatttccctggaacaagatcagactgcctgaatatgtgatcccagtacactatgatctgctgatccacgcaaacctgaccacacttaccttttggggcaccactaaggtggaaattaccgcgtcgcagcccacctctaccatcattctccactctcaccatttacagattagcagggcaacattgcggaagggcgcaggcgagcgtctatctgaagaacccctccaggtcctcgaacatccacgccaggagcaaatcgccctcttggcaccagaaccattactggtgggcctaccctataccgtggtaattcactatgcgggcaatctgtccgaaacctttcatgggttctataaatctacatatagaacaaaagagggtgagttgcgcatcctcgcctcaacccagtttgaaccaactgcagcccgaatggctttcccctgctttgatgagccagcctttaaagcaagcttcagtattaaaattagacgcgaacccaggcatctggccatctccaacatgcccttagtgaagtctgtcacggttgccgagggtctcattgaggaccatttcgatgttaccgtaaagatgtcgacgtaccttgtggccttcattatttctgatttcgaatcagtctcaaagatcaccaagtctggagtaaaagtaagtgtgtatgctgtgcccgataagattaaccaagccgattacgcgctcgatgctgccgttaccttactggagttctatgaggactactttagcattccctatccattacctaagcaggacctggcggcaatccccgatttccaatcaggagccatggaaaactggggtctgaccacctaccgggagtccgccctgcttttcgatgcagaaaagtcaagcgctagttccaaattgggcatcaccatgactgtggcccacgaactcgcccaccagtggtttggcaacctggtcaccatggagtggtggaacgatctgtggcttaatgaagggtttgccaaattcatggagttcgtgtcggtttctgtgactcatcccgagctgaaagttggggactactttttcggcaaatgcttcgacgccatggaggtagacgcactgaactcctcccaccccgtgtctacacccgtcgagaatccggctcagattagagagatgtttgatgatgtgagttatgataagggcgcttgcattttgaatatgctgcgcgagtatctatccgcagatgccttcaaatctgggatcgtgcagtatttacagaaacatagttacaagaacaccaagaacgaagacctgtgggactctatggcaagcatctgccctaccgatggagtgaaggggatggacggtttctgctctcgttcccagcatagcagctccagttcccattggcatcaggagggtgtggatgtgaagacaatgatgaacacctggacccttcagaaaggctttccactaattacaatcacagtgcgggggcgcaatgtacatatgaaacaagaacattacatgaagggttccgatggagctccggatactggatatttatggcatgtccccctgacttttattacctccaaaagtgacatggtgcaccggttcctgctcaagaccaagacagacgtgctgattctccccgaggaggtcgaatggattaagttcaatgtcggcatgaacgggtattacatagtgcattacgaagacgacggatgggactctctgacgggtttgttgaagggtacacacacggccgtgtcgtctaacgacagagcatcactgattaacaacgcctttcagctggtatctatcgggaagctcagtatcgagaaagccttggatttgtcactgtacttaaaacatgagaccgagatcatgcccgtctttcaaggccttaacgagctgatcccaatgtacaagctaatggagaagagggacatgaacgaggtggagacccaattcaaggcttttctgatcaggttgctccgcgatcttattgacaagcagacctggacagatgagggatctgtgagcgagcggatgctgagaagtcagctgttgctgctggcctgcgtgcataattatcaaccttgcgtacagcgggccgaaggctattttcgcaagtggaaagagagtaatggcaatctaagcctgcccgtggacgtgacacttgccgtgtttgcagtgggggcgcagtcaactgaaggatgggacttcctgtatagtaagtaccagttctcactgtcctccaccgagaagtcacaaattgagttcgcgctttgtagaacacagaataaagaaaagcttcagtggctgctcgacgagtcgtttaagggcgataagattaagactcaggaatttccccagatcctgaccctgattgggcgcaatccagtgggctaccctctggcttggcagttcttgcgcaagaattggaacaagctggtccagaaatttgaactgggcagttcttccattgcccatatggtgatggggacaacaaaccagttttccacgagaacccgcctggaggaggtgaaagggttcttctcctcactgaaagagaatgggagtcagctccgctgtgtgcagcagacaattgaaacgatcgaagagaatatcggctggatggacaagaactttgataagatcagagtgtggcttcagagcgaaaaacttgagcacgatccagaggccgacgctaccggatag

SEQ ID NO: 191257 - DNA, 2847 bp, Artificial Sequence
  derived and/or modified sequence
atggtcttcctcccactaaaatggtccctggccactatgtccttcctgctctcatcactgttggcgctacttactgtcagcacgccgtcttggtgccagagtacagaagcttctccgaaacggtcggacggaaccccattcccttggaataagattaggctgccagaatatgtgattcccgtccactacgacttgttgatccacgcgaatctaaccacattaacgttttggggaacaaccaaagtggaaataacagcttcccagcctacatctactattattctccactctcaccatctgcagatatcccgcgctaccctgcgtaaaggggctggcgagcgcctctctgaggagccacttcaggtgttggagcatccaaggcaggaacagatcgctctgctggcccctgaaccactactggtgggacttccctacaccgttgtgattcattacgccggaaatctgtcagagacttttcacggattctataaaagtacataccggactaaggaaggggagttgcgcatcctggcttctacacaattcgagcctacggcagccaggatggccttcccttgttttgatgagccagcattcaaagcttcattctcaattaagattagaagggagccacgacatctcgccatcagcaacatgccgttggtgaaaagtgttaccgtggccgagggcctcattgaggatcactttgatgttactgttaagatgtctacttatttagtggcctttattatctcagacttcgagtcagtgtcgaagataaccaagtctggagtcaaagtctctgtctatgctgtgcctgataagatcaaccaggctgattatgccctggacgccgctgtgactttgctggagttctacgaggactacttctctattccgtaccccctgcccaagcaggatctcgccgcaataccagactttcaaagtggtgccatggagaactggggcctgacaacctaccgggaaagcgcactgttgtttgatgccgagaaatcatcagctagtagtaaactcggtattacgatgacagtcgcacatgagctagcccaccagtggtttggaaacctcgtgacaatggagtggtggaacgacttatggcttaacgaggggttcgccaaatttatggaatttgtgtccgtgtccgtcacacacccagagctcaaagtaggcgattacttcttcgggaaatgtttcgacgctatggaggttgacgcactgaactcgagtcacccagtgagtacaccggtggaaaaccccgctcaaatacgtgagatgttcgacgacgtttcctatgataaaggcgcatgtatcttgaatatgctgagggagtacctttccgctgacgccttcaagtccgggatcgttcagtatcttcagaagcactcctacaagaacaccaagaacgaggacctgtgggattccatggcctctatctgccccacggacggtgtgaaaggcatggacggcttctgctctcgctctcagcatagctccagctcgagtcattggcatcaggaaggagttgatgttaaaaccatgatgaacacatggactctacagaaaggattccccttaatcactatcacagtgcggggtcgcaatgttcatatgaagcaagaacactatatgaaaggaagcgacggcgcaccggacactggttatctgtggcacgtccccttaactttcattacttcaaagtctgacatggttcacagattcctcctgaagactaagacagatgttttaattctccccgaggaagtcgaatggatcaagtttaacgttggaatgaatggttactatattgtgcactacgaggacgatggttgggattcgctaaccggcttattgaaagggacccataccgccgtgtcttctaacgatcgagcgagcttaatcaataacgcctttcagctcgtgtccatcggcaagctgagcattgagaaagccctggatttatctctgtacttaaaacatgaaacagagatcatgcctgttttccaaggattgaatgagttgatccccatgtacaaacttatggagaagagagatatgaacgaggtggaaacccaatttaaggctttcctcattaggctacttcgagatctgattgataaacagacttggactgatgaggggtctgtttccgaacgcatgctccgctcccagctgctgctcctggcatgtgtccacaattaccaaccctgcgtccagcgagctgaaggctattttcgaaagtggaaagaatccaacgggaacctgtccttacccgttgacgttacattggcagtgttcgccgtgggagcccagagcacagaagggtgggattttctgtactctaaataccaatttagtttatctagcactgagaagagccagattgaattcgcactttgcaggacacagaacaaagagaaactacaatggctccttgacgagagctttaagggagacaaaatcaagacacaggagttccctcagatcctcactctcattgggagaaatccggtggggtatccactagcttggcaattcctcaggaagaattggaataaactcgtgcagaagttcgaactgggctcgtcgtcaattgcacacatggtgatgggaactactaatcaattcagtactaggaccaggttggaagaagtcaaaggctttttttcctcgctcaaggaaaatggctctcagctgaggtgcgttcagcagacgattgaaactatcgaggaaaacattggatggatggataagaactttgacaaaatacgggtttggttgcagagtgaaaaattagaacatgaccccgaagcagacgccactggctag

SEQ ID NO: 191258 - DNA, 2847 bp, Artificial Sequence
  derived and/or modified sequence
atggtgttcctgcccctgaagtggagcctggccaccatgagcttcctgctgagcagcctgctggccctgctgaccgtgagcacccccagctggtgccagagcaccgaggccagccccaagagaagcgacggcacccccttcccctggaacaagatcagactgcccgagtacgtgatccccgtgcactacgacctgctgatccacgccaacctgaccaccctgaccttctggggcaccaccaaggtggagatcaccgccagccagcccaccagcaccatcatcctgcacagccaccacctgcagatcagcagagccaccctgagaaagggcgccggcgagagactgagcgaggagcccctgcaggtgctggagcaccccagacaggagcagatcgccctgctggcccccgagcccctgctggtgggcctgccctacaccgtggtgatccactacgccggcaacctgagcgagaccttccacggcttctacaagagcacctacagaaccaaggagggcgagctgagaatcctggccagcacccagttcgagcccaccgccgccagaatggccttcccctgcttcgacgagcccgccttcaaggccagcttcagcatcaagatcagaagagagcccagacacctggccatcagcaacatgcccctggtgaagagcgtgaccgtggccgagggcctgatcgaggaccacttcgacgtgaccgtgaagatgagcacctacctggtggccttcatcatcagcgacttcgagagcgtgagcaagatcaccaagagcggcgtgaaggtgagcgtgtacgccgtgcccgacaagatcaaccaggccgactacgccctggacgccgccgtgaccctgctggagttctacgaggactacttcagcatcccctaccccctgcccaagcaggacctggccgccatccccgacttccagagcggcgccatggagaactggggcctgaccacctacagagagagcgccctgctgttcgacgccgagaagagcagcgccagcagcaagctgggcatcaccatgaccgtggcccacgagctggcccaccagtggttcggcaacctggtgaccatggagtggtggaacgacctgtggctgaacgagggcttcgccaagttcatggagttcgtgagcgtgagcgtgacccaccccgagctgaaggtgggcgactacttcttcggcaagtgcttcgacgccatggaggtggacgccctgaacagcagccaccccgtgagcacccccgtggagaaccccgcccagatcagagagatgttcgacgacgtgagctacgacaagggcgcctgcatcctgaacatgctgagagagtacctgagcgccgacgccttcaagagcggcatcgtgcagtacctgcagaagcacagctacaagaacaccaagaacgaggacctgtgggacagcatggccagcatctgccccaccgacggcgtgaagggcatggacggcttctgcagcagaagccagcacagcagcagcagcagccactggcaccaggagggcgtggacgtgaagaccatgatgaacacctggaccctgcagaagggcttccccctgatcaccatcaccgtgagaggcagaaacgtgcacatgaagcaggagcactacatgaagggcagcgacggcgcccccgacaccggctacctgtggcacgtgcccctgaccttcatcaccagcaagagcgacatggtgcacagattcctgctgaagaccaagaccgacgtgctgatcctgcccgaggaggtggagtggatcaagttcaacgtgggcatgaacggctactacatcgtgcactacgaggacgacggctgggacagcctgaccggcctgctgaagggcacccacaccgccgtgagcagcaacgacagagccagcctgatcaacaacgccttccagctggtgagcatcggcaagctgagcatcgagaaggccctggacctgagcctgtacctgaagcacgagaccgagatcatgcccgtgttccagggcctgaacgagctgatccccatgtacaagctgatggagaagagagacatgaacgaggtggagacccagttcaaggccttcctgatcagactgctgagagacctgatcgacaagcagacctggaccgacgagggcagcgtgagcgagagaatgctgagaagccagctgctgctgctggcctgcgtgcacaactaccagccctgcgtgcagagagccgagggctacttcagaaagtggaaggagagcaacggcaacctgagcctgcccgtggacgtgaccctggccgtgttcgccgtgggcgcccagagcaccgagggctgggacttcctgtacagcaagtaccagttcagcctgagcagcaccgagaagagccagatcgagttcgccctgtgcagaacccagaacaaggagaagctgcagtggctgctggacgagagcttcaagggcgacaagatcaagacccaggagttcccccagatcctgaccctgatcggcagaaaccccgtgggctaccccctggcctggcagttcctgagaaagaactggaacaagctggtgcagaagttcgagctgggcagcagcagcatcgcccacatggtgatgggcaccaccaaccagttcagcaccagaaccagactggaggaggtgaagggcttcttcagcagcctgaaggagaacggcagccagctgagatgcgtgcagcagaccatcgagaccatcgaggagaacatcggctggatggacaagaacttcgacaagatcagagtgtggctgcagagcgagaagctggagcacgaccccgaggccgacgccaccggctag

SEQ ID NO: 191259 - DNA, 5488 bp, Artificial Sequence
  derived and/or modified sequence
accaattcccttcctgggagttgcggcttccctcgctcggccccactcccgtttaccctttccccagctcccgccttagccaggggcttccccgcctgccgctagggctcgggccgaagcgccgctcagcgccagcctgccgctccccgggctccactttcactttcggtcctgggggagctaggccggcggcagtggtggtggcggcggcgcaagggtgagggcggccccagaaccccaggtaggtagagcaagaagatggtgtttctgcccctcaaatggtcccttgcaaccatgtcatttctactttcctcactgttggctctcttaactgtgtccactccttcatggtgtcagagcactgaagcatctccaaaacgtagtgatgggacaccatttccttggaataaaatacgacttcctgagtacgtcatcccagttcattatgatctcttgatccatgcaaaccttaccacgctgaccttctggggaaccacgaaagtagaaatcacagccagtcagcccaccagcaccatcatcctgcatagtcaccacctgcagatatctagggccaccctcaggaagggagctggagagaggctatcggaagaacccctgcaggtcctggaacacccccgtcaggagcaaattgcactgctggctcccgagcccctccttgtcgggctcccgtacacagttgtcattcactatgctggcaatctttcggagactttccacggattttacaaaagcacctacagaaccaaggaaggggaactgaggatactagcatcaacacaatttgaacccactgcagctagaatggcctttccctgctttgatgaacctgccttcaaagcaagtttctcaatcaaaattagaagagagccaaggcacctagccatctccaatatgccattggtgaaatctgtgactgttgctgaaggactcatagaagaccattttgatgtcactgtgaagatgagcacctatctggtggccttcatcatttcagattttgagtctgtcagcaagataaccaagagtggagtcaaggtttctgtttatgctgtgccagacaagataaatcaagcagattatgcactggatgctgcggtgactcttctagaattttatgaggattatttcagcataccgtatcccctacccaaacaagatcttgctgctattcccgactttcagtctggtgctatggaaaactggggactgacaacatatagagaatctgctctgttgtttgatgcagaaaagtcttctgcatcaagtaagcttggcatcacaatgactgtggcccatgaactggctcaccagtggtttgggaacctggtcactatggaatggtggaatgatctttggctaaatgaaggatttgccaaatttatggagtttgtgtctgtcagtgtgacccatcctgaactgaaagttggagattatttctttggcaaatgttttgacgcaatggaggtagatgctttaaattcctcacaccctgtgtctacacctgtggaaaatcctgctcagatccgggagatgtttgatgatgtttcttatgataagggagcttgtattctgaatatgctaagggagtatcttagtgctgacgcatttaaaagtggtattgtacagtatctccagaagcatagctataaaaatacaaaaaacgaggacctgtgggatagtatggcaagtatttgccctacagatggtgtaaaagggatggatggcttttgctctagaagtcaacattcatcttcatcctcacattggcatcaggaaggggtggatgtgaaaaccatgatgaacacttggacactgcagaagggttttcccctaataaccatcacagtgagggggaggaatgtacacatgaagcaagagcactacatgaagggctctgacggcgccccggacactgggtacctgtggcatgttccattgacattcatcaccagcaaatccgacatggtccatcgatttttgctaaaaacaaaaacagatgtgctcatcctcccagaagaggtggaatggatcaaatttaatgtgggcatgaatggctattacattgtgcattacgaggatgatggatgggactctttgactggccttttaaaaggaacacacacagcagtcagcagtaatgatcgggcgagtctcattaacaatgcatttcagctcgtcagcattgggaagctgtccattgaaaaggccttggatttatccctgtacttgaaacatgaaactgaaattatgcccgtgtttcaaggtttgaatgagctgattcctatgtataagttaatggagaaaagagatatgaatgaagtggaaactcaattcaaggccttcctcatcaggctgctaagggacctcattgataagcagacatggacagacgagggctcagtctcagagcgaatgctgcggagtcaactactactcctcgcctgtgtgcacaactatcagccgtgcgtacagagggcagaaggctatttcagaaagtggaaggaatccaatggaaacttgagcctgcctgtcgacgtgaccttggcagtgtttgctgtgggggcccagagcacagaaggctgggattttctttatagtaaatatcagttttctttgtccagtactgagaaaagccaaattgaatttgccctctgcagaacccaaaataaggaaaagcttcaatggctactagatgaaagctttaagggagataaaataaaaactcaggagtttccacaaattcttacactcattggcaggaacccagtaggatacccactggcctggcaatttctgaggaaaaactggaacaaacttgtacaaaagtttgaacttggctcatcttccatagcccacatggtaatgggtacaacaaatcaattctccacaagaacacggcttgaagaggtaaaaggattcttcagctctttgaaagaaaatggttctcagctccgttgtgtccaacagacaattgaaaccattgaagaaaacatcggttggatggataagaattttgataaaatcagagtgtggctgcaaagtgaaaagcttgaacatgatcctgaagctgacgcaacaggatgaaaatccatcagaatctcagactacagcactaaatatgctttgatgctacatcaaacggaatggaagcatagctgacttcgctaaagttacttcatctccatctagcaaatgaggcactgttctcaaccaaaggagatggggatctggtttagggcaatccctttataatttgatgtgctgtggtctccttggtaatgtataatttggtattgcacaggtgattagtcaaggaagtctggaaaagctttggtcccacagccttgcctcacagcatgtaaataattaaaacaatattgatgctgaggttcttctactgctagtatgaaagtgacaaatttttactggtgtgaattgggaagaaaacaatgctattccatgacgtttgtaaaatgtttgtaaaagctcaaacatgacgattccataaaataaacttgaggttaaataatgggtagtaaattatagaatgtataagaaaaaatataaaggagaaaatcaattatcaggaaagctaaagaacttttcaaatctagtaatttgaatatagacacaatgcactttattgcactttcaattcttataaagcaacaataatattaaggtccttgactatgtgtacaatgttttcacatatatagtttcatttaatcatttcaaagttaatctctgccatctcgctaaatcatcagtctcggctcttctgaaatagaaggtgcctgatcttcctaataattctgcctattttcatttgctttaaacaggcgccctattttctttctagttgtggctgcgcaaaaacatttatctcccaaataagatgtgctgcttaccgaggtatcacggggtggggctccagcttgggtcgttgaagctggggtttgggaaaccacttcagagatggcagcagcaagtttagcatcttcaaatttcttttattgaaaaaaattttattagtaacatgttgtatataaaattatgagcacaatgccatcacttaactataactcttaaagatagcttaatgactgtttattctcttgaccaaatagactcataataacatataattttaaaagaaatttaaattctttcttctctattgtattattttatacaatttgctatttctatttccttctcatattgattattctaaatactatgcaataatataacttagagttccacggtttgtttacacatttcctgttgtacatttaggttattcaaagttttcagctcttttaaaattgctctgaataagttctagtgagtgagttatggtgctggctatattttgctaaactgccctctcaaatgttgctaggaattcatactgcgaaaagcaatgaataagcatgcctgttttcccatggccttgcttgccagaatttgacttttattatgataatcagtgtaaaatgatatactactattgcttgtatattgtggtatacggtgtcaggtttcagggttttttttcaacgttaaatattctagaaactttctgaaataatttctgtttaaaaatattgaatatttgcttcatttcaaatactcccttttgacaaaaaaacttaggtataactgttgatgaaaaaccagaaaaaagtccagaactctttggtgactccaactatggatagcttattttgaaaaaggagaattgcaaattttaccaaaagatggagaaaagcacattaaaaagataccaacattcagaaattcatttcagcatgttattattggaaattatttaaactaatttagataactataagatacttattgtccatttataccctgtaaagccgttttagaatgtaatattttaggtaatccaaaatgtactaaattaaattcatttttagttatgagaaatctttgcttatatgacaaatgaaaagaataacaagttgtcaaatgaaaagaatgacattgaaacatttgtattgtctcttcttaaactatcttattgacttattatttaagccttttaatactaagtatgaaacaacctatggtctggaaatttgtatcgcaaagctatatgtgcatatgttatttaattcatctaatgctacacaaaagcataaaataatgatttttcactctctttaaaaatactaaatcatttatgtccatttctcaattttttcattgatctatgctttgagtttgctttctcaacattattgtattttccacttattattactgtataacatatgctagtgtttagttggattaatcttacctaaaagtactgaaaaatgctttttagtactttttcatattttatacatttattttccgaatgtatcattgaataattttattgagttataaaagtatcttattgctatttaataaaaaattaacacat

SEQ ID NO: 191260 - protein, 353 aa, Artificial Sequence
  derived and/or modified sequence
MEDGVLKEGFLVKRGHIVHNWKARWFILRQNTLVYYKLEGGRRVTPPKGRILLDGCTITCPCLEYENRPLLIKLKTQTSTEYFLEACSREERDAWAFEITGAIHAGQPGKVQQLHSLRNSFKLPPHISLHRIVDKMHDSNTGIRSSPNMEQGSTYKKTFLGSSLVDWLISNSFTASRLEAVTLASMLMEENFLRPVGVRSMGAIRSGDLAEQFLDDSTALYTFAESYKKKISPKEEISLSTVELSGTVVKQGYLAKQGHKRKNWKVRRFVLRKDPAFLHYYDPSKEENRPVGGFSLRGSLVSALEDNGVPTGVKGNVQGNLFKVITKDDTHYYIQASSKAERAEWIEAIKKLT

SEQ ID NO: 191261 - DNA, 1549 bp, Artificial Sequence
  derived and/or modified sequence
gcgccagggaggcgtcgccctgccgcgtcggagctgcttcctgggcgccgtgggcgcggactgcgcgggctgcgcgggtgccgaggagcgcgaggcgcggggaaggcgcacctggggtggccctggcgtgcgggcggcgacatggaggacggcgtgctcaaggagggcttcctggtcaagaggggccacattgtccacaactggaaggcgcgatggttcatccttcggcagaacacgctggtgtactacaagcttgaggggggtcggagagtgacccctcccaagggccggatcctcctggatggctgcaccatcacctgcccctgcctggagtatgaaaaccgaccgctcctcattaagctgaagactcaaacatccacggagtacttcctggaggcctgttctcgagaggagcgggatgcctgggcctttgagatcaccggggctattcatgcagggcagccggggaaggtccagcagctgcacagcctgagaaactccttcaagctgcccccgcacatcagcctgcatcgcattgtggacaagatgcacgatagcaacaccggaatccgttcaagccccaacatggagcagggaagcacctataaaaagaccttcctcggctcctccctggtggactggctcatctccaacagcttcacggccagccgtctggaggcggtgaccctggcctccatgctcatggaggagaacttcctcaggcctgtgggtgtccgaagcatgggagccattcgctctggggatctggccgagcagttcctggatgactccacagccctgtacacttttgctgagagctacaaaaagaagataagccccaaggaagaaattagcctgagcactgtggagttaagtggcacggtggtgaaacaaggctacctggccaagcagggacacaagaggaaaaactggaaggtgcgtcgctttgttctaaggaaggatccagctttcctgcattactatgacccttccaaagaagagaacaggccagtgggtgggttttctcttcgtggttcactcgtgtctgctctggaagataatggcgttcccactggggttaaagggaatgtccagggaaacctcttcaaagtgattactaaggatgacacacactattacattcaggccagcagcaaggctgagcgagccgagtggattgaagctatcaaaaagctaacatgacaaggacctgagggaaccaggattcctccctcctaccagatgacacagacaagagttcctggagaatgggagtgttaagacttttgacttctttgtaagttttgtactgctttggagagtgaatgctgccaagagttcctcagattacaaacagcagtggtgccatttccttccccatcttcatgttacaaacctggaaaggctagaacagccattaggcgtcagcatcttgacttttccccagcatcacaaacagccatttcctcgggcaccaaagtaggttccctttgttggaacaattacactggccatgccataatgttgaataaaactctcttcttatgag

SEQ ID NO: 191262 - DNA, 1062 bp, Artificial Sequence
  derived and/or modified sequence
atggaggatggagtgttgaaagaaggcttcctagttaaaaggggtcatattgtccataactggaaggcccgctggttcatcctgcgccagaacaccttggtttactacaagctagaaggtggacggagagtgacccctccgaagggccgaatcctcctggatgggtgtactattacgtgtccttgcttggagtacgagaatcgccctttactgattaagctgaaaacccaaacctctactgaatactttctggaggcttgctctagggaggaacgcgatgcatgggcatttgaaatcaccggcgccattcacgcagggcagcccgggaaggtccagcaactgcactcattgagaaatagttttaagctcccaccccatattagtcttcacaggattgtggacaaaatgcacgattccaacactgggatccggtcttcgccaaacatggagcagggttcgacatacaaaaaaacattccttggatctagtctggtggattggctgattagcaattctttcacggcaagtcgcttagaagccgtgacactcgcctccatgctgatggaagagaacttcctgagacccgtcggcgtccgaagtatgggagcaattcgctccggtgatcttgcagaacaattcctcgatgactctacggcactttacactttcgccgaatcatataaaaagaagataagccctaaggaggagataagcctctcgactgtggaactcagcgggaccgtcgtgaagcagggttatttagccaagcaaggtcacaaacgaaaaaactggaaggttagaagattcgtgcttcgcaaagacccggcttttttgcactactacgatccttccaaagaagagaaccggcccgtggggggtttttctttaagggggtcgctcgtctcggccttggaagacaatggggtgcctaccggcgttaaggggaacgtgcagggaaacctgttcaaagtcattaccaaggacgacacgcattattacatacaggcatcatcaaaagctgagcgtgccgagtggattgaggcaattaagaagctgacatag

SEQ ID NO: 191263 - DNA, 1062 bp, Artificial Sequence
  derived and/or modified sequence
atggaggatggagtgctgaaggagggcttcctggtgaagaggggccacatcgtgcacaactggaaggcccgctggttcatcctgcggcagaacaccctggtgtactacaagctggagggcggccggcgggtgaccccacccaagggccgcatcctgctggatggctgcaccatcacctgcccctgcctggagtatgagaaccggcccctgctgatcaagctgaagacccagaccagcacagagtacttcctggaggcctgcagccgggaggagagagatgcctgggcctttgagatcaccggggccatccatgctggccagcccgggaaggtgcagcagctgcacagcctgaggaacagcttcaagctgcccccccacatcagcctgcaccgcatcgtggacaagatgcatgacagcaacacaggcatccgcagcagccccaacatggagcagggcagcacctacaagaagaccttcctgggcagcagcctggtggactggctgatcagcaacagcttcaccgccagccggctggaggccgtgaccctggcctccatgctgatggaggagaacttcctgcggcctgtgggcgtgcgctccatgggcgccatccgcagcggggacctggccgagcagttcctggatgacagcacagccctgtacacctttgctgagagctacaagaagaagatcagccccaaggaggagatcagcctgagcacagtggagctgtctggaacagtggtgaagcagggctacctggccaagcagggccacaagaggaagaactggaaggtgagaagatttgtgctgaggaaggaccctgccttcctgcactactatgaccccagcaaggaggagaacagacctgtgggcggcttcagcctgcggggcagcctggtgtctgccctggaggacaatggagtgcccactggagtgaagggaaatgtgcagggcaacctcttcaaggtgatcaccaaggatgacacccactactacatccaggccagcagcaaggccgagagagctgagtggattgaggccatcaagaagctgacctag

SEQ ID NO: 191264 - DNA, 1062 bp, Artificial Sequence
  derived and/or modified sequence
atggaggacggcgtgctgaaggagggcttcctggtgaagcggggccacatcgtgcataattggaaggctcggtggtttatcctgagacagaataccctggtgtattacaagctcgaaggtgggagacgcgtaacccctcctaaagggaggatcttgctggatggatgcaccatcacatgcccatgcctagagtatgagaacaggccactgcttatcaaactcaagactcagacctccactgaatattttttggaagcttgcagccgcgaggagagggacgcatgggcgttcgagatcaccggggccatccatgcagggcagcccggaaaagtgcagcaactgcactctctcaggaattcatttaagctgcccccacacatcagtctccacaggattgtagacaaaatgcatgacagcaacaccgggattcgcagttctccgaacatggaacagggctccacttacaaaaaaacctttcttgggagttctctggtagattggttgatcagcaactctttcacagccagccggctcgaggccgtgacgctagcctccatgttgatggaggagaactttctgagacctgtcggggtgcggtcaatgggggctatcaggtcaggtgacttggctgagcagttcttggacgactctaccgcattatatacttttgccgaatcttataaaaagaagatcagcccaaaagaggaaatttctctttcaacagtcgaactgagtggtaccgtcgtcaagcagggatacttagctaagcaggggcataagcggaaaaattggaaagtgagaagattcgtcctgagaaaagatcctgcttttctccactactatgacccttcaaaggaggagaaccgccccgtaggaggattctctcttcggggctctctggtgtctgccctcgaggataatggcgtgcccactggcgtaaaagggaacgttcagggaaacctgttcaaagtaatcaccaaagacgatacacactactacatccaagcttccagtaaggctgaacgggccgaatggatcgaagctattaaaaagttaacctag

SEQ ID NO: 191265 - DNA, 1062 bp, Artificial Sequence
  derived and/or modified sequence
atggaagacggtgtgctaaaggaaggcttcctggtgaagagaggccatatcgtacacaactggaaggcgcgttggtttattcttcgacagaacaccttggtttattataaactcgaaggcggtcggcgtgttacacctcccaagggccgaatcctgcttgatggatgcaccataacttgcccttgtttggagtacgagaacaggccactgttgattaaactgaagacacagacttccactgaatattttcttgaggcctgctcaagagaggagcgtgacgcttgggcttttgagatcacgggcgctatccatgccggacagcctggaaaagtccagcagctccattcgctgagaaactcttttaagttgcctccacatattagcttacatcgcatagtggataagatgcacgacagcaacactggaattcggagtagcccaaatatggagcagggaagtacatataagaagacattcctcggctcctctctggtggactggctcatctcaaatagttttaccgcgagccgcctcgaggccgtcacgctggcctcaatgcttatggaggagaactttcttaggccagtgggcgtcagatctatgggcgcaattagatctggggatctcgcggagcagttccttgatgattccacagccctttacactttcgccgagagttacaaaaagaaaatctctcccaaagaagaaatcagcctctcaaccgtggaattgagcggaactgtggttaagcagggctatctggctaaacaggggcacaaacgcaaaaactggaaggtcagaaggtttgtgctgcgcaaagaccctgctttccttcactactatgatccaagcaaagaggagaaccgcccagtgggaggcttttcgctcagagggtcacttgtcagcgctctggaggacaatggcgtcccaactggcgtgaaaggtaatgtacaggggaacctatttaaggttatcaccaaagacgatacccattattatatccaggcatcctccaaagctgaacgggctgagtggatcgaggctattaaaaaactcacgtag

SEQ ID NO: 191266 - DNA, 1062 bp, Artificial Sequence
  derived and/or modified sequence
atggaggacggcgtgctgaaggagggcttcctggtgaagagaggccacatcgtgcacaactggaaggccagatggttcatcctgagacagaacaccctggtgtactacaagctggagggcggcagaagagtgaccccccccaagggcagaatcctgctggacggctgcaccatcacctgcccctgcctggagtacgagaacagacccctgctgatcaagctgaagacccagaccagcaccgagtacttcctggaggcctgcagcagagaggagagagacgcctgggccttcgagatcaccggcgccatccacgccggccagcccggcaaggtgcagcagctgcacagcctgagaaacagcttcaagctgcccccccacatcagcctgcacagaatcgtggacaagatgcacgacagcaacaccggcatcagaagcagccccaacatggagcagggcagcacctacaagaagaccttcctgggcagcagcctggtggactggctgatcagcaacagcttcaccgccagcagactggaggccgtgaccctggccagcatgctgatggaggagaacttcctgagacccgtgggcgtgagaagcatgggcgccatcagaagcggcgacctggccgagcagttcctggacgacagcaccgccctgtacaccttcgccgagagctacaagaagaagatcagccccaaggaggagatcagcctgagcaccgtggagctgagcggcaccgtggtgaagcagggctacctggccaagcagggccacaagagaaagaactggaaggtgagaagattcgtgctgagaaaggaccccgccttcctgcactactacgaccccagcaaggaggagaacagacccgtgggcggcttcagcctgagaggcagcctggtgagcgccctggaggacaacggcgtgcccaccggcgtgaagggcaacgtgcagggcaacctgttcaaggtgatcaccaaggacgacacccactactacatccaggccagcagcaaggccgagagagccgagtggatcgaggccatcaagaagctgacctag

SEQ ID NO: 191267 - DNA, 1017 bp, Artificial Sequence
  derived and/or modified sequence
atgaacatgccccagagcctgggcaaccagcccctgccccccgagccccccagcctgggcacccccgccgagggccccggcaccaccagcccccccgagcactgctggcccgtgagacccaccctgagaaacgagctggacaccttcagcgtgcacttctacatcttcttcggccccagcgtggccctgccccccgagagacccgccgtgttcgccatgagactgctgcccgtgctggacagcggcggcgtgctgagcctggagctgcagctgaacgccagcagcgtgagacaggagaacgtgaccgtgttcggctgcctgacccacgaggtgcccctgagcctgggcgacgccgccgtgacctgcagcaaggagagcctggccggcttcctgctgagcgtgagcgccaccaccagagtggccagactgagaatccccttcccccagaccggcacctggttcctggccctgagaagcctgtgcggcgtgggccccagattcgtgagatgcagaaacgccaccgccgaggtgagaatgagaaccttcctgagcccctgcgtggacgactgcggcccctacggccagtgcaagctgctgagaacccacaactacctgtacgccgcctgcgagtgcaaggccggctggagaggctggggctgcaccgacagcgccgacgccctgacctacggcttccagctgctgagcaccctgctgctgtgcctgagcaacctgatgttcctgccccccgtggtgctggccatcagaagcagatacgtgctggaggccgccgtgtacaccttcaccatgttcttcagcaccgtgtgcggcggcgtgtgcatcctgagcctgggcgcctgcgcctggtggtgggtgaccgtgtgcatcagcaccaccttcagcgagggcctgggcatgagcgtgcccagcctgtgcctgctgcagaccgagaccgccgtgctgcccaagctgagctgcatcgacaacggccacttctgcaagacccactggagcaagtag

SEQ ID NO: 191268 - DNA, 1017 bp, Artificial Sequence
  derived and/or modified sequence
atgaatatgccacaaagtctggggaatcagccgcttcctccagagccaccaagcttaggcacccccgcggagggccccgggaccacttcacctccggagcactgctggccggtgcggccaacactacgaaatgaacttgacacctttagtgttcatttttatattttcttcggcccatccgtggctctgccacctgagaggccggctgtgtttgctatgagactgctgccggtattagactcgggcggagtcctgtctctggaactccaactcaatgcttcctccgtgcggcaggaaaatgtcactgtcttcggctgcctcacgcatgaagtgcctttatctctgggcgacgctgctgtcacctgctcgaaggaatctctcgctgggttcttgctgtctgtctccgcaaccacgcgagtggcccgtttgcgtataccattcccccagaccggcacttggtttctggccctgcggtctctatgtggggttggcccgagattcgtgagatgcagaaatgccacagccgaagtgagaatgcgaacttttctgtcaccctgtgttgacgactgtggaccctatggtcagtgtaagctgctccgcacacacaattacctgtacgctgcctgcgagtgcaaagccggatggcgaggatggggttgtactgatagtgcagatgcccttacctacggatttcagttactcagcacgctcctcttgtgcctgagtaatctgatgttcttgcccccagtggttctggcgattaggagtcgctacgtactggaagccgcggtctacactttcacaatgtttttttcaaccgtgtgtggcggtgtgtgtattctgagcctgggagcctgtgcatggtggtgggtaacagtctgtataagcacaactttctctgaaggcttggggatgtcagtgcctagcctgtgtcttttgcagaccgagacagctgtcctccctaaactgtcgtgtattgacaatggccacttttgcaaaacccactggagcaagtag

SEQ ID NO: 191269 - DNA, 1017 bp, Artificial Sequence
  derived and/or modified sequence
atgaatatgccacagtcactcggtaaccagccccttccccctgaaccgccgtccttggggactccagcagagggaccaggcaccacttccccacccgaacattgctggcctgtgcgccctacattacggaatgagttagatacattctctgtgcacttctatatattttttggtcctagtgtggccctccccccagaaagacctgctgtgtttgcaatgcggcttctcccggtgctggactctggcggggtattgtcattggagctgcaactgaatgcctcttctgtgcgccaggaaaatgtgaccgtctttgggtgccttactcacgaggtgccactctcccttggcgatgcagcagtgacgtgctcaaaggagagcctcgccggctttctgctgtccgtgtcagcaactacacgagtagcgagactgcggattccctttccacagactgggacctggtttctcgcgctgcggtctctgtgcggcgtcgggccccgattcgtgcgctgtcgcaacgcgactgcagaggttcggatgagaacatttctttctccttgtgtcgatgactgtggtccctatggccagtgcaagctgctgagaacccacaactatctctacgccgcttgcgagtgtaaagcgggttggaggggatggggatgcacagactcagcagatgctctgacttacggctttcagctcctgtcaaccctactcctgtgtctgtcaaatctgatgttcctgccgccagtagtcctggctatacgaagcagatatgtattagaagctgccgtttacaccttcactatgttcttttccactgtctgcggaggcgtatgcatcctgtccctaggggcctgtgcctggtggtgggtcacagtttgtatttccacaacattctcggaaggcctggggatgtctgtcccatctctctgcctccttcagacagagaccgcagtgctgcccaagttgagctgcattgataatggtcacttctgcaagacccactggagtaagtag

SEQ ID NO: 191270 - DNA, 1017 bp, Artificial Sequence
  derived and/or modified sequence
atgaacatgccccagagcctgggcaaccagcccctgcccccagagccccccagcctgggcaccccagctgagggccctggcaccaccagccccccagagcactgctggcctgtgcggcccaccctgagaaatgagctggacaccttctctgtgcacttctacatcttcttcggccccagcgtggccctgcccccagagaggcctgctgtgtttgccatgaggctgctgcctgtgctggacagcggaggagtgctgagcctggagctgcagctgaatgccagctctgtgcggcaggagaatgtgacagtgtttggctgcctgacccatgaggtgcccctgagcctgggagatgctgctgtgacctgcagcaaggagagcctggccggcttcctgctgtctgtgtctgccaccaccagggtggcccggctgcgcatccccttcccccagacaggcacctggttcctggccctgcggagcctgtgtggggtgggccccaggtttgtgcgctgcagaaatgccacagctgaggtgaggatgaggaccttcctgagcccctgtgtggatgactgtggcccctacggccagtgcaagctgctgcggacccacaactacctgtatgctgcctgtgagtgcaaggccggctggaggggctggggctgcacagattctgcagatgccctgacctacggcttccagctgctgagcaccctgctgctgtgcctgagcaacctgatgttcctgccccctgtggtgctggccatccgcagccgctacgtgctggaggccgctgtgtacaccttcaccatgttcttcagcacagtgtgtggcggcgtgtgcatcctgagcctgggcgcctgtgcctggtggtgggtgacagtgtgcatcagcaccaccttcagcgagggcctgggcatgtctgtgcccagcctgtgcctgctgcagacagaaacagctgtgctgcccaagctgagctgcatcgacaatggccacttctgcaagacccactggagcaagtag

SEQ ID NO: 191271 - DNA, 1017 bp, Artificial Sequence
  derived and/or modified sequence
atgaacatgccccagagcctgggcaaccagcccctgccccccgagccacccagcctgggcacacccgcggagggaccagggacaacttcacctccagaacattgttggccagttcgtccaacgctccggaatgagttggacacattctctgtgcacttctacatcttctttggacctagtgtggcgttgcctccagaacggccagcggtgttcgctatgagattgctgcccgttctagactcaggcggggttttgagcctggaactacaactgaacgcttcaagcgtgaggcaggagaatgtcacagtgttcggatgcctgactcatgaggtaccactctcattgggagacgcggctgtgacttgctctaaagagagcctcgctgggttcctgttgtctgtaagcgccacgacccgagtagctagattgaggatcccattcccccagaccggtacgtggtttttggccctacgtagtctctgcggggtgggcccaagattcgttcgctgtagaaatgccacagctgaggtgcgaatgagaaccttcttgtctccgtgcgtggacgattgcggcccttatgggcaatgtaaactcctgcgaacccacaattatctctatgctgcctgtgaatgtaaagccggatggcgtggctgggggtgcactgacagcgcagatgcactgacctacggatttcagctcttgtccactttactcttgtgtctatccaaccttatgttcctgccaccagtagttctggctatcaggtctcggtatgtgctggaggcagctgtgtacacattcactatgtttttcagcaccgtgtgcgggggcgtctgcattctctctttaggcgcctgcgcttggtggtgggtgacagtctgtatttccactacctttagcgaaggcctgggcatgagcgttccatccctgtgtctcctccagacagagaccgctgtgctgccaaagctctcatgtatagataatggacatttttgcaagacccattggtctaagtag

SEQ ID NO: 191272 - DNA, 1017 bp, Artificial Sequence
  derived and/or modified sequence
atgaacatgccccagagcctgggcaaccagcccctgccccccgagcccccttctcttgggacacccgctgaaggcccgggcacaacctcaccaccagaacattgttggcctgtccgtcccacccttcgcaatgaattagataccttttccgtccatttttacattttctttggaccgtccgtagcacttcccccagaaaggcccgctgtattcgcaatgcggcttctcccagtgctcgatagcggcggcgtgctgtccctggagcttcagctcaatgctagttccgtcagacaagagaatgtgacagtcttcggatgcctaacgcacgaagtccctctgtcactgggggacgctgccgtaacgtgttccaaagagagcttggctggatttctgttgtccgtatctgctactacccgggtcgctcgcttaagaattcctttccctcagacaggtacttggttcttggccctccgatcgttatgcggcgtcggtccacgattcgtgcggtgtcgtaacgccacggccgaggttcgcatgaggacctttctgtcaccatgtgtcgatgactgtggaccctatggtcagtgcaagttgctgcgcactcataattacctctatgccgcgtgcgagtgtaaagccggctggaggggctggggctgtaccgactccgccgacgcgttgacctatggttttcagctacttagcacattattactttgcctgtctaatttaatgttcttgcctcccgtggttcttgcaattcgatctcggtatgtactcgaggctgcagtctacacctttacaatgttcttttccacagtgtgtggaggcgtttgtatcctgtcactcggtgcctgtgcttggtggtgggtgaccgtctgtatttctacaaccttctctgaggggctcggaatgtctgttccgtctctgtgcctccttcagaccgagactgctgtgttgcctaagctcagctgcatcgacaacggtcacttttgtaagacgcattggtccaagtag

SEQ ID NO: 191273 - DNA, 1017 bp, Artificial Sequence
  derived and/or modified sequence
atgaatatgccacagagcctgggcaaccagcccttgcctcctgagccaccctcgctcggcacgcccgctgagggccctggcacaaccagtcctcccgagcattgctggcccgtgagacccacactgcgtaatgaacttgatactttctcagtgcacttttacattttctttgggccttccgttgctttgcctccagagcgccctgccgtgttcgcaatgcggctgctgcccgtacttgacagtggtggcgttctgtcccttgaactgcagctgaatgccagctcagttcgacaggagaacgtgactgtctttggctgtctcacccacgaggtgcccttatctttgggcgatgccgcagtgacttgctctaaggagagcctggcgggattcctgctttccgttagcgccaccactcgggttgcccgtcttaggattccgttcccacagacgggcacctggtttctcgctctgagatcactgtgcggagtagggccaagatttgtccgatgtcgtaacgcgaccgccgaggtacgcatgagaactttcctgagtccatgtgtggatgactgtgggccttacggacagtgtaagctgctcagaactcacaactacctctacgcagcctgcgagtgtaaagcagggtggaggggatggggctgcactgattccgccgacgctctgacctatggcttccagctgttatcaacgttgctgttgtgcctgagcaatctgatgttccttccaccagtggtactggctattcgttcaagatatgtcctagaggccgcagtctatacgttcacaatgttcttctcgaccgtttgcgggggtgtgtgtatattgtccctaggtgcttgtgcatggtggtgggtcaccgtctgcatctctacaactttctcagagggcttgggcatgagcgttccaagcctgtgcttgctgcagacagagacagctgtgctgcccaaactgagctgtatcgataacggccacttttgtaaaactcattggtcaaaatag

SEQ ID NO: 191274 - DNA, 1017 bp, Artificial Sequence
  derived and/or modified sequence
atgaatatgccacagtctctgggaaatcagcctttgccccctgagcccccaagtctggggacccccgctgagggacccggtacgacgagccccccagaacattgctggccggtacgaccaaccctcaggaacgagctggacacctttagtgtacatttttatatatttttcgggccttcggttgctctccctcctgaacggccagccgtgttcgctatgcggctgttaccagtgctggacagtgggggtgtcctctcactggagctgcagctcaatgcaagctctgtccgacaggaaaacgtgactgtgtttgggtgcttaacacacgaagtgccactcagtctgggagacgcggcagtgacctgtagtaaagagagtctggctgggtttctcttgtcagtgtccgccacaacccgcgtggcacgactgagaatccccttccctcagactggaacatggtttctcgccttgagatcgctgtgcggcgttggccctaggtttgttcgctgccggaacgctaccgctgaagtcagaatgaggacgtttctgagcccttgcgtcgacgactgtggcccttatggacagtgtaaacttttgcgtacccataactatctgtatgccgcatgtgaatgcaaggccggttggcgcggatggggttgcaccgactcagctgacgctttaacctacgggttccagctgttatcgactcttttattgtgcctgtccaatctgatgttccttccgccagttgtgctcgccatccgctccagatacgtgctggaggctgccgtctataccttcaccatgttctttagcacggtctgtggaggagtgtgcattttgtccttaggtgcctgcgcctggtggtgggtgactgtttgcatatctaccaccttttccgagggtcttggcatgtccgtcccctccttatgtctgttgcagactgagactgctgtactcccgaaactaagttgcattgataatggtcacttttgcaaaacccactggagcaaatag

SEQ ID NO: 191275 - protein, 730 aa, Artificial Sequence
  derived and/or modified sequence
MLFNSVLRQPQLGVLRNGWSSQYPLQSLLTGYQCSGNDEHTSYGETGVPVPPFGCTFSSAPNMEHVLAVANEEGFVRLYNTESQSFRKKCFKEWMAHWNAVFDLAWVPGELKLVTAAGDQTAKFWDVKAGELIGTCKGHQCSLKSVAFSKFEKAVFCTGGRDGNIMVWDTRCNKKDGFYRQVNQISGAHNTSDKQTPSKPKKKQNSKGLAPSVDFQQSVTVVLFQDENTLVSAGAVDGIIKVWDLRKNYTAYRQEPIASKSFLYPGSSTRKLGYSSLILDSTGSTLFANCTDDNIYMFNMTGLKTSPVAIFNGHQNSTFYVKSSLSPDDQFLVSGSSDEAAYIWKVSTPWQPPTVLLGHSQEVTSVCWCPSDFTKIATCSDDNTLKIWRLNRGLEEKPGGDKLSTVGWASQKKKESRPGLVTVTSSQSTPAKAPRAKCNPSNSSPSSAACAPSCAGDLPLPSNTPTFSIKTSPAKARSPINRRGSVSSVSPKPPSSFKMSIRNWVTRTPSSSPPITPPASETKIMSPRKALIPVSQKSSQAEACSESRNRVKRRLDSSCLESVKQKCVKSCNCVTELDGQVENLHLDLCCLAGNQEDLSKDSLGPTKSSKIEGAGTSISEPPSPISPYASESCGTLPLPLRPCGEGSEMVGKENSSPENKNWLLAMAAKRKAENPSPRSPSSQTPNSRRQSGKKLPSPVTITPSSMRKICTYFHRKSQEDFCGPEHSTEL

SEQ ID NO: 191276 - DNA, 2193 bp, Artificial Sequence
  derived and/or modified sequence
atgctgttcaattctgtgctacgacaacctcagctgggcgttctaagaaatggctggtcttctcagtatcccttacagtcattgctgactggttatcagtgcagtggaaacgacgagcacacttcctacggcgagacaggcgtccctgttcctcccttcggctgcacattctccagtgctcccaatatggagcacgtgctggccgtggccaatgaggaggggttcgtgcgcctgtataatactgaatcccaatcgttccgcaaaaagtgcttcaaggaatggatggcccactggaatgctgtgttcgatttggcgtgggtacctggggaactgaaactcgttaccgcagcgggtgatcagacggctaaattttgggatgtgaaagctggcgaactgattggaacatgtaagggacatcagtgttctctcaaatcagtagctttctctaagtttgagaaagctgtcttttgtacaggtggcagagacgggaatatcatggtttgggacaccaggtgtaacaagaaagatggtttctaccgtcaggtgaaccagatcagtggcgctcacaatacctcagacaagcagactccttcaaaacccaaaaaaaagcagaattctaaaggtctggcccctagcgtggacttccagcaatctgtaaccgtcgtactgtttcaggatgaaaacaccctggtgtctgccggagcagtcgacgggattattaaggtatgggacttgcgcaagaactacactgcttacagacaagagcctattgcttccaagtcctttctgtatcccggctcaagtaccaggaaactggggtactccagcctaattttagattccaccgggtccaccctgttcgccaattgcacagatgacaacatttacatgttcaatatgactggcttgaaaacatcaccagtcgccatattcaacgggcatcaaaattctactttttatgtgaagagttccctgtcccctgacgaccaattcttggtatcggggtcttcagacgaagccgcttacatttggaaagtctccacaccatggcaacctccaacagtgctgctggggcactcacaggaggtcacatcggtgtgttggtgcccatcagacttcacaaaaatcgccacatgttcagatgacaatacactcaagatctggcgattgaatcgcggcctcgaggaaaagcctgggggggacaagttgtccacagtgggctgggctagtcagaaaaagaaagaaagtaggcctgggctcgtcacagtgacttccagtcagtcaacacccgcgaaggcccccagggctaagtgtaatcctagtaacagcagtccttcaagtgctgcatgcgccccatcttgcgccggtgatttgcccctcccaagtaatacgcccacattcagtatcaagacgagcccagcaaaggccaggtcccccatcaacagacgcgggtcagtgagctctgtgtcacctaagccaccttctagttttaaaatgtccatcagaaattgggtaacaaggactccatcaagcagccctcccataaccccccccgccagcgagacaaaaattatgagcccccggaaagcattaattcccgttagccagaaaagttcacaggccgaagcatgttccgagagtagaaatagagtgaagcgtcgactggactcaagttgcttggagagcgtgaagcagaagtgtgtgaagtcatgcaactgtgtcacggagctcgatggccaggtcgagaacctccatctggatctttgttgcctggccggcaaccaggaggacctgtcaaaggacagcttaggccccactaagtcatcgaaaatagagggcgctggtacttctatatccgagccgcccagccccattagcccctatgcaagcgagtcatgcggaacattgcctcttcccctcagaccgtgcggagaaggatcagaaatggtgggcaaggagaactcaagcccggagaataagaattggctccttgccatggctgccaaacgtaaagccgaaaacccaagtccacgttccccctcaagtcagactcctaactccagaaggcagtcaggaaagaagctgccctcaccggtgaccatcacccctagctccatgagaaaaatctgtacgtattttcatcgaaagagtcaggaagatttctgcgggcccgagcactccactgagctgtag

SEQ ID NO: 191277 - DNA, 2193 bp, Artificial Sequence
  derived and/or modified sequence
atgctgttcaacagcgtgctgcggcagccccagctgggcgtgctgagaaatggctggagcagccagtaccccctgcagagcctgctgaccggctaccagtgcagcggaaatgatgagcacaccagctatggagagaccggggtgcctgtgcccccatttggctgcaccttcagcagcgcccccaacatggagcacgtgctggccgtggccaatgaggagggctttgtgcggctgtacaacacagagagccagagcttcaggaagaagtgcttcaaggagtggatggcccactggaatgctgtgtttgacctggcctgggtgcctggagagctgaagctggtgacagctgctggggaccagacagccaagttctgggatgtgaaggccggggagctgattggcacctgcaagggccaccagtgcagcctgaagtctgtggccttcagcaagtttgagaaggctgtgttctgcaccggcggcagagatggcaacatcatggtgtgggacacccgctgcaacaagaaggatggcttctaccggcaggtgaaccagatcagcggggcccacaacaccagtgacaagcagacccccagcaagcccaagaagaagcagaacagcaagggcctggcccccagcgtggacttccagcagagcgtgacagtggtgctcttccaggatgagaacaccctggtgtctgctggagctgtggatggcatcatcaaggtgtgggacctgaggaagaactacacagcctaccggcaggagcccatcgccagcaagagcttcctgtacccaggcagcagcaccaggaagctgggctacagcagcctcatcctggacagcacaggcagcaccctgtttgccaactgcacagatgacaacatctacatgttcaacatgacaggcctgaagaccagccctgtggccatcttcaacggccaccagaacagcaccttctacgtgaagagcagcctgagcccagatgaccagttcctggtgtctggcagcagtgatgaggccgcctacatctggaaggtgtccaccccctggcagccccccaccgtgctgctgggccacagccaggaggtgacctctgtgtgctggtgccccagcgacttcaccaagatcgccacctgcagtgatgacaacaccctgaagatctggaggctgaacagaggcctggaggagaagccaggaggagacaagctgagcacagtgggctgggccagccagaagaagaaggagagccggcccggcctggtgacagtgaccagcagccagagcaccccagccaaggccccccgggccaagtgcaaccccagcaacagcagccccagcagcgctgcctgtgcccccagctgtgccggggacctgcccctgcccagcaacacccccaccttcagcatcaagaccagccctgccaaggcccggagccccatcaacagaagaggctctgtgtcctctgtgagccccaagccacccagcagcttcaagatgagcatccggaactgggtgaccaggacccccagcagcagcccccccatcaccccaccagccagcgagaccaagatcatgagccccaggaaggccctgatccctgtgtcccagaagagcagccaggccgaggcctgcagcgagagcaggaacagagtgaagaggcggctggacagcagctgcctggagagcgtgaagcagaagtgtgtgaagagctgcaactgtgtgacagagctggatggccaggtggagaacctgcacctggacctgtgctgcctggccggcaaccaggaggacctgagcaaggacagcctgggccccaccaagagcagcaagattgaaggagctggcaccagcatcagcgagccccccagccccatcagcccctatgccagcgagagctgtggcaccctgcccctgcccctgcggccctgtggggagggcagcgagatggtgggcaaggagaacagcagccctgagaacaagaactggctgctggccatggccgccaagaggaaggccgagaaccccagccccaggagccccagcagccagacccccaacagccggcggcagagcggcaagaagctgcccagccctgtgaccatcacccccagctccatgaggaagatctgcacctacttccacaggaagagccaggaggacttctgtggccctgagcacagcacagagctgtag

SEQ ID NO: 191278 - DNA, 2193 bp, Artificial Sequence
  derived and/or modified sequence
atgctgttcaacagcgtgctgcggcagccccagctgggcgtgctgcgtaatggctggtcctctcagtacccacttcaaagcctgttgactgggtaccaatgcagtgggaatgacgagcacacatcctacggagagacgggtgttcccgtaccccctttcggctgcacgttctcttccgcccctaatatggaacacgttctagctgtagccaacgaggaaggatttgtgcgcctatataataccgagtcacagagcttcaggaagaagtgtttcaaagagtggatggctcattggaatgccgtattcgacctggcctgggttcctggcgagctgaagcttgtgacagccgctggtgatcagaccgcaaagttctgggatgtgaaagctggtgagttgataggcacttgcaaggggcaccaatgtagtctgaagtctgtggctttctccaaattcgagaaggcagtgttctgtaccggtggtcgcgatggaaatatcatggtgtgggacactcggtgcaacaagaaggatggattctacaggcaggtcaaccagatctccggagctcacaatactagcgacaagcagacccctagcaaacccaagaagaaacagaattcaaagggcttagctccatcagtcgacttccaacagagcgttacggtggtgctgtttcaggatgagaacacactcgtgtccgcaggggctgtggacggaattattaaggtgtgggacctgaggaagaactatacggcttaccgtcaggagcctatcgcttcgaagagctttctgtacccagggtcttcaaccagaaagcttggatacagttccctgattctcgacagtacaggatccaccctgttcgcgaattgtaccgacgacaacatatatatgtttaatatgacagggctgaagacctctccggtggctatttttaatggtcaccagaactccactttttatgtgaagagttctctgagcccagatgatcaattcctcgtgagtgggagttccgacgaagccgcatacatttggaaggtgtcaaccccatggcagccacctactgttctcctaggccactcccaggaggtcactagcgtgtgctggtgccctagcgattttacaaagattgccacttgctcagacgataatacactgaagatatggaggctgaatcgaggactggaggaaaaacctggcggtgacaagctcagcaccgtgggttgggcctctcaaaagaaaaaagagtctaggcccggactcgtcacagttacttcatcccaatccacgcccgccaaggcgcctagggcaaaatgcaatcccagcaatagcagcccttcatctgccgcgtgcgccccgagctgcgccggcgatctcccactgcctagcaatactccgacattcagtattaaaacaagtccagcaaaagctcgcagcccaatcaatcggagaggctccgtgagttccgtctccccgaagccccctagctcattcaagatgtcgatccggaactgggtgacccgcacaccgagcagtagtccccctatcacaccaccagccagcgaaaccaaaattatgagtcctcgaaaggccctgattcctgtctcgcagaagagttcgcaggccgaggcctgcagcgagagtcggaatcgggtcaaaaggcggctcgactcgtcttgtctggagagtgtgaaacagaagtgtgttaagagctgcaattgtgttacagaactcgacggacaagttgagaatcttcatctcgacctgtgctgcctggcaggcaaccaggaagacctatctaaagatagcttagggccgaccaagagcagcaagatcgaaggagccggcacgtccatctcagagccacccagccccatctctccctatgcttctgagtcctgcggtacgttacctcttcctctccggccttgcggggagggatccgaaatggtcgggaaagagaacagctcgccagaaaacaagaattggctcttggcaatggcagccaagaggaaagccgagaatccatcccctcggtctcctagtagccaaacacctaacagtaggcgccagagtggcaaaaagttgccctcccccgtgactattaccccgtcctctatgcgcaagatatgtacgtatttccaccgtaagagtcaagaagacttttgtggccccgagcacagtacagagctgtag

SEQ ID NO: 191279 - DNA, 2193 bp, Artificial Sequence
  derived and/or modified sequence
atgctgttcaatagcgtccttcggcagccccagctcggcgtgctgagaaacggttggtcaagccagtaccccctacagtcactgctcacgggatatcagtgctccggaaatgatgagcacacatcatacggggaaacaggggtccctgtgccgccttttggttgtacattttctagcgcgccaaacatggagcacgtgctggccgtggccaacgaagaaggttttgtgcgcctttacaacactgagtcacagtcttttaggaagaaatgcttcaaggaatggatggcgcattggaacgcggtcttcgaccttgcttgggtgccaggggaactgaaactggttaccgcagctggtgaccagacagccaaattctgggatgtgaaggcgggagaattgatcggcacttgcaaaggacatcagtgctctctcaagagcgtagcatttagcaaatttgagaaagcagtgttctgcacgggaggccgtgatggcaatataatggtttgggatacgcggtgcaataagaaagatggattttataggcaagtcaaccagatctctggagcacacaacacatcagataagcagactccctccaagcccaagaaaaagcagaacagtaagggcctggccccttctgtcgatttccagcagagcgtcactgtggtgctattccaagacgaaaatacgcttgtcagcgccggagctgttgatggtatcatcaaggtctgggatctccgcaaaaactataccgcgtaccgacaagagccaatagcgagtaagtccttcttatacccgggatccagtactagaaaattgggatactcttccctcattctcgatagtactggtagcactttgtttgccaattgtacagatgataatatttatatgttcaatatgaccggcctgaaaacttcacccgtcgccattttcaacggacaccagaatagcactttttacgtgaaaagctctctttctcctgacgaccaatttttggtatcaggtagctcggatgaggcagcctacatctggaaggtctccacaccatggcagcctcctactgtgcttttggggcactctcaggaagttacatccgtctgttggtgccctagcgatttcacaaagattgccacgtgctcagacgataatactctgaagatttggagactgaaccggggtttagaagagaagcctgggggtgataagctttcaacagtgggctgggcgtcacagaagaagaaggaaagccgccctggactagtcaccgtgacgagctcccagtccacaccagccaaggcccctagggcaaagtgcaatcccagtaacagctccccatcaagtgctgcttgcgccccttcctgcgccggtgatcttccattgccaagtaacacgccaacgttttcaatcaaaacatctcccgcaaaggctcggtcccctattaacaggcgcggatccgtgtctagcgtcagtcccaagcctccttctagcttcaagatgagtatcaggaactgggttaccagaaccccttcatcatcccctccaatcactccacccgctagtgagaccaagatcatgtcccctcggaaggcattgatccctgtctctcagaagtcatctcaagcagaggcttgctctgagagcagaaacagagtgaagcggagactggatagtagctgcctggagtccgtgaagcaaaaatgcgtcaagagttgtaactgtgtaacagagcttgacgggcaagtggagaacctacacttagacctatgctgccttgccggaaatcaggaagatctatctaaagactccctaggaccgacgaaaagcagcaagatcgagggcgcaggcacaagcattagcgagccaccctcccctataagtccatacgcttcagagtcttgcggtaccttacctctgccgcttaggccatgtggagaggggtcagagatggtggggaaggaaaacagttcacccgaaaacaaaaactggcttctcgccatggccgctaaacggaaggctgaaaatccctcccccagatctccatcctcacagaccccgaatagcaggcgccaaagtggcaagaagctgccttctcccgtcactataaccccatcctccatgcgtaagatttgcacttactttcatcgaaagagccaggaggacttttgtggtcctgaacattccactgaactgtag

SEQ ID NO: 191280 - DNA, 2193 bp, Artificial Sequence
  derived and/or modified sequence
atgctgttcaacagcgtgctgagacagccccagctgggcgtgctgagaaacggctggagcagccagtaccccctgcagagcctgctgaccggctaccagtgcagcggcaacgacgagcacaccagctacggcgagaccggcgtgcccgtgccccccttcggctgcaccttcagcagcgcccccaacatggagcacgtgctggccgtggccaacgaggagggcttcgtgagactgtacaacaccgagagccagagcttcagaaagaagtgcttcaaggagtggatggcccactggaacgccgtgttcgacctggcctgggtgcccggcgagctgaagctggtgaccgccgccggcgaccagaccgccaagttctgggacgtgaaggccggcgagctgatcggcacctgcaagggccaccagtgcagcctgaagagcgtggccttcagcaagttcgagaaggccgtgttctgcaccggcggcagagacggcaacatcatggtgtgggacaccagatgcaacaagaaggacggcttctacagacaggtgaaccagatcagcggcgcccacaacaccagcgacaagcagacccccagcaagcccaagaagaagcagaacagcaagggcctggcccccagcgtggacttccagcagagcgtgaccgtggtgctgttccaggacgagaacaccctggtgagcgccggcgccgtggacggcatcatcaaggtgtgggacctgagaaagaactacaccgcctacagacaggagcccatcgccagcaagagcttcctgtaccccggcagcagcaccagaaagctgggctacagcagcctgatcctggacagcaccggcagcaccctgttcgccaactgcaccgacgacaacatctacatgttcaacatgaccggcctgaagaccagccccgtggccatcttcaacggccaccagaacagcaccttctacgtgaagagcagcctgagccccgacgaccagttcctggtgagcggcagcagcgacgaggccgcctacatctggaaggtgagcaccccctggcagccccccaccgtgctgctgggccacagccaggaggtgaccagcgtgtgctggtgccccagcgacttcaccaagatcgccacctgcagcgacgacaacaccctgaagatctggagactgaacagaggcctggaggagaagcccggcggcgacaagctgagcaccgtgggctgggccagccagaagaagaaggagagcagacccggcctggtgaccgtgaccagcagccagagcacccccgccaaggcccccagagccaagtgcaaccccagcaacagcagccccagcagcgccgcctgcgcccccagctgcgccggcgacctgcccctgcccagcaacacccccaccttcagcatcaagaccagccccgccaaggccagaagccccatcaacagaagaggcagcgtgagcagcgtgagccccaagccccccagcagcttcaagatgagcatcagaaactgggtgaccagaacccccagcagcagcccccccatcaccccccccgccagcgagaccaagatcatgagccccagaaaggccctgatccccgtgagccagaagagcagccaggccgaggcctgcagcgagagcagaaacagagtgaagagaagactggacagcagctgcctggagagcgtgaagcagaagtgcgtgaagagctgcaactgcgtgaccgagctggacggccaggtggagaacctgcacctggacctgtgctgcctggccggcaaccaggaggacctgagcaaggacagcctgggccccaccaagagcagcaagatcgagggcgccggcaccagcatcagcgagccccccagccccatcagcccctacgccagcgagagctgcggcaccctgcccctgcccctgagaccctgcggcgagggcagcgagatggtgggcaaggagaacagcagccccgagaacaagaactggctgctggccatggccgccaagagaaaggccgagaaccccagccccagaagccccagcagccagacccccaacagcagaagacagagcggcaagaagctgcccagccccgtgaccatcacccccagcagcatgagaaagatctgcacctacttccacagaaagagccaggaggacttctgcggccccgagcacagcaccgagctgtag

SEQ ID NO: 191281 - DNA, 4573 bp, Artificial Sequence
  derived and/or modified sequence
cgcggtttgtccgcgcctctgctaccccctgcgcaggcgctcaaggagctcttggactccaggttcccgcggctgggagaaaaggaggcggggatccgaagggggaaatgactctgaggcgcccggacgtcgctcggaagccaatcagagagcgtgacgtcagtttggcgcggagtttggcggccggggcttacagtggcgggagttggaggcgataacgatttgtgttgtgagaggcgcaagctgcgatttctgctgaacttggaggcatttctacgacttttctctcagctgaggcttttcctccgaccctgatgctcttcaattcggtgctccgccagccccagcttggcgtcctgagaaatggatggtcttcacaataccctcttcaatcccttctgactggttatcagtgcagtggtaatgatgaacacacttcttatggagaaacaggagtcccagttcctccttttggatgtaccttctcttctgctcccaatatggaacatgtactagcagttgccaatgaagaaggctttgttcgattgtataacacagaatcacaaagtttcagaaagaagtgcttcaaagaatggatggctcactggaatgccgtctttgacctggcctgggttcctggtgaacttaaacttgttacagcagcaggtgatcaaacagccaaattttgggacgtaaaagctggtgagctgattggaacatgcaaaggtcatcaatgcagcctcaagtcagttgccttttctaagtttgagaaagctgtattctgtacgggtggaagagatggcaacattatggtctgggataccaggtgcaacaaaaaagatgggttttataggcaagtgaatcaaatcagtggagctcacaatacctcagacaagcaaaccccttcaaaacccaagaagaaacagaattcaaaaggacttgctccttctgtggatttccagcaaagtgttactgtggtcctctttcaagacgagaataccttagtctcagcaggagctgtggatgggataatcaaagtatgggatttacgtaagaattatactgcttatcgacaagaacccatagcatccaagtctttcctgtacccaggtagcagcactcgaaaacttggatattcaagtctgattttggattccactggctctactttatttgctaattgcacagacgataacatctacatgtttaatatgactgggttgaagacttctccagtggctattttcaatggacaccagaactctaccttttatgtaaaatccagccttagtccagatgaccagtttttagtcagtggctcaagtgatgaagctgcctacatatggaaggtctccacaccctggcaacctcctactgtgctcctgggtcattctcaagaggtcacgtctgtgtgctggtgtccatctgacttcacaaagattgctacctgttctgatgacaatacactaaaaatctggcgcttgaatagaggcttagaggagaaaccaggaggtgataaactttccacggtgggttgggcctctcagaagaaaaaagagtcaagacctggcctagtaacagtaacgagtagccagagtactcctgccaaagcccccagggcaaagtgcaatccatccaattcttccccgtcatccgcagcttgtgccccaagctgtgctggagacctccctcttccttcaaatactcctacgttctctattaaaacctctcctgccaaggcccggtctcccatcaacagaagaggctctgtctcctccgtctctcccaagccaccttcatctttcaagatgtcgattagaaactgggtgacccgaacaccttcctcatcaccacccatcactccacctgcttcggagaccaagatcatgtctccgagaaaagcccttattcctgtgagccagaagtcatcccaagcagaggcttgctctgagtctagaaatagagtaaagaggaggctagactcaagctgtctggagagtgtgaaacaaaagtgtgtgaagagttgtaactgtgtgactgagcttgatggccaagttgaaaatcttcatttggatctgtgctgccttgctggtaaccaggaagaccttagtaaggactctctaggtcctaccaaatcaagcaaaattgaaggagctggtaccagtatctcagagcctccgtctcctatcagtccgtatgcttcagaaagctgtggaacgctacctcttcctttgagaccttgtggagaagggtctgaaatggtaggcaaagagaatagttccccagagaataaaaactggttgttggccatggcagccaaacggaaggctgagaatccatctccacgaagtccgtcatcccagacacccaattccaggagacagagcggaaagaaattgccaagcccggtcaccatcacgcccagctccatgaggaaaatctgcacatacttccatagaaagtcccaggaggacttctgtggtcctgaacactcaacagaattatagattctaatctgagtgagttactgagctttggtccactaaaacaagctgagctttggtccactaaaacaagatgaaaaatacaagagtgactctataactctggtctttaagaaagctgccttttcatttttagacaaaatcttttcaacgctgaaatgtacctaatctggttctactaccataatgtatatgcagcttcccgaggatgaatgctgtgtttaaatttcataaagtaaatttgtcactctagcattttgaatgaatagtcttcactttttaaattattcatcttctctataataatgacatcccagttcatggaggcaaaaaacaagtttcttgttatcctgaaactttctatgctcagtggaaagtatctgccagccacagcatgaggcctgtgaaggctgactgagaaatcctctgctgaagacccctggttctgttctgcctccaacatgtataattttatttgaaatacataatcttttcactatgcttttgtggggttttttttaagtatgtgtaaaaatgtgatgctcagataagtacatttatatcagttcagtgttaaaatgcagtctcttgagttaaagtcatctttattttaaatgcagtgataaatgtcaactcttcggagaaactaggagaacaacaacagaaagctgtgtttgtcttttttctctcaaatatatctcccgtatgagatttcaggtccccatgttttcaccaagcaatctgctatgtcagccaacccaacatcactttctacaggaggttatgatttttgccatttactagaggaagatgttttatgaaatcaatttggggtttgaattcaggtgcagtcatcagttctttaggggctgcaatgttttaaaaaaaataagtcatcagattttaagaaaaaagtgatgatttcttattgatatttttgtaacagaatatagctcttaactgaaaatccagaaccagaaacataaatcttgagtttcttttcatgtacataaaaagcaatagccttttagtatagatagccctgagccaaaaagtaatagaattttctctagatatttaatacagagagtgtatagactgactctaagttaataatgtgcaaaatatcttaaacatccctccccttattcaacaattatgtatcagtgatcttgaaccattgttttatatttttcacctttgtaacctcatggaaagaggctttacatactttctatgtactatttacttagaagggagcccccttccagtcatgaaacttcatttgttttatccatatccctgaggactgtgtagactttatgtcagtttttgtcattatttgaaaatctattctgacaactttttaattcctttgatcttataagttaaagctgtaacaactgaaattgcatggatcaagtaagcatagttttatccagggagaaaaataaaaggaagccatagaattgctctggtcaaaaccaagcacaccatagccttaactgaatatttaggaaatctgcctaatctgcttatatttggtgtttgttttttgactgttgggctttgggaagatgttatttatgaccaatatctgccagtaacgctgtttatctcacttgctttgaaagccaatgggggaaaaaaatccatgaaaaaaaaaagattgataaagtagatgattttgtttgtatccctacccatctcctggcagccctactgagtgaaattgggatacatttggctgtcagaaattataccgagtctactgggtataacatgtctcacttggaaagctagtacttttaaatgggtgccaaaggtcaactgtaatgagataattatccctgcctgtgtccatgtcagactttgagctgatcctgaataataaagccttttaccttatctgatgtccttttctgagctttttgcattacctagaagcagtctacaaaaaagaactatagtagtcaagaatcccttctacttgttcattaaaatgtttattcccaaagttataatctatttcaagctgaaagagcttttaataaaaaacatcttgcttg

SEQ ID NO: 191282 - protein, 953 aa, Artificial Sequence
  derived and/or modified sequence
MTAAENVCYTLINVPMDSEPPSEISLKNDLEKGDVKSKTEALKKVIIMILNGEKLPGLLMTIIRFVLPLQDHTIKKLLLVFWEIVPKTTPDGRLLHEMILVCDAYRKDLQHPNEFIRGSTLRFLCKLKEAELLEPLMPAIRACLEHRHSYVRRNAVLAIYTIYRNFEHLIPDAPELIHDFLVNEKDASCKRNAFMMLIHADQDRALDYLSTCIDQVQTFGDILQLVIVELIYKVCHANPSERARFIRCIYNLLQSSSPAVKYEAAGTLVTLSSAPTAIKAAAQCYIDLIIKESDNNVKLIVLDRLIELKEHPAHERVLQDLVMDILRVLSTPDLEVRKKTLQLALDLVSSRNVEELVIVLKKEVIKTNNVSEHEDTDKYRQLLVRTLHSCSVRFPDMAANVIPVLMEFLSDNNEAAAADVLEFVREAIQRFDNLRMLIVEKMLEVFHAIKSVKIYRGALWILGEYCSTKEDIQSVMTEIRRSLGEIPIVESEIKKEAGELKPEEEITVGPVQKLVTEMGTYATQSALSSSRPTKKEEDRPPLRGFLLDGDFFVAASLATTLTKIALRYVALVQEKKKQNSFVAEAMLLMATILHLGKSSLPKKPITDDDVDRISLCLKVLSECSPLMNDIFNKECRQSLSHMLSAKLEEEKLSQKKESEKRNVTVQPDDPISFMQLTAKNEMNCKEDQFQLSLLAAMGNTQRKEAADPLASKLNKVTQLTGFSDPVYAEAYVHVNQYDIVLDVLVVNQTSDTLQNCTLELATLGDLKLVEKPSPLTLAPHDFANIKANVKVASTENGIIFGNIVYDVSGAASDRNCVVLSDIHIDIMDYIQPATCTDAEFRQMWAEFEWENKVTVNTNMVDLNDYLQHILKSTNMKCLTPEKALSGYCGFMAANLYARSIFGEDALANVSIEKPIHQGPDAAVTGHIRIRAKSQGMALSLGDKINLSQKKTSI

SEQ ID NO: 191283 - DNA, 2862 bp, Artificial Sequence
  derived and/or modified sequence
atgaccgcagcagaaaacgtctgctatacgttgataaatgtgccaatggactccgagccacctagtgagatctccctgaagaacgacttggaaaagggcgacgtcaagagtaaaaccgaagccctgaagaaggtgattattatgatattaaatggggagaaactgcccggcctcctcatgaccattatacgcttcgtcctcccattgcaggatcatacaatcaagaagctcctgctcgtcttttgggaaatagtaccaaagacaacccccgacggcagacttctgcacgagatgatcctggtttgcgatgcctatcgtaaagacctccaacacccaaacgaatttataagaggaagtactcttcgattcttgtgcaaacttaaggaggcagaactcctggagccccttatgccggccatacgcgcctgcctcgagcaccggcactcctatgtgagaaggaatgcagtccttgctatatacaccatctatagaaatttcgagcatctcatccctgacgcaccagagcttatccatgattttttggtcaacgaaaaagacgccagctgcaagcgcaacgctttcatgatgctgattcacgcagaccaggacagggccttagattatctgtccacttgcatagatcaggtccagactttcggggacatcctgcagctagtgatcgtcgagcttatctacaaagtatgtcacgcgaacccctctgaacgggcccgctttatccgatgcatatataatctcctccagagcagctctccggccgtgaagtacgaagcagcggggacattagtcacactgagctctgctcccaccgctattaaagcagcagctcagtgttacatagacctgatcattaaggagagcgataataacgttaaactcattgtactggatcgactgatagagttgaaggagcatcctgcccatgagcgagtgctgcaggatctggtgatggacattctgagagttctgagtactccggatttggaagtgagaaagaaaaccttgcagctcgctctagacctagtgagtagcagaaacgtggaagagctagttattgtcttgaaaaaggaagtcataaagacaaataacgtgtccgaacacgaagatactgataagtataggcagttgttggtccgtactctccactcatgttcagtccgctttccagacatggcagccaacgttatccccgtgctgatggagtttctgagtgataacaacgaggccgcagccgcagatgtgctggaattcgtgagggaggcaattcagagatttgacaatctcagaatgcttattgtggagaagatgctggaagtattccatgcaataaagagcgtcaagatctacaggggtgccctatggatccttggcgagtattgtagtaccaaagaagacatccagagtgtcatgactgagattcggcgatcacttggggaaattccgatcgtggaaagtgaaatcaagaaggaggcgggggagctcaaaccggaggaagagatcacagttggccccgtgcaaaaactcgtgaccgaaatgggcacctatgctactcagagtgctctcagctccagccgcccaaccaagaaagaggaggacagaccaccactcagaggattccttctggacggtgacttcttcgtggcggcctccctcgcgaccaccctgaccaagattgcactgcgctacgtcgccttggttcaagaaaaaaagaaacagaatagttttgttgcggaagccatgctcctgatggctacaatcctgcatctgggcaagtcatctctgccaaagaaaccaattacagacgacgatgtggacagaatcagtctgtgcttgaaggtactgtccgaatgctccccgctcatgaacgacattttcaacaaagagtgtaggcagtccctcagtcacatgcttagtgccaagttagaggaggaaaaactgtcacagaaaaaagaatctgagaaacgcaatgtgacagtacagcccgatgaccctatatcctttatgcagctgaccgccaagaacgagatgaattgtaaggaggatcaattccagctttctttactagctgcaatgggaaacactcagaggaaagaggccgcagaccctttggcaagcaagcttaacaaggtgacacaattaaccggattctcggaccccgtttatgccgaagcgtacgtgcacgtgaatcaatacgatatcgtcctcgatgttctggtcgtgaatcagacctcagacacattgcagaactgtactttggagcttgccacactgggggatctcaagctcgtggagaagccctctccgctgacactagcacctcatgacttcgcaaatattaaagccaatgtcaaggtggcaagcacggagaatggcataatatttggcaacatcgtgtacgatgtcagcggagcggcctccgacaggaattgcgtggtgctatccgacattcacattgacattatggactacattcaacccgccacgtgcactgatgccgaatttagacagatgtgggcggagttcgagtgggaaaacaaagtcacagttaacaccaacatggtcgacttaaacgattacctacagcacattttgaaatccacaaacatgaaatgtctcaccccagagaaagccctttctggttattgtggcttcatggcagcaaacctctatgcccggagcattttcggcgaagatgcattggctaacgtttccatcgagaaacccatccaccagggcccggatgctgcagttacagggcacatcagaatcagagcgaagagtcaggggatggcattgtcattgggtgataaaatcaatttatctcagaagaaaaccagcatttag

SEQ ID NO: 191284 - DNA, 2862 bp, Artificial Sequence
  derived and/or modified sequence
atgaccgcagccgagaatgtgtgctacacactaatcaacgtgcctatggatagcgagcctcccagtgagattagtctcaaaaacgatttagagaagggggatgtgaagtccaagaccgaagcccttaagaaagtgattataatgatactgaacggtgagaagcttcctggactcctcatgactatcatccggtttgttctcccacttcaggatcacacgattaagaaattgctgcttgtgttctgggagatcgtccccaagacgacacctgacgggaggcttcttcacgagatgatcctggtgtgcgatgcgtaccgtaaggacctgcagcaccccaacgagttcatcagaggatcaaccctccggtttctttgtaaactgaaggaggcggaactcctcgagcctctcatgccggctatccgcgcctgcctcgagcacagacactcctatgtccgccgcaacgcggtcctggctatttatacaatctatcggaactttgagcacttgattccggacgcccctgaactaatacatgattttctcgtaaacgagaaggatgcctcatgcaagcgcaatgcctttatgatgctgatccacgcggatcaggacagggctttagactatcttagtacctgtatcgaccaggtgcagactttcggggacatccttcaactggtgattgtcgaattaatctacaaggtgtgccatgctaacccgtctgagcgcgctcgatttattagatgcatttacaaccttctccaatctagcagccccgccgtgaaatacgaagccgcggggactctggtgaccctgtctagcgcccccaccgcgataaaagctgctgcccaatgctacatcgaccttatcatcaaagagtctgacaacaatgtgaaactgatcgtgttggacaggctcattgagctgaaggagcaccctgcccatgaacgcgtgcttcaggacctcgtcatggacattctgcgtgtactaagcacccctgaccttgaggtgaggaaaaaaacgctgcaattggccctggacttggtctcttcgcggaatgtggaggagctcgtaatcgtcctcaagaaggaagtgatcaagacgaataatgtatccgagcatgaagacaccgacaagtaccggcaactgctcgtgcgaacattacactcatgtagcgtgaggttccccgatatggcagcgaatgttattccagtattgatggagtttctctctgacaataacgaagccgcagcagctgacgttctggagtttgtcagagaggccattcagcgcttcgataaccttagaatgctgatcgtcgagaaaatgctggaagtgttccacgccatcaagagcgtgaagatttacagaggtgctttgtggatcctgggcgagtactgcagtacaaaggaggacatccagtctgtgatgacagaaatcagacggtctcttggagaaatccctattgttgagagcgagataaagaaggaggccggagaattgaaacctgaagaagaaatcaccgtgggccctgttcagaagttggtcacagagatggggacttacgcaacacagtcagcccttagcagctcacgcccaacgaaaaaggaagaggatcggcctccgttgcggggatttctcctggatggcgacttcttcgtggccgcttctctggctacaaccctcaccaaaattgcccttaggtacgtcgcattggtgcaggaaaaaaagaagcaaaacagcttcgtggccgaggctatgctgttgatggccacgatcctgcacttgggtaagagttccctgccaaagaagcccattaccgacgacgatgtcgatcggattagcctgtgcctcaaggtgcttagcgaatgctctcctctgatgaatgatattttcaacaaggagtgcagacagtccctcagccacatgctgtcagccaagctcgaggaggagaagctgtctcagaaaaaagagagtgagaaacgaaatgtgactgtgcagccagacgacccaattagcttcatgcagctcacagccaaaaatgaaatgaactgcaaagaagaccagttccagcttagcctgctggctgcaatgggtaacacccagcgtaaagaggccgcagaccctctcgcatcaaaactcaataaagtcactcagcttaccggattctctgatccagtttacgcagaagcctacgtccatgtcaaccagtatgatattgtgctggacgttctcgtggtcaatcagactagcgataccctccagaattgtacccttgagttggccacactgggcgatctcaagctggtggagaagccgagcccccttacgctggctccccatgacttcgcaaatatcaaagccaacgtcaaggttgcctcaaccgaaaatggaattattttcggcaatattgtctatgacgtgtctggtgccgcatccgacagaaattgcgtggttctctcagatattcacattgatataatggactatatccagcccgccacatgtactgatgcagaattcaggcagatgtgggccgagtttgaatgggagaacaaggttacggtgaataccaacatggtggatctgaatgactatctgcagcatattcttaaatcaaccaatatgaaatgcctcacccctgaaaaagctctcagcggttactgcggcttcatggcagcaaacctctatgcacgctcaatctttggcgaagacgcgctcgctaatgtcagcattgaaaagccaatccaccagggacctgacgccgccgtaactggacacatacggattagagccaagtctcaaggcatggctctgtctttgggcgacaaaatcaacctttctcagaaaaagacctctatctag

SEQ ID NO: 191285 - DNA, 2862 bp, Artificial Sequence
  derived and/or modified sequence
atgacagctgctgaaaatgtgtgctacaccctcatcaacgtgcccatggacagcgagccccccagcgagatcagcctgaagaatgacctggagaagggagatgtgaagagcaagacagaggccctgaagaaggtgatcatcatgatcctgaatggagagaagctgcccggcctgctgatgaccatcatccgctttgtgctgcccctgcaggaccacaccatcaagaagctgctgctggtgttctgggagatcgtgcccaagaccaccccagatggccgcctgctgcacgagatgatcctggtgtgtgatgcctacaggaaggacctgcagcaccccaatgagttcatccggggcagcaccctgcgcttcctgtgcaagctgaaggaggccgagctgctggagcccctgatgcctgccatccgggcctgcctggagcaccgccacagctatgtgagaagaaatgctgtgctggccatctacaccatctacagaaactttgagcacctgatcccagatgcccctgagctgattcatgacttcctggtgaatgagaaggatgccagctgcaagagaaatgccttcatgatgctgattcatgctgaccaggaccgggccctggactacctgagcacctgcatcgaccaggtgcagacctttggagacatcctgcagctggtgattgtggagctgatctacaaggtgtgccacgccaaccccagcgagcgggcccgcttcatccgctgcatctacaacctgctgcagagcagcagccctgctgtgaagtatgaggccgccggcaccctggtgaccctgagcagcgcccccacagccatcaaggctgctgcccagtgctacatcgacctgatcatcaaggagagtgacaacaacgtgaagctgattgtgctggacaggctcatcgagctgaaggagcacccagcccacgagcgggtgctgcaggacctggtgatggacatcctgcgggtgctgagcaccccagacctggaggtgaggaagaagaccctgcagctggccctggacctggtgagcagcagaaatgtggaggagctggtgattgtgctgaagaaggaggtgatcaagaccaacaacgtgtctgaacatgaggacacagacaagtaccggcagctgctggtgaggaccctgcacagctgcagcgtgcgcttcccagacatggccgccaacgtcatccctgtgctgatggagttcctgagtgacaacaatgaagctgctgctgctgatgtgctggagtttgtgcgggaggccatccagagatttgacaacctgaggatgctgattgtggagaagatgctggaggtgttccacgccatcaagtctgtgaagatctacagaggagccctgtggatcctgggggagtactgcagcaccaaggaggacatccagagcgtgatgacagagatccgccgcagcctgggggagatccccatcgtggagagcgagatcaagaaggaggccggggagctgaagccagaggaggagatcaccgtgggccctgtgcagaagctggtgacagagatgggcacctacgccacccagagcgccctgagcagcagccggcccaccaagaaggaggaggaccggccccccctgcggggcttcctgctggatggagacttctttgtggccgccagcctggccaccaccctgaccaagatcgccctgcgctacgtggccctggtgcaggagaagaagaagcagaacagctttgtggccgaggccatgctgctgatggccaccatcctgcacctgggcaagagcagcctgcccaagaagcccatcacagatgatgatgtggaccgcatcagcctgtgcctgaaggtgctgtctgagtgcagccccctgatgaatgacatcttcaacaaggagtgccggcagagcctgagccacatgctgagcgccaagctggaggaggagaagctgagccagaagaaggagagcgagaagagaaatgtgacagtgcagccagatgaccccatctccttcatgcagctgacagccaagaatgagatgaactgcaaggaggaccagttccagctgagcctgctggccgccatgggcaacacccagaggaaggaggccgctgaccccctggccagcaagctgaacaaggtgacccagctgaccggcttcagtgaccctgtgtatgcagaggcctacgtgcacgtgaaccagtatgacatcgtgctggatgtgctggtggtgaaccagaccagtgacaccctgcagaactgcaccctggagctggccaccctgggggacctgaagctggtggagaagcccagccccctgaccctggcccctcatgactttgccaacatcaaggccaacgtgaaggtggccagcacagaaaatggcatcatcttcggcaacatcgtgtatgatgtgtctggggccgccagtgacaggaactgtgtggtgctgagtgacatccacatcgacatcatggactacatccagcctgccacctgcacagatgctgagttccggcagatgtgggccgagtttgagtgggagaacaaggtgacagtgaacaccaacatggtggacctgaatgactacctgcagcacatcctgaagagcaccaacatgaagtgcctgaccccagagaaggccctgagcggctactgcggcttcatggccgccaacctgtatgcccggagcatctttggagaagatgccctggccaacgtgtccattgagaagcccatccaccagggcccagatgctgctgtgacaggccacatccgcatccgggccaagagccagggcatggccctgagcctgggggacaagatcaacctgagccagaagaagaccagcatctag

SEQ ID NO: 191286 - DNA, 2862 bp, Artificial Sequence
  derived and/or modified sequence
atgaccgccgccgagaacgtgtgctacaccctgatcaacgtgcccatggattccgaacccccaagcgaaatctcgcttaaaaatgatctcgaaaaaggagacgtcaaatcaaagaccgaagccttaaaaaaggttatcattatgatcctgaatggcgaaaaactccctggactgttgatgactattattagatttgtcctgccgttacaggatcacacaatcaaaaagttgctcttagtgttttgggagatagtgccgaagaccacccccgacggcagactgctgcatgaaatgatcttggtctgcgatgcttatagaaaggatttgcaacatcctaacgaattcattaggggttctacactacgttttctgtgcaaactgaaagaagcggaattactggagccattaatgccagcgattagggcctgtttagagcaccggcacagctatgtgagaaggaatgctgtgctggctatttacacaatctacagaaatttcgaacatctgattcccgatgccccggaattaatccacgatttcctcgtcaacgaaaaagacgcttcttgtaaacgcaacgccttcatgatgcttatacacgccgaccaggacagagctctggattatctgtcaacctgtattgatcaggtgcagaccttcggagatattttacagctggtgattgtggagttaatctataaagtctgccacgctaacccttcagagagagcccggtttatcagatgtatctataacctgctgcaatcgtcatctccagccgtcaaatacgaggccgctggcaccctggttaccctgagctccgcacctacagcaatcaaggctgcagcgcagtgttacatcgacttgatcatcaaagaatcagataacaatgtgaagttaatcgtgctcgacagattaattgaattgaaagaacaccccgctcacgagcgggtgttacaagacttagttatggatatcctgagagtgctttctactcctgacctggaagtgaggaagaagaccctgcaactcgctcttgatttagtgagctctaggaatgttgaggaactagtgatcgtcttgaagaaagaggttatcaagacaaataatgtctcggagcatgaggacactgacaaatatcgccagctgctggtacggacgctacatagctgctctgttcgcttccccgacatggccgctaatgtcattcctgtgctgatggagttcctcagtgataacaacgaggcagccgccgcggacgtgcttgaattcgtgcgggaagcaatacagcgtttcgacaatctgcggatgctgattgttgagaagatgctcgaggtttttcacgctattaaatccgtaaaaatttacagaggcgctctctggatcctgggcgagtattgtagtacaaaagaagacatacaaagtgtgatgacagagataagacggtcgctcggagaaattcccatcgtggagagcgaaataaagaaagaagccggcgaactaaagcccgaagaggaaatcacagtgggtcccgtgcagaaactagtaacggagatgggaacctacgctacccaaagcgccctgagcagctcacgtcctaccaaaaaagaagaggacaggccacctctacgcggctttctcctggacggggatttctttgtggcagccagtctcgccactacccttaccaagattgccctccggtacgtggctctagtgcaggaaaagaaaaaacagaactcgttcgtcgctgaggcgatgctcctgatggccactattttgcacctgggaaagagcagcttgcccaagaaaccaatcactgatgacgatgttgaccgtatcagcctctgccttaaggtgctgtctgaatgttcccccctcatgaatgatatttttaataaggagtgtaggcagtccctatctcatatgctaagtgcaaagcttgaagaggaaaagctttcccaaaaaaaagagtcagaaaagcggaatgtaaccgtacaaccagacgatcctattagttttatgcagctgactgctaaaaatgagatgaactgcaaagaggaccagtttcagctcagtctcctggccgccatgggcaacactcaacggaaagaagccgctgatccgctcgcaagcaagctaaataaggtcacccagctgaccggcttctccgacccagtatatgctgaagcttatgttcatgtgaaccagtacgatatagtcctagatgtactcgtagtgaaccagacctcagatacgctgcaaaattgcaccctcgaactggctacactgggtgatctgaaactggttgaaaagccgagcccactgaccctggcaccacacgactttgctaacatcaaggccaatgttaaggtggctagcacggaaaacggtatcatctttggcaatattgtgtacgatgtatcaggagcggccagcgaccggaactgtgtggtgctctcagatatccatattgacatcatggattatattcaacccgctacttgcactgacgccgagtttcgtcagatgtgggccgagttcgagtgggagaacaaggtgaccgtcaacactaatatggtggacctgaacgactatctccagcacatcctcaaaagcactaacatgaagtgtctgacccccgaaaaggcgctgagcggctactgcggattcatggccgctaatctctatgcccgaagtatctttggtgaagacgcgctagcaaatgtttccatcgagaagcctattcatcaaggccccgacgccgcagtcactgggcacatccggatcagagcaaagtctcagggaatggctctgtcactaggcgataagattaacctgtcacaaaaaaagacaagcatttag

SEQ ID NO: 191287 - DNA, 2862 bp, Artificial Sequence
  derived and/or modified sequence
atgaccgccgccgagaacgtgtgctacaccctgatcaacgtgcccatggacagtgaacccccctccgaaatttccctgaagaatgatctggaaaaaggcgatgttaaaagtaaaactgaagcacttaaaaaggtcataatcatgatcctcaacggagagaaactcccagggcttctgatgaccattattaggttcgtgcttcccttacaggatcataccataaaaaaacttctcttggtcttttgggagatcgtgccgaagacaacccctgatggcagattgttgcacgagatgattttggtgtgcgatgcttaccgcaaggacctccagcaccctaatgagttcattagaggtagcacactaaggttcctttgcaaactgaaggaggctgaactgctggagccactcatgccagcgataagggcctgtctcgaacatcgtcactcctacgtgagaaggaacgcagtattagcaatatatactatctatcgcaactttgagcatctgattcctgacgcccctgagttaattcacgactttctggtgaatgaaaaggatgcatcatgtaagcggaatgccttcatgatgctcatacatgccgaccaggacagggcgcttgactatctcagcacttgcatagatcaggtgcaaacattcggggatattctgcaactggtgatcgtggagcttatctataaggtctgccacgcgaatcccagcgaaagggctcgctttattcgatgtatttacaacctgttgcagagcagctcccccgcagtcaaatacgaggcagctggcactctcgtaactctctccagcgctccgacagctattaaagcagccgcccagtgttacatcgacctcatcattaaagaatcagataataacgtcaaacttatcgtgctggacaggctcatcgaactaaaagaacaccctgcccacgagcgtgtgttgcaggacttagtcatggacatcctgagggttctgagtacaccagacctggaagtgcgaaagaagactttacagctggctctggacctggtgtcctctcgcaatgtggaggaactcgtcattgtgcttaagaaagaggtgatcaaaaccaacaatgtctcagaacacgaggatacagataagtatagacagctgctggttcggacattacacagctgcagcgtgcgttttcctgatatggctgccaacgtaatccctgtcctgatggagttcctgtctgacaacaatgaagccgctgccgcagatgtactggagttcgtgagagaagcaatccagcggttcgataatctacgcatgcttatcgtggaaaagatgctggaagtgttccacgcaattaagtccgttaaaatctaccgcggcgctctctggatcctcggagaatactgctccacaaaggaggacatccagagcgtgatgacagagatccgccggagcttaggtgaaattcctattgtcgaatcagaaattaaaaaggaagctggcgagctgaagccggaagaagagattaccgtcggtcctgtgcagaagcttgtgacagaaatgggaacctacgccacacagtctgccctatccagtagccgacctaccaagaaggaagaggataggccccccctccgtggcttcctgcttgatggggattttttcgtcgctgcctccttggcgaccaccctgacaaagattgcacttcgctatgtggcactggtccaggaaaagaaaaaacagaacagcttcgtcgcagaggccatgttgttgatggctacaatcctccatttgggaaaatccagcctgcccaagaagcccataaccgatgatgacgtcgatcgcatcagtctgtgtttaaaggtcctctccgaatgtagccctctgatgaatgatatctttaacaaagagtgtcggcagagcttgagccacatgctgtcagcaaaactggaagaagagaagcttagccaaaaaaaggagtcagaaaagcgcaatgtgacagtccagcctgacgaccctatatcgttcatgcaactcaccgccaaaaacgagatgaattgtaaagaagaccagttccagctctctctgctggccgcaatggggaacacgcaacggaaggaggctgcagaccccctggcgtcaaaactgaataaggtgacgcaactaaccggtttttcagatccagtctatgcggaagcatatgtccacgttaaccagtacgacatagtcctggacgtacttgtggtgaaccagacaagcgacacactccagaactgcacactggagctcgccactctcggagacctcaagttggtcgagaagccgtccccgctgacactggcgcctcacgatttcgctaatattaaggccaacgtgaaggtggcctcaactgaaaacggtatcattttcggcaacattgtgtacgacgtctccggggccgcctcagacaggaactgtgtggtgctatcagacattcacatcgatataatggattacattcaacctgcaacctgtaccgacgctgaattccggcagatgtgggccgagtttgagtgggaaaataaagtgactgtgaacactaacatggtggatctgaatgattacctgcagcatatcttaaagagcacaaatatgaaatgccttacccccgaaaaagccctctccggctactgcggatttatggccgcaaatctgtacgcccgtagcatctttggcgaggacgccttggctaatgtctccatcgagaagcccatccatcagggtcctgacgccgccgtgaccggccacattagaattagggctaagtcccagggaatggcccttagcctgggcgacaagatcaacctaagtcagaaaaagacctctatttag

SEQ ID NO: 191288 - DNA, 2862 bp, Artificial Sequence
  derived and/or modified sequence
atgacagccgcagagaacgtttgctacacacttataaacgtgcccatggactctgagccccctagcgaaatctcgctgaaaaatgatctggaaaaaggggacgtgaagtcaaaaaccgaggccctcaagaaagtaatcatcatgatcctcaatggtgagaagctgcccggtctacttatgaccatcatcaggtttgttctcccactgcaggaccacactatcaagaaactgctcttggttttctgggagatagtacccaagactacgccagatgggcgactgctccacgagatgatacttgtgtgcgacgcctaccgaaaagacctacagcaccccaacgaattcatacggggaagcactctacgctttctttgtaagcttaaagaggcagaactgctggagcccttaatgcctgctatccgcgcatgcctggaacaccgacactcctacgtacgtaggaacgcagtcctagccatctatacaatctacagaaacttcgagcacctcatacccgatgctcctgagctgattcatgatttcctggtcaacgaaaaagatgcatcttgcaagcgaaacgcgtttatgatgctcatccacgccgaccaggacagagccctggattatctttcaacgtgcatagatcaggtacagaccttcggagacatcttgcaactcgtgatagtggaacttatttataaagtttgccacgccaatcccagcgaacgtgcccgttttattagatgtatttacaacctgcttcagagctctagtccagcggtgaagtacgaagcggctggcacacttgtgacattaagcagtgctccaacggcaataaaagccgctgcgcagtgctatattgatcttattatcaaggaatccgacaacaacgtaaagctgatagtcctcgaccgactcattgagctgaaagaacaccccgctcacgagagagtgctgcaggaccttgttatggatattttgcgagtcctgagtacccccgacctagaggtgagaaaaaaaacgcttcagctcgctctggatctggtatccagtcgcaatgtggaagagcttgtcattgttctgaagaaagaggtaatcaagaccaacaatgtgtccgaacacgaggacacagacaaatacaggcagctgctggttcgcaccctgcatagctgtagtgtgcggttcccagacatggccgctaatgtcatcccggttctcatggagttcctctctgacaataatgaagcagccgctgctgacgtcctggagttcgtccgtgaggctatacagcggttcgacaacttgagaatgctcatcgtcgagaaaatgctggaagtcttccacgcaatcaaaagtgttaagatctacagaggagccctgtggattctcggtgagtattgttccactaaggaggatattcaatccgttatgacagagattagaagaagtctcggcgagattccgatagtggaatccgagatcaagaaagaggccggagaacttaagcccgaggaggagattaccgttggaccagtacagaagctggtcacagagatggggacatatgctacgcaatcagctttgagttcttcaagacctacgaagaaggaggaggaccgacccccactgcgaggttttctcctggacggcgactttttcgtggctgccagtctggctacaacccttactaaaatcgcactgagatacgtcgccttggtccaggagaaaaaaaagcagaacagctttgtggccgaagctatgctgctgatggcgacgattttacatcttggtaagagtagtttgcctaagaagcctatcactgatgacgatgtggaccgaataagcctgtgtcttaaggtcctgtctgagtgtagcccccttatgaatgacatcttcaacaaggaatgcagacagtctctttctcacatgctgagtgccaaattggaagaggagaagctgtctcaaaaaaaggaatctgagaagaggaatgtgacagtacaacccgatgatcccatatcgttcatgcagctgacagccaaaaatgagatgaactgtaaggaggaccaatttcagctaagcttgcttgccgctatggggaacacccaacgaaaggaagccgctgatcccctcgccagcaagctcaataaggtgacacagctgacaggattcagcgacccagtttacgccgaggcttacgtgcacgtgaaccagtatgacatcgtactggacgtgctcgttgtcaatcagacatctgatactctccagaattgcactcttgaattggctacactgggagatctgaagcttgtggaaaagcccagccccctgaccctcgctccgcacgacttcgccaacatcaaagccaacgtgaaagttgcctctaccgagaatggcattatcttcggcaacatcgtttacgatgtgagcggcgcagcctctgatcgaaactgtgttgttctcagtgatattcacatcgacatcatggattatattcagccagccacttgcacagacgccgaattccggcaaatgtgggccgagtttgaatgggagaacaaggtgacagtaaataccaacatggtggacctgaatgactaccttcagcacatcctgaaatcaacgaatatgaaatgcctgacgcccgaaaaagccctgtccggctactgcggattcatggccgctaatctgtacgccaggtccatctttggcgaggatgctcttgccaacgtaagcattgagaagcctatacatcagggacccgacgccgctgtgactggacatattcgcattcgagctaagtcacaggggatggccctgagcctcggagataaaattaatctctctcagaaaaagacctctatatag

SEQ ID NO: 191289 - DNA, 2862 bp, Artificial Sequence
  derived and/or modified sequence
atgactgcagcggagaacgtgtgttatacgctgatcaatgtgccaatggattccgaacccccaagtgagatctccctcaagaacgacctggaaaagggtgatgtgaaatccaaaaccgaggcccttaagaaagttataatcatgatcctcaacggcgagaaactaccaggactcttgatgactatcatccgcttcgtcctcccccttcaggatcacaccatcaagaagctgctccttgtgttttgggaaatcgttccgaaaaccacaccagacggccgtcttctgcacgagatgatcctcgtatgcgatgcctatcgcaaggaccttcagcatcctaatgaattcatccggggaagcaccctgagattcctgtgtaagctaaaagaggcggagttactggaacctctaatgccagccatccgggcatgccttgagcacaggcactcctacgtccgacgaaacgcggtgcttgccatctacacaatatatcggaatttcgagcacctgatacctgatgcaccagagctgattcatgattttctggtaaatgaaaaagatgcaagctgtaaacggaatgcctttatgatgctgattcacgccgaccaggacagagcactcgactacctgagcacatgtattgaccaggtacagaccttcggcgacattctgcagctggtgatcgtcgagctgatctacaaggtatgtcatgccaatcccagtgagcgcgcaagattcattcggtgtatctacaatctgcttcagtccagctctccagctgttaagtacgaagccgctgggactctggtgaccctgagttccgcccctaccgcgattaaagctgcagctcagtgttatattgatctgatcatcaaggaatccgataataatgttaagctcatagtgctggataggctgattgagttgaaagagcatcctgcacatgaaagagtgctccaggatcttgtcatggatattctgcgggtgttgtctacccccgacctcgaggtgcgcaaaaagacacttcaactggcactggacctggtctcctctcgcaacgtcgaggagctggtgattgtattgaaaaaggaggtgattaaaactaacaatgtgagtgagcatgaggacactgataagtacagacagctccttgtgcggacactgcattcttgcagcgtgcgcttccctgatatggctgctaacgtgatacctgtgctcatggaatttctcagcgataacaacgaggcagccgctgccgatgtgctggaattcgttagggaagcaattcaaaggtttgacaatttaaggatgctgattgttgagaagatgctggaagtgttccatgcaattaagtctgtaaagatttatcggggtgcactctggattctgggggaatattgctctaccaaagaggatatccagtccgttatgacagagattcgtcgttccctaggcgagattccaattgtggaatctgaaatcaagaaggaggctggagagctgaaaccagaagaggagatcaccgtagggccagttcagaagttagtaaccgagatgggtacctatgctacgcaaagcgcactctcctcctctcgcccaaccaagaaagaggaagaccggcctccgctacggggttttctgctggatggcgattttttcgttgctgcctctttggctacaacactgacaaaaatcgcactgcggtacgtggcgctggtgcaggagaagaaaaagcagaatagtttcgtcgcagaggcgatgttattgatggccactatacttcacctgggcaaatcatccctgccaaagaagccaatcacagatgacgacgtggacaggatatcgttatgtcttaaagtgttgtcagagtgctcccccctaatgaatgacatttttaacaaggaatgccggcagagcttatcacacatgctctcggctaaattagaagaagaaaagctatcccagaagaaagagtctgagaagcggaacgtcacggtccagccggatgaccctatttcctttatgcagttaaccgcaaagaatgagatgaattgcaaggaggatcagtttcagctgtccctgctggcggctatggggaatacacagcgcaaggaagccgcagacccactcgcctccaaattgaataaagtgactcagttgaccggattcagcgaccctgtgtatgctgaggcctatgtccacgtgaatcaatacgacatcgtcctggatgtgttggtcgtgaaccaaacaagtgacacgttgcagaattgcaccttggagttagcaactctgggtgatttgaagttagtggaaaaaccatctccccttacactggccccacatgactttgccaatataaaggcaaacgtcaaggtggccagcaccgagaatggcatcatctttgggaacatagtctatgacgtatcaggagctgcatcggataggaactgtgtggtcctctctgacatccacatcgatattatggactacatacaaccggcaacttgcacagatgcagaatttaggcaaatgtgggcagaatttgaatgggagaacaaagtgactgtcaatacaaatatggtggacctgaacgactacctgcagcacatactcaagtccacaaacatgaagtgcctaaccccagaaaaggccctatctggttactgtgggtttatggcggctaacttatatgcccgttctattttcggggaagatgcccttgcaaatgtctccattgagaaacccattcaccagggaccggacgccgctgtaaccggacatatcagaataagagcaaaaagccagggcatggctctatctttgggagacaagattaacttgtctcagaagaaaacgtccatttag

SEQ ID NO: 191290 - DNA, 3481 bp, Artificial Sequence
  derived and/or modified sequence
agccaaggactctggagccgccgccgccgctgctgcggttcatagccggagtagacggagccgcagtagacggatccgcggctgcaccaaaccactgcccctcggagcctggtagtgggccacaagcccccagtcccagaggcgtggtgggtcgggcagagtcggaagaactggctttctagctggaagatgcggaaggggagcgactaggccgcttgcgtctgggcctggcagaagggaccggattttctggcatccttaaatcttgtgtcaaggattggttataatataaccagaaaccatgacggcggctgagaacgtatgctacacgttaattaacgtgccaatggattcagaaccaccatctgaaattagcttaaaaaatgatctagaaaaaggagatgtaaagtcaaagactgaagctttgaagaaagtaatcattatgattctgaatggtgaaaaacttcctggacttctgatgaccatcattcgttttgtgctacctcttcaggatcacactatcaagaaattacttctggtattttgggaaattgttcctaaaacaactccagatgggagacttttacatgagatgatccttgtatgtgatgcatacagaaaggatcttcaacatcctaatgaatttattcgaggatctactcttcgttttctttgcaaattgaaagaagcagaattgctagaacctttaatgccagctattcgtgcatgtttggagcatcgacacagctatgttagaagaaatgctgttttggccatctataccatctatagaaattttgaacatcttatacctgatgctcctgaactgatacatgattttctggtgaatgagaaggatgcaagttgcaaaaggaatgcatttatgatgctaattcatgcagatcaggatcgagctttggattacttaagtacttgcattgatcaagttcaaacatttggagacattctgcagctggttattgttgaactgatttataaggtctgtcatgctaatccatcagaaagagctcgttttattcgctgcatctataacttattacagtcatccagccctgctgtaaaatatgaagctgctgggacattagtgacactctctagtgcaccaactgcaatcaaggctgctgctcagtgttacattgatttaattattaaggagagcgacaacaatgtaaaactcatagttttggatcgcttgatagaattaaaagagcatcctgctcatgaacgagtactacaggatctggttatggatatcctaagagtattgagcacaccagacttagaagtacgaaagaaaactctgcagttagcactggatcttgtctcttctagaaatgttgaagagctggttattgtcctgaagaaggaagtgataaaaacaaataatgtgtctgagcatgaagatactgacaaatacagacaactcctagtgcgaacattgcattcctgttctgtccgatttccagatatggctgcaaatgttattcctgtgttaatggaatttctcagtgacaacaacgaagcagcagctgctgatgtcttggagtttgttcgtgaagccattcagcgctttgataacctgagaatgcttattgttgagaagatgcttgaagtctttcatgctattaaatctgtcaagatttaccgaggagcattatggatcctgggagaatactgtagtaccaaggaagacattcagagtgtgatgactgagatccgcaggtcccttggagagatcccaattgtagagtcagaaataaagaaagaagctggtgaattaaaacctgaagaagaaataactgtagggccagttcagaaattggttactgaaatgggtacctatgcaactcagagtgcccttagcagttctagacccaccaagaaagaggaagacagacctcccttgagaggattccttctggatggagatttctttgttgctgcctcccttgccacaactctgaccaagattgcattgcgctatgtagctttggttcaggagaagaaaaagcaaaattcttttgttgctgaggctatgttgctcatggctactatcctgcatttgggaaaatcctctcttcctaagaagccaattactgatgatgatgtggatcgaatttccctgtgcctcaaggtcttgtctgaatgttcacctttaatgaatgacattttcaataaggaatgcagacagtccctttctcacatgttatctgctaaactagaagaagagaaattatcccaaaagaaagaatctgaaaagaggaatgtgacagtacagcctgatgaccccatttccttcatgcaactaactgctaagaatgaaatgaactgcaaggaagatcagtttcagctgagtttactggcagcaatgggtaacacacagaggaaagaggcagcagatcccctagcatctaaacttaacaaggtcacccaattgacaggtttctcagatcctgtatatgcagaagcttacgttcatgtcaaccaatatgatattgtcctggatgtacttgttgtgaaccaaaccagtgatactttgcagaattgcacattagaactagctacactaggggatctgaaacttgtggaaaagccgtctcctttgactcttgctcctcatgacttcgcaaatattaaagctaacgtcaaagtagcatcaacagaaaatggaataatttttggtaatatagtttatgatgtctctggagcagcaagtgacagaaattgtgtggttctcagtgatattcacatcgacatcatggactatatccagcctgcaacttgcactgatgcagaattccgtcagatgtgggccgaatttgaatgggaaaacaaagtgacagttaacaccaacatggttgatttaaatgactacttacagcacatattaaagtcaaccaatatgaaatgcctgactccagaaaaggccctttctggttactgtggctttatggcagccaacctttatgctcgttccatatttggtgaagatgcacttgcaaatgtcagcattgagaagccaattcaccagggaccagatgctgctgttaccggccatataagaattcgtgcaaagagccagggaatggccttaagtcttggagataaaatcaacttgtcacagaagaaaactagtatataaaaataaacaaaaagtccttgaagctttacagttaatttaggtatgggcttactggactccaacatcttttgtactctttcatgcttatatagaatctgagttcatgctgaatacttttcagccaataatttatagcctttcccttaaatcaagattgagtttaaaattatagtttgtcttttgtcttaacagttctgaatgctgtcctcaaagtatataatgtttcatgtaccaagacccttttcacagtacaataaacagatctattcataaatttttgttattttataaataaatgattacataattttagttata

SEQ ID NO: 191291 - DNA, 3382 bp, Artificial Sequence
  derived and/or modified sequence
aggtggctgtggcttcggtcgttaccccacccccttccacgtcagccaaggactctggagccgccgccgccgctgctgcggttcatagccggagtagacggagccgcagtagacggatccgcggctgcaccaaaccactgcccctcggagcctggtagtgggccacaagcccccagtcccagaggcgtgattttctggcatccttaaatcttgtgtcaaggattggttataatataaccagaaaccatgacggcggctgagaacgtatgctacacgttaattaacgtgccaatggattcagaaccaccatctgaaattagcttaaaaaatgatctagaaaaaggagatgtaaagtcaaagactgaagctttgaagaaagtaatcattatgattctgaatggtgaaaaacttcctggacttctgatgaccatcattcgttttgtgctacctcttcaggatcacactatcaagaaattacttctggtattttgggaaattgttcctaaaacaactccagatgggagacttttacatgagatgatccttgtatgtgatgcatacagaaaggatcttcaacatcctaatgaatttattcgaggatctactcttcgttttctttgcaaattgaaagaagcagaattgctagaacctttaatgccagctattcgtgcatgtttggagcatcgacacagctatgttagaagaaatgctgttttggccatctataccatctatagaaattttgaacatcttatacctgatgctcctgaactgatacatgattttctggtgaatgagaaggatgcaagttgcaaaaggaatgcatttatgatgctaattcatgcagatcaggatcgagctttggattacttaagtacttgcattgatcaagttcaaacatttggagacattctgcagctggttattgttgaactgatttataaggtctgtcatgctaatccatcagaaagagctcgttttattcgctgcatctataacttattacagtcatccagccctgctgtaaaatatgaagctgctgggacattagtgacactctctagtgcaccaactgcaatcaaggctgctgctcagtgttacattgatttaattattaaggagagcgacaacaatgtaaaactcatagttttggatcgcttgatagaattaaaagagcatcctgctcatgaacgagtactacaggatctggttatggatatcctaagagtattgagcacaccagacttagaagtacgaaagaaaactctgcagttagcactggatcttgtctcttctagaaatgttgaagagctggttattgtcctgaagaaggaagtgataaaaacaaataatgtgtctgagcatgaagatactgacaaatacagacaactcctagtgcgaacattgcattcctgttctgtccgatttccagatatggctgcaaatgttattcctgtgttaatggaatttctcagtgacaacaacgaagcagcagctgctgatgtcttggagtttgttcgtgaagccattcagcgctttgataacctgagaatgcttattgttgagaagatgcttgaagtctttcatgctattaaatctgtcaagatttaccgaggagcattatggatcctgggagaatactgtagtaccaaggaagacattcagagtgtgatgactgagatccgcaggtcccttggagagatcccaattgtagagtcagaaataaagaaagaagctggtgaattaaaacctgaagaagaaataactgtagggccagttcagaaattggttactgaaatgggtacctatgcaactcagagtgcccttagcagttctagacccaccaagaaagaggaagacagacctcccttgagaggattccttctggatggagatttctttgttgctgcctcccttgccacaactctgaccaagattgcattgcgctatgtagctttggttcaggagaagaaaaagcaaaattcttttgttgctgaggctatgttgctcatggctactatcctgcatttgggaaaatcctctcttcctaagaagccaattactgatgatgatgtggatcgaatttccctgtgcctcaaggtcttgtctgaatgttcacctttaatgaatgacattttcaataaggaatgcagacagtccctttctcacatgttatctgctaaactagaagaagagaaattatcccaaaagaaagaatctgaaaagaggaatgtgacagtacagcctgatgaccccatttccttcatgcaactaactgctaagaatgaaatgaactgcaaggaagatcagtttcagctgagtttactggcagcaatgggtaacacacagaggaaagaggcagcagatcccctagcatctaaacttaacaaggtcacccaattgacaggtttctcagatcctgtatatgcagaagcttacgttcatgtcaaccaatatgatattgtcctggatgtacttgttgtgaaccaaaccagtgatactttgcagaattgcacattagaactagctacactaggggatctgaaacttgtggaaaagccgtctcctttgactcttgctcctcatgacttcgcaaatattaaagctaacgtcaaagtagcatcaacagaaaatggaataatttttggtaatatagtttatgatgtctctggagcagcaagtgacagaaattgtgtggttctcagtgatattcacatcgacatcatggactatatccagcctgcaacttgcactgatgcagaattccgtcagatgtgggccgaatttgaatgggaaaacaaagtgacagttaacaccaacatggttgatttaaatgactacttacagcacatattaaagtcaaccaatatgaaatgcctgactccagaaaaggccctttctggttactgtggctttatggcagccaacctttatgctcgttccatatttggtgaagatgcacttgcaaatgtcagcattgagaagccaattcaccagggaccagatgctgctgttaccggccatataagaattcgtgcaaagagccagggaatggccttaagtcttggagataaaatcaacttgtcacagaagaaaactagtatataaaaataaacaaaaagtccttgaagctttacagttaatttaggtatgggcttactggactccaacatcttttgtactctttcatgcttatatagaatctgagttcatgctgaatacttttcagccaataatttatagcctttcccttaaatcaagattgagtttaaaattatagtttgtcttttgtcttaacagttctgaatgctgtcctcaaagtatataatgtttcatgtaccaagacccttttcacagtacaataaacagatctattcataaa

SEQ ID NO: 191292 - DNA, 2862 bp, Artificial Sequence
  derived and/or modified sequence
atgaccgccgccgagaacgtgtgctacaccctgatcaacgtgcccatggacagcgagccccccagcgagatcagcctgaagaacgacctggagaagggcgacgtgaagagcaagaccgaggccctgaagaaggtgatcatcatgatcctgaacggcgagaagctgcccggcctgctgatgaccatcatcagattcgtgctgcccctgcaggaccacaccatcaagaagctgctgctggtgttctgggagatcgtgcccaagaccacccccgacggcagactgctgcacgagatgatcctggtgtgcgacgcctacagaaaggacctgcagcaccccaacgagttcatcagaggcagcaccctgagattcctgtgcaagctgaaggaggccgagctgctggagcccctgatgcccgccatcagagcctgcctggagcacagacacagctacgtgagaagaaacgccgtgctggccatctacaccatctacagaaacttcgagcacctgatccccgacgcccccgagctgatccacgacttcctggtgaacgagaaggacgccagctgcaagagaaacgccttcatgatgctgatccacgccgaccaggacagagccctggactacctgagcacctgcatcgaccaggtgcagaccttcggcgacatcctgcagctggtgatcgtggagctgatctacaaggtgtgccacgccaaccccagcgagagagccagattcatcagatgcatctacaacctgctgcagagcagcagccccgccgtgaagtacgaggccgccggcaccctggtgaccctgagcagcgcccccaccgccatcaaggccgccgcccagtgctacatcgacctgatcatcaaggagagcgacaacaacgtgaagctgatcgtgctggacagactgatcgagctgaaggagcaccccgcccacgagagagtgctgcaggacctggtgatggacatcctgagagtgctgagcacccccgacctggaggtgagaaagaagaccctgcagctggccctggacctggtgagcagcagaaacgtggaggagctggtgatcgtgctgaagaaggaggtgatcaagaccaacaacgtgagcgagcacgaggacaccgacaagtacagacagctgctggtgagaaccctgcacagctgcagcgtgagattccccgacatggccgccaacgtgatccccgtgctgatggagttcctgagcgacaacaacgaggccgccgccgccgacgtgctggagttcgtgagagaggccatccagagattcgacaacctgagaatgctgatcgtggagaagatgctggaggtgttccacgccatcaagagcgtgaagatctacagaggcgccctgtggatcctgggcgagtactgcagcaccaaggaggacatccagagcgtgatgaccgagatcagaagaagcctgggcgagatccccatcgtggagagcgagatcaagaaggaggccggcgagctgaagcccgaggaggagatcaccgtgggccccgtgcagaagctggtgaccgagatgggcacctacgccacccagagcgccctgagcagcagcagacccaccaagaaggaggaggacagaccccccctgagaggcttcctgctggacggcgacttcttcgtggccgccagcctggccaccaccctgaccaagatcgccctgagatacgtggccctggtgcaggagaagaagaagcagaacagcttcgtggccgaggccatgctgctgatggccaccatcctgcacctgggcaagagcagcctgcccaagaagcccatcaccgacgacgacgtggacagaatcagcctgtgcctgaaggtgctgagcgagtgcagccccctgatgaacgacatcttcaacaaggagtgcagacagagcctgagccacatgctgagcgccaagctggaggaggagaagctgagccagaagaaggagagcgagaagagaaacgtgaccgtgcagcccgacgaccccatcagcttcatgcagctgaccgccaagaacgagatgaactgcaaggaggaccagttccagctgagcctgctggccgccatgggcaacacccagagaaaggaggccgccgaccccctggccagcaagctgaacaaggtgacccagctgaccggcttcagcgaccccgtgtacgccgaggcctacgtgcacgtgaaccagtacgacatcgtgctggacgtgctggtggtgaaccagaccagcgacaccctgcagaactgcaccctggagctggccaccctgggcgacctgaagctggtggagaagcccagccccctgaccctggccccccacgacttcgccaacatcaaggccaacgtgaaggtggccagcaccgagaacggcatcatcttcggcaacatcgtgtacgacgtgagcggcgccgccagcgacagaaactgcgtggtgctgagcgacatccacatcgacatcatggactacatccagcccgccacctgcaccgacgccgagttcagacagatgtgggccgagttcgagtgggagaacaaggtgaccgtgaacaccaacatggtggacctgaacgactacctgcagcacatcctgaagagcaccaacatgaagtgcctgacccccgagaaggccctgagcggctactgcggcttcatggccgccaacctgtacgccagaagcatcttcggcgaggacgccctggccaacgtgagcatcgagaagcccatccaccagggccccgacgccgccgtgaccggccacatcagaatcagagccaagagccagggcatggccctgagcctgggcgacaagatcaacctgagccagaagaagaccagcatctag

SEQ ID NO: 191293 - protein, 664 aa, Artificial Sequence
  derived and/or modified sequence
MPYLYRAPGPQAHPVPKDARITHSSGQSFEQMRQECLQRGTLFEDADFPASNSSLFYSERPQIPFVWKRPGEIVKNPEFILGGATRTDICQGELGDCWLLAAIASLTLNQKALARVIPQDQSFGPGYAGIFHFQFWQHSEWLDVVIDDRLPTFRDRLVFLHSADHNEFWSALLEKAYAKLNGSYEALKGGSAIEAMEDFTGGVAETFQTKEAPENFYEILEKALKRGSLLGCFIDTRSAAESEARTPFGLIKGHAYSVTGIDQVSFRGQRIELIRIRNPWGQVEWNGSWSDRMAFKDFKAHFDKVEICNLTPDALEEDAIHKWEVTVHQGSWVRGSTAGGCRNFLDTFWTNPQIKLSLTEKDEGQEECSFLVALMQKDRRKLKRFGANVLTIGYAIYECPDKDEHLNKDFFRYHASRARSKTFINLREVSDRFKLPPGEYILIPSTFEPHQEADFCLRIFSEKKAITRDMDGNVDIDLPEPPKPTPPDQETEEEQRFRALFEQVAGEDMEVTAEELEYVLNAVLQKKKDIKFKKLSLISCKNIISLMDTSGNGKLEFDEFKVFWDKLKQWINLFLRFDADKSGTMSTYELRTALKAAGFQLSSHLLQLIVLRYADEELQLDFDDFLNCLVRLENASRVFQALSTKNKEFIHLNINEFIHLTMNI

SEQ ID NO: 191294 - DNA, 1995 bp, Artificial Sequence
  derived and/or modified sequence
atgccttatctctacagagctcctggccctcaggctcatccagtcccaaaggatgcccggataactcacagcagcggccaatcgttcgagcagatgagacaggagtgcctgcagcgcggtactttatttgaggatgctgattttccggcctccaactcttcattattttactcagagaggccacagatcccgttcgtatggaagcgccccggcgagattgtgaaaaaccccgagtttatcctcggaggcgctacaaggacagatatttgtcagggagagctgggtgactgttggctgctggcagccattgcaagcctcaccctcaatcagaaagccctggcacgtgtgatcccacaggaccagagttttggtcccggctacgctgggatctttcactttcaattctggcagcactcagagtggttggatgtagtgatcgacgatcgcctcccaactttcagggaccgactggtctttctgcatagtgccgaccacaacgagttttggagtgcccttctggagaaggcttatgccaaactgaatgggtcttatgaggctcttaagggcggatcggcaatcgaggcgatggaagatttcacaggcggcgtggccgagacatttcagactaaagaggcgcccgagaatttctacgaaattctggaaaaagcccttaagagaggttcactgctagggtgtttcattgatacgcgctcagcagccgaatctgaggccaggacaccgtttggtctgattaaaggccacgcttactccgtcactggaatcgaccaagtgtcatttagaggacaacggatagagttgatcagaatcagaaatccttggggccaggtggaatggaacgggtcgtggtctgatcgtatggcatttaaggatttcaaagcccacttcgacaaagttgagatctgcaacctgaccccagatgcgctggaagaggatgcaattcacaagtgggaggtgacagtgcaccagggttcttgggtcagagggagtactgcaggtgggtgtaggaacttcctggacactttttggacaaacccccaaattaaattatcgctgaccgagaaagatgaagggcaggaagagtgcagttttttggtcgcgctgatgcagaaggaccgccgcaaactaaaaagattcggggctaatgtgctgacgatcggatacgccatttatgagtgccccgacaaggatgaacacttgaataaggacttcttccgctaccatgcttccagggcccgcagcaaaacattcatcaacctcagagaagtgagcgaccggtttaagctgccacccggagagtacatcctcatcccaagcacctttgaaccccatcaggaagctgacttctgtttgcgaatcttcagcgagaagaaggccataacccgcgatatggacggcaatgtagacatcgaccttccggagccccctaagccgacaccacccgaccaggagaccgaagaggaacagcggttcagagctctttttgagcaggtggctggagaagatatggaggtgaccgccgaagaactcgaatacgtccttaacgctgtcctccagaaaaagaaagatattaaatttaaaaaactctccctgatttcatgcaaaaatataattagcctgatggacacatctggtaacgggaaactcgaattcgatgagttcaaagtgttttgggacaagcttaaacagtggatcaacttgttcttgagattcgacgctgataaatccggcactatgtccacttatgagttgaggacagcactgaaggctgccggcttccagctgtctagccatcttctgcagctgatcgtcctaaggtatgctgatgaggagctccagctggactttgatgactttctcaactgtctggtgcgcctggagaacgcttcccgggtgttccaagcactttctacgaagaacaaagagtttatccacttgaatatcaatgaatttatccatctgaccatgaacatttag

SEQ ID NO: 191295 - DNA, 1995 bp, Artificial Sequence
  derived and/or modified sequence
atgccctacctgtaccgggcccctggcccccaggcccaccctgtgcccaaggatgcccgcatcacccacagcagcggccagagctttgagcagatgaggcaggagtgcctgcagaggggcaccctgtttgaagatgctgacttccctgccagcaacagcagcctcttctacagcgagcggccccagatcccctttgtgtggaagaggcctggagaaattgtgaagaaccctgagttcatcctgggcggggccaccaggacagacatctgccagggcgagctgggggactgctggctgctggccgccatcgccagcctgaccctgaaccagaaggccctggcccgggtcatcccccaggaccagagctttggacctggctacgccggcatcttccacttccagttctggcagcacagcgagtggctggatgtggtgattgatgaccggctgcccaccttccgggaccggctggtgttcctgcacagcgctgaccacaatgagttctggagcgccctgctggagaaggcctatgccaagctgaatggcagctatgaggccctgaagggcggcagcgccatcgaggccatggaggacttcaccggcggcgtggccgagaccttccagaccaaggaggcccctgagaacttctatgagatcctggagaaggccctgaagaggggcagcctgctgggctgcttcatcgacaccaggtctgctgctgagagcgaggcccggacccccttcggcctcatcaagggccacgcctacagcgtgactggaattgaccaggtgtccttccggggccagagaattgagctgatccgcatccggaacccctggggccaggtggagtggaatggctcctggagcgacaggatggccttcaaggacttcaaggcccactttgacaaggtggagatctgcaacctgaccccagatgccctggaggaggatgccatccacaagtgggaggtgacagtgcaccagggctcctgggtgcggggcagcacagctgggggctgcaggaacttcctggacaccttctggaccaacccccagatcaagctgagcctgacagagaaggatgagggccaggaggagtgcagcttcctggtggccctgatgcagaaggacaggaggaagctgaagagatttggagccaacgtgctgaccatcggctacgccatctatgagtgcccagacaaggatgagcacctgaacaaggacttcttccgctaccacgccagccgggcccggagcaagaccttcatcaacctgcgggaggtgtctgaccgcttcaagctgcccccaggagagtacatcctgatccccagcacctttgagccccaccaggaggccgacttctgcctgcgcatcttcagcgagaagaaggccatcacccgggacatggatggaaatgtggacatcgacctgcctgagccccccaagcccaccccaccagaccaggagacagaggaggagcagcgcttccgggccctgtttgagcaggtggccggggaggacatggaggtgacagctgaggagctggagtatgtgctgaatgctgtgctgcagaagaagaaggacatcaagttcaagaagctgagcctcatcagctgcaagaacatcatcagcctgatggacaccagcggaaatggcaagctggagtttgatgagttcaaggtgttctgggacaagctgaagcagtggatcaacctcttcctgcgctttgatgctgacaagagcggcaccatgagcacctatgagctgaggacagccctgaaggctgctggcttccagctgagcagccacctgctgcagctgattgtgctgcgctatgcagatgaggagctgcagctggactttgatgacttcctgaactgcctggtgcggctggagaatgccagcagggtcttccaggccctgagcaccaagaacaaggagttcatccacctgaacatcaatgagttcatccacctgaccatgaacatctag

SEQ ID NO: 191296 - DNA, 1995 bp, Artificial Sequence
  derived and/or modified sequence
atgccctacctgtaccgggcccccggcccccaggcccaccccgtgccaaaggacgctagaattacccattcctcgggccaatcatttgagcaaatgagacaggagtgcctccagcgcggtactcttttcgaggacgctgacttccctgcctccaatagttccttattctacagcgagcgcccccagatcccttttgtatggaagcgacctggcgagatcgtcaaaaacccagagttcatattgggcggcgctacaagaaccgatatctgccagggtgaacttggcgactgctggctacttgccgccatcgcttccctcacattgaaccaaaaagcacttgcccgcgtgattcctcaagaccagtcctttggccccggatacgcaggcattttccattttcagttctggcagcattcagagtggctcgacgtggtcattgacgaccggttaccaaccttccgggataggcttgttttcttacactctgcagaccataacgagttttggagcgctctacttgagaaagcctacgccaagctaaatgggtcgtacgaggcgctgaaggggggcagtgcaatcgaggctatggaagatttcactggaggagttgcagaaacttttcaaaccaaagaagcaccagagaatttctacgagatactcgagaaggctctaaaaaggggctctttactggggtgtttcattgatactaggagcgcagcggaaagcgaggcaagaacccctttcggcttgatcaaggggcatgcatattccgtcaccggcatcgaccaggttagcttccgtggccaacggatcgagttgatccgaattaggaacccgtggggacaggtagagtggaatgggagctggagcgaccgcatggccttcaaagacttcaaggcccattttgataaagttgaaatctgcaatctcacccctgatgcactggaagaagatgccattcacaagtgggaggtgactgtgcatcaggggtcttgggtgagaggctcaactgctggaggatgcaggaattttttggacacgttttggactaatccccagatcaagctctctttaaccgaaaaggatgaagggcaggaggaatgttctttcctcgtggcccttatgcagaaggacaggcgaaaacttaagaggttcggcgcaaatgtattgactattggctacgctatctacgaatgccccgataaagacgagcatcttaataaagacttctttaggtaccatgcatcgagggcccgaagtaagacgttcatcaacctgcgggaagtatccgatcgttttaagctccctcctggagaatacatcctcattccatccacctttgagcctcatcaggaggctgacttttgcttgaggattttttccgagaagaaggcgatcactagggatatggacggtaacgtggatatagatctgccggagccccctaaaccaactccacccgaccaggagacggaagaagagcaacggtttcgcgccttgttcgaacaggtagctggcgaagacatggaggtgactgccgaggagctggagtatgttctgaacgctgtcctgcagaagaagaaagacattaaattcaagaagctcagtcttatctcctgcaaaaacattatttctctcatggatactagtggtaacgggaaactggaatttgatgagtttaaagtattctgggacaagctgaaacagtggatcaacctattcctccgcttcgatgcggacaaatctggtactatgagcacatacgaactacggacagccctaaaagccgccgggtttcagcttagctctcatctattacaactcattgtgctccgatatgcagacgaggaactgcaactcgatttcgacgactttctgaactgtttggtgcgcctggaaaatgcctccagagtgtttcaggctctaagtactaagaacaaagagttcatacacctgaacatcaacgagtttatccacttgactatgaacatctag

SEQ ID NO: 191297 - DNA, 1995 bp, Artificial Sequence
  derived and/or modified sequence
atgccttatctttatagagcacctgggccacaggcccatcctgttccaaaggacgctcggattacccactcctctggccagagctttgaacagatgcggcaggagtgtttgcaacgtggaacgctgtttgaggacgcggatttcccagcatccaatagctcacttttttacagtgaaagacctcagatcccttttgtgtggaagaggccgggagagatcgtcaaaaacccggagtttattttaggtggagctacgaggacggatatctgccagggggagttgggcgattgttggctccttgccgcaattgcgagcttgacgctgaatcagaaggccctggcgcgtgttatccctcaagaccagtcattcggcccaggctacgcaggtattttccatttccaattctggcagcattccgagtggctcgatgttgtgattgacgatcgcctgccaacgttccgcgacagactggtgttccttcattcagcggatcataatgaattctggtcagctctgcttgaaaaagcctatgccaagctcaatggctcatacgaggccctcaaggggggatcagcaatagaggccatggaggactttaccggaggggtcgctgagacattccaaacgaaagaagcgccagagaatttttacgagattctggagaaagccctcaagaggggaagtctgctaggatgctttattgatacgcgtagtgcggctgagtcagaagcacgcaccccttttggcctaatcaaggggcacgcatatagtgtgacaggtatcgatcaggtgagtttcaggggacagagaatcgagttaatccggatacggaatccgtggggtcaggttgagtggaacggtagttggtccgacagaatggctttcaaggatttcaaagcccatttcgacaaagtcgagatttgcaatctgacaccagacgctctggaggaggatgctatacataagtgggaagttacagttcaccagggatcctgggtgcgcggatctacagcagggggatgtagaaatttcctggacacattctggactaacccccaaataaaactctctctgaccgagaaggatgaggggcaggaagaatgtagcttcctcgtggccctaatgcagaaggaccgcagaaagctgaagcgatttggcgctaacgtgctcacaatagggtacgctatctacgaatgcccggacaaggacgagcatttaaacaaggattttttcaggtaccatgcgagcagagcgaggtcaaaaacattcattaacctgcgggaagtgtccgacagatttaagctgccaccaggcgaatatattttaattcctagcacttttgaaccacatcaagaggcggacttctgtttgaggatcttcagcgagaagaaggctattacccgtgacatggacggaaatgtggatatagacctcccagaaccacctaagccaaccccccctgatcaggaaacggaggaggaacaacgattccgtgccctcttcgagcaggtcgccggagaggatatggaggttacagccgaagagcttgagtatgtcttaaatgccgtgcttcagaaaaaaaaggacattaagtttaaaaagctctccctgatcagttgcaaaaatattattagcctcatggacactagcggtaacgggaagctcgagttcgatgaattcaaggtgttttgggacaagttgaagcagtggattaacctgttcttgagattcgatgccgacaaatcaggcacaatgagcacctacgaattaagaacagccttgaaggcagcaggcttccagctgtctagccatttgctgcagctcattgtgctgcggtatgcagatgaggagctgcagctggactttgatgacttccttaactgcctagtgcggctcgagaacgcttcccgggtgtttcaagcactgagcaccaagaataaggaattcatccacctcaatatcaacgagtttatccatctgactatgaatatctag

SEQ ID NO: 191298 - DNA, 2484 bp, Artificial Sequence
  derived and/or modified sequence
tcttgaccggcacacacagctcgcttcttcactttcttttccatccactgccggacccaagccagccttccagggagcagccatgccttacctctaccgggccccagggcctcaggcacacccggttcccaaggacgcccggatcacccactcctcaggccagagctttgagcaaatgaggcaggagtgcctgcagagaggcaccctgtttgaggatgcagacttcccagccagcaattcctccctgttctacagtgagaggccgcagatcccctttgtgtggaaacgaccaggggaaatcgtgaaaaacccagaattcattcttggaggggccaccaggactgatatctgccagggagagctgggagactgctggctattagccgccatcgcctcccttacgcttaatcaaaaagcactggccagagtcatcccccaggaccaaagctttggccctggttatgccgggatattccatttccagttctggcagcacagtgagtggctggacgtggtgatcgatgaccgcctgcccaccttcagggaccgcttggttttcctccactctgccgaccacaacgagttctggagcgccttgctggaaaaagcctacgccaagctaaatgggagctatgaagctctgaagggaggcagcgccatcgaggccatggaagacttcactgggggtgtggcagagaccttccaaactaaagaggcccccgagaacttctatgagattctagagaaggctttgaagagaggctccctgctgggctgcttcattgataccagaagtgctgcagaatctgaggcccggacgccgtttggtcttattaagggtcatgcctacagtgtaacgggaattgaccaggtaagcttccgaggccagagaatcgagctcatccgaatccggaacccttggggccaggttgagtggaacgggtcgtggagcgacaggatggcatttaaggacttcaaggcccactttgataaagtggagatctgcaacctcactcccgatgccctggaggaagacgcgatccacaaatgggaggtgacggtccatcagggaagctgggttcgcggctccacggctgggggctgccgcaatttcctggataccttttggaccaatccacaaataaaattgtctctgactgagaaagatgaggggcaggaggagtgtagtttccttgtagccctgatgcagaaagatagaaggaaactcaagagatttggtgccaatgtgctgacaatcggctatgccatttatgagtgccctgacaaagacgaacacctgaacaaagacttcttcagataccacgcttctcgggccagaagcaagacgttcatcaacctgagagaagtctccgaccggttcaagctgccccctggggagtacatcctgattcccagcacttttgagccccaccaggaagctgatttctgtctgagaatcttttcagagaaaaaagccattacccgggatatggatggaaatgtagacattgaccttcctgagcctccaaagccaactccacctgaccaggagacagaggaggagcagcggtttcgggctctgtttgaacaagtcgctggtgaggacatggaggtgacagcagaggaacttgagtatgttttaaatgctgtgctgcaaaagaaaaaggacatcaaattcaagaagctaagcctgatctcctgtaaaaacatcatttccctgatggacaccagcggcaatgggaagctggagtttgatgaattcaaagtgttctgggacaagctgaagcagtggattaaccttttccttcggtttgatgctgacaagtccggcaccatgtctacctatgaactacggactgcactgaaagctgcaggctttcagctgagcagccacctcctgcagctgattgtgctcaggtatgcggatgaggagctccagctggacttcgatgacttcctcaactgcctggtccggctggagaatgcgagccgggtgttccaggctctcagtacaaagaacaaggagttcattcatctcaatataaatgagttcatccatttgacaatgaacatctgaggctgccttgtagagatgcagcctgcccagctgaatcttggcttctggaccttgaccttcagaacttctcttggtgtggaaccattacgcccagggttcactcccctctcatcgtccggccttctcccttcatcttgatctgggaagaatgaaatgaactcagctacactctctgattttgtgctactcctttgtaaagtcactgccttaagggggctgatggcgccacctgtgccttacatccaggttcaggcatcactagctttcccacactctactttccttatttccttccattaagaattactcagagttctaacgcacagaatcctgacttccatgtagctccagtcattgtgatcagacatcctttataaaacatgtttttataaatgtgtatgtggaat

SEQ ID NO: 191299 - DNA, 1995 bp, Artificial Sequence
  derived and/or modified sequence
atgccctacctgtacagagcccccggcccccaggcccaccccgtgcccaaggacgccagaatcacccacagcagcggccagagcttcgagcagatgagacaggagtgcctgcagagaggcaccctgttcgaggacgccgacttccccgccagcaacagcagcctgttctacagcgagagaccccagatccccttcgtgtggaagagacccggcgagatcgtgaagaaccccgagttcatcctgggcggcgccaccagaaccgacatctgccagggcgagctgggcgactgctggctgctggccgccatcgccagcctgaccctgaaccagaaggccctggccagagtgatcccccaggaccagagcttcggccccggctacgccggcatcttccacttccagttctggcagcacagcgagtggctggacgtggtgatcgacgacagactgcccaccttcagagacagactggtgttcctgcacagcgccgaccacaacgagttctggagcgccctgctggagaaggcctacgccaagctgaacggcagctacgaggccctgaagggcggcagcgccatcgaggccatggaggacttcaccggcggcgtggccgagaccttccagaccaaggaggcccccgagaacttctacgagatcctggagaaggccctgaagagaggcagcctgctgggctgcttcatcgacaccagaagcgccgccgagagcgaggccagaacccccttcggcctgatcaagggccacgcctacagcgtgaccggcatcgaccaggtgagcttcagaggccagagaatcgagctgatcagaatcagaaacccctggggccaggtggagtggaacggcagctggagcgacagaatggccttcaaggacttcaaggcccacttcgacaaggtggagatctgcaacctgacccccgacgccctggaggaggacgccatccacaagtgggaggtgaccgtgcaccagggcagctgggtgagaggcagcaccgccggcggctgcagaaacttcctggacaccttctggaccaacccccagatcaagctgagcctgaccgagaaggacgagggccaggaggagtgcagcttcctggtggccctgatgcagaaggacagaagaaagctgaagagattcggcgccaacgtgctgaccatcggctacgccatctacgagtgccccgacaaggacgagcacctgaacaaggacttcttcagataccacgccagcagagccagaagcaagaccttcatcaacctgagagaggtgagcgacagattcaagctgccccccggcgagtacatcctgatccccagcaccttcgagccccaccaggaggccgacttctgcctgagaatcttcagcgagaagaaggccatcaccagagacatggacggcaacgtggacatcgacctgcccgagccccccaagcccaccccccccgaccaggagaccgaggaggagcagagattcagagccctgttcgagcaggtggccggcgaggacatggaggtgaccgccgaggagctggagtacgtgctgaacgccgtgctgcagaagaagaaggacatcaagttcaagaagctgagcctgatcagctgcaagaacatcatcagcctgatggacaccagcggcaacggcaagctggagttcgacgagttcaaggtgttctgggacaagctgaagcagtggatcaacctgttcctgagattcgacgccgacaagagcggcaccatgagcacctacgagctgagaaccgccctgaaggccgccggcttccagctgagcagccacctgctgcagctgatcgtgctgagatacgccgacgaggagctgcagctggacttcgacgacttcctgaactgcctggtgagactggagaacgccagcagagtgttccaggccctgagcaccaagaacaaggagttcatccacctgaacatcaacgagttcatccacctgaccatgaacatctag

SEQ ID NO: 191300 - protein, 722 aa, Artificial Sequence
  derived and/or modified sequence
MYRALYAFRSAEPNALAFAAGETFLVLERSSAHWWLAARARSGETGYVPPAYLRRLQGLEQDVLQAIDRAIEAVHNTAMRDGGKYSLEQRGVLQKLIHHRKETLSRRGPSASSVAVMTSSTSDHHLDAAAARQPNGVCRAGFERQHSLPSSEHLGADGGLYQIPLPSSQIPPQPRRAAPTTPPPPVKRRDREALMASGSGGHNTMPSGGNSVSSGSSVSSTSLDTLYTSSSPSEPGSSCSPTPPPVPRRGTHTTVSQVQPPPSKASAPEPPAEEEVATGTTSASDDLEALGTLSLGTTEEKAAAEAAVPRTIGAELMELVRRNTGLSHELCRVAIGIIVGHIQASVPASSPVMEQVLLSLVEGKDLSMALPSGQVCHDQQRLEVIFADLARRKDDAQQRSWALYEDEGVIRCYLEELLHILTDADPEVCKKMCKRNEFESVLALVAYYQMEHRASLRLLLLKCFGAMCSLDAAIISTLVSSVLPVELARDMQTDTQDHQKLCYSALILAMVFSMGEAVPYAHYEHLGTPFAQFLLNIVEDGLPLDTTEQLPDLCVNLLLALNLHLPAADQNVIMAALSKHANVKIFSEKLLLLLNRGDDPVRIFKHEPQPPHSVLKFLQDVFGSPATAAIFYHTDMMALIDITVRHIADLSPGDKLRMEYLSLMHAIVRTTPYLQHRHRLPDLQAILRRILNEEETSPQCQMDRMIVREMCKEFLVLGEAPS

SEQ ID NO: 191301 - protein, 722 aa, Artificial Sequence
  derived and/or modified sequence
MYRALYAFRSAEPNALAFAAGETFLVLERSSAHWWLAARARSGETGYVPPAYLRRLQGLEQDVLQAIDRAIEAVHNTAMRDGGKYSLEQRGVLQKLIHHRKETLSRRGPSASSVAVMTSSTSDHHLDAAAARQPNGVCRAGFERQHSLPSSEHLGADGGLYQIPLPSSQIPPQPRRAAPTTPPPPVKRRDREALMASGSGGHNTMPSGGNSVSSGSSVSSTSLDTLYTSSSPSEPGSSCSPTPPPVPRRGTHTTVSQVQPPPSKASAPEPPAEEEVATGTTSASDDLEALGTLSLGTTEEKAAAEAAVPRTIGAELMELVRRNTGLSHELCRVAIGIIVGHIQASVPASSPVMEQVLLSLVEGKDLSMALPSGQVCHDQQRLEVIFADLARRKDDAQQRSWALYEDEGVIRCYLEELLHILTDADPEVCKKMCKRNEFESVLALVAYYQMEHRASLRLLLLKCFGAMCSLDAAIISTLVSSVLPVELARDMQTDTQDHQKLCYSALILAMVFSMGEAVPYAHYEHLGTPFAQFLLNIVEDGLPLDTTEQLPDLCVNLLLALNLHLPAADQNVIMAALSKHANVKIFSEKLLLLLNRGDDPVRIFKHEPQPPHSVLKFLQDVFGSPATAAIFYHTDMMALIDITVRHIADLSPGDKGPFGAGQRPWPGVPRLLEPGSTPSREPHPVERSGVPALTSSWASGCPRPLHPALQLVIDSAFGGRSV

SEQ ID NO: 191302 - DNA, 2169 bp, Artificial Sequence
  derived and/or modified sequence
atgtacagagccctttacgcgtttcggagcgcggagccaaacgccctggcttttgccgccggcgaaaccttcctggtactggaacggtcctccgcccactggtggctggccgctagggcccggagcggcgagaccggctacgtcccgccggcttacttacggagacttcaaggactcgaacaagatgtgctgcaggccattgaccgcgccattgaggcagtgcacaatacagcaatgagggacgggggaaaatactccctggagcaacgcggagtgttgcagaagttaattcaccaccggaaagaaaccctatcaagaagaggccctagcgcttcaagcgtcgctgtgatgacttcctcaacgagtgatcatcatctcgacgccgcagctgcacgtcaacccaacggagtctgccgcgcggggttcgaacggcaacactcgttgccatcctcagagcaccttggggcggacgggggtctttaccagatcccactgcctagctctcaaatcccaccccagcctcgacgagccgcccctaccactcctcccccccccgtcaaacggcgcgaccgagaggccctgatggcttctggttccggggggcataacacgatgccatctggcgggaacagtgtgagctctggtagtagtgtgtcctcgacaagtcttgacacactgtataccagtagttctccatccgaacccgggagcagctgctccccaactccccctcctgtgccccgcagggggacacataccactgtttcccaggttcagccacccccttccaaggcgtccgcgccggagcctcccgctgaagaagaggttgccaccgggacaaccagtgcttctgacgatcttgaagcgctggggacgctaagtctggggactacagaagaaaaagctgccgccgaagcagccgttccacgcactattggcgcggagctcatggaactcgtgcggcggaataccggccttagccacgaactgtgtagagtcgcaattggaatcatagtgggccatatccaggcgagcgtacccgcctctagtcctgttatggaacaggtgctgctttccctggtggaaggaaaggacttgagcatggccttgccctcaggacaggtctgtcacgatcagcaacgactagaggtgatttttgcggacctggcccgcagaaaagacgacgcacaacaacgcagttgggcgctctacgaagacgagggagttatccgctgctatctggaggagctgcttcatatcctgaccgacgccgacccagaggtgtgcaaaaagatgtgcaagcgcaatgagttcgagtccgtcctagcgctggtggcctattaccagatggagcatagggcatccctgaggctactactcctgaaatgtttcggggctatgtgcagtctagacgcagctataatctcaactctcgttagctcagtgctgccagtggaactggcacgggatatgcaaaccgatacacaggaccatcagaagctgtgctacagcgcgttgatcctcgcgatggtatttagtatgggcgaggctgtaccctacgcacattacgaacacttggggaccccctttgcccagttcctgctgaacattgtcgaagatggtctacccctggacaccacagagcagttacccgacttgtgtgtgaatctgctcctcgccctgaacttacacctgccggcggccgaccaaaatgtgataatggctgcgctttcgaaacacgcaaacgtgaagatcttcagtgagaagttactcttactcctgaacaggggtgacgatccagtccgtattttcaaacacgagcctcaacccccccacagtgttctcaagttccttcaggatgttttcggcagtcccgctaccgcagccatcttctaccatacggatatgatggccctgattgatatcacagtccgccacatcgccgacctcagcccaggagataagctgagaatggagtacctatctctcatgcacgcaatcgtccgcactacaccgtacctccagcacaggcacagattacctgatctgcaggcgatcctacggaggatcctcaatgaggaagagactagcccacagtgccagatggatcggatgatcgttagagaaatgtgcaaggaatttctggttttaggggaagctccaagttag

SEQ ID NO: 191303 - DNA, 2169 bp, Artificial Sequence
  derived and/or modified sequence
atgtatcgcgccttgtacgcttttcggtcagctgagccaaacgctctcgccttcgccgctggggagacgttcctggttctagagcgtagttcagcccattggtggctggcggctcgggcccgatctggagagacaggatatgtgccacctgcttacctgcgcagattgcagggtctggaacaggatgttctgcaggctatcgacagggccatcgaagcagtccacaataccgcaatgagagacgggggcaaatattcactggaacagcggggagtcctgcagaagctcattcaccatcgaaaagagacactcagcagaagagggcccagcgcctcttctgtggcggtcatgacaagcagtaccagcgaccatcacttagacgccgccgctgcccggcagcctaacggggtttgtcgggcagggttcgaacgacaacatagtctccccagctcagaacatctcggcgctgacggtggtttgtaccagattccactccccagttcacagattccgccccaaccccgccgggccgcccccacgaccccacccccacctgtgaagaggagggatcgcgaagctttgatggccagcggctccggcggacataatacaatgccgagcggcggtaattccgtgtcatccgggagctccgtttctagcacttcgctagacaccctctataccagcagttcaccctctgagccggggagttcctgttctcctacacctcctcccgttcctagacgaggcacccacactaccgttagccaagttcagccaccaccttcaaaggcgagtgcacctgagccaccagcagaggaggaggttgcgactggaaccacgtccgcctctgatgacctcgaggccctgggcaccctgtcactgggaaccacagaagagaaagccgccgcagaggccgctgtgcctcgtactataggcgcggagctcatggagctcgtccgccgcaacactggactgtcacatgagctgtgccgcgtggcgatcggcattatagtgggtcacatacaggcctcagttcccgcatcctccccagtgatggaacaggtgctattaagcctggtagaaggaaaagatctcagcatggctttaccgtcaggccaagtgtgtcatgaccaacagcgtctggaggtgatctttgctgatctggcacgccggaaagacgatgctcagcagaggtcctgggcgctctacgaggatgaaggtgtgatcagatgttacctcgaggaactccttcacatcctgacagatgcagaccccgaagtgtgcaaaaagatgtgtaaacgcaacgagttcgaaagcgtgctcgcgttagtggcatattaccagatggaacatagggcctcactgcggctgttgctgctgaagtgctttggcgccatgtgctccttggatgcagccattatctcaactctggttagtagtgtacttcccgtggagctcgcccgtgacatgcagaccgacacccaagaccatcagaagctttgttactccgcccttattctcgccatggtgttctcaatgggcgaagctgtgccttacgcccactacgagcatctcggcaccccattcgcacagtttctgctgaatatagttgaggacggcttgcctctggacactacagagcaactcccggacttatgcgtcaacttattgttagccctcaacctgcacctcccggcagccgatcaaaatgttattatggcggcactaagcaaacacgccaacgtgaagatcttctctgaaaagctcctgctcctgttgaacagaggagatgatcctgtgcggatctttaaacacgagccgcagccacctcatagcgtgctaaagtttctgcaggacgttttcggctcgccagcaacggctgctatcttttaccatacagacatgatggccctaattgacattactgtgcgccacatcgcagatctgtctcctggggacaagggcccgtttggggccgggcagcgtccctggccaggggtccccagactccttgagcctggtagcacaccatcccgcgagccccaccctgtggagaggtctggcgtacctgctctcacgagctcctgggcgtccggttgtcccaggccacttcaccctgctctgcagcttgttatcgactccgctttcggcgggaggtctgtatag

SEQ ID NO: 191304 - DNA, 2169 bp, Artificial Sequence
  derived and/or modified sequence
atgtaccgggccctgtatgccttccgctctgctgagcccaatgccctggcctttgctgctggggagaccttcctggtgctggagaggagcagcgcccactggtggctggccgcccgggcccggagcggggagaccggctacgtgcccccagcctacctgcggcggctgcagggcctggagcaggatgtgctgcaggccatcgaccgggccattgaagctgtgcacaacacagccatgagagatggcggcaagtacagcctggagcagaggggcgtgctgcagaagctgatccaccacaggaaggagaccctgagccggcggggccccagcgccagctctgtggccgtgatgaccagcagcaccagtgaccaccacctggatgctgctgctgcccggcagcccaatggagtgtgccgggccggctttgagcggcagcacagcctgcccagcagcgagcacctgggcgcagatggcggcctgtaccagatccccctgcccagcagccagatccccccccagcccaggagagctgcccccaccaccccacctcctcctgtgaagaggcgggaccgggaggccctgatggccagcggcagcggcggccacaacaccatgcccagcggcggcaacagcgtgagcagcggcagctctgtgagcagcaccagcctggacaccctgtacaccagcagcagccccagcgagcccggcagcagctgcagccccaccccacctcctgtgccccggcggggcacccacaccaccgtgtcccaggtgcagcccccacccagcaaggccagcgcccctgagcccccagctgaggaggaggtggccaccggcaccaccagcgccagtgatgacctggaggccctgggcaccctgagcctgggcaccacagaggagaaggctgctgctgaggccgctgtgcccaggaccatcggggctgagctgatggagctggtgagaagaaacacaggcctgagccatgagctgtgccgggtggccatcggcatcatcgtgggccacatccaggcctctgtgcctgccagcagccctgtgatggagcaggtgctgctgagcctggtggagggcaaggacctgtccatggccctgcccagcggccaggtgtgccacgaccagcagaggctggaggtgatctttgctgacctggcccggaggaaggatgatgcccagcagaggtcctgggccctgtatgaagatgagggcgtcatccgctgctacctggaggagctgctgcacatcctgacagatgctgaccctgaggtgtgcaagaagatgtgcaagagaaatgaatttgagagcgtgctggccctggtggcctactaccagatggagcaccgggccagcctgcggctgctgctgctgaagtgcttcggggccatgtgcagcctggatgctgccatcatcagcaccctggtgtcctctgtgctgcctgtggagctggcccgggacatgcagacagacacccaggaccaccagaagctgtgctacagcgccctgatcctggccatggtgttctccatgggagaggccgtgccctatgcccactatgagcacctgggcaccccatttgcccagttcctgctgaacatcgtggaggatggcctgcccctggacaccacagagcagctgcctgacctgtgtgtgaacctgctgctggccctgaacctgcacctgcctgctgctgaccagaatgtcatcatggccgccctgagcaagcacgccaacgtgaagatcttcagcgagaagctgctgctgctgctgaacagaggagatgatcctgtgcgcatcttcaagcatgagccccagcccccccacagcgtgctgaagttcctgcaggatgtgtttggcagccctgccacagctgccatcttctaccacacagacatgatggccctgattgacatcaccgtgcgccacatcgctgacctgagccctggggacaagctgaggatggagtacctgagcctgatgcacgccatcgtgaggaccaccccctacctgcagcaccgccaccggctgcctgacctgcaggccatcctgcggcgcatcctgaatgaggaggagaccagcccccagtgccagatggacaggatgattgtgcgggagatgtgcaaggagttcctggtgctgggggaggcccccagctag

SEQ ID NO: 191305 - DNA, 2169 bp, Artificial Sequence
  derived and/or modified sequence
atgtaccgggccctgtatgccttccgctctgctgagcccaatgccctggcctttgctgctggggagaccttcctggtgctggagaggagcagcgcccactggtggctggccgcccgggcccggagcggggagaccggctacgtgcccccagcctacctgcggcggctgcagggcctggagcaggatgtgctgcaggccatcgaccgggccattgaagctgtgcacaacacagccatgagagatggcggcaagtacagcctggagcagaggggcgtgctgcagaagctgatccaccacaggaaggagaccctgagccggcggggccccagcgccagctctgtggccgtgatgaccagcagcaccagtgaccaccacctggatgctgctgctgcccggcagcccaatggagtgtgccgggccggctttgagcggcagcacagcctgcccagcagcgagcacctgggcgcagatggcggcctgtaccagatccccctgcccagcagccagatccccccccagcccaggagagctgcccccaccaccccacctcctcctgtgaagaggcgggaccgggaggccctgatggccagcggcagcggcggccacaacaccatgcccagcggcggcaacagcgtgagcagcggcagctctgtgagcagcaccagcctggacaccctgtacaccagcagcagccccagcgagcccggcagcagctgcagccccaccccacctcctgtgccccggcggggcacccacaccaccgtgtcccaggtgcagcccccacccagcaaggccagcgcccctgagcccccagctgaggaggaggtggccaccggcaccaccagcgccagtgatgacctggaggccctgggcaccctgagcctgggcaccacagaggagaaggctgctgctgaggccgctgtgcccaggaccatcggggctgagctgatggagctggtgagaagaaacacaggcctgagccatgagctgtgccgggtggccatcggcatcatcgtgggccacatccaggcctctgtgcctgccagcagccctgtgatggagcaggtgctgctgagcctggtggagggcaaggacctgtccatggccctgcccagcggccaggtgtgccacgaccagcagaggctggaggtgatctttgctgacctggcccggaggaaggatgatgcccagcagaggtcctgggccctgtatgaagatgagggcgtcatccgctgctacctggaggagctgctgcacatcctgacagatgctgaccctgaggtgtgcaagaagatgtgcaagagaaatgaatttgagagcgtgctggccctggtggcctactaccagatggagcaccgggccagcctgcggctgctgctgctgaagtgcttcggggccatgtgcagcctggatgctgccatcatcagcaccctggtgtcctctgtgctgcctgtggagctggcccgggacatgcagacagacacccaggaccaccagaagctgtgctacagcgccctgatcctggccatggtgttctccatgggagaggccgtgccctatgcccactatgagcacctgggcaccccatttgcccagttcctgctgaacatcgtggaggatggcctgcccctggacaccacagagcagctgcctgacctgtgtgtgaacctgctgctggccctgaacctgcacctgcctgctgctgaccagaatgtcatcatggccgccctgagcaagcacgccaacgtgaagatcttcagcgagaagctgctgctgctgctgaacagaggagatgatcctgtgcgcatcttcaagcatgagccccagcccccccacagcgtgctgaagttcctgcaggatgtgtttggcagccctgccacagctgccatcttctaccacacagacatgatggccctgattgacatcaccgtgcgccacatcgctgacctgagccctggggacaagggcccctttggagctggccagaggccctggccaggagtgccccggctgctggagcccggcagcacccccagccgggagccccaccctgtggagaggtctggagtgcctgccctgaccagctcctgggccagcggctgcccccggcccctgcacccagccctgcagctggtgattgattctgcctttggaggccgctctgtgtag

SEQ ID NO: 191306 - DNA, 2989 bp, Artificial Sequence
  derived and/or modified sequence
gcgcgcgcctgcgtagtgtgtcacggggcgggacaaccgcggcgcggctcggcgctcccggcctggcgttgtggcgccgcagcccttgccaccttccctgcacctgccctgcccggcctcatgtaccgcgcgctgtacgcgttccgctcggcggagcccaacgcgctggcgttcgccgcgggcgagaccttcctggtgctagagcgaagcagcgcgcactggtggctggccgcgcgggcgcgcagtggtgagacgggctacgtgccgccagcctacctgcgccgcctgcagggcctggagcaggatgtcctccaggccattgaccgggccatcgaggctgtacacaacacagccatgcgggatggtggcaagtacagcctggaacagcgtggagtcctccagaagctgatccaccaccggaaagagaccctgtcacgcagaggcccttcagcctccagtgttgcagttatgacctcatcaaccagtgaccaccacttggatgctgctgcagccaggcagcccaatggggtgtgtcgagctgggttcgagcggcagcacagcctacccagttctgagcatcttggggcagatggaggcctctaccagatcccacttccatcttcccagatcccaccacagcctcgccgagcagcacccaccacaccgcccccaccagtgaagcgccgagaccgcgaggccctgatggcctctgggagtggtggccacaacaccatgccctccgggggtaactctgtgtccagcggctcctcagtcagcagcacctccctggacacgctctataccagctccagcccatctgaaccaggctccagctgctcacccacacccccacctgtgccccgccgaggcacccacaccaccgtgtcccaagtccagccccctccctccaaggcatcagcacctgaaccccctgcagaagaagaagtggcaactggtacaacctcagcctctgatgacctggaagccctgggtacactgagcctggggaccacagaggagaaggcagcagctgaggcggctgtgcccaggaccattggggccgagctgatggagctggtgcggagaaacactggcctgagccacgaattatgccgggtggccatcggcatcatagtgggtcacatccaggcctcggtgccggccagctcaccagtcatggagcaggtcctcctctcactcgtagagggcaaggacctcagcatggccctgccctcagggcaggtctgccacgaccagcagaggctggaggtgatctttgcagacctggctcgccggaaggacgacgcccagcagcgcagttgggcactatatgaggatgagggtgtcatccgctgctacctagaggagctgctgcatattctgactgatgcagaccctgaagtttgcaagaaaatgtgcaagagaaacgagttcgagtctgtcctggccttggtggcctattaccaaatggaacaccgagcatcactgcggctgctgctcctcaagtgctttggcgccatgtgcagcctggatgcagccatcatctccacgcttgtgtcatccgtgctgcctgtagagctggcgagggacatgcagacagacacgcaggaccaccagaaactctgttactctgccctcatcctggccatggtcttctccatgggagaggcagtgccctatgcacactatgagcacctgggcacgcctttcgcccagttcctactgaacatcgtcgaggatgggctgcccttggacaccacagagcagctgccggacctctgcgtgaacctgcttctggctctcaacctgcacctgccagctgctgaccagaatgtcatcatggctgccctgagcaaacacgccaatgtcaagatcttctccgagaagctgttgttgctcctgaacagaggggatgaccctgtgcgcatcttcaaacatgagccacagccaccacactctgtcctcaagttcctgcaggacgtgtttggcagcccggccacagctgccatcttctaccacacagacatgatggctctcattgacatcactgtgcggcacatcgcagacctgtcaccaggagacaagctgcgcatggagtacctctccctgatgcatgctatagtccgcaccacaccctacctgcagcaccgccaccggctacccgacctgcaggccatactgcgacgcatcctgaatgaggaggagacctcaccccagtgccagatggaccgcatgattgtccgagagatgtgcaaggaattcctggtgctgggggaggctcccagctagcaccttgctgtcctcccttccctgcagctccagtcagtgtgcaggggactcaggggcttggccctaagaatgttttgcactgacagtgggaggggataaggtggcagaaggaacctgagcaggacccccacctgaagtagaacttaagagaggggccaagtgtaggattggggaccatggtctgggagctgttctggggcagggggaatatgcaagctaaagcccctctataccctggtaggcttcctcttcagcatgcccccctcttcaccccacacccatgtgtacactcagagtcctgctgccgctccaggctggaccagacccccatccccacccctcctggtctgtatcctgggcctcagcaagccatgcccctggggtgaggggaggcatctcccaccagctctattctttgccttagctttgcagtgagtgctgctcatgtcctcccctccacccgcacatgggggtcgctgcccttcactcctacccccagaggccttggccaagctgctgctttgaaagcgggatcttggagacaggccatccatcctggagcctcatggaacaggatgatggcactgagaaagccaatgaccgaatctcttttctctgtaaaaatgtagactgaaaagccatgtgtattttcctatgtgctgtagctctcctttggaaataaatcacaggcatctggaaa

SEQ ID NO: 191307 - DNA, 2263 bp, Artificial Sequence
  derived and/or modified sequence
ggcgggacaaccgcggcgcggctcggcgctcccggcctggcgttgtggcgccgcagcccttgccaccttccctgcacctgccctgcccggcctcatgtaccgcgcgctgtacgcgttccgctcggcggagcccaacgcgctggcgttcgccgcgggcgagaccttcctggtgctagagcgaagcagcgcgcactggtggctggccgcgcgggcgcgcagtggtgagacgggctacgtgccgccagcctacctgcgccgcctgcagggcctggagcaggatgtcctccaggccattgaccgggccatcgaggctgtacacaacacagccatgcgggatggtggcaagtacagcctggaacagcgtggagtcctccagaagctgatccaccaccggaaagagaccctgtcacgcagaggcccttcagcctccagtgttgcagttatgacctcatcaaccagtgaccaccacttggatgctgctgcagccaggcagcccaatggggtgtgtcgagctgggttcgagcggcagcacagcctacccagttctgagcatcttggggcagatggaggcctctaccagatcccacttccatcttcccagatcccaccacagcctcgccgagcagcacccaccacaccgcccccaccagtgaagcgccgagaccgcgaggccctgatggcctctgggagtggtggccacaacaccatgccctccgggggtaactctgtgtccagcggctcctcagtcagcagcacctccctggacacgctctataccagctccagcccatctgaaccaggctccagctgctcacccacacccccacctgtgccccgccgaggcacccacaccaccgtgtcccaagtccagccccctccctccaaggcatcagcacctgaaccccctgcagaagaagaagtggcaactggtacaacctcagcctctgatgacctggaagccctgggtacactgagcctggggaccacagaggagaaggcagcagctgaggcggctgtgcccaggaccattggggccgagctgatggagctggtgcggagaaacactggcctgagccacgaattatgccgggtggccatcggcatcatagtgggtcacatccaggcctcggtgccggccagctcaccagtcatggagcaggtcctcctctcactcgtagagggcaaggacctcagcatggccctgccctcagggcaggtctgccacgaccagcagaggctggaggtgatctttgcagacctggctcgccggaaggacgacgcccagcagcgcagttgggcactatatgaggatgagggtgtcatccgctgctacctagaggagctgctgcatattctgactgatgcagaccctgaagtttgcaagaaaatgtgcaagagaaacgagttcgagtctgtcctggccttggtggcctattaccaaatggaacaccgagcatcactgcggctgctgctcctcaagtgctttggcgccatgtgcagcctggatgcagccatcatctccacgcttgtgtcatccgtgctgcctgtagagctggcgagggacatgcagacagacacgcaggaccaccagaaactctgttactctgccctcatcctggccatggtcttctccatgggagaggcagtgccctatgcacactatgagcacctgggcacgcctttcgcccagttcctactgaacatcgtcgaggatgggctgcccttggacaccacagagcagctgccggacctctgcgtgaacctgcttctggctctcaacctgcacctgccagctgctgaccagaatgtcatcatggctgccctgagcaaacacgccaatgtcaagatcttctccgagaagctgttgttgctcctgaacagaggggatgaccctgtgcgcatcttcaaacatgagccacagccaccacactctgtcctcaagttcctgcaggacgtgtttggcagcccggccacagctgccatcttctaccacacagacatgatggctctcattgacatcactgtgcggcacatcgcagacctgtcaccaggagacaagggaccgttcggggcgggccagaggccttggccaggagttcctcgcctgttagaaccaggatccaccccatcgcgggagccgcaccctgtggagcgttctggggtcccggccctgacctcttcctgggcttcgggatgcccgcgtcctctgcacccggcgctgcagctcgttatcgattccgcctttggaggccggtccgtatag

SEQ ID NO: 191308 - DNA, 2169 bp, Artificial Sequence
  derived and/or modified sequence
atgtaccgggccctgtacgccttccggagcgccgagcccaacgccctggccttcgcagcgggcgagacctttctggtcctagagcgctcttctgcacattggtggctcgcggcaagagctcgtagcggggagactggttacgtgcccccggcctatcttcgaagacttcaaggtcttgaacaagatgtgctgcaagccattgaccgggccattgaagccgttcataatactgccatgcgtgatggtggcaaatactctttggagcagcgcggggttctacagaaactcattcaccaccggaaggagaccctgagccgtcggggaccatctgcctcaagcgtggccgtgatgactagcagtactagcgatcaccatctggatgcagctgccgctcggcagcccaatggggtttgcagggccggatttgaacgccagcattccctaccatcctcggaacaccttggcgctgacggcggcttataccaaatccccttgccctcatcgcagattccaccgcagcccagacgtgccgccccgacaacacctcccccccccgtgaagcgcagagacagggaagctttaatggcttccggcagtggtggccacaacacgatgccgtccggtgggaactctgttagttcaggctctagtgtgtcttctacctccctggatactctatacacatcgtcttccccgtccgagcccggctcatcctgctcaccgacacccccgccagtccctagaaggggcacccacaccacagtgtcccaggtgcagcccccaccttcaaaggcctccgctcccgaaccccctgcagaagaagaagtggccaccggcacgacatctgccagcgatgacctggaagcattgggaactctctcattggggaccaccgaagaaaaagctgccgctgaagctgcagtgcctcggaccatcggcgcagagttaatggaactcgtgcgacgaaatacaggcctttcccacgagctctgcagagtcgctattggcatcatcgtcggccacatacaagccagtgtgcccgcttcttcccccgtcatggagcaggtgttgttgtccttagtggagggtaaagatctgtccatggcactgccttctggtcaggtatgccacgatcagcagagactggaagtgatttttgccgacctcgcaagacgtaaagacgacgcacaacagcgttcatgggctctgtacgaagatgagggagtgatcaggtgttatcttgaagagctgctccacattctgactgacgctgaccccgaagtttgcaagaagatgtgtaagcgaaatgaatttgagtccgtgttagccctggtcgcgtactatcaaatggagcaccgcgcttcgctgcgtttgttgctccttaaatgtttcggagcaatgtgcagccttgatgctgcaattatcagcacattagtctccagtgtcctccctgtcgaactcgcccgtgacatgcagaccgacacacaagaccatcagaaactgtgctactctgcacttatcctcgccatggtgttctcaatgggagaagcagtgccctacgcccattacgaacacctgggaaccccatttgcccagttcctgctcaatattgtagaggacggcttgcctttggacacaacagaacagctgccagacttatgcgtgaacctcctcctcgcactgaaccttcatctgccggcggccgaccagaatgtcatcatggcagccctctcaaaacacgccaatgtcaagatcttcagcgaaaaactgctcctcctgctgaacagaggcgatgatcctgtgcgcatattcaaacacgaacctcaacccccgcactcagtcctgaagttcctgcaggacgtttttggaagccctgccaccgctgctatcttctatcacactgatatgatggcccttatcgatatcaccgtgcgccacatcgccgatctcagtcccggagataagctacgcatggaatacctttccctgatgcacgctatcgttaggacgaccccctacttgcaacaccgccacagacttcctgatctacaggcaatcttgcgccgtatcctgaacgaagaagagacaagccctcagtgccagatggatcggatgatcgtgcgtgagatgtgcaaagagtttctcgtgctgggcgaagcaccctcctag

SEQ ID NO: 191309 - DNA, 2169 bp, Artificial Sequence
  derived and/or modified sequence
atgtaccgggccctgtacgccttccggagcgccgagcccaacgccttggcttttgccgctggtgagacctttttggtgctcgaacggtctagcgctcactggtggttggcggcacgggcaagatctggggagaccggttacgtaccgccagcttacctcagacgcctccagggactagaacaggatgtgctccaagcgatagatcgggcaattgaggcagtgcacaataccgctatgagagacggaggtaaatattccctcgagcagcgtggtgttctccagaagctcatccatcatcgcaaggaaacattatccaggcgcgggcccagtgcttcaagtgtggccgtgatgacatcttcaacgagcgatcaccatcttgatgccgctgcagcccgccaacccaacggtgtatgtcgggctggcttcgagagacagcattcccttccctcatctgagcacttgggagccgatggaggtttataccagatcccccttccctctagccagattcctccgcagccccggcgcgcagctcccacgacccccccacctcctgtcaagagacgagatcgggaggctctgatggcatccggtagtggcgggcacaatacgatgccgtccgggggcaactccgtgtcttccggcagctcggtaagcagcacctctctggatacactatataccagttcgtcgccctctgaaccaggcagctcctgttctccaacaccccctcctgtcccccggcgtggaacccacaccaccgtgagccaggtgcagcctcctccaagcaaagccagcgctcctgaaccgcctgctgaggaggaagtcgccactggtactacttcagcttccgatgacctggaagcactcgggactttgtctctgggcactacagaagaaaaggctgccgccgaggccgccgtcccccggaccataggcgccgagctgatggagcttgtccgcaggaataccggactgtcacacgagctgtgtcgcgtggcgattggcatcatcgtgggccatatacaggccagtgtaccagcatcatcccccgtcatggaacaggtactgttgtctctggttgagggaaaggatctgtccatggcacttcctagcgggcaggtctgccacgatcagcagcgcctcgaagtgatcttcgcggatctggcgcggcgaaaggacgacgcccaacagcgcagttgggccctgtatgaggatgaaggtgtaatcaggtgttatctggaagaactgctgcatattctgacagacgccgaccccgaggtgtgcaagaaaatgtgcaaaagaaacgaattcgagtccgtgttggccttagtcgcctattaccagatggaacatagagcgtctctgagactcctgctgctcaagtgttttggagccatgtgcagcctggacgccgcgatcatttccacattggtgtcatctgtactacccgtcgaactcgctcgggacatgcagaccgacacccaagaccaccaaaaattgtgttatagcgctctcatcctggcgatggtgttctcaatgggggaggctgtgccatatgcacactacgagcatctgggcaccccattcgcacagtttttgctcaacattgtggaggatggcttgcccttggatacgaccgaacagctgcctgatctgtgtgtgaatctactgctggccctaaacctccacctgccagccgccgaccagaacgtcattatggcagcgttgtctaagcatgcaaatgtgaagatttttagcgagaaactcctcctcttactgaaccggggtgatgacccagtcaggattttcaaacacgaaccccagccaccccacagtgtgctgaagtttctccaggatgtattcgggagccccgcaacagcagcaattttttaccatacagacatgatggctctgatagacataaccgtgcggcatattgccgaccttagtcccggggataaaggccccttcggtgcaggtcagcggccgtggcctggcgtcccgcggttgcttgaacccggctccactccttctcgtgagccccaccccgtggagcgatcaggagtcccagcactcactagctcctgggcatccggctgtccacgcccactgcatccggctctgcagttggtaattgacagtgcgttcggcggtcgatccgtgtag

SEQ ID NO: 191310 - DNA, 2169 bp, Artificial Sequence
  derived and/or modified sequence
atgtacagggctttgtatgcattcaggtccgcagagcccaacgccctggcattcgcagccggtgaaacgttcctggtattggaaaggtcatcagcacattggtggctggcggcaagggctaggtcaggggagaccgggtatgtacctcccgcttacctaagaagactgcagggcctcgaacaggatgtactgcaggcaatcgacagagcgatcgaggccgtacacaatacagctatgcgggatgggggaaagtactcgctggaacaacgcggagtcctccagaaactaatccaccaccgcaaggaaaccctatcacgacgtgggccttccgcctcttccgttgcagtgatgacatcaagtacttcagaccatcatctcgacgccgcagccgcaagacagccaaacggtgtgtgccgcgcaggcttcgagcgccagcactcccttccatctagtgagcacctcggggcagatggagggttatatcagatcccactgccgagttcccaaatcccaccacagcccagaagagcagctccgaccaccccccctcctccagtgaaaagacgcgatcgcgaggcacttatggcttccggcagtggagggcacaatacgatgccgtccggaggtaactctgtgagtagtggaagctctgttagtagcacgagtctggacaccctttataccagctctagccccagcgaaccaggatcaagctgcagcccaacacccccaccagtccctcgccgagggacgcacacgaccgtcagtcaggttcagccacctcctagcaaagcatctgcgcctgagccaccagctgaggaggaggtagcaactggcactacatcagcatccgatgacctcgaggccctcggcacactgagccttggcactacagaagagaaagctgctgctgaggctgcagtccccagaaccataggggcagaattgatggaattggttagacgcaataccggtcttagccacgaactttgcagggtggcaataggaattatagtcggccatattcaagccagcgtaccagccagcagtcctgtcatggagcaggtgctgctgagtcttgtagaaggtaaagatctgagcatggcactcccgtcagggcaggtctgtcatgaccagcagcgactagaagtcatcttcgccgacctggcaagacggaaggacgatgcgcagcagagatcgtgggccctgtacgaagatgagggcgtgataagatgctacctcgaagagctgctgcacatcctgactgatgcagatcctgaagtctgcaaaaagatgtgtaagcgtaacgagtttgaatcagtcctcgctctggtggcatactaccaaatggagcaccgcgctagcctgcgactgcttttgttaaaatgcttcggagccatgtgctctctggatgccgctataatctcaacattagtctccagcgtattgccagtcgaactggctcgggacatgcagacggacacccaggatcatcagaagttgtgttacagtgcactgatcctggcgatggtgtttagtatgggcgaagctgtcccttacgcacactatgagcatctggggacgcctttcgcacagttcctcttgaatatagtggaggatggactgcccctggatacgacagagcaattaccagacctgtgtgttaatttgttgttggcgctcaatttacatcttccggcagcagatcagaatgtcatcatggcggcactctctaaacacgctaacgtcaaaattttcagcgagaaattattgctcttgctgaaccggggtgacgaccctgtccgaatcttcaagcatgaaccccaacctcctcattccgttctgaagtttctccaggatgtgttcggttcccccgctacagctgctatcttttatcataccgatatgatggccctaattgatatcactgtacgccacatagcggatctttcaccgggtgacaaactgcgaatggaatatctttcattgatgcatgccattgtgcgaacaaccccatatctccagcacaggcaccgcctgcctgacctgcaagcgatactccgacgcatattgaatgaagaagagactagtccacagtgccagatggaccggatgatcgtgcgagaaatgtgcaaggaattcctcgtactgggcgaggccccatcctag

SEQ ID NO: 191311 - DNA, 2169 bp, Artificial Sequence
  derived and/or modified sequence
atgtaccgtgccctatacgcattccgttctgctgagcccaatgctctcgctttcgctgcgggagagacatttctggtcctggaacggagctctgcacattggtggcttgccgcacgggctcgatcaggtgagacgggatacgtgccacctgcataccttagacggttacagggcctagagcaagatgtgttgcaggcgatcgacagagccattgaagccgtgcacaatacagcgatgcgcgacggcggaaaatattcccttgaacagcgaggtgtgctgcagaagctaatacaccaccgcaaagaaacactaagcagacgcggacccagcgcatcttccgtggctgttatgaccagtagtaccagtgatcatcatctggatgctgcggctgctcgacagcctaacggcgtttgcagggccggatttgagcgacagcacagtctgcccagcagtgagcatctaggcgctgacggcggtctgtaccaaatccccctgccctcttcacagatcccccctcaaccacgtagagccgctccaactacgccccctcccccagtcaaaagacgggaccgggaagcgttgatggcctccgggtccggaggtcataatactatgccaagtgggggaaactcagtgtcgagcggtagttctgtcagttccacatcccttgatacgttatatacgtcgagctctccctcagagcctggatcaagttgctctcccacacctcccccagtgccacgcaggggaacacatactactgtctcgcaggtgcagcctccccctagtaaggctagtgcacccgaacccccagctgaggaggaagtggcaacgggtactacatcagcctcagacgacctggaggccctgggcaccctgtctttgggtacaaccgaggagaaggctgccgctgaagccgctgtgccacgaacaattggcgctgagttaatggagttagtcaggcgtaatactgggctgagtcacgaactgtgtcgggtggcaatcggaatcatcgtgggacacatccaggcaagcgtgcccgcatcaagccctgttatggagcaggtgttactcagtttggttgaaggaaaggacctgtccatggccctgcctagcggacaggtctgccacgatcagcagcgcctggaagtcatcttcgccgatctcgccagacgcaaggacgacgcccagcaacggtcctgggccctgtacgaggacgaaggggtcatccggtgttaccttgaagaacttctgcacattctcactgacgcagaccccgaagtctgcaagaagatgtgtaaacgtaacgaatttgagtcagtcctagctctagtcgcctactaccagatggagcatcgagcctccctgcgcctgctgctgctcaagtgcttcggagctatgtgttccctggacgccgctatcattagtactctcgtgagctcggtgcttcccgtggaactggccagagacatgcaaactgatactcaggaccaccagaagctgtgttacagcgcgttaatccttgccatggtgttttcaatgggagaggcggtaccgtatgcacattacgaacatctgggaacgccgtttgcgcagttcctgttgaacatcgtggaagacgggctgcccttagacacaaccgagcaactccctgatctatgtgtcaatctgctgctggccttaaacctccacctgccagccgctgaccagaatgtcatcatggccgcacttagcaaacacgctaacgtaaaaatcttctcagaaaaattgctgcttctgttgaaccgtggtgatgaccccgtccgcatttttaagcacgagccacagccccctcattctgtgctgaagtttctccaagacgtctttggctcacctgccactgccgctattttttatcacacggacatgatggctcttatagacataaccgtccgacacatcgctgacctgtctcctggtgataagggtccgttcggtgccggacagcggccttggcccggtgtgcctcgtctgctagagccagggagcactccaagcagagagccccatcctgtggaacgaagcggcgtgcctgcacttacctctagttgggcttccggatgtccacgtccacttcatccggcattacaattggtgattgacagtgccttcggaggcagaagcgtctag

SEQ ID NO: 191312 - DNA, 2169 bp, Artificial Sequence
  derived and/or modified sequence
atgtacagagccctgtacgccttcagaagcgccgagcccaacgccctggccttcgccgccggcgagaccttcctggtgctggagagaagcagcgcccactggtggctggccgccagagccagaagcggcgagaccggctacgtgccccccgcctacctgagaagactgcagggcctggagcaggacgtgctgcaggccatcgacagagccatcgaggccgtgcacaacaccgccatgagagacggcggcaagtacagcctggagcagagaggcgtgctgcagaagctgatccaccacagaaaggagaccctgagcagaagaggccccagcgccagcagcgtggccgtgatgaccagcagcaccagcgaccaccacctggacgccgccgccgccagacagcccaacggcgtgtgcagagccggcttcgagagacagcacagcctgcccagcagcgagcacctgggcgccgacggcggcctgtaccagatccccctgcccagcagccagatccccccccagcccagaagagccgcccccaccaccccccccccccccgtgaagagaagagacagagaggccctgatggccagcggcagcggcggccacaacaccatgcccagcggcggcaacagcgtgagcagcggcagcagcgtgagcagcaccagcctggacaccctgtacaccagcagcagccccagcgagcccggcagcagctgcagccccacccccccccccgtgcccagaagaggcacccacaccaccgtgagccaggtgcagcccccccccagcaaggccagcgcccccgagccccccgccgaggaggaggtggccaccggcaccaccagcgccagcgacgacctggaggccctgggcaccctgagcctgggcaccaccgaggagaaggccgccgccgaggccgccgtgcccagaaccatcggcgccgagctgatggagctggtgagaagaaacaccggcctgagccacgagctgtgcagagtggccatcggcatcatcgtgggccacatccaggccagcgtgcccgccagcagccccgtgatggagcaggtgctgctgagcctggtggagggcaaggacctgagcatggccctgcccagcggccaggtgtgccacgaccagcagagactggaggtgatcttcgccgacctggccagaagaaaggacgacgcccagcagagaagctgggccctgtacgaggacgagggcgtgatcagatgctacctggaggagctgctgcacatcctgaccgacgccgaccccgaggtgtgcaagaagatgtgcaagagaaacgagttcgagagcgtgctggccctggtggcctactaccagatggagcacagagccagcctgagactgctgctgctgaagtgcttcggcgccatgtgcagcctggacgccgccatcatcagcaccctggtgagcagcgtgctgcccgtggagctggccagagacatgcagaccgacacccaggaccaccagaagctgtgctacagcgccctgatcctggccatggtgttcagcatgggcgaggccgtgccctacgcccactacgagcacctgggcacccccttcgcccagttcctgctgaacatcgtggaggacggcctgcccctggacaccaccgagcagctgcccgacctgtgcgtgaacctgctgctggccctgaacctgcacctgcccgccgccgaccagaacgtgatcatggccgccctgagcaagcacgccaacgtgaagatcttcagcgagaagctgctgctgctgctgaacagaggcgacgaccccgtgagaatcttcaagcacgagccccagcccccccacagcgtgctgaagttcctgcaggacgtgttcggcagccccgccaccgccgccatcttctaccacaccgacatgatggccctgatcgacatcaccgtgagacacatcgccgacctgagccccggcgacaagctgagaatggagtacctgagcctgatgcacgccatcgtgagaaccaccccctacctgcagcacagacacagactgcccgacctgcaggccatcctgagaagaatcctgaacgaggaggagaccagcccccagtgccagatggacagaatgatcgtgagagagatgtgcaaggagttcctggtgctgggcgaggcccccagctag

SEQ ID NO: 191313 - DNA, 2169 bp, Artificial Sequence
  derived and/or modified sequence
atgtacagagccctgtacgccttcagaagcgccgagcccaacgccctggccttcgccgccggcgagaccttcctggtgctggagagaagcagcgcccactggtggctggccgccagagccagaagcggcgagaccggctacgtgccccccgcctacctgagaagactgcagggcctggagcaggacgtgctgcaggccatcgacagagccatcgaggccgtgcacaacaccgccatgagagacggcggcaagtacagcctggagcagagaggcgtgctgcagaagctgatccaccacagaaaggagaccctgagcagaagaggccccagcgccagcagcgtggccgtgatgaccagcagcaccagcgaccaccacctggacgccgccgccgccagacagcccaacggcgtgtgcagagccggcttcgagagacagcacagcctgcccagcagcgagcacctgggcgccgacggcggcctgtaccagatccccctgcccagcagccagatccccccccagcccagaagagccgcccccaccaccccccccccccccgtgaagagaagagacagagaggccctgatggccagcggcagcggcggccacaacaccatgcccagcggcggcaacagcgtgagcagcggcagcagcgtgagcagcaccagcctggacaccctgtacaccagcagcagccccagcgagcccggcagcagctgcagccccacccccccccccgtgcccagaagaggcacccacaccaccgtgagccaggtgcagcccccccccagcaaggccagcgcccccgagccccccgccgaggaggaggtggccaccggcaccaccagcgccagcgacgacctggaggccctgggcaccctgagcctgggcaccaccgaggagaaggccgccgccgaggccgccgtgcccagaaccatcggcgccgagctgatggagctggtgagaagaaacaccggcctgagccacgagctgtgcagagtggccatcggcatcatcgtgggccacatccaggccagcgtgcccgccagcagccccgtgatggagcaggtgctgctgagcctggtggagggcaaggacctgagcatggccctgcccagcggccaggtgtgccacgaccagcagagactggaggtgatcttcgccgacctggccagaagaaaggacgacgcccagcagagaagctgggccctgtacgaggacgagggcgtgatcagatgctacctggaggagctgctgcacatcctgaccgacgccgaccccgaggtgtgcaagaagatgtgcaagagaaacgagttcgagagcgtgctggccctggtggcctactaccagatggagcacagagccagcctgagactgctgctgctgaagtgcttcggcgccatgtgcagcctggacgccgccatcatcagcaccctggtgagcagcgtgctgcccgtggagctggccagagacatgcagaccgacacccaggaccaccagaagctgtgctacagcgccctgatcctggccatggtgttcagcatgggcgaggccgtgccctacgcccactacgagcacctgggcacccccttcgcccagttcctgctgaacatcgtggaggacggcctgcccctggacaccaccgagcagctgcccgacctgtgcgtgaacctgctgctggccctgaacctgcacctgcccgccgccgaccagaacgtgatcatggccgccctgagcaagcacgccaacgtgaagatcttcagcgagaagctgctgctgctgctgaacagaggcgacgaccccgtgagaatcttcaagcacgagccccagcccccccacagcgtgctgaagttcctgcaggacgtgttcggcagccccgccaccgccgccatcttctaccacaccgacatgatggccctgatcgacatcaccgtgagacacatcgccgacctgagccccggcgacaagggccccttcggcgccggccagagaccctggcccggcgtgcccagactgctggagcccggcagcacccccagcagagagccccaccccgtggagagaagcggcgtgcccgccctgaccagcagctgggccagcggctgccccagacccctgcaccccgccctgcagctggtgatcgacagcgccttcggcggcagaagcgtgtag

SEQ ID NO: 191314 - protein, 390 aa, Artificial Sequence
  derived and/or modified sequence
MGEAGAGAGASGGPEASPEAEVVKLLPFLAPGARADLQAAAVRHVLALTGCGPGRALLAGQAALLQALMELAPASAPARDAARALVNLAADPGLHETLLAADPGLPARLMGRALDPQWPWAEEAAAALANLSREPAPCAALMAALAAAEPADSGLERLVRALCTPGYNARAPLHYLAPLLSNLSQRPAARAFLLDPDRCVVQRLLPLTQYPDSSVRRGGVVGTLRNCCFEHRHHEWLLGPEVDILPFLLLPLAGPEDFSEEEMERLPVDLQYLPPDKQREPDADIRKMLVEAIMLLTATAPGRQQVRDQGAYLILRELHSWEPEPDVRTACEKLIQVLIGDEPERGMENLLEVQVPEDVEQQLQQLDCREQEQLERELAPEPWVERATPT

SEQ ID NO: 191315 - protein, 390 aa, Artificial Sequence
  derived and/or modified sequence
MGEAGAGAGASGGPEASPEAEVVKLLPFLAPGARADLQAAAVRHVLALTGCGPGRALLAGQAALLQALMELAPASAPARDAARALVNLAADPGLHETLLAADPGLPARLMGRALDPQWPWAEEAAAALANLSREPAPCAALMAALAAAEPADSGLERLVRALCTPGYNARAPLHYLAPLLSNLSQRPAARAFLLDPDRCVVQRLLPLTQYPDSSVRRGGVVGTLRNCCFEHRHHEWLLGPEVDILPFLLLPLAGPEDFSEEEMQRLPVDLQYLPPDKQREPDADIRKMLVEAIMLLTATAPGRQQVRDQGAYLILRELHSWEPEPDVRTACEKLIQVLIGDEPERGMENLLEVQVPEDVEQQLQQLDCREQEQLERELAPEPWVERATPT

SEQ ID NO: 191316 - DNA, 1173 bp, Artificial Sequence
  derived and/or modified sequence
atgggcgaggccggcgccggcgccggcgccagcggcggccccgaggccagccccgaggccgaggtggtgaagctgctgcccttcctggcccccggcgccagagccgacctgcaggccgccgccgtgagacacgtgctggccctgaccggctgcggccccggcagagccctgctggccggccaggccgccctgctgcaggccctgatggagctggcccccgccagcgcccccgccagagacgccgccagagccctggtgaacctggccgccgaccccggcctgcacgagaccctgctggccgccgaccccggcctgcccgccagactgatgggcagagccctggacccccagtggccctgggccgaggaggccgccgccgccctggccaacctgagcagagagcccgccccctgcgccgccctgatggccgccctggccgccgccgagcccgccgacagcggcctggagagactggtgagagccctgtgcacccccggctacaacgccagagcccccctgcactacctggcccccctgctgagcaacctgagccagagacccgccgccagagccttcctgctggaccccgacagatgcgtggtgcagagactgctgcccctgacccagtaccccgacagcagcgtgagaagaggcggcgtggtgggcaccctgagaaactgctgcttcgagcacagacaccacgagtggctgctgggccccgaggtggacatcctgcccttcctgctgctgcccctggccggccccgaggacttcagcgaggaggagatggagagactgcccgtggacctgcagtacctgccccccgacaagcagagagagcccgacgccgacatcagaaagatgctggtggaggccatcatgctgctgaccgccaccgcccccggcagacagcaggtgagagaccagggcgcctacctgatcctgagagagctgcacagctgggagcccgagcccgacgtgagaaccgcctgcgagaagctgatccaggtgctgatcggcgacgagcccgagagaggcatggagaacctgctggaggtgcaggtgcccgaggacgtggagcagcagctgcagcagctggactgcagagagcaggagcagctggagagagagctggcccccgagccctgggtggagagagccacccccacctag

SEQ ID NO: 191317 - DNA, 1173 bp, Artificial Sequence
  derived and/or modified sequence
atgggcgaggccggcgccggcgccggcgccagcggcggccccgaggccagccccgaggccgaggtggtgaagctgctgcccttcctggcccccggcgccagagccgacctgcaggccgccgccgtgagacacgtgctggccctgaccggctgcggccccggcagagccctgctggccggccaggccgccctgctgcaggccctgatggagctggcccccgccagcgcccccgccagagacgccgccagagccctggtgaacctggccgccgaccccggcctgcacgagaccctgctggccgccgaccccggcctgcccgccagactgatgggcagagccctggacccccagtggccctgggccgaggaggccgccgccgccctggccaacctgagcagagagcccgccccctgcgccgccctgatggccgccctggccgccgccgagcccgccgacagcggcctggagagactggtgagagccctgtgcacccccggctacaacgccagagcccccctgcactacctggcccccctgctgagcaacctgagccagagacccgccgccagagccttcctgctggaccccgacagatgcgtggtgcagagactgctgcccctgacccagtaccccgacagcagcgtgagaagaggcggcgtggtgggcaccctgagaaactgctgcttcgagcacagacaccacgagtggctgctgggccccgaggtggacatcctgcccttcctgctgctgcccctggccggccccgaggacttcagcgaggaggagatgcagagactgcccgtggacctgcagtacctgccccccgacaagcagagagagcccgacgccgacatcagaaagatgctggtggaggccatcatgctgctgaccgccaccgcccccggcagacagcaggtgagagaccagggcgcctacctgatcctgagagagctgcacagctgggagcccgagcccgacgtgagaaccgcctgcgagaagctgatccaggtgctgatcggcgacgagcccgagagaggcatggagaacctgctggaggtgcaggtgcccgaggacgtggagcagcagctgcagcagctggactgcagagagcaggagcagctggagagagagctggcccccgagccctgggtggagagagccacccccacctag

SEQ ID NO: 191318 - DNA, 1173 bp, Artificial Sequence
  derived and/or modified sequence
atgggagaggcgggtgctggggcaggggcatctggtggtccagaggcctcgcctgaggcagaggttgttaaactcctccccttcctagcaccaggagctcgcgcagatctccaggccgccgctgtgagacatgtcttggcgctgaccgggtgtggcccggggagggctctgctggccgggcaggccgctttgttgcaggctctgatggagctcgcccctgcatctgcccccgcccgggatgctgcccgggcactggtcaacctggcggctgaccccggtctgcatgagacattgttggcagcagatcctggactgcctgcccgcttgatgggcagagctctcgatccccaatggccctgggccgaagaggcggcagctgccctggcaaatctgtctcgcgaaccagccccttgcgctgccttgatggcagccctggctgcagccgagccagctgacagcggactggagcggctggtacgcgctctgtgcacacctggttacaatgcacgcgcgcccttacactatctggcgcccctgctatccaacttgtcccagaggcctgctgcgcgggcctttctactggacccggacaggtgcgtcgtccagagactgttgcccctgacacagtacccagattcctctgtgagacggggaggggtcgtaggcacactgcggaattgttgttttgagcaccggcatcacgagtggctccttggccccgaagtagacattctgccctttctgctcctcccactggcaggtcccgaggacttctctgaggaggagatggagcgactgccagtggacctacagtatctccctcccgacaagcaacgtgagcccgacgccgatattcgaaaaatgctagtggaagctataatgctcctgacagcgaccgctcctggacgccaacaggtcagagatcagggagcatacctgatcttgcgggagctgcactcctgggagcccgagcctgatgtgcggacagcctgcgagaagttaatccaagtcctgatcggcgatgaacctgaacgagggatggagaacctcctggaggtgcaggtgccagaggatgtggaacagcagctgcaacagctggactgccgagaacaggaacagttggaaagggaacttgcccctgagccttgggttgagagagccacacctacatag

SEQ ID NO: 191319 - DNA, 1173 bp, Artificial Sequence
  derived and/or modified sequence
atgggagaagccggcgcaggggctggggcctccggtggtcccgaggcctcgccagaagctgaggtcgttaaattgcttccatttcttgcccccggcgcccgtgctgacttgcaagccgccgctgtccgccacgtactagctctcacgggttgtggccccggcagggccctcctggccggacaggccgccttgctgcaagccctgatggaacttgccccagcgtcagctcccgccagagacgccgccagagccctggtcaatttagccgctgaccctgggttgcacgaaaccctgttggctgctgacccgggcctgcccgcgcgtctgatgggtcgtgctctggaccctcagtggccttgggcagaggaagcagctgctgccctcgcgaacttgagccgtgagcccgccccatgcgccgcgctcatggccgcactcgccgccgctgagcccgccgactctggcctcgaaaggctggttcgggcactctgtacccccggctacaacgcaagggcacctctgcactaccttgcacccttactttctaatctttctcagagacccgcagctagggcctttctacttgatcccgacaggtgtgtggtgcagcggttactcccattgacccagtatcctgattcgtctgtccgccgggggggagtggtgggtactctcagaaactgttgttttgaacaccgacaccacgagtggctcttgggcccagaggttgacattctgccctttctactgcttccgctggccggccctgaggacttcagcgaggaggaaatgcagcgtctgcctgtcgatcttcaatacctgccccctgacaaacagagagagcctgacgccgatattcggaagatgctcgttgaggctattatgctgctgacagcgacagcccctggaagacagcaggtacgcgaccaaggggcgtatctgatcttgcgggagcttcatagctgggaaccagagcctgacgtacggacagcctgcgagaagctcatccaggtgttgattggagatgaacctgaacgggggatggaaaacctactggaggtccaggtgcccgaggacgttgaacaacagttacagcagctggattgtcgggagcaggaacagctggagcgagagttggcacccgagccttgggtggaaagagctacacccacatag

SEQ ID NO: 191320 - DNA, 2531 bp, Artificial Sequence
  derived and/or modified sequence
gggccacacagcggacccctaagcggaccgctggcaccggtcgggtggcagcagagtgtcgctcgacatgggggaggccggggctggcgctggcgcctcgggagggccggaggcaagcccggaggcagaggtggtgaagctgctgcccttcctggcgccgggcgcgcgggcggacctgcaggcggcggcggtgcggcacgtgctggcgctgactggctgcggacccggccgcgcgctgttggcggggcaggcggcgctgctgcaggcgctgatggagctggcgccggcctctgccccggcccgggacgccgcccgcgcgctcgtgaacttggccgccgaccccggcctgcacgagacattgctggcggccgaccccgggctgccagcgcgcctgatgggccgcgcgttggacccgcagtggccctgggccgaggaggcggccgccgcgctagccaacctcagtcgcgagccggcgccgtgtgcagcgctcatggcggcgctggcggccgcggagccggcagactcgggcctggagcggctggtgcgcgcgctgtgcacgcccggctacaacgcccgcgcgcccctgcactacctagcgccgctgctctccaacctcagccaacgccctgcggcgcgggccttcctactggaccccgacaggtgcgtggtccagcggctgctgccccttacccagtaccccgactcctctgtacgcaggggcggggtggtggggacgctgcggaattgctgcttcgagcaccgacatcacgagtggttgcttggacctgaggtggacattctcccctttttgctcctgcccttggctgggcctgaggatttctccgaggaagagatggaacggctgcctgtcgacttgcagtacctgccaccagacaagcagcgagaacctgatgcagacatccgcaagatgcttgttgaagccatcatgctgctgacagccacagcaccaggtcggcagcaggtgcgggaccagggagcctacctgatccttcgagagctgcacagctgggagccggagcccgacgtgcggacggcttgtgagaagctcatccaggtgcttattggggacgagcctgaacgtggcatggaaaacctgctggaggtgcaggtgcctgaggatgtggagcagcagctgcagcagctggattgcagggagcaggagcagttggagcgggagctggccccagagccatgggtggagagggccacacccacctgaggcccctgcagccggacaccagctccagggtcccctttgccaggctttctcagaccaggccttcctgcagctgtctgcaggccccctgggtccccttgttcagagactgtgctcttctgagaagcagagctacgcttaggctccagtaaggattggaggcactttccagccctgtgcagtgttgctaccagcaagaatgaaggttgtgcagagcagtactgtgaggtaggcaccgtgactcggctgcctgtgcagaaggtggaggtggcaggcggatggccagggagccatgagaagactcttcctgggcacggcgtggggactggacagaaaaccactgcaagccccaaggagccagctgaagcctcccaatccccagggcactgcagagtctgggcagaggtgggcgcataggtacaagtgctgctttgtcagcctcactccctgcagctctcagctccctgttccctgagacctggcctcaaagggctgacccagccatacgtagatcctggggtctttctaggactgtgcctccctgcttgacctatgctccaggaccctgccctcaacccttgtcagctccctaagtcttcctgtttcccagtctcagattgagtgggtgctctcattggcctctctagctaggccgtctccctggtcagcttccttgagcctgggccactcctccctggccttcttacctctgccaagagcctccagatgtgcctgcagcctagtccctgcccaagcttctcccccagccaccctctgcccctgtggtagagcccactataggcccaggcgccttacgtgcttctcccctggacctatgtgcatccctcacctgccagttatgtggctgccaagccccacaggctgtcatggtggctcttgccacacttcccttcctgagctgacctgacctcactgccacctcttgcattgggatcctgagggctggcccctgctcactgatgggccctcccaggcccgtcaagccctggtgaaggagcttagcttgtcttcttggcaattcacaatgcctcactccacaccctaaaactggagcgtcccctatggtctcctgctgtggcttgggtgccgggcgtctcccgcctccaggatctcctctcacctgcccccattaaagctctgccactcatgcaggcatgtgtggaccatgttttcccctggccagagcccccacctgccactggaggccagttgccctcttagcactcagacatcagcactgtcttcacagaataaatgctttatctggccttgc

SEQ ID NO: 191321 - DNA, 2405 bp, Artificial Sequence
  derived and/or modified sequence
gggccacacagcggacccctaagcggaccgctggcaccggtcgggtggcagcagagtgtcgctcgacatgggggaggccggggctggcgctggcgcctcgggagggccggaggcaagcccggaggcagaggtggtgaagctgctgcccttcctggcgccgggcgcgcgggcggacctgcaggcggcggcggtgcggcacgtgctggcgctgactggctgcggacccggccgcgcgctgttggcggggcaggcggcgctgctgcaggcgctgatggagctggcgccggcctctgccccggcccgggacgccgcccgcgcgctcgtgaacttggccgccgaccccggcctgcacgagacattgctggcggccgaccccgggctgccagcgcgcctgatgggccgcgcgttggacccgcagtggccctgggccgaggaggcggccgccgcgctagccaacctcagtcgcgagccggcgccgtgtgcagcgctcatggcggcgctggcggccgcggagccggcagactcgggcctggagcggctggtgcgcgcgctgtgcacgcccggctacaacgcccgcgcgcccctgcactacctagcgccgctgctctccaacctcagccaacgccctgcggcgcgggccttcctactggaccccgacaggtgcgtggtccagcggctgctgccccttacccagtaccccgactcctctgtacgcaggggcggggtggtggggacgctgcggaattgctgcttcgagcaccgacatcacgagtggttgcttggacctgaggtggacattctcccctttttgctcctgcccttggctgggcctgaggatttctccgaggaagagatgcaacggctgcctgtcgacttgcagtacctgccaccagacaagcagcgagaacctgatgcagacatccgcaagatgcttgttgaagccatcatgctgctgacagccacagcaccaggtcggcagcaggtgcgggaccagggagcctacctgatccttcgagagctgcacagctgggagccggagcccgacgtgcggacggcttgtgagaagctcatccaggtgcttattggggacgagcctgaacgtggcatggaaaacctgctggaggtgcaggtgcctgaggatgtggagcagcagctgcagcagctggattgcagggagcaggagcagttggagcgggagctggccccagagccatgggtggagagggccacacccacctgaggcccctgcagccggacaccagctccagggtcccctttgccaggctttctcagaccaggccttcctgcagctgtctgcaggccccctgggtccccttgttcagagactgtgctcttctgagaagcagagctacgcttaggctccagtaaggattggaggcactttccagccctgtgcagtgttgctaccagcaagaatgaaggttgtgcagagcagtactgtgaggtaggcaccgtgactcggctgcctgtgcagaaggtggaggtggcaggcggatggccagggagccatgagaagactcttcctgggcacggcgtggggactggacagaaaaccactgcaagccccaaggagccagctgaagcctcccaatccccagggcactgcagagtctgggcagaggtgggcgcataggtacaagtgctgctttgtcagcctcactccctgcagctctcagctccctgttccctgagacctggcctcaaagggctgacccagccatacgtagatcctggggtctttctaggactgtgcctccctgcttgacctatgctccaggaccctgccctcaacccttgtcagctccctaagtcttcctgtttcccagtctcagattgagtgggtgctctcattggcctctctagctaggccgtctccctggtcagcttccttgagcctgggccactcctccctggccttcttacctctgccaagagcctccagatgtgcctgcagcctagtccctgcccaagcttctcccccagccaccctctgcccctgtggtagagcccactataggcccaggcgccttacgtgcttctcccctggacctatgtgcatccctcacctgccagttatgtggctgccaagccccacaggctgtcatggtggctcttgccacacttcccttcctgagctgacctgacctcactgccacctcttgcattgggatcctgagggctggcccctgctcactgatgggccctcccaggcccgtcaagccctggtgaaggagcttagcttgtcttcttggcaattcacaatgcctcactccacaccctaaaactggagcgtcccctatggtctcctgctgtggcttgggtgccgggcgtctcccgcctccaggatctcctctcacctgcccccattaaagctctgccactca

SEQ ID NO: 191322 - DNA, 1173 bp, Artificial Sequence
  derived and/or modified sequence
atgggagaggccggggccggggccggggccagcggcggccctgaggccagccctgaggccgaggtggtgaagctgctgcccttcctggcccctggggcccgggctgacctgcaggccgctgctgtgcgccacgtgctggccctgaccggctgcggccctggccgggccctgctggccggccaggccgccctgctgcaggccctgatggagctggccccagccagcgccccagccagagatgctgcccgggccctggtgaacctggccgctgaccccggcctgcacgagaccctgctggccgctgaccccggcctgcctgcccggctgatgggccgggccctggacccccagtggccctgggccgaggaggccgccgccgccctggccaacctgagccgggagcccgccccctgtgccgccctgatggccgccctggccgctgctgagcctgctgacagcggcctggagcggctggtgcgggccctgtgcaccccaggctacaatgcccgggcccccctgcactacctggcccccctgctgagcaacctgagccagaggcctgctgcccgggccttcctgctggaccctgacagatgtgtggtgcagaggctgctgcccctgacccagtacccagacagctctgtgcggcggggcggcgtggtgggcaccctgaggaactgctgctttgagcaccgccaccacgagtggctgctgggccctgaggtggacatcctgcccttcctgctgctgcccctggccggccctgaggacttcagcgaggaggagatggagcggctgcctgtggacctgcagtacctgcccccagacaagcagcgggagccagatgctgacatcaggaagatgctggtggaggccatcatgctgctgacagccacagcccctggccggcagcaggtgcgggaccagggcgcctacctgatcctgcgggagctgcacagctgggagcctgagccagatgtgaggacagcctgtgagaagctgatccaggtgctgattggagatgagcctgagcggggcatggagaacctgctggaggtgcaggtgcctgaagatgtggagcagcagctgcagcagctggactgccgggagcaggagcagctggagcgggagctggcccctgagccctgggtggagcgggccacccccacctag

SEQ ID NO: 191323 - DNA, 1173 bp, Artificial Sequence
  derived and/or modified sequence
atgggagaggccggggccggggccggggccagcggcggccctgaggccagccctgaggccgaggtggtgaagctgctgcccttcctggcccctggggcccgggctgacctgcaggccgctgctgtgcgccacgtgctggccctgaccggctgcggccctggccgggccctgctggccggccaggccgccctgctgcaggccctgatggagctggccccagccagcgccccagccagagatgctgcccgggccctggtgaacctggccgctgaccccggcctgcacgagaccctgctggccgctgaccccggcctgcctgcccggctgatgggccgggccctggacccccagtggccctgggccgaggaggccgccgccgccctggccaacctgagccgggagcccgccccctgtgccgccctgatggccgccctggccgctgctgagcctgctgacagcggcctggagcggctggtgcgggccctgtgcaccccaggctacaatgcccgggcccccctgcactacctggcccccctgctgagcaacctgagccagaggcctgctgcccgggccttcctgctggaccctgacagatgtgtggtgcagaggctgctgcccctgacccagtacccagacagctctgtgcggcggggcggcgtggtgggcaccctgaggaactgctgctttgagcaccgccaccacgagtggctgctgggccctgaggtggacatcctgcccttcctgctgctgcccctggccggccctgaggacttcagcgaggaggagatgcagaggctgcctgtggacctgcagtacctgcccccagacaagcagcgggagccagatgctgacatcaggaagatgctggtggaggccatcatgctgctgacagccacagcccctggccggcagcaggtgcgggaccagggcgcctacctgatcctgcgggagctgcacagctgggagcctgagccagatgtgaggacagcctgtgagaagctgatccaggtgctgattggagatgagcctgagcggggcatggagaacctgctggaggtgcaggtgcctgaagatgtggagcagcagctgcagcagctggactgccgggagcaggagcagctggagcgggagctggcccctgagccctgggtggagcgggccacccccacctag

SEQ ID NO: 191324 - DNA, 1173 bp, Artificial Sequence
  derived and/or modified sequence
atgggcgaggccggcgccggcgccggcgccagcggcggccccgaggcatcccccgaggcagaggtggtgaagctactgccattcctcgcgcccggagcacgtgctgaccttcaggccgcagccgttcggcacgtcttagctcttacaggatgtggtccaggtagggctctactggctggccaggctgctctccttcaggctttaatggagctggcacctgcctcggcaccagcccgggacgctgcacgggcattagtgaatctggccgctgatccaggtctgcatgagacacttcttgctgccgaccccgggctgcccgctagactgatggggcgagccttggatccgcaatggccttgggcagaggaggcagctgccgcacttgctaatcttagtcgggagcccgctccgtgtgccgccctcatggcggccctagctgctgcagagcccgctgattctggccttgagcgcctggtacgcgcactctgtacgccagggtataacgcacgcgctcccttacactacctcgctccattgctcagcaatttgtcacaaaggcccgccgcacgcgcctttcttctcgatcccgaccgatgcgtcgtgcaaaggctcctccccctcactcaataccccgactcctccgtgagaagaggaggagtggttggcacacttcgcaattgctgcttcgagcatagacatcacgagtggctgctaggaccagaggtggatatcctgccattcctcctgctgccacttgccggtcccgaggatttctcggaggaggagatggagaggctgcctgtagacctgcagtacctacctcccgacaaacagagggagcctgacgctgacattcggaaaatgctagtagaagccatcatgctcctcaccgcaacagcccccggcaggcagcaggtaagggaccagggagcctacctcattctgagggaactacattcctgggagccggaacctgacgtgcgcaccgcctgtgagaaactgatccaggtgttgattggggacgaacccgagcggggtatggaaaatctgttggaagttcaggtcccggaggacgtcgaacagcagctccagcagctggattgtcgagagcaggaacaacttgagcgtgagctggccccggaaccgtgggtggagcgcgcaactcccacctag

SEQ ID NO: 191325 - DNA, 1173 bp, Artificial Sequence
  derived and/or modified sequence
atgggcgaggccggcgccggcgccggcgccagcggcggccccgaggctagtccagaggccgaggtcgtaaaactgttgccatttctggcccctggggctcgcgcggacctgcaggccgccgctgtgcgccacgtattggccctgactgggtgcggccccgggcgtgcactgcttgctggacaagccgctctgctgcaggctctgatggagctcgcaccagcctccgcccctgcccgggatgcggcacgggccctggtcaaccttgcagctgatccaggactccacgagaccctgttggctgcagaccccggactccccgctcgcttgatgggcagagctctggacccacagtggccttgggcagaagaggccgccgctgctctagccaatctgagtcgagaacctgccccgtgcgccgcactaatggcagccctggcagctgcggaaccagctgatagtgggcttgagcggctagtgagggctctgtgcacccccgggtataatgcccgggcccctctacattacctcgcccccctgctcagtaacctatcacaacggcctgccgcaagagcatttctgctggaccctgaccgatgtgtagtgcaaaggctcctgcccttgacccagtatcctgattctagtgtgcggaggggcggggtggtagggactctcaggaactgctgcttcgagcatcgccatcacgaatggctgctgggcccagaggtggatatattgcctttcctactcctcccattggctgggcctgaggatttcagcgaagaggagatgcagcgactgcccgtggatctgcaatacctgccccccgacaagcagagggaaccagacgcagatatcaggaaaatgctggttgaggccataatgctgcttacagccaccgcccctggtcgtcagcaggtgcgagatcaaggcgcatatctgatcctgcgggagctccattcctgggaacctgagcctgacgtccgtactgcctgcgagaagttgatccaagtgctaattggggatgagccggaaagaggaatggaaaatctccttgaggtgcaagtgcctgaagacgttgaacaacagctgcagcagttggactgcagggaacaagagcaactagagagagaattggcaccagaaccctgggtggaaagagccacacctacatag

SEQ ID NO: 191326 - DNA, 1173 bp, Artificial Sequence
  derived and/or modified sequence
atgggtgaggctggcgcaggcgcaggcgcttctggaggtccagaagcaagtcctgaagcagaggtggtgaagctgctgccatttctcgcacctggcgctcgcgctgatcttcaggctgcagccgtgagacacgtccttgccctcacaggttgcgggccaggacgggctctcctggccggacaggcggcacttttacaggcgcttatggagctggcccctgcctccgcccctgctagagacgccgcaagagccttggtaaacctggccgctgacccaggcctgcatgaaacactcctcgccgcagaccccggtctacctgcgcgactgatgggaagagcactggatccacagtggccttgggctgaggaggccgctgccgctcttgctaaccttagccgtgagcctgctccttgtgcagctctcatggctgcccttgctgctgccgagcctgcagattctggtctggaacggttagtccgagccctgtgcacccctggatacaatgcgcgagcgccactgcattatctggcacccctcctgtcaaacttgagccagaggccagcggcaagggccttcttgctggatcccgatcgatgcgttgtccagaggctgttaccactgactcaataccctgattcatctgtgaggcggggaggggtcgtaggcacccttcgaaattgttgcttcgagcaccgacatcacgaatggttgttagggccagaagtcgatatactgccttttctcctactccccctggccggacctgaggacttctccgaggaagaaatggaacgactccctgtggacctacagtacctcccgcctgacaaacagagagagcctgatgcagacattaggaaaatgctagtggaagctatcatgctgctgactgctacagcacccggtaggcagcaagttagggaccagggcgcttacttgattctgcgagagcttcattcttgggagcctgaacccgatgtgaggaccgcctgcgagaagctcatccaggtgctaataggagacgaacccgaaagaggtatggaaaacttgcttgaggtgcaggtgccagaggatgtagagcaacaactccagcagctggattgcagagagcaggagcaactcgagcgggaattggcccctgaaccctgggtggagcgagcaacaccaacatag

SEQ ID NO: 191327 - DNA, 1173 bp, Artificial Sequence
  derived and/or modified sequence
atgggtgaggctggcgctggcgctggcgcaagcggcggaccggaggcatctccagaagcggaagtcgtgaaactgctgcccttcctggccccaggcgctcgggctgatctacaagcagctgcagtgcggcacgtactggctcttaccggctgcgggcctggacgtgcgttgttggctggccaagctgctttgctgcaggccttaatggagttagcacctgcaagcgcccctgcccgagacgccgctagagcactggtgaatttagctgccgacccaggcttgcacgagactctcttggctgctgatcctggcctgccagcacggctgatggggagagccctcgacccccaatggccatgggccgaagaggctgcagctgcactcgcgaatctctcacgcgaaccagctccctgtgccgcacttatggccgctcttgccgctgcagaaccagccgattctgggttggaacggctggtgagagcgttatgcacccctgggtacaacgcacgggctccactgcattacctggcccctctactgagcaatctgtcacagcgccctgctgccagagccttcctgttggacccagataggtgcgtcgtccagaggctgctgccattgacgcagtaccctgactcttcagtcaggaggggaggagttgtggggaccctgagaaattgctgcttcgagcacagacaccacgagtggcttttgggcccagaggtcgacatcctgccatttctactactgcctttggctgggccagaggacttttccgaggaagagatgcaacgactccccgttgatttacagtaccttccgccagataaacagagggaacccgatgctgacatacggaaaatgttggttgaggccatcatgctattgactgccacggcaccaggacggcagcaggttcgcgatcagggggcatacctcattctccgggagcttcactcgtgggaacctgagccagacgtgcgcaccgcctgcgagaagctgatccaggtgctaatcggtgatgagccggaacgaggtatggagaacttactcgaagtacaggtcccagaggatgtagagcagcagttgcagcagctcgattgtcgcgaacaggagcagctggagagggagctggcacccgagccttgggtggagcgggctactcctacatag

SEQ ID NO: 191328 - protein, 189 aa, Artificial Sequence
  derived and/or modified sequence
MRLSLPLLLLLLGAWAIPGGLGDRAPLTATAPQLDDEEMYSAHMPAHLRCDACRAVAYQMWQNLAKAETKLHTSNSGGRRELSELVYTDVLDRSCSRNWQDYGVREVDQVKRLTGPGLSEGPEPSISVMVTGGPWPTRLSRTCLHYLGEFGEDQIYEAHQQGRGALEALLCGGPQGACSEKVSATREEL

SEQ ID NO: 191329 - protein, 97 aa, Artificial Sequence
  derived and/or modified sequence
MPAELWLTSYGVREVDQVKRLTGPGLSEGPEPSISVMVTGGPWPTRLSRTCLHYLGEFGEDQIYEAHQQGRGALEALLCGGPQGACSEKVSATREEL

SEQ ID NO: 191330 - protein, 75 aa, Artificial Sequence
  derived and/or modified sequence
MRLSLPLLLLLLGAWAIPGGLGDRAPLTATAPQLDDEEMYSAHMPAHLRCDACRAVAYQRLCSYPPHLPLTEQQS

SEQ ID NO: 191331 - DNA, 294 bp, Artificial Sequence
  derived and/or modified sequence
atgcccgccgagctgtggctgaccagctacggcgtgagagaggtggaccaggtgaagagactgaccggccccggcctgagcgagggccccgagcccagcatcagcgtgatggtgaccggcggcccctggcccaccagactgagcagaacctgcctgcactacctgggcgagttcggcgaggaccagatctacgaggcccaccagcagggcagaggcgccctggaggccctgctgtgcggcggcccccagggcgcctgcagcgagaaggtgagcgccaccagagaggagctgtag

SEQ ID NO: 191332 - DNA, 228 bp, Artificial Sequence
  derived and/or modified sequence
atgagactgagcctgcccctgctgctgctgctgctgggcgcctgggccatccccggcggcctgggcgacagagcccccctgaccgccaccgccccccagctggacgacgaggagatgtacagcgcccacatgcccgcccacctgagatgcgacgcctgcagagccgtggcctaccagagactgtgcagctaccccccccacctgcccctgaccgagcagcagagctag

SEQ ID NO: 191333 - DNA, 570 bp, Artificial Sequence
  derived and/or modified sequence
atgcgtctttctctgcccctcctcttgttactgctgggcgcgtgggcaatcccgggaggattgggcgaccgggcccctctgaccgcaaccgctcctcagctcgatgacgaagagatgtattcagctcacatgccagctcatttgcgttgtgatgcatgccgcgccgtggcataccagatgtggcagaatctggccaaggccgagacgaaacttcatacctcgaactccgggggcagaagggagctcagcgaactggtgtacacagatgttctcgataggtcctgctcacgcaactggcaagactatggcgtgagggaagtcgatcaggtaaagcgactcactgggcccgggttgtctgagggccctgagcctagcatcagcgttatggtaaccggtggcccatggcccactaggctgtctagaacatgtctccactatctgggggagttcggcgaagaccaaatctatgaggctcaccagcaggggcggggcgcccttgaggcactgctgtgcgggggaccgcagggggcctgcagcgaaaaagtttctgccacccgagaagagctgtag

SEQ ID NO: 191334 - DNA, 294 bp, Artificial Sequence
  derived and/or modified sequence
atgcccgccgagctgtggctaacctcttatggagtccgggaagtggaccaagtgaaacgcctcacaggaccaggattgagtgaagggcccgagccctcgataagcgtgatggtcacagggggtccctggcccacccgcctttctcgcacctgtcttcactatttgggggaatttggcgaggaccagatctatgaagctcaccagcaaggccgtggcgcactcgaggcactgctgtgcgggggaccacagggcgcgtgttccgagaaggtatcagctaccagggaggaattatag

SEQ ID NO: 191335 - DNA, 228 bp, Artificial Sequence
  derived and/or modified sequence
atgcgcttgtccctcccactcctgttactcctactgggggcatgggcgattccaggcgggctgggggacagggcgccactcaccgccacagcccctcagctggacgatgaggagatgtactccgcccatatgccggctcacctgcggtgtgacgcatgtagggcagtggcctaccagagactctgttcataccctccccacctgccattaacagagcaacagtcatag

SEQ ID NO: 191336 - DNA, 570 bp, Artificial Sequence
  derived and/or modified sequence
atgaggctgagcctgcccctgctgctgctgctgctgggcgcctgggccatccctgggggcctgggggaccgggcccccctgacagccacagccccccagctggatgatgaggagatgtacagcgcccacatgcctgcccacctgcgctgtgatgcctgcagagctgtggcctaccagatgtggcagaacctggccaaggccgagaccaagctgcacaccagcaacagcggcggcagaagagagctgtctgagctggtgtacacagatgtgctggacaggagctgcagcaggaactggcaggactatggagtgcgggaggtggaccaggtgaagaggctgaccggccctggcctgtctgagggccctgagcccagcatctctgtgatggtgactggaggcccctggcccacccggctgagcaggacctgcctgcactacctgggggagtttggagaggaccagatctatgaggcccaccagcagggccgcggggccctggaggccctgctgtgtggcggcccccagggcgcctgcagcgagaaggtgtctgccacccgggaggagctgtag

SEQ ID NO: 191337 - DNA, 294 bp, Artificial Sequence
  derived and/or modified sequence
atgcctgctgagctgtggctgaccagctatggagtgcgggaggtggaccaggtgaagaggctgaccggccctggcctgtctgagggccctgagcccagcatctctgtgatggtgactggaggcccctggcccacccggctgagcaggacctgcctgcactacctgggggagtttggagaggaccagatctatgaggcccaccagcagggccgcggggccctggaggccctgctgtgtggcggcccccagggcgcctgcagcgagaaggtgtctgccacccgggaggagctgtag

SEQ ID NO: 191338 - DNA, 228 bp, Artificial Sequence
  derived and/or modified sequence
atgaggctgagcctgcccctgctgctgctgctgctgggcgcctgggccatccctgggggcctgggggaccgggcccccctgacagccacagccccccagctggatgatgaggagatgtacagcgcccacatgcctgcccacctgcgctgtgatgcctgcagagctgtggcctaccagaggctgtgcagctacccaccccacctgcccctgacagagcagcagagctag

SEQ ID NO: 191339 - DNA, 570 bp, Artificial Sequence
  derived and/or modified sequence
atgcggctgagcctgcccctgctgctgctgctgctgggcgcctgggccattccaggtggtctcggggacagagcccctctgacggctacagcccctcaacttgacgatgaagaaatgtacagcgcccacatgccagcacatctccgctgtgacgcatgtagagccgtggcttaccagatgtggcaaaatttggccaaggccgagaccaagctgcacacttccaattcagggggacggcgggagctttctgagctcgtctacactgacgtgttggatcgatcctgcagtagaaactggcaggattacggcgttagagaggtagaccaggtcaagcggctgacaggaccaggattgagtgagggccctgagccttccattagcgtgatggtgactgggggcccatggccaaccagactgagccgcacatgcctccattatttgggtgaattcggggaggaccagatttacgaggcccatcagcagggcaggggggcactcgaggcactgttgtgcggtgggccccagggtgcctgtagcgaaaaggtgagtgccacgcgggaggagctttag

SEQ ID NO: 191340 - DNA, 294 bp, Artificial Sequence
  derived and/or modified sequence
atgcccgccgagctgtggctgaccagctacggcgtgcgggaggtggaccaggtaaaacgcttgacgggacctggtctgtccgaaggacccgagcccagcatttctgtcatggtgacaggcggaccatggcctacgcgcctgagtcggacctgcctccactatctcggggagttcggcgaggatcagatctatgaagctcatcagcaaggacggggcgctctggaggctctcctgtgcggcggcccacagggcgcatgctccgaaaaagtgagtgctacaagggaggagctgtag

SEQ ID NO: 191341 - DNA, 228 bp, Artificial Sequence
  derived and/or modified sequence
atgcggctgagcctgcccctgctgctgctgctgctgggcgcctgggctattcctggaggccttggggacagagctcccttgaccgcaacagccccacagttagatgatgaggagatgtactcagctcacatgcctgcccatctgaggtgtgatgcctgccgggctgtggcctatcagagactttgtagttacccacctcatctgcctctgacagagcaacagagctag

SEQ ID NO: 191342 - DNA, 682 bp, Artificial Sequence
  derived and/or modified sequence
ctcaaccacagactacacttgctgaactggctcctggggccatgaggctgtcactgccactgctgctgctgctgctgggagcctgggccatcccagggggcctcggggacagggcgccactcacagccacagccccacaactggatgatgaggagatgtactcagcccacatgcccgctcacctgcgctgtgatgcctgcagagctgtggcttaccagctacggagttcgagaagtggaccaagtgaaacgtctcacaggcccaggacttagcgaggggccagagccaagcatcagcgtgatggtcacagggggcccctggcctaccaggctctccaggacatgtttgcactacttgggggagtttggagaagaccagatctatgaagcccaccaacaaggccgaggggctctggaggcattgctatgtgggggaccccagggggcctgctcagagaaggtgtcagccacaagagaagagctctagtcctggactctaccctcctctgaaagaagctggggcttgctctgacggtctccactcccgtctgcaggcagccaggagggcaggaagcccttgctctgtgctgccatcctgcctccctcctccagcctcagggcactcgggcctgggtgggagtcaacgccttcccctctggactcaaataaaacccagtgacctc

SEQ ID NO: 191343 - DNA, 570 bp, Artificial Sequence
  derived and/or modified sequence
atgcgactgagtctgcctttactattactactcctgggagcctgggctataccaggaggactgggggaccgcgctcccctgaccgccaccgcccctcagctagacgacgaggaaatgtactcagctcatatgcccgcacacttaaggtgcgacgcatgccgggctgtcgcatatcagatgtggcagaatttggctaaggcagagacaaagttacatacaagcaacagtgggggtaggcgagaactatctgagttagtgtacacagatgtgctggaccggagctgcagcaggaattggcaggactacggggtgcgggaggtcgaccaggtgaaaagactaaccgggcctggactttcggagggaccggagccttccatctctgtcatggtcaccgggggaccatggccaacccgactgtctcgaacctgcctccattatctgggcgagttcggcgaggatcaaatttacgaagcgcaccagcaggggcgtggtgccttggaggccttgctttgcggtggcccacagggggcatgctcggaaaaggtgagcgctactagggaggaactttag

SEQ ID NO: 191344 - DNA, 294 bp, Artificial Sequence
  derived and/or modified sequence
atgccggctgaattgtggttaacatcatatggtgtgcgggaggtggatcaagttaagcggcttacagggccaggcctgtctgaggggcctgagccctccataagcgtgatggttaccggagggccttggccaactaggcttagccggacgtgtcttcactatctcggtgagttcggggaggaccagatctacgaagcccatcaacaaggccgaggtgcactagaggccctgctgtgcggcggtccgcaaggtgcgtgcagtgagaaagtgtcagctacccgtgaagaactgtag

SEQ ID NO: 191345 - DNA, 228 bp, Artificial Sequence
  derived and/or modified sequence
atgagattgagtctgcccctactgctcctcctgctaggagcttgggcaatacccggtggcctgggtgacagggcaccgcttacagctaccgcccctcagctggacgacgaggaaatgtacagcgctcacatgccagctcacttacggtgcgatgcctgcagggcggtggcttatcagaggctgtgtagttatccccctcatctgcccctgactgagcaacagtcctag

SEQ ID NO: 191346 - DNA, 269 bp, Artificial Sequence
  derived and/or modified sequence
ctcaaccacagactacacttgctgaactggctcctggggccatgaggctgtcactgccactgctgctgctgctgctgggagcctgggccatcccagggggcctcggggacagggcgccactcacagccacagccccacaactggatgatgaggagatgtactcagcccacatgcccgctcacctgcgctgtgatgcctgcagagctgtggcttaccagagactctgctcctatcctccccacctccccctaactgagcagcagtcctga

SEQ ID NO: 191347 - DNA, 825 bp, Artificial Sequence
  derived and/or modified sequence
cacacacacatctgcacctcaaccacagactacacttgctgaactggctcctggggccatgaggctgtcactgccactgctgctgctgctgctgggagcctgggccatcccagggggcctcggggacagggcgccactcacagccacagccccacaactggatgatgaggagatgtactcagcccacatgcccgctcacctgcgctgtgatgcctgcagagctgtggcttaccagatgtggcaaaatctggcaaaggcagagaccaaacttcatacctcaaactctggggggcggcgggagctgagcgagttggtctacacggatgtcctggaccggagctgctcccggaactggcaggactacggagttcgagaagtggaccaagtgaaacgtctcacaggcccaggacttagcgaggggccagagccaagcatcagcgtgatggtcacagggggcccctggcctaccaggctctccaggacatgtttgcactacttgggggagtttggagaagaccagatctatgaagcccaccaacaaggccgaggggctctggaggcattgctatgtgggggaccccagggggcctgctcagagaaggtgtcagccacaagagaagagctctagtcctggactctaccctcctctgaaagaagctggggcttgctctgacggtctccactcccgtctgcaggcagccaggagggcaggaagcccttgctctgtgctgccatcctgcctccctcctccagcctcagggcactcgggcctgggtgggagtcaacgccttcccctctggactcaaataaaacccagtgacctca

SEQ ID NO: 191348 - DNA, 570 bp, Artificial Sequence
  derived and/or modified sequence
atgagactgagcctgcccctgctgctgctgctgctgggcgcctgggccatccccggcggcctgggcgacagagcccccctgaccgccaccgccccccagctggacgacgaggagatgtacagcgcccacatgcccgcccacctgagatgcgacgcctgcagagccgtggcctaccagatgtggcagaacctggccaaggccgagaccaagctgcacaccagcaacagcggcggcagaagagagctgagcgagctggtgtacaccgacgtgctggacagaagctgcagcagaaactggcaggactacggcgtgagagaggtggaccaggtgaagagactgaccggccccggcctgagcgagggccccgagcccagcatcagcgtgatggtgaccggcggcccctggcccaccagactgagcagaacctgcctgcactacctgggcgagttcggcgaggaccagatctacgaggcccaccagcagggcagaggcgccctggaggccctgctgtgcggcggcccccagggcgcctgcagcgagaaggtgagcgccaccagagaggagctgtag

SEQ ID NO: 191349 - protein, 162 aa, Artificial Sequence
  derived and/or modified sequence
MLQTSNYSLVLSLQFLLLSYDLFVNSFSELLQKTPVIQLVLFIIQDIAVLFNIIIIFLMFFNTFVFQAGLVNLLFHKFKGTIILTAVYFALSISLHVWVMNLRWKNSNSFIWTDGLQMLFVFQRLAAVLYCYFYKRTAVRLGDPHFYQDSLWLRKEFMQVRR

SEQ ID NO: 191350 - DNA, 489 bp, Artificial Sequence
  derived and/or modified sequence
atgctgcagaccagcaactacagcctggtgctgagcctgcagttcctgctgctgagctacgacctgttcgtgaacagcttcagcgagctgctgcagaagacccccgtgatccagctggtgctgttcatcatccaggacatcgccgtgctgttcaacatcatcatcatcttcctgatgttcttcaacaccttcgtgttccaggccggcctggtgaacctgctgttccacaagttcaagggcaccatcatcctgaccgccgtgtacttcgccctgagcatcagcctgcacgtgtgggtgatgaacctgagatggaagaacagcaacagcttcatctggaccgacggcctgcagatgctgttcgtgttccagagactggccgccgtgctgtactgctacttctacaagagaaccgccgtgagactgggcgacccccacttctaccaggacagcctgtggctgagaaaggagttcatgcaggtgagaagatag

SEQ ID NO: 191351 - DNA, 489 bp, Artificial Sequence
  derived and/or modified sequence
atgctgcagacctctaattattctctagtcctctctctgcagtttctcctgctgtcctacgatctctttgttaattccttttccgaactgctgcagaaaactcctgtgatccagcttgtactcttcatcattcaagacattgccgtgctgttcaacattattatcatatttctgatgtttttcaatacgttcgtgttccaggctggcctcgtgaatctcctctttcataaattcaaagggacgatcatcctaaccgctgtgtacttcgctctaagcataagcctgcacgtttgggttatgaacttgcgctggaagaatagcaattctttcatatggaccgacggacttcagatgctgttcgtgtttcagcggctggcagctgttctgtattgctacttttacaaaagaaccgctgtccgcttaggtgatccccacttctatcaggactcgctgtggctacgcaaagagttcatgcaggtgagaaggtag

SEQ ID NO: 191352 - DNA, 489 bp, Artificial Sequence
  derived and/or modified sequence
atgctgcagaccagcaactacagcctggtgctgagcctgcagttcctgctgctgtcctatgacctgtttgtgaacagcttcagcgagctgctgcagaagacccctgtgatccagctggtgctcttcatcatccaggacattgctgtgctcttcaacatcatcatcatcttcctgatgttcttcaacacctttgtgttccaggccggcctggtgaacctgctcttccacaagttcaagggcaccatcatcctgacagctgtgtactttgccctgagcatcagcctgcacgtgtgggtgatgaacctgcgctggaagaacagcaacagcttcatctggacagatggcctgcagatgctgtttgtgttccagaggctggccgctgtgctgtactgctacttctacaagaggacagctgtgcggctgggggacccccacttctaccaggacagcctgtggctgaggaaggagttcatgcaggtgagaagatag

SEQ ID NO: 191353 - DNA, 489 bp, Artificial Sequence
  derived and/or modified sequence
atgctgcagaccagcaactacagcctggtgctgagcctgcagttcctgctgctctcttatgacttgtttgtcaactctttctctgaactgttgcagaagactcctgttattcagctggtgctctttataatccaggacattgctgttctgtttaacatcattatcatcttcctcatgttcttcaacacgttcgtatttcaggctggtctggtgaatttactgttccacaaattcaaaggcacaattatcttaaccgccgtctacttcgccctctcaatatctctgcacgtctgggttatgaacttgcggtggaaaaactccaactcctttatctggactgatgggctgcagatgctttttgtgttccaaaggctggccgctgttctctactgctatttttacaagcggacagctgtccgcctgggagatccacacttctaccaggacagtttgtggctgcgcaaggagttcatgcaggtgcggcgctag

SEQ ID NO: 191354 - DNA, 489 bp, Artificial Sequence
  derived and/or modified sequence
atgttacagactagcaattactctttggtgctctcattgcagttcctcctgctttcctacgatctctttgtcaatagcttctctgaactgttgcagaagacacctgtgattcagctcgtcttgttcatcatacaggatattgccgttctcttcaatataattatcattttcttgatgttctttaatacgttcgtatttcaagcgggtctcgtcaacctcctgtttcacaaatttaaaggaaccattattttgactgcagtatacttcgcactgtcgatttctctacatgtgtgggttatgaatttgcggtggaagaatagtaattcattcatctggaccgacgggctgcagatgctctttgtatttcagcggttggccgctgtcctctattgttatttttacaaaaggaccgctgttcgcttaggagacccccacttttatcaggacagtctatggctgagaaaggaattcatgcaggtaaggcggtag

SEQ ID NO: 191355 - DNA, 1550 bp, Artificial Sequence
  derived and/or modified sequence
gctaaccccctaactcccgttcctcctcggcgtttcttctccaagtccgaagtcagggtccaggactgctgcgatgcatcagccccgcctctcatcccccatccagaggaggcggaaatgttcaggtgaacgcgaagcctcccactacgagccggccctcagcaaggccgtgcgcagtgtgggcgggagccctaagtcagctagcggcgacgctgggagggcccggagcaggccgggccccgaacagcgaaagctccaacatggcggccagactggccatagagcgggaagagaaagccggggactagcaggccgcacggcgcagacggggcccgcctcctccatttacttccggaatttaaagccggcttccggaagccgggacgatgtccgcatgacaaccgacgttggagtttggaggtgcttgccttagagcaagggaaacagctctcattcaaaggaactagaagcctctccctcagtggtagggagacagccaggagcggttttctgggaactgtgggatgtgcccttgggggcccgagaaaacagaaggaagatgctccagaccagtaactacagcctggtgctctctctgcagttcctgctgctgtcctatgacctctttgtcaattccttctcagaactgctccaaaagactcctgtcatccagcttgtgctcttcatcatccaggatattgcagtcctcttcaacatcatcatcattttcctcatgttcttcaacaccttcgtcttccaggctggcctggtcaacctcctattccataagttcaaagggaccatcatcctgacagctgtgtactttgccctcagcatctcccttcatgtctgggtcatgaacttacgctggaaaaactccaacagcttcatatggacagatggacttcaaatgctgtttgtattccagagactagcagcagtgttgtactgctacttctataaacggacagccgtaagactaggcgatcctcacttctaccaggactctttgtggctgcgcaaggagttcatgcaagttcgaaggtgacctcttgtcacactgatggatacttttccttcctgatagaagccacatttgctgctttgcagggagagttggccctatgcatgggcaaacagctggactttccaaggaaggttcagactagctgtgttcagcattcaagaaggaagatcctccctcttgcacaattagagtgtccccatcggtctccagtgcggcatcccttccttgccttctacctctgttccaccccctttccttcctttcctctctgtaccattcattctccctgaccggcctttcttgccgagggttctgtggctcttacccttgtgaagcttttcctttagcctgggacagaaggacctcccagcccccaaaggatctcccagtgaccaaaggatgcgaagagtgatagttacgtgctcctgactgatcacaccgcagacatttagatttttatacccaaggcactttaaaaaaatgttttataaatagagaataaattgaattcttgttccataaa

SEQ ID NO: 191356 - protein, 106 aa, Artificial Sequence
  derived and/or modified sequence
MFAPAVMRAFRKNKTLGYGVPMLLLIVGGSFGLREFSQIRYDAVKSKMDPELEKKLKENKISLESEYEKIKDSKFDDWKNIRGPRPWEDPDLLQGRNPESLKTKTT

SEQ ID NO: 191357 - DNA, 1413 bp, Artificial Sequence
  derived and/or modified sequence
attcactaaggaccgagcaccaaataaccaaggaaaaggaagtgagttaaggacgtactcgtcttggtgagagcgtgagctgctgagatttgggagtctgcgctaggcccgcttggagttctgagccgatggaagagttcactcatgtttgcacccgcggtgatgcgtgcttttcgcaagaacaagactctcggctatggagtccccatgttgttgctgattgttggaggttcttttggtcttcgtgagttttctcaaatccgatatgatgctgtgaagagtaaaatggatcctgagcttgaaaaaaaactgaaagagaataaaatatctttagagtcggaatatgagaaaatcaaagactccaagtttgatgactggaagaatattcgaggacccaggccttgggaagatcctgacctcctccaaggaagaaatccagaaagccttaagactaagacaacttgactctgctgattcttttttccttttttttttttttaaataaaaatattattaactggacttcctaatatatacttctatcaagtggaaaggaaattccaggcccatggaaacttggatatgggtaatttgatgacaaataatcttcactaaaggtcatgtacaggtttttatacttcccagctattccatctgtggatgaaagtaacaatgttggccacgtatattttacacctcgaaataaaaaatgtgaatactgctccaaaaacagagtcacgtattccactctccaactacccacatattccttttgcaatagccattagggcatcattttgatatttcattctgatttctgattctctgatttctgattcctaatgaggacagtaggtctggatccaaattctcacagtaaaatcaagcagtaattttctctcatatctattagggaaagaaaaatgatcacagtctgctaagagtcttgattttctttgtaatgcctcacatagtatgataatcagtctccaaagcatcacatgataattacaatgataccattaacatgtcaaggaaattatattatttatggttgtcaaaaattatgaagtagtgtatgattataagcagatatggcaaatttgttcagtaaatccatagatgactacattttgagaaatactaagataatactaaaaattatgccttagcataatttgcatgcaaaattgccctctagtgtttttgttttgttttgagacatagtctcgctctgttcgcccaggctggagtgcaggggcacgatctctgctcactgcaagctctgcttcccgggttcacaccattctcctgcctcagcatcctgagtagctgggactacaggcacatgctgtcacacccggctaattttttgtatttagtagagatggggtttcaccacgttagccagga

SEQ ID NO: 191358 - DNA, 321 bp, Artificial Sequence
  derived and/or modified sequence
atgttcgcccccgccgtgatgagagccttcagaaagaacaagaccctgggctacggcgtgcccatgctgctgctgatcgtgggcggcagcttcggcctgagagagttcagccagatcagatacgacgccgtgaagagcaagatggaccccgagctggagaagaagctgaaggagaacaagatcagcctggagagcgagtacgagaagatcaaggacagcaagttcgacgactggaagaacatcagaggccccagaccctgggaggaccccgacctgctgcagggcagaaaccccgagagcctgaagaccaagaccacctag

SEQ ID NO: 191359 - DNA, 321 bp, Artificial Sequence
  derived and/or modified sequence
atgtttgcccctgccgtgatgagagcattccgtaagaataaaacccttggctatggggttccaatgttacttctgattgtggggggcagcttcggtcttcgggaattctcccagatcaggtacgatgccgtgaagtcaaagatggaccctgagctggaaaagaagctcaaggagaacaagattagtctggaaagcgaatacgagaagataaaggactccaaattcgatgattggaagaacatcagagggccgagaccatgggaggatccggatttgctccagggccgtaatcctgaaagccttaaaaccaaaacgacatag

SEQ ID NO: 191360 - DNA, 321 bp, Artificial Sequence
  derived and/or modified sequence
atgtttgccccagctgtgatgagggccttcaggaagaacaagaccctgggctacggcgtgcccatgctgctgctgattgtgggcggcagctttggcctgcgggagttcagccagatccgctatgatgctgtgaagagcaagatggaccctgagctggagaagaagctgaaggagaacaagatcagcctggagagtgaatatgagaagatcaaggacagcaagtttgatgactggaagaacatccggggcccccggccctgggaggaccctgacctgctgcagggcaggaaccctgagagcctgaagaccaagaccacctag

SEQ ID NO: 191361 - DNA, 321 bp, Artificial Sequence
  derived and/or modified sequence
atgttcgcccccgccgtgatgcgggccttccggaagaacaagaccctcggttatggagtgcccatgctcctgctcatcgtcggggggagttttggcctaagggaattttcacagatccgctacgatgcagtcaagagtaaaatggatcctgagctagaaaagaaactgaaggaaaataaaatctcccttgaatccgaatatgaaaaaatcaaggactcgaagttcgatgactggaagaacatacgcggcccgcgcccatgggaagatcccgatctccttcagggtcggaatcccgaaagtcttaagactaagaccacatag

SEQ ID NO: 191362 - DNA, 321 bp, Artificial Sequence
  derived and/or modified sequence
atgtttgctcccgctgtgatgcgggcatttcgtaaaaataagaccctcggttacggggtgccaatgctactgctgatcgtaggcggatcctttgggctccgagagttctcacagatacgctacgatgccgttaagtcaaaaatggatccagagctggagaaaaaattgaaggagaataagatctcactagagtccgagtacgagaagataaaggattctaagtttgacgactggaagaatattaggggccctcgtccttgggaggatcccgacttgttgcagggtcgtaatcctgaatccctcaagacgaagaccacgtag

SEQ ID NO: 191363 - protein, 502 aa, Artificial Sequence
  derived and/or modified sequence
MAAPCEGQAFAVGVEKNWGAVVRSPEGTPQKIRQLIDEGIAPEEGGVDAKDTSATSQSVNGSPQAEQPSLESTSKEAFFSRVETFSSLKWAGKPFELSPLVCAKYGWVTVECDMLKCSSCQAFLCASLQPAFDFDRYKQRCAELKKALCTAHEKFCFWPDSPSPDRFGMLPLDEPAILVSEFLDRFQSLCHLDLQLPSLRPEDLKTMCLTEDKISLLLHLLEDELDHRTDERKTTIKLGSDIQVHVTACILSVCGWACSSSLESMQLSLITCSQCMRKVGLWGFQQIESSMTDLDASFGLTSSPIPGLEGRPERLPLVPESPRRMMTRSQDATFSPGSEQAEKSPGPIVSRTRSWDSSSPVDRPEPEAASPTTRTRPVTRSMGTGDTPGLEVPSSPLRKAKRARLCSSSSSDTSSRSFFDPTSQHRDWCPWVNITLGKESRENGGTEPDASAPAEPGWKAVLTILLAHKQSSQPAETDSMSLSEKSRKVFRIFRQWESLCSC

SEQ ID NO: 191364 - DNA, 1509 bp, Artificial Sequence
  derived and/or modified sequence
atggccgccccctgcgagggccaggccttcgccgtgggcgtggagaagaactggggcgccgtggtgagaagccccgagggcaccccccagaagatcagacagctgatcgacgagggcatcgcccccgaggagggcggcgtggacgccaaggacaccagcgccaccagccagagcgtgaacggcagcccccaggccgagcagcccagcctggagagcaccagcaaggaggccttcttcagcagagtggagaccttcagcagcctgaagtgggccggcaagcccttcgagctgagccccctggtgtgcgccaagtacggctgggtgaccgtggagtgcgacatgctgaagtgcagcagctgccaggccttcctgtgcgccagcctgcagcccgccttcgacttcgacagatacaagcagagatgcgccgagctgaagaaggccctgtgcaccgcccacgagaagttctgcttctggcccgacagccccagccccgacagattcggcatgctgcccctggacgagcccgccatcctggtgagcgagttcctggacagattccagagcctgtgccacctggacctgcagctgcccagcctgagacccgaggacctgaagaccatgtgcctgaccgaggacaagatcagcctgctgctgcacctgctggaggacgagctggaccacagaaccgacgagagaaagaccaccatcaagctgggcagcgacatccaggtgcacgtgaccgcctgcatcctgagcgtgtgcggctgggcctgcagcagcagcctggagagcatgcagctgagcctgatcacctgcagccagtgcatgagaaaggtgggcctgtggggcttccagcagatcgagagcagcatgaccgacctggacgccagcttcggcctgaccagcagccccatccccggcctggagggcagacccgagagactgcccctggtgcccgagagccccagaagaatgatgaccagaagccaggacgccaccttcagccccggcagcgagcaggccgagaagagccccggccccatcgtgagcagaaccagaagctgggacagcagcagccccgtggacagacccgagcccgaggccgccagccccaccaccagaaccagacccgtgaccagaagcatgggcaccggcgacacccccggcctggaggtgcccagcagccccctgagaaaggccaagagagccagactgtgcagcagcagcagcagcgacaccagcagcagaagcttcttcgaccccaccagccagcacagagactggtgcccctgggtgaacatcaccctgggcaaggagagcagagagaacggcggcaccgagcccgacgccagcgcccccgccgagcccggctggaaggccgtgctgaccatcctgctggcccacaagcagagcagccagcccgccgagaccgacagcatgagcctgagcgagaagagcagaaaggtgttcagaatcttcagacagtgggagagcctgtgcagctgctag

SEQ ID NO: 191365 - DNA, 1509 bp, Artificial Sequence
  derived and/or modified sequence
atggccgcgccctgcgagggccaggcattcgcagttggggtcgaaaagaactggggcgccgtagtgagatctcccgagggcactccacagaagatcaggcaactcatcgacgaagggatcgcacctgaggaaggtggcgtggatgccaaggacacatctgcaacttcacagtctgtgaatggcagccctcaagctgagcagccttctctggaatccacatctaaggaagccttcttttcgcgggttgaaactttcagcagcctgaagtgggccggaaaacctttcgaattgagtcctctggtgtgtgccaaatatggatgggttactgtggagtgcgacatgttaaaatgctcaagttgtcaggccttcctatgtgcctccctgcagcccgctttcgacttcgatcgctataagcagcggtgcgccgaacttaagaaagcactgtgtactgcacacgaaaagttttgtttctggcctgactcgccatctcctgatagattcggaatgcttccattggacgagcctgctatcttggtctccgaatttctggacaggttccaatctctttgccacctggacctgcaattgccaagtcttaggccagaggacctcaagacaatgtgcctcacggaggacaagatctccctgctactccatttactcgaagatgagcttgatcatcgcacggacgagaggaagacaacaatcaagctcgggtctgatatacaggtgcacgtgaccgcctgcattctgagcgtgtgtggctgggcctgctcctcttcactggaatccatgcaactgtccctcattacttgcagccaatgcatgcggaaagtgggactgtggggcttccaacagatagagtctagcatgaccgacctggacgcatcatttgggctgaccagttctcccatccctggactggaaggccgccccgagagactccctctagtgcctgagagccctcgcaggatgatgactaggagccaagacgccactttctccccagggtccgaacaggccgagaagagcccaggcccgatagttagccgaacccgcagctgggatagttcctctcctgtcgaccgcccagagcctgaagctgccagtccaacaacccggacccgacctgttacacgatctatggggactggggatactccagggcttgaggttcctagctctcccctgagaaaagcaaaaagagcgcgtctgtgctccagttccagctccgataccagcagcaggagcttctttgatcctacatctcaacacagagactggtgcccttgggttaatatcacgctcggcaaggagagccgggaaaatggcgggaccgaacctgacgcttcagcaccggcagaaccaggatggaaagcagtcctgaccattcttctggcacataaacagagttcccagccggccgagactgactctatgtcactatcagaaaaaagccgcaaagtgtttcgtatttttcggcagtgggagtctttatgttcatgctag

SEQ ID NO: 191366 - DNA, 1509 bp, Artificial Sequence
  derived and/or modified sequence
atggccgccccctgtgagggccaggcctttgctgtgggcgtggagaagaactggggcgctgtggtgcgcagccctgagggcaccccccagaagatccggcagctgattgatgagggcatcgcccctgaggagggcggcgtggatgccaaggacaccagcgccaccagccagagcgtgaatggcagcccccaggccgagcagcccagcctggagagcaccagcaaggaggccttcttcagccgggtggagaccttcagcagcctgaagtgggccggcaagccctttgagctgagccccctggtgtgtgccaagtatggctgggtgacagtggagtgtgacatgctgaagtgcagcagctgccaggccttcctgtgtgccagcctgcagcctgcctttgattttgaccgctacaagcagagatgtgccgagctgaagaaggccctgtgcacagcccacgagaagttctgcttctggccagacagccccagcccagacagatttggcatgctgcccctggatgagcccgccatcctggtgtctgagttcctggaccgcttccagagcctgtgccacctggacctgcagctgcccagcctgcggcctgaggacctgaagaccatgtgcctgacagaggacaagatcagcctgctgctgcacctgctggaggatgagctggaccacaggacagatgagaggaagaccaccatcaagctgggcagtgacatccaggtgcacgtgacagcctgcatcctgtctgtgtgtggctgggcctgcagcagcagcctggagagcatgcagctgagcctcatcacctgcagccagtgcatgaggaaggtgggcctgtggggcttccagcagatcgagagctccatgacagacctggatgccagctttggcctgaccagcagccccatccctggcctggagggccggcctgagcggctgcccctggtgcctgagagccccaggaggatgatgaccaggagccaggatgccaccttcagccctggcagcgagcaggccgagaagagccctggccccatcgtgtccaggaccaggtcctgggacagcagcagccctgtggacaggcctgagcctgaggccgccagccccaccaccaggaccaggcctgtgaccaggtccatgggcaccggggacaccccaggcctggaggtgcccagcagccccctgaggaaggccaagagggcccggctgtgcagcagcagcagcagtgacaccagcagccgctccttctttgaccccaccagccagcaccgggactggtgcccctgggtgaacatcaccctgggcaaggagagccgggagaatggaggaacagagccagatgccagcgccccagctgagcccggctggaaggctgtgctgaccatcctgctggcccacaagcagagcagccagcctgctgagacagacagcatgagcctgtctgagaagagcaggaaggtgttccgcatcttccggcagtgggagagcctgtgcagctgctag

SEQ ID NO: 191367 - DNA, 1509 bp, Artificial Sequence
  derived and/or modified sequence
atggccgccccctgcgagggccaggccttcgccgtgggcgtggagaagaactggggggctgttgtgagaagcccagaaggtaccccgcaaaagattcggcagttgattgacgagggaatcgcccctgaggagggcggggttgacgccaaggacaccagcgcaacatctcagtccgtcaatgggtctccccaggcggagcagccaagtctggagagtacctccaaggaggcctttttcagcagggtggaaacattttcatcactgaagtgggctggcaaacccttcgaactaagtcctctggtgtgcgccaagtacggttgggttactgtggaatgtgacatgctgaagtgttctagctgtcaagccttcttgtgtgctagtctccagcccgcctttgattttgaccggtataaacagcgctgcgccgagctgaaaaaagccctctgtacggctcatgaaaagttttgcttttggcctgacagcccctcacctgacaggtttggtatgctaccactggacgagccagccatcctcgtgagcgagttcctggatagattccaatctctttgccacctggatcttcagcttccatcactgagaccagaggatcttaagaccatgtgcctcacagaggacaagataagcctgctgttacacctgctcgaggacgagctggatcacagaactgacgagcgcaagactaccattaagctcggaagcgatatccaggtccatgttaccgcttgtatcctctctgtgtgtgggtgggcgtgttcctcctcactagaaagtatgcagctttcacttataacgtgttcccagtgcatgcgcaaggtgggtctttgggggtttcagcaaatcgagagctccatgaccgatctggacgccagcttcggactgacaagttcccctatccccggcttagagggaagaccggaaaggcttcccctggttcctgagtcacctcggagaatgatgacacgctcacaggatgccacatttagtccaggctccgagcaagcagaaaagtcccccggccctatcgtgtctagaactcggtcttgggactcttctagccctgtggaccggcccgagccagaagctgcttctcccacaacccgaactagacccgtgacacggtcaatgggcaccggcgatacccccggtttggaggtgccttcaagtccactgcgaaaagcaaagagggcccggctctgcagttcatcctccagcgacacctcaagtcggagtttttttgacccgacctcgcagcatagggattggtgcccctgggtaaatatcactttggggaaggagtcccgcgagaacggtggcacagaaccagacgcatcggcacctgcagagccaggctggaaggcggttctcacaatccttctcgcccacaagcaaagctctcaacctgcagagacagattctatgtcactaagcgaaaaatctcgcaaagtattccgcatttttcgtcagtgggaaagtctgtgctcctgctag

SEQ ID NO: 191368 - DNA, 1509 bp, Artificial Sequence
  derived and/or modified sequence
atggccgcaccgtgtgaaggacaagcctttgccgtcggggtcgagaagaactggggagcggtagtccgatcacccgaaggcaccccccaaaaaattagacagctgatcgacgagggaattgcccctgaggaaggcggagtcgatgcaaaagataccagtgctaccagtcagagcgtgaacgggagcccacaggccgagcagccctctctggaaagtaccagtaaggaggcattttttagtcgggtggaaacgttctcaagcttgaagtgggccggaaagcctttcgagttgagcccactcgtctgtgctaagtacgggtgggtgaccgttgaatgcgacatgttgaagtgttctagctgtcaggcctttctatgcgcctccttgcaacctgctttcgactttgacaggtacaaacagaggtgcgcagagttgaagaaggcgctgtgcactgctcacgagaaattttgcttttggccagattcacccagcccagatcgctttggaatgctgcccctggatgaacccgctattctggtgtcagagtttcttgaccgattccaaagcttgtgccatttggacttgcagcttccctcactgcgccctgaggacttgaagacaatgtgcttgaccgaagacaagattagcctcctattacatttgctggaggacgagctggaccatcgcacagatgagcggaagaccacgataaagctgggctctgacattcaggtgcacgtaacagcctgtattctgtcggtgtgtggatgggcctgtagttcctcattggaaagtatgcagctgagtctcatcacctgctcacagtgtatgcgcaaagtggggctctggggatttcagcagattgagtcctccatgaccgacctagacgcttcttttggactgacttcttcgccaataccagggctggaaggcaggccagagcgtctgccattagtacccgaatcgcctcgccgaatgatgaccaggtcgcaggatgctacctttagcccgggatccgagcaggccgaaaagtctcccggacccatcgtgagtaggacccgttcatgggatagctcctcccccgtggataggcctgagcccgaggctgcttcaccaactacaaggacccggcctgtcacacgcagcatgggcacaggagacaccccagggcttgaggtgccttccagtcctctaagaaaagccaagcgcgctcggctctgcagtagtagctcatccgacacatcatccagatcattcttcgatccgaccagccaacaccgcgattggtgcccctgggtgaacattacactgggcaaggaatccagggagaacggcggtacagaacccgacgcatctgcccctgcagagccgggatggaaagctgtgttgacaattctgctcgcccataagcaaagtagccagcctgcagagacagactcaatgtccttgagtgagaaatctagaaaggtttttagaattttccgccaatgggaatccttatgtagctgctag

SEQ ID NO: 191369 - DNA, 1972 bp, Artificial Sequence
  derived and/or modified sequence
gcctcaagaggcggatattaacctcccaggacggaagttccggagccttcaaactctcggggaagcaactcggcagcggaccaagatggcggcgccctgtgagggacaagcgtttgccgtaggggttgaaaagaattggggtgcagtagttcgctccccagaagggaccccccagaaaatccggcagctgatagatgaggggattgccccggaagagggaggcgtggacgcgaaggacacgtctgccacatcccagtcagttaatggatcaccccaagcggaacaaccttcattggaatctacaagcaaagaagccttctttagcagagtggaaacattttcttctttgaaatgggcaggtaagccctttgagctgtctccactcgtctgtgcaaaatatggctgggtcacagtggaatgtgatatgctcaagtgctctagctgtcaagcttttctctgtgccagtttacaaccagcttttgactttgacagatataagcaacgatgtgctgagctgaagaaagccttgtgtactgcccatgagaagttctgtttctggccagacagcccatccccagaccgatttgggatgttgcccctggatgagcctgctattcttgttagtgaattcctagatcgttttcaaagcctttgtcacttggacctccagcttccttccctaaggccggaggacttgaaaactatgtgcttgacagaagacaagatcagtcttctcctacacttgcttgaagatgaacttgatcaccgaactgatgagagaaaaactacaatcaaattaggctcagacatccaagtccacgtcactgcctgtattctctctgtgtgtggctgggcgtgtagttcctctttggaatccatgcagctctccctgataacatgttcgcaatgtatgaggaaggtggggctctggggcttccagcagattgaatcgtccatgactgacctggatgcatcctttggcctgaccagctccccaatcccaggccttgaggggcgaccagagcgcttacctctggtgcctgaatctcctcggaggatgatgacccggagccaggatgccactttctccccaggctcagagcaggctgaaaagagccctggtcccattgtctctcgaactcggagctgggactcttccagtcctgttgaccgtcctgagccagaggctgctagccccaccaccagaactcgcccagtgacccgaagcatgggaacaggagacacccctggcctggaggtaccatctagccctctgcggaaagccaagcgagctcgcctctgctcctccagcagttcggacacatcttcccgaagcttctttgatcccacctctcagcatagagactggtgcccttgggtgaatatcacacttggcaaagaaagcagggagaatggtggaactgaaccagatgccagcgccccagcagagccaggctggaaagcagtgctgaccatcctcttggcgcacaaacagtctagccagccagctgaaacggactccatgagtctctctgagaaatcaaggaaagtattccgaatatttcggcagtgggaatctctgtgctcatgctgaagatactccagcgccttcctggagatagctggaatgagagtgactttttgaaaaattaaggctgagttcctttcggtcagctgacactaagtttttcctgttctgggttaatcataaggagccccctgccatagcaaaggcagtgagtgtcaactatctgcatctggctgagagagacccgtttcctttcagggatgtggacagggtaagggcagcaagcatggttctgttaaaggagtgtgggattaacagactagaaggaagactaaggacctgaccacccatttcagcatcttcaatgtggagcagtgttctgaggactcttctatcctaggactatgacagtgtgtattaataaaatatttgctaagattctca

SEQ ID NO: 191370 - protein, 159 aa, Artificial Sequence
  derived and/or modified sequence
RGLEESGPRPTATPCGCVKPALETGNLLTEPVGYLESCFSAKNGTPRQPSICSYSRACLRIRKRIFNNPEHSLMGLEQFSHVWILFVFHKNGHLSCKAKVQPPRLNGAKTGVFSTRSPHRPNAIGLTLAKLEKVEALGKWTDIMAAVLMSTVLCGRSLG

SEQ ID NO: 191371 - protein, 441 aa, Artificial Sequence
  derived and/or modified sequence
MRGLEESGPRPTATPCGCVKPALETGNLLTEPVGYLESCFSAKNGTPRQPSICSYSRACLRIRKRIFNNPEHSLMGLEQFSHVWILFVFHKNGHLSCKAKVQPPRLNGAKTGVFSTRSPHRPNAIGLTLAKLEKVEGGAIYLSGIDMIHGTPVLDIKPYIAEYDSPQNVMEPLADFNLQNNQHTPNTVSQSDSKTDSCDQRQLSGCDEPQPHHSTKRKPKCPEDRTSEENYLTHSDTARIQQAFPMHREIAVDFGLESRRDQSSSVAEEQIGPYCPEKSFSEKGTDKKLERVEGAAVLQGSRAETQPMAPHCPAGRADGAPRSVVPAWVTEAPVATLEVRFTPHAEMDLGQLSSQDVGQASFKYFQSAEEAKRAIEAVLSADPRSVYRRKLCQDRLFYFTVDIAHVTCWFGDGFAEVLRIKPASEPVHMTGPVGSLVSLGS

SEQ ID NO: 191372 - protein, 172 aa, Artificial Sequence
  derived and/or modified sequence
GLEESGPRPTATPCGCVKPALETGNLLTEPVGYLESCFSAKNGTPRQPSICSYSRACLRIRKRIFNNPEHSLMGLEQFSHVWILFVFHKNGHLSCKAKVQPPRLNGAKTGVFSTRSPHRPNAIGLTLAKLEKVEGNPFHFYFYLFPHPKKPYKINSIHHWLFIQTSTNDVNS

SEQ ID NO: 191373 - DNA, 1326 bp, Artificial Sequence
  derived and/or modified sequence
atgagaggcctggaggagagcggccccagacccaccgccaccccctgcggctgcgtgaagcccgccctggagaccggcaacctgctgaccgagcccgtgggctacctggagagctgcttcagcgccaagaacggcacccccagacagcccagcatctgcagctacagcagagcctgcctgagaatcagaaagagaatcttcaacaaccccgagcacagcctgatgggcctggagcagttcagccacgtgtggatcctgttcgtgttccacaagaacggccacctgagctgcaaggccaaggtgcagccccccagactgaacggcgccaagaccggcgtgttcagcaccagaagcccccacagacccaacgccatcggcctgaccctggccaagctggagaaggtggagggcggcgccatctacctgagcggcatcgacatgatccacggcacccccgtgctggacatcaagccctacatcgccgagtacgacagcccccagaacgtgatggagcccctggccgacttcaacctgcagaacaaccagcacacccccaacaccgtgagccagagcgacagcaagaccgacagctgcgaccagagacagctgagcggctgcgacgagccccagccccaccacagcaccaagagaaagcccaagtgccccgaggacagaaccagcgaggagaactacctgacccacagcgacaccgccagaatccagcaggccttccccatgcacagagagatcgccgtggacttcggcctggagagcagaagagaccagagcagcagcgtggccgaggagcagatcggcccctactgccccgagaagagcttcagcgagaagggcaccgacaagaagctggagagagtggagggcgccgccgtgctgcagggcagcagagccgagacccagcccatggccccccactgccccgccggcagagccgacggcgcccccagaagcgtggtgcccgcctgggtgaccgaggcccccgtggccaccctggaggtgagattcaccccccacgccgagatggacctgggccagctgagcagccaggacgtgggccaggccagcttcaagtacttccagagcgccgaggaggccaagagagccatcgaggccgtgctgagcgccgaccccagaagcgtgtacagaagaaagctgtgccaggacagactgttctacttcaccgtggacatcgcccacgtgacctgctggttcggcgacggcttcgccgaggtgctgagaatcaagcccgccagcgagcccgtgcacatgaccggccccgtgggcagcctggtgagcctgggcagctag

SEQ ID NO: 191374 - DNA, 843 bp, Artificial Sequence
  derived and/or modified sequence
cgcggcttggaggagtcggggcctcggcctacagcgaccccgtgcggctgcgttaagccggctctggagacagggaatcttttaactgagccagtcggctacttggaatcttgtttctcggccaagaatggtactccaagacagccatccatttgtagctattctcgagcctgtttgaggattagaaagaggatctttaataatcctgaacattccttgatgggcctagaacagttttctcatgtttggattttgtttgtttttcacaaaaatggtcatttgagctgtaaggcaaaagtgcagcctcctaggctgaatggtgcaaagactggagttttttccacaaggagccctcatcgtcccaatgcaataggactgaccctggccaagctggaaaaggtagaagccttggggaaatggacagatatcatggctgcagtgctgatgtcaactgtgctgtgtggcaggagtctgggatgaatcacactacaaggacaaacattggtcaggtggagctatatacctttctggaattgacatgatacatggcacacccgtactagacatcaagccctacatagctgagtatgactcaccgcaaaatgtgatggagcctttagcagactttaatttacagaataaccaacatacaccaaacactgtgtcccagtctgacagcaagactgacagctgtgaccagcgacagctctcagggtgtgatgagccacaaccccaccatagcactaagaggaaacctaaatgtcctgaagacagaacttcagaagaaaactacctgacacacagtgacacagccagaattcagcaagcatttcctatgcacag

SEQ ID NO: 191375 - DNA, 1647 bp, Artificial Sequence
  derived and/or modified sequence
actgcgcatgcgtcaggcatggagagcggaagcggaaggttgaatgcgtcgggtgggcacctcagcaaccagtagccatgcgcggcttggaggagtcggggcctcggcctacagcgaccccgtgcggctgcgttaagccggctctggagacagggaatcttttaactgagccagtcggctacttggaatcttgtttctcggccaagaatggtactccaagacagccatccatttgtagctattctcgagcctgtttgaggattagaaagaggatctttaataatcctgaacattccttgatgggcctagaacagttttctcatgtttggattttgtttgtttttcacaaaaatggtcatttgagctgtaaggcaaaagtgcagcctcctaggctgaatggtgcaaagactggagttttttccacaaggagccctcatcgtcccaatgcaataggactgaccctggccaagctggaaaaggtagaaggtggagctatatacctttctggaattgacatgatacatggcacacccgtactagacatcaagccctacatagctgagtatgactcaccgcaaaatgtgatggagcctttagcagactttaatttacagaataaccaacatacaccaaacactgtgtcccagtctgacagcaagactgacagctgtgaccagcgacagctctcagggtgtgatgagccacaaccccaccatagcactaagaggaaacctaaatgtcctgaagacagaacttcagaagaaaactacctgacacacagtgacacagccagaattcagcaagcatttcctatgcacagggagatagcagtggattttggtttggaatcaagacgtgatcagagttccagcgtggcagaagaacaaattggcccatattgcccagagaagagcttttcagagaaaggtacagacaagaagctagaaagagtggaaggagcagcagtcttgcaaggaagcagggcagagacacagcccatggcccctcactgccctgctggaagggctgatggagctccccgcagcgtggttcctgcctgggtgacagaggctcctgtggccactttagaagtgcggtttactcctcatgccgagatggaccttgggcagctcagttcacaagatgttggtcaggcgtcatttaaatattttcagtcagcagaggaagcaaagcgtgccattgaggctgtgctgtcagcggatcctcggtctgtgtaccgccggaagctttgccaggaccgccttttctactttactgtagacatagcgcatgtcacttgctggtttggtgatggctttgcagaggtgctgaggatcaagccggcttctgagcctgttcatatgactggccctgtggggtccttggtgtctctagggtcttaaggagcctccctcatgtctttaaggtagcatcattgatctttggatgtggcttttggattttctgaacaagctaatgttgtgtcgagaagcaacactttgtgatctcatggctttgattgatttgggctgttcaaaatgtttatttgaaaaacgtatacattaataaacttaacaaagagatataaaatacagagaaatcaccaaatgctttttgatctgttgatattaaagaatcaaaaggtga

SEQ ID NO: 191376 - DNA, 1326 bp, Artificial Sequence
  derived and/or modified sequence
atgcgggggctcgaagagagcggccctcgtcccacagctacaccatgtggatgtgttaagccagccctcgagaccggtaacctcttaacagagcctgtgggctatcttgagagttgcttctctgcgaagaatgggacacctcgtcagccttcaatatgttcttactctcgcgcttgcctcagaattcgcaaacgcatattcaataaccccgagcactctctcatgggactcgagcagtttagccacgtctggattcttttcgttttccataagaacggccacctctcatgcaaggcgaaggttcagccgccaaggcttaatggtgcaaagactggggtgttctctaccaggagcccgcatcgtcccaacgccattggtctcactctcgcaaagcttgaaaaagtggaaggtggggctatctacctgtctggaatcgacatgattcatggtactccggtgctagatataaaaccgtatatcgccgaatacgattcacctcagaacgtcatggagcccctcgctgacttcaacctgcaaaacaatcagcacactcctaacaccgtgtcccaaagtgacagtaaaactgactcatgcgaccagcgacagctgtcggggtgtgatgagcctcagcctcaccatagcactaagcggaaacctaaatgtcccgaagatcggacctcagaggaaaactacctgacacactccgacacagcaaggatccagcaggcattccctatgcatcgggaaattgccgtagatttcgggctagagagtagacgggatcaaagctcttccgttgccgaggaacagatagggccctactgtccagagaaaagttttagtgaaaagggcacagacaaaaaactagagagggttgagggagcggcggtgctccagggcagccgcgctgaaacccagcccatggcaccacattgcccggctggacgggctgacggagccccgcgcagcgttgtccctgcctgggtgacggaggcgcccgtggcaacactcgaagtacgctttactcctcatgcagagatggacttagggcaattgtcctctcaagacgtcgggcaagcctcttttaaatacttccagagcgctgaggaggctaaacgcgctattgaagctgtgctctctgccgatcccaggagtgtgtacaggcgcaaactgtgccaggatcgacttttttattttaccgtggacatcgcccatgttacgtgttggtttggagacggattcgccgaggtgctgagaattaaacctgccagtgaaccggtccatatgaccggtcccgtgggcagtctggtcagtctcggcagctag

SEQ ID NO: 191377 - DNA, 1326 bp, Artificial Sequence
  derived and/or modified sequence
atgaggggcctggaggagagcggcccccggcccacagccaccccctgtggctgtgtgaagccagccctggagactggaaacctgctgacagagcctgtgggctacctggagagctgcttcagcgccaagaatggcaccccccggcagcccagcatctgcagctacagccgggcctgcctgcgcatcaggaagaggatcttcaacaaccctgagcacagcctgatgggcctggagcagttcagccacgtgtggatcctgtttgtgttccacaagaatggccacctgagctgcaaggccaaggtgcagcccccccggctgaatggagccaagacaggagtcttcagcaccaggagcccccaccggcccaatgccatcggcctgaccctggccaagctggagaaggtggagggcggggccatctacctgtctggaattgacatgattcatggcacccctgtgctggacatcaagccctacatcgccgagtatgacagcccccagaatgtgatggagcccctggccgacttcaacctgcagaacaaccagcacacccccaacacagtgtcccagagcgacagcaagacagacagctgtgaccagaggcagctgagcggctgtgatgagccccagccccaccacagcaccaagaggaagcccaagtgcccagaggacaggaccagcgaggagaactacctgacccacagcgacacagcccgcatccagcaggccttccccatgcaccgggagattgctgtggactttggcctggagagcagaagagaccagagcagctctgtggccgaggagcagatcggcccctactgcccagagaagagcttcagcgagaagggcacagacaagaagctggagcgggtggagggcgctgctgtgctgcagggcagcagagctgagacccagcccatggccccccactgcccagctggccgggcagatggagcccccaggtctgtggtgcctgcctgggtgacagaggcccctgtggccaccctggaggtgcgcttcacccctcatgctgagatggacctgggccagctgagcagccaggatgtgggccaggccagcttcaagtacttccagagcgctgaggaggccaagagggccattgaagctgtgctgtctgctgaccccaggtctgtgtacagaaggaagctgtgccaggacaggctcttctacttcaccgtggacatcgcccacgtgacctgctggtttggagatggctttgctgaggtgctgcgcatcaagccagccagcgagcctgtgcacatgacaggccctgtgggcagcctggtgtccctgggcagctag

SEQ ID NO: 191378 - DNA, 1326 bp, Artificial Sequence
  derived and/or modified sequence
atgcggggcctggaggagagcggcccccggcccaccgccaccccctgtgggtgcgtgaaaccggctttggagacaggcaacctgctcacagagcccgtgggctacctcgaatcatgtttctcagcaaagaacgggaccccaagacaaccatcaatatgtagttattcgagggcatgtctgagaatccgcaaaagaatattcaacaaccccgagcatagcctgatgggcctcgaacaattctcccacgtctggatcctgttcgtgttccacaaaaatgggcacttgtcatgcaaggcaaaggttcagcctccgcggcttaatggcgcgaaaactggagtctttagcacacggtccccccacaggcctaacgccatcgggctgaccctcgcgaagttggagaaagtggaaggtggggcaatctatttatcaggaatcgatatgatccacggcacacccgtgctggacattaaaccgtacatcgctgagtacgatagcccccagaacgtcatggaacccctggcagatttcaacctccagaataatcaacatacgcctaatactgtctcacagagcgatagcaaaacggatagttgcgatcagcgccagctgtctgggtgtgatgagccccagccacaccatagcactaagagaaagccaaagtgcccggaagatcgcaccagtgaagagaattacctgacccactctgataccgcccgcatccaacaggcgttcccaatgcacagggaaatcgctgttgatttcgggttggagtcgcggagagatcagagctcatctgttgcagaggaacaaatcggtccctactgtcccgaaaaatccttttctgaaaaagggactgacaagaaattagagcgggtggaaggggccgcagtgcttcagggaagtcgagcagaaactcagcccatggcacctcattgtccagcagggcgtgctgatggagcccccagatcagtcgtccccgcttgggttacggaagcaccagtggctactttggaggtgagatttacgccccacgctgagatggacctgggccagctgtcttcccaagatgtcggacaggcaagcttcaaatactttcagtctgccgaggaggccaagagggctattgaggccgtgctaagcgccgaccctcggagcgtttataggagaaaactgtgtcaagaccgcctattctattttacagtcgatatcgcccacgtgacgtgttggttcggggacgggtttgcagaagttctccggataaagccagcatccgaacctgttcatatgaccggacccgtgggaagtttggtgagcttgggatcctag

SEQ ID NO: 191379 - DNA, 1326 bp, Artificial Sequence
  derived and/or modified sequence
atgcgtgggttggaagagtctggccctcggccaacagctaccccgtgtggttgcgtgaaaccagccctggagactggcaatcttttaacagaaccagttggatacctcgagagctgtttctcggctaagaacgggacaccgagacagccgtcaatttgttcctattctagagcctgtctgaggattcgcaagcgcatatttaacaatcctgagcactccttgatgggccttgaacagttctcccatgtctggattctctttgttttccacaagaacggacaccttagctgtaaggctaaggttcaacccccaaggcttaacggagccaaaactggggtcttttcaactagatcaccacacagaccaaacgccataggccttaccttggctaaactggaaaaagtggagggcggtgcaatatacctctctggaatcgatatgatccatggaacccctgtactcgacattaaaccttacattgctgagtatgacagcccccagaacgtgatggaaccactcgctgacttcaacctgcagaacaaccagcacacaccaaacacagtgtcccagtccgactccaagaccgatagttgtgaccaaaggcagctaagcggttgcgacgagccccagccccaccattctaccaagcgaaaaccgaaatgtccagaagacaggactagcgaggagaattatctgacacactccgatactgcacggatccaacaggcttttccaatgcaccgggagatagctgtcgactttgggctggagtcccgcagagatcaatcatccagtgtggccgaggagcagattgggccatattgccctgaaaaaagtttctccgaaaagggaacggataaaaagcttgagcgcgtggagggggcagctgtgctgcagggtagtcgcgctgagacccaacctatggcacctcattgtccggctggtagagccgacggggctcctcgcagcgtagtgcccgcttgggttactgaagcacctgtggcaaccctagaggtgcgcttcacaccgcacgccgaaatggacctgggccaactctcctcccaggacgtgggccaggccagctttaagtacttccagagcgcggaggaggcaaagagagccatcgaagccgtgctgtctgcggacccacggtccgtttaccgacgtaagctgtgccaagaccgactgttttactttacggtcgatatcgcccacgtgacatgttggtttggggacggctttgctgaggtgctgcgcattaaaccagcatcagagcctgtacacatgacaggccctgtcggcagcctggtgagcctgggctcctag

SEQ ID NO: 191380 - protein, 249 aa, Artificial Sequence
  derived and/or modified sequence
MTSETLWWLITLKKQLGDNEAITQEIVGCAHLENYALKMFLYADNEDRAGRFHKNMIKSFYTASLLIDVITVFGELTDENVKHRKYARWKATYIHNCLKNGETPQAGPVGIEEDNDIEENEDAGAASLPTQPTQPSSSSTYDPSNMPSGNYTGIQIPPGAHAPANTPAEVPHSTGVASNTIQPTPQTIPAIDPALFNTISQGDVRLTPEDFARAQKYCKYAGSALQYEDVSTAVQNLQKALKLLTTGRE

SEQ ID NO: 191381 - protein, 307 aa, Artificial Sequence
  derived and/or modified sequence
MAALAPLPPLPAQFKSIQHHLRTAQEHDKRDPVVAYYCRLYAMQTGMKIDSKTPECRKFLSKLMDQLEALKKQLGDNEAITQEIVGCAHLENYALKMFLYADNEDRAGRFHKNMIKSFYTASLLIDVITVFGELTDENVKHRKYARWKATYIHNCLKNGETPQAGPVGIEEDNDIEENEDAGAASLPTQPTQPSSSSTYDPSNMPSGNYTGIQIPPGAHAPANTPAEVPHSTGVASNTIQPTPQTIPAIDPALFNTISQGDVRLTPEDFARAQKYCKYAGSALQYEDVSTAVQNLQKALKLLTTGRE

SEQ ID NO: 191382 - protein, 220 aa, Artificial Sequence
  derived and/or modified sequence
EMAALAPLPPLPAQFKSIQHHLRTAQEHDKRDPVVAYYCRLYAMQTGMKIDSKTPECRKFLSKLMDQLEALKKQLGDNEAITQEIVGCAHLENYALKMFLYADNEDRAGRFHKNMIKSFYTASLLIDVITVFGELTDENVKHRKYARWKATYIHNCKEWGDSSSRPCWLKKIMILKKMKMLEQPLCPLSQLSHHHLQLMTQHAIRQLYWNTDSSGCTRSS

SEQ ID NO: 191383 - DNA, 750 bp, Artificial Sequence
  derived and/or modified sequence
atgaccagcgagaccctgtggtggctgatcaccctgaagaagcagctgggcgacaacgaggccatcacccaggagatcgtgggctgcgcccacctggagaactacgccctgaagatgttcctgtacgccgacaacgaggacagagccggcagattccacaagaacatgatcaagagcttctacaccgccagcctgctgatcgacgtgatcaccgtgttcggcgagctgaccgacgagaacgtgaagcacagaaagtacgccagatggaaggccacctacatccacaactgcctgaagaacggcgagaccccccaggccggccccgtgggcatcgaggaggacaacgacatcgaggagaacgaggacgccggcgccgccagcctgcccacccagcccacccagcccagcagcagcagcacctacgaccccagcaacatgcccagcggcaactacaccggcatccagatcccccccggcgcccacgcccccgccaacacccccgccgaggtgccccacagcaccggcgtggccagcaacaccatccagcccaccccccagaccatccccgccatcgaccccgccctgttcaacaccatcagccagggcgacgtgagactgacccccgaggacttcgccagagcccagaagtactgcaagtacgccggcagcgccctgcagtacgaggacgtgagcaccgccgtgcagaacctgcagaaggccctgaagctgctgaccaccggcagagagtag

SEQ ID NO: 191384 - DNA, 924 bp, Artificial Sequence
  derived and/or modified sequence
atggccgccctggcccccctgccccccctgcccgcccagttcaagagcatccagcaccacctgagaaccgcccaggagcacgacaagagagaccccgtggtggcctactactgcagactgtacgccatgcagaccggcatgaagatcgacagcaagacccccgagtgcagaaagttcctgagcaagctgatggaccagctggaggccctgaagaagcagctgggcgacaacgaggccatcacccaggagatcgtgggctgcgcccacctggagaactacgccctgaagatgttcctgtacgccgacaacgaggacagagccggcagattccacaagaacatgatcaagagcttctacaccgccagcctgctgatcgacgtgatcaccgtgttcggcgagctgaccgacgagaacgtgaagcacagaaagtacgccagatggaaggccacctacatccacaactgcctgaagaacggcgagaccccccaggccggccccgtgggcatcgaggaggacaacgacatcgaggagaacgaggacgccggcgccgccagcctgcccacccagcccacccagcccagcagcagcagcacctacgaccccagcaacatgcccagcggcaactacaccggcatccagatcccccccggcgcccacgcccccgccaacacccccgccgaggtgccccacagcaccggcgtggccagcaacaccatccagcccaccccccagaccatccccgccatcgaccccgccctgttcaacaccatcagccagggcgacgtgagactgacccccgaggacttcgccagagcccagaagtactgcaagtacgccggcagcgccctgcagtacgaggacgtgagcaccgccgtgcagaacctgcagaaggccctgaagctgctgaccaccggcagagagtag

SEQ ID NO: 191385 - DNA, 750 bp, Artificial Sequence
  derived and/or modified sequence
atgacatctgaaactctgtggtggctcattaccttaaagaagcagctgggggataacgaggccattacacaggaaatcgtggggtgcgctcacttggagaattacgctctgaagatgtttctgtatgcggacaacgaagatagggcaggtaggtttcacaaaaatatgatcaagagcttctacacagcctcactcctgatcgacgtcattactgttttcggcgagttgaccgacgaaaacgttaaacaccgcaaatacgcccggtggaaagcgacatacatccataattgcttaaagaatggcgaaactccccaagccgggcctgtcgggatcgaggaagataacgatattgaagagaacgaggatgcgggtgcagcctcactgcccacccagccaacccagccttcttcttcctccacttatgacccttcaaacatgcccagtgggaattacacaggcattcagatcccccctggcgcccacgcgcccgctaatacccctgccgaagtacctcactcaacgggagtcgcctccaataccatacaacccacaccccaaaccatccctgcaattgaccccgccctgttcaataccatcagccagggagacgtgcggcttactccggaagactttgctagggcccagaagtactgtaagtacgccggcagcgcactgcagtatgaagacgtcagcacagctgtccagaatttacaaaaggccctcaaattgttgactacgggccgcgagtag

SEQ ID NO: 191386 - DNA, 924 bp, Artificial Sequence
  derived and/or modified sequence
atggctgcacttgccccacttcctcccctgccagcccagtttaagtcgatccaacaccacctgaggaccgcccaagagcacgataagcgcgatccagtggtggcctactactgcagactatacgccatgcagaccggcatgaaaatcgactctaagacaccggagtgtcggaagtttctcagcaagctgatggaccagctagaggcgttgaaaaaacagctgggcgacaacgaggccatcactcaggagatcgtggggtgtgcccacctagagaactacgccctcaaaatgtttctatatgccgacaacgaggatagggccggccgctttcataagaacatgattaagtctttttacacagcctctctcctgatagacgtcatcacagtgtttggggagctaaccgacgagaacgtcaagcaccgaaagtacgcacgctggaaggcgacatacattcacaactgcctgaagaacggagaaacgccgcaggccggcccagtgggcatagaggaagataatgacattgaggagaacgaggacgctggcgccgctagcctccctactcagccaactcaacctagcagctcgtccacctatgacccctccaacatgccatccgggaactacactggaattcagatcccccccggcgctcatgcccctgccaacaccccagccgaggtgccgcacagcaccggcgtcgctagcaacaccatccagccaacccctcaaaccatcccagcaatcgaccccgctctttttaacacgattagtcagggcgatgttcggttaactcctgaggatttcgctagagctcagaagtactgcaaatacgctgggtctgcgctgcagtacgaggacgtcagcacagcagtccagaacttgcagaaggctcttaaacttctcacaaccggtcgagaatag

SEQ ID NO: 191387 - DNA, 750 bp, Artificial Sequence
  derived and/or modified sequence
atgaccagcgagaccctgtggtggctgatcaccctgaagaagcagctgggggacaatgaggccatcacccaggagatcgtgggctgtgcccacctggagaactatgccctgaagatgttcctgtatgctgacaatgaagatagagctggccgcttccacaagaacatgatcaagagcttctacacagccagcctgctgattgatgtgatcaccgtgtttggagagctgacagatgaaaatgtgaagcacaggaaatatgcccgctggaaggccacctacatccacaactgcctgaagaatggagagaccccccaggccggccctgtgggcattgaagaagataatgacattgaagaaaatgaagatgctggagctgccagcctgcccacccagcccacccagcccagcagcagcagcacctatgaccccagcaacatgcccagcggcaactacacaggcatccagatccccccaggggcccacgccccagccaacaccccagctgaggtgccccacagcactggagtggccagcaacaccatccagcccaccccccagaccatcccagccattgatcctgccctcttcaacaccatcagccagggagatgtgcggctgaccccagaagattttgcccgggcccagaagtactgcaagtatgccggcagcgccctgcagtatgaagatgtgtccacagctgtgcagaacctgcagaaggccctgaagctgctgaccaccggccgggagtag

SEQ ID NO: 191388 - DNA, 924 bp, Artificial Sequence
  derived and/or modified sequence
atggccgccctggcccccctgccccccctgcctgcccagttcaagagcatccagcaccacctgaggacagcccaggagcatgacaagagggaccctgtggtggcctactactgccgcctgtatgccatgcagacaggcatgaagattgacagcaagaccccagaatgtaggaagttcctgagcaagctgatggaccagctggaggccctgaagaagcagctgggggacaatgaggccatcacccaggagatcgtgggctgtgcccacctggagaactatgccctgaagatgttcctgtatgctgacaatgaagatagagctggccgcttccacaagaacatgatcaagagcttctacacagccagcctgctgattgatgtgatcaccgtgtttggagagctgacagatgaaaatgtgaagcacaggaaatatgcccgctggaaggccacctacatccacaactgcctgaagaatggagagaccccccaggccggccctgtgggcattgaagaagataatgacattgaagaaaatgaagatgctggagctgccagcctgcccacccagcccacccagcccagcagcagcagcacctatgaccccagcaacatgcccagcggcaactacacaggcatccagatccccccaggggcccacgccccagccaacaccccagctgaggtgccccacagcactggagtggccagcaacaccatccagcccaccccccagaccatcccagccattgatcctgccctcttcaacaccatcagccagggagatgtgcggctgaccccagaagattttgcccgggcccagaagtactgcaagtatgccggcagcgccctgcagtatgaagatgtgtccacagctgtgcagaacctgcagaaggccctgaagctgctgaccaccggccgggagtag

SEQ ID NO: 191389 - DNA, 750 bp, Artificial Sequence
  derived and/or modified sequence
atgaccagcgagaccctgtggtggctgatcaccctgaagaagcagctcggcgacaacgaagccattactcaggagattgtgggatgtgcccacctggaaaattacgcactcaagatgttcttgtacgccgataacgaagaccgagctggccgtttccacaaaaacatgattaagagcttttacaccgcttccctgctgattgacgtgattaccgtgttcggggaactcactgacgagaacgttaagcacaggaagtatgcaaggtggaaggctacttacatacataattgtctgaaaaacggggaaacccctcaggccggacccgtaggtatagaagaagataacgatatcgaagaaaatgaggacgccggggcggcttcattacccactcagccgacacagccctcttcctcatccacctatgatccgtcaaacatgccgagcggcaattataccggtatacagatccctccaggagctcatgcacccgccaacactccagcagaagtgccacactccactggcgtggcctcaaatacaattcagcctactcctcagaccattcctgcaattgacccagccctgtttaacacgatcagtcagggtgacgtcaggctgacccctgaggactttgccagggcgcagaagtattgtaagtacgcgggaagcgctctgcagtacgaggacgtatcaaccgcagtacaaaacctccaaaaggcactaaaactgctgacaaccgggagagagtag

SEQ ID NO: 191390 - DNA, 924 bp, Artificial Sequence
  derived and/or modified sequence
atggccgccctggcccccctgccccccctgcccgcccagttcaagtccattcagcaccatctgcgaactgcgcaagaacacgacaagcgtgaccctgtggtggcatactactgccggctctatgccatgcagactgggatgaaaattgattccaagacacctgagtgccggaagttcctttccaaacttatggatcaactggaagccctcaaaaaacaacttggagacaatgaggctatcactcaggagatcgtcggctgcgcacatcttgagaactatgctttgaaaatgttcctctacgccgacaacgaagaccgcgccggacgctttcacaagaatatgattaagtctttctacaccgcttcacttctgattgatgtcattaccgtattcggcgagttgacagatgagaacgttaaacaccggaaatacgcccgctggaaagctacttatatccataactgtctaaagaacggtgaaactccacaggctggtcccgtgggcatcgaggaggacaacgacatagaagaaaacgaagatgccggagccgcaagccttccgactcaacctactcaaccctcgagctccagcacctatgacccatctaatatgccatccggaaattatacaggcatccagatccctcctggagctcacgcacctgccaacacacccgccgaagtcccccactctaccggggttgcctctaatactatacagccaactccccagacgattcctgccatcgatccagctttatttaatacaattagccagggtgatgtgcggcttactcctgaggactttgctcgcgcacagaagtactgtaaatatgcggggagcgctctccaatacgaggacgtgtccactgcagtgcagaatctgcagaaggcactaaaattgttaactacaggtagggaatag

SEQ ID NO: 191391 - DNA, 750 bp, Artificial Sequence
  derived and/or modified sequence
atgactagtgagacattatggtggctcatcaccctcaaaaaacaactgggcgacaatgaggccataacacaggagatcgtcggatgcgcccatctggagaattacgccttaaaaatgttcttgtacgccgacaatgaggaccgcgcagggcgatttcataaaaacatgataaagtcattttacaccgcaagcctcttaatcgatgtgatcacggtgttcggggagttgacggatgaaaacgtcaagcatcgaaaatacgccaggtggaaagccacctacatacataattgcttgaagaatggcgagacgccccaggcagggccagttgggatagaggaggataacgacatcgaggagaacgaagatgccggtgccgctagcctccccactcagccgacccaaccaagctccagctctacatatgatccctcaaatatgcccagcgggaattacacaggcattcagatccccccaggagcccacgcacccgctaatacaccagcagaagtcccacacagtactggtgttgcctcaaacactattcagccaactccccagaccattccggcaatcgacccagcgctgttcaataccattagccagggagatgtgagattaacccccgaggattttgctcgggctcagaaatactgcaaatatgccggtagcgcactgcagtacgaggacgtttccacagctgtgcaaaacctacagaaagctctcaagctgctcacaactgggcgtgagtag

SEQ ID NO: 191392 - DNA, 924 bp, Artificial Sequence
  derived and/or modified sequence
atggctgcgttagccccactgccccctttgcctgcccaattcaagagtatccagcatcacctacgcacggcgcaagaacatgataaacgcgacccagtggtcgcatactactgtagactctacgccatgcagacagggatgaagattgattcaaagacacctgaatgtaggaagttcctctctaagcttatggatcagctggaggccctaaagaagcagctgggcgataatgaggccatcacacaggagattgtgggctgcgcacacctggagaactacgccctgaagatgtttctctacgccgataatgaggatagagcgggtcgattccacaaaaacatgattaaaagcttttatacagcatccctgctgatcgatgtcattacggttttcggcgagctgactgatgaaaacgtgaagcacagaaagtacgccagatggaaagccacgtatattcataactgtttgaaaaatggtgagacccctcaggctgggcctgtggggatcgaggaggataacgatattgaggagaatgaggatgcaggtgcagcctcactcccaacccagcctacacagccatctagttccagtacctacgaccccagcaacatgcctagtggaaactacacgggaattcaaatcccacctggtgcgcatgctcctgctaacacccccgctgaagtcccccacagtactggcgtcgcttcaaacactattcagcctacaccacagaccattcccgcaatagaccccgctctgtttaacaccatttcccagggggacgtgcggctgactcccgaagatttcgctagagctcaaaaatattgcaaatatgcaggcagtgccctccagtacgaggacgtgtctactgctgtccaaaatttgcaaaaagccctcaagctccttaccacgggtcgtgagtag

SEQ ID NO: 191393 - DNA, 1284 bp, Artificial Sequence
  derived and/or modified sequence
gcgagtaggaagtggtgagttcggagtagagatggccgcgcttgcaccgctgcccccgctccccgcacagttcaagagcatacagcatcatctgaggacggctcaggagcatgacaagcgagaccctgtggtggcttattactctaaagaagcagttgggtgataatgaagctattactcaagaaatagtgggctgtgcccatttggagaattatgctttgaaaatgtttttgtatgcagacaatgaagatcgtgctggacgatttcacaaaaacatgatcaagtccttctatactgcaagtcttttgatagatgtcataacagtatttggagaactcactgatgaaaatgtgaaacacaggaagtatgccagatggaaggcaacatacatccataattgtttaaagaatggggagactcctcaagcaggccctgttggaattgaagaagataatgatattgaagaaaatgaagatgctggagcagcctctctgcccactcagccaactcagccatcatcatcttcaacttatgacccaagcaacatgccatcaggcaactatactggaatacagattcctccgggtgcacacgctccagctaatacaccagcagaagtgcctcacagcacaggtgtagcaagtaatactatccaacctactccacagactatacctgccattgatcccgcacttttcaatacaatttcccagggggatgttcgtctaaccccagaagactttgctagagctcagaagtactgcaaatatgctggcagtgctttgcagtatgaagatgtaagcactgctgtccagaatctacaaaaggctctcaagttactgacgacaggcagagaatgaagcctttgtatgacagacccatgtatttttggcatgaggaactaacagtccattactctatcttcagcctatcaggatcacagttttaaggaagacttggttttgttgaatatgacaatgaaatctgtgtgtatcagatttttattgaagcattcatcagcagcctcaaccagttttcattgtccatttactagattcaatcgtctctgagtatatagggctgatgttagcaagaccctaaaaatgtccattgaaccctgcttcaaaaaatgaaaacacacctctataaaatgtgtactgggaataagctttgtatttacatacattaggggaattttttaaaatctgtaatgtttggacaaacagatgatattactttgctataaaattataaatgtaacttttaataaagatagccagaata

SEQ ID NO: 191394 - DNA, 3287 bp, Artificial Sequence
  derived and/or modified sequence
agacggaagcggaagtgccggtggagcgcgagtaggaagtggtgagttcggagtagagatggccgcgcttgcaccgctgcccccgctccccgcacagttcaagagcatacagcatcatctgaggacggctcaggagcatgacaagcgagaccctgtggtggcttattactgtcgtttatacgcaatgcagactggaatgaagatcgatagtaaaactcctgaatgtcgcaaatttttatcaaagttaatggatcagttagaagctctaaagaagcagttgggtgataatgaagctattactcaagaaatagtgggctgtgcccatttggagaattatgctttgaaaatgtttttgtatgcagacaatgaagatcgtgctggacgatttcacaaaaacatgatcaagtccttctatactgcaagtcttttgatagatgtcataacagtatttggagaactcactgatgaaaatgtgaaacacaggaagtatgccagatggaaggcaacatacatccataattgtttaaagaatggggagactcctcaagcaggccctgttggaattgaagaagataatgatattgaagaaaatgaagatgctggagcagcctctctgcccactcagccaactcagccatcatcatcttcaacttatgacccaagcaacatgccatcaggcaactatactggaatacagattcctccgggtgcacacgctccagctaatacaccagcagaagtgcctcacagcacaggtgtagcaagtaatactatccaacctactccacagactatacctgccattgatcccgcacttttcaatacaatttcccagggggatgttcgtctaaccccagaagactttgctagagctcagaagtactgcaaatatgctggcagtgctttgcagtatgaagatgtaagcactgctgtccagaatctacaaaaggctctcaagttactgacgacaggcagagaatgaagcctttgtatgacagacccatgtatttttggcatgaggaactaacagtccattactctatcttcagcctatcaggatcacagttttaaggaagacttggttttgttgaatatgacaatgaaatctgtgtgtatcagatttttattgaagcattcatcagcagcctcaaccagttttcattgtccatttactagattcaatcgtctctgagtatatagggctgatgttagcaagaccctaaaaatgtccattgaaccctgcttcaaaaaatgaaaacacacctctataaaatgtgtactgggaataagctttgtatttacatacattaggggaattttttaaaatctgtaatgtttggacaaacagatgatattactttgctataaaattataaatgtaacttttaataaagatagccagaatattctaaattagaaattacgtttttgtttccctcaagacataaaacaaatataaacattctaaactgctggatgaatctgaaaagacattaagttcaaattttaatttattctcatattaaatataactccattaaaagtttaaaatttcatgggagaaaatataataaggtaaagaggtagaatcactttcagacttaagaataatgttgatttcccaagtgctttaccttatctgttaaagcgtaagatgaattggtatttgcttcataggcagtttgactgcatgtattagagaatgaaaagaagatatttgtagtaatgcctggaaacttggtgctttaaattaaggtactcctctgctgctgtagaatggattccacacagtggatagctatgggtgattcagaatattatgtttagattcccatttgttaagtttataagttttgtggggaattatgaacttactgtgtactacctgcatttgtgctgtgtgaaaaataaatacaaggattcgtttagctaattcaacttactacaaagacaaatgtctgtttttatttgcctgctaggattgtcttttttaaaagtcatttttatttataggaatatgggtgtttctataggaagaaacaggttttttgttttttgttttttaagataaatttgacaaagttaactgaaatttatctggtccattttattcatgctactaagatgggaatctttaaacacaagggtcagcaagctttggcccatggattggccacctgttacgtaaataaagtttctttgaaacaagcctacactcattcatttatgttttgtctgtggttgctttccacaactgcagagttgtatggcttgcaagtctaaaaacatttactatttggccctctaagaaaaagttaagacacctagtctaatggccttttgggaaaaaacaaatcactaactcataatcatttatatccattattttctgcataaatgtaatgctattgtacagggtttggtagaataaatattcagactgactaaactgttctaaatcctcacaaaaaagtccccaaacaacatgcctcctaaaaaacattttcctatcttttacaagaggtatgaacatttgtagggttccacatttgcatctagaaatccaatgctctttagaatgttattacgaatagaaagatggccaggatgacctttagtgttacatgatgttcagcaaattttaattcaaaccttgatatgcctggacactgaaaagtaaacgcatcacctcctattttataccctaccttctggttcccaattgggagagcacatagagggaaggagacaatatagaaactacggagtccgctggtagtgggctgcatggtgtgacagagcccttctctgtaaaatggaaatgacaccactagccatctcaatagttacaagaattaaaagagatacagtacctgaagtgcttagcgcatggtagcatttcataaatgtttagtgtcaatactaatgctctaataatgtaaattgttaataatttatttccctaatatcaggaaatcccagttgtctatgtggcccagtgcttaaaaacgccttcttgcatgaggggattgaactatacaatgtttgttaactttgtatttgtattttttcctataaaatcttaaaataaaattaggagatgtgttctgatgtaacagtaggattagcaattttcatttattccttccatatatatttactgaatggctactatatgcctggtattgttctttgaaagcagaaacagcaggaaaaaaagtccctccctcatagagtttacattctaaaagggaggaaatagataataaaatatacattacatttaa

SEQ ID NO: 191395 - DNA, 3234 bp, Artificial Sequence
  derived and/or modified sequence
gagttcggagtagagatggccgcgcttgcaccgctgcccccgctccccgcacagttcaagagcatacagcatcatctgaggacggctcaggagcatgacaagcgagaccctgtggtggcttattactgtcgtttatacgcaatgcagactggaatgaagatcgatagtaaaactcctgaatgtcgcaaatttttatcaaagttaatggatcagttagaagctctaaagaagcagttgggtgataatgaagctattactcaagaaatagtgggctgtgcccatttggagaattatgctttgaaaatgtttttgtatgcagacaatgaagatcgtgctggacgatttcacaaaaacatgatcaagtccttctatactgcaagtcttttgatagatgtcataacagtatttggagaactcactgatgaaaatgtgaaacacaggaagtatgccagatggaaggcaacatacatccataattgtaaagaatggggagactcctcaagcaggccctgttggttgaagaagataatgatattgaagaaaatgaagatgctggagcagcctctctgcccactcagccaactcagccatcatcatcttcaacttatgacccaacatgccatcaggcaactatactggaatacagattcctccgggtgcacacgctccagctaatacaccagcagaagtgcctcacagcacaggtgtagcaagtaatactatccaacctactccacagactatacctgccattgatcccgcacttttcaatacaatttcccagggggatgttcgtctaaccccagaagactttgctagagctcagaagtactgcaaatatgctggcagtgctttgcagtatgaagatgtaagcactgctgtccagaatctacaaaaggctctcaagttactgacgacaggcagagaatgaagcctttgtatgacagacccatgtatttttggcatgaggaactaacagtccattactctatcttcagcctatcaggatcacagttttaaggaagacttggttttgttgaatatgacaatgaaatctgtgtgtatcagatttttattgaagcattcatcagcagcctcaaccagttttcattgtccatttactagattcaatcgtctctgagtatatagggctgatgttagcaagaccctaaaaatgtccattgaaccctgcttcaaaaaatgaaaacacacctctataaaatgtgtactgggaataagctttgtatttacatacattaggggaattttttaaaatctgtaatgtttggacaaacagatgatattactttgctataaaattataaatgtaacttttaataaagatagccagaatattctaaattagaaattacgtttttgtttccctcaagacataaaacaaatataaacattctaaactgctggatgaatctgaaaagacattaagttcaaattttaatttattctcatattaaatataactccattaaaagtttaaaatttcatgggagaaaatataataaggtaaagaggtagaatcactttcagacttaagaataatgttgatttcccaagtgctttaccttatctgttaaagcgtaagatgaattggtatttgcttcataggcagtttgactgcatgtattagagaatgaaaagaagatatttgtagtaatgcctggaaacttggtgctttaaattaaggtactcctctgctgctgtagaatggattccacacagtggatagctatgggtgattcagaatattatgtttagattcccatttgttaagtttataagttttgtggggaattatgaacttactgtgtactacctgcatttgtgctgtgtgaaaaataaatacaaggattcgtttagctaattcaacttactacaaagacaaatgtctgtttttatttgcctgctaggattgtcttttttaaaagtcatttttatttataggaatatgggtgtttctataggaagaaacaggttttttgttttttgttttttaagataaatttgacaaagttaactgaaatttatctggtccattttattcatgctactaagatgggaatctttaaacacaagggtcagcaagctttggcccatggattggccacctgttacgtaaataaagtttctttgaaacaagcctacactcattcatttatgttttgtctgtggttgctttccacaactgcagagttgtatggcttgcaagtctaaaaacatttactatttggccctctaagaaaaagttaagacacctagtctaatggccttttgggaaaaaacaaatcactaactcataatcatttatatccattattttctgcataaatgtaatgctattgtacagggtttggtagaataaatattcagactgactaaactgttctaaatcctcacaaaaaagtccccaaacaacatgcctcctaaaaaacattttcctatcttttacaagaggtatgaacatttgtagggttccacatttgcatctagaaatccaatgctctttagaatgttattacgaatagaaagatggccaggatgacctttagtgttacatgatgttcagcaaattttaattcaaaccttgatatgcctggacactgaaaagtaaacgcatcacctcctattttataccctaccttctggttcccaattgggagagcacatagagggaaggagacaatatagaaactacggagtccgctggtagtgggctgcatggtgtgacagagcccttctctgtaaaatggaaatgacaccactagccatctcaatagttacaagaattaaaagagatacagtacctgaagtgcttagcgcatggtagcatttcataaatgtttagtgtcaatactaatgctctaataatgtaaattgttaataatttatttccctaatatcaggaaatcccagttgtctatgtggcccagtgcttaaaaacgccttcttgcatgaggggattgaactatacaatgtttgttaactttgtatttgtattttttcctataaaatcttaaaataaaattaggagatgtgttctgatgtaacagtaggattagcaattttcatttattccttccatatatatttactgaatggctactatatgcctggtattgttctttgaaagcagaaacagcaggaaaaaaagtccctccctcatagagtttacattctaaaagggaggaaatagataataaaatatacattacattt

SEQ ID NO: 191396 - protein, 297 aa, Artificial Sequence
  derived and/or modified sequence
MTNQESAVHVKMMPEFQKSSVRIKNPTRVEEIICGLIKGGAAKLQIITDFDMTLSRFSYKGKRCPTCHNIIDNCKLVTDECRKKLLQLKEKYYAIEVDPVLTVEEKYPYMVEWYTKSHGLLVQQALPKAKLKEIVAESDVMLKEGYENFFDKLQQHSIPVFIFSAGIGDVLEEVIRQAGVYHPNVKVVSNFMDFDETGVLKGFKGELIHVFNKHDGALRNTEYFNQLKDNSNIILLGDSQGDLRMADGVANVEHILKIGYLNDRVDELLEKYMDSYDIVLVQDESLEVANSILQKIL

SEQ ID NO: 191397 - DNA, 894 bp, Artificial Sequence
  derived and/or modified sequence
atgactaaccaggaaagcgctgttcacgtgaagatgatgcccgagtttcaaaaatccagcgtcaggatcaaaaaccccacccgagtggaagagatcatatgcggtctcattaagggtggtgcggcaaaacttcagatcataacggatttcgatatgaccttgtccagatttagttataagggcaaacgatgcccgacctgtcataatataatcgacaactgtaagttggtcaccgacgagtgccgaaaaaagctgctccagctaaaggaaaaatactacgctatcgaagtagatccagtactcactgtggaagagaagtacccttacatggtggaatggtacacaaaaagccacggcctgctcgttcagcaggcccttccgaaggcaaagttaaaagaaatagtggccgagtcagatgtgatgttaaaggaagggtacgagaacttcttcgacaaactgcagcagcatagtatacccgtttttatcttctcagcagggattggcgacgtgcttgaggaggtaatccgccaggccggggtgtatcatcccaacgtcaaggttgtaagcaacttcatggactttgacgaaactggtgtattgaaaggcttcaaaggagagctgatacacgtctttaacaagcatgatggcgccttgcggaacacagagtacttcaatcagctgaaagacaacagcaatatcatcctacttggagacagccagggcgaccttcgtatggctgatggcgtggccaatgttgaacacattctgaagatcggctacctgaatgacagggtcgacgaactgttggaaaagtatatggactcttatgacattgtcctggtacaggatgaatccttggaagtggcaaactcaatcctgcaaaaaatcttgtag

SEQ ID NO: 191398 - DNA, 894 bp, Artificial Sequence
  derived and/or modified sequence
atgaccaaccaggagtcagctgtgcatgtgaagatgatgccagaatttcagaagtcatctgtaagaatcaaaaaccccacgcgcgtggaggaaatcatttgcgggcttattaagggtggcgcagctaagttgcagattatcacggacttcgacatgaccttgagcaggttttcatacaaaggtaaacgttgcccaacctgccacaatattatcgataactgcaaattggtgacggacgagtgccgcaaaaagttgctgcagctcaaggagaaatattatgccatcgaagtggatcccgtcctcacagttgaggagaaatatccatacatggttgagtggtacacgaagtctcacggtttgctcgtgcagcaggctcttcccaaggctaaactgaaggaaatcgtggctgagtccgacgtgatgctgaaagagggttatgaaaatttttttgacaaactacaacaacattcaattcctgtatttatattttcagccgggatcggggatgtgctagaggaggtaattcgacaagcgggtgtctaccatcctaacgtgaaggttgtgtctaacttcatggacttcgatgagaccggagtgctgaagggattcaaaggagagttgattcatgtgttcaataaacacgatggggccctgcggaatactgagtattttaatcagctcaaggataacagtaacatcatcctcttgggagactcgcaaggagaccttaggatggcagatggcgtggctaacgtcgagcatattctgaagattggttacctgaacgatcgggtggatgagcttctggagaaatatatggactcctacgacattgtgctggtgcaggacgagagcctggaagtggctaattccattctgcaaaagatactttag

SEQ ID NO: 191399 - DNA, 894 bp, Artificial Sequence
  derived and/or modified sequence
atgaccaaccaggagagcgctgtgcacgtgaagatgatgcctgagttccagaagagctctgtgcgcatcaagaaccccaccagggtggaggagatcatctgtggcctcatcaagggcggggccgccaagctgcagatcatcacagactttgacatgaccctgagccgcttctcctacaagggcaagcgctgccccacctgccacaacatcatcgacaactgcaagctggtgacagatgagtgcaggaagaagctgctgcagctgaaggagaagtactatgccatcgaggtggaccctgtgctgactgtggaggagaagtacccctacatggtggagtggtacaccaagagccacggcctgctggtgcagcaggccctgcccaaggccaagctgaaggagatcgtggccgagagtgatgtgatgctgaaggagggctatgagaacttctttgacaagctgcagcagcacagcatccctgtgttcatcttctctgctggcattggagatgtgctggaggaggtgatccggcaggccggcgtgtaccaccccaacgtgaaggtggtgagcaacttcatggactttgatgaaacaggagtgctgaagggcttcaagggggagctgattcatgtgttcaacaagcatgatggagccctgaggaacacagagtacttcaaccagctgaaggacaacagcaacatcatcctgctgggggacagccagggcgacctgaggatggctgatggagtggccaacgtggagcacatcctgaagattggctacctgaatgacagagtggatgagctgctggagaagtacatggacagctatgacatcgtgctggtgcaggatgagagcctggaggtggccaacagcatcctgcagaagatcctgtag

SEQ ID NO: 191400 - DNA, 894 bp, Artificial Sequence
  derived and/or modified sequence
atgaccaaccaggagagcgccgtgcacgtgaagatgatgcccgagttccagaaaagttccgtcaggattaaaaacccaactcgggtggaggagatcatatgcggtctgattaaaggtggcgctgctaaattgcagatcataactgatttcgatatgaccctcagccgatttagttacaaagggaagagatgtcccacctgccacaacatcatagataactgtaaactggtgactgacgaatgccggaaaaaactgctgcagttgaaagagaagtactatgcaattgaggtggatccggtgctgactgtcgaggagaaatatccctacatggtggagtggtacaccaagagccacggacttctggttcaacaggcacttccaaaagccaagcttaaggagattgtggcggaatcagacgtaatgctaaaggaggggtacgaaaacttcttcgacaaactgcagcagcactctattcctgtttttatctttagcgccggaatcggagacgtcctggaggaagtgattagacaggccggcgtgtatcatccgaatgtgaaagttgtctctaattttatggatttcgatgagacaggcgtcctgaagggtttcaagggagaattgatccatgtgttcaacaagcacgatggggccctcaggaataccgagtacttcaaccagctgaaagataactctaacatcatcctgctgggggattcccaaggcgacctgagaatggctgatggggtcgctaacgtagaacatatactgaagattggatacctgaatgacagagttgatgaactgcttgagaagtatatggactcctacgacatcgtgttagtccaggatgaaagtctcgaagtcgcaaacagtatcctacagaaaattctctag

SEQ ID NO: 191401 - DNA, 894 bp, Artificial Sequence
  derived and/or modified sequence
atgaccaaccaggagagcgccgtgcacgtgaagatgatgcccgagttccaaaagagttccgtgagaattaaaaatcctaccagagttgaggaaataatttgtggactaatcaaggggggagctgccaagctgcagatcattacggattttgatatgaccctcagtcgattctcctacaaggggaaacgctgccctacatgccataacattatagacaattgcaaactggtcactgacgagtgtagaaagaaactgttacaactaaaagagaagtattatgccattgaggtggacccagtgttgacagtcgaggagaagtatccatatatggtagagtggtacaccaagagccacggacttttggtacagcaagcactgccaaaagcaaagctgaaagagattgttgccgagtcggacgtgatgttgaaagaaggatatgaaaacttcttcgacaagttacagcaacattcaattcccgtgtttattttctccgcggggatcggcgacgttctggaggaagtgatccggcaagctggagtataccacccgaacgtaaaagtggtatcaaatttcatggacttcgatgaaacaggtgtgctgaagggattcaaaggggagttaattcacgtcttcaataaacacgatggggcattgagaaacaccgagtatttcaatcagctgaaggacaacagcaatattatcttactcggagactctcaaggagaccttagaatggcagacggagttgcaaatgtggaacacatcctcaaaattgggtatctgaacgatcgcgtggatgagcttctggagaagtatatggacagctacgatatcgtgctcgtgcaagacgaatccttggaggtggccaattccattttgcagaagattttatag

SEQ ID NO: 191402 - DNA, 894 bp, Artificial Sequence
  derived and/or modified sequence
atgacaaaccaggagtctgccgtgcacgttaagatgatgccagagttccagaagagctctgtacgaatcaagaatcccaccagggtggaggagattatttgcgggctcatcaagggtggagccgctaagctccagataatcacggatttcgatatgactctgagtaggttcagctataagggaaaacggtgccccacttgccacaacattatcgacaactgcaaactagtgacagacgagtgcagaaagaagttactccagctaaaggagaagtactacgccatcgaggttgatccggtgctgaccgtggaagaaaagtacccctatatggtcgagtggtataccaagtctcacggcctgttggttcaacaagccctaccgaaggcaaagcttaaagagatcgtggcagagtcggacgttatgttgaaagaagggtatgaaaatttcttcgataaacttcaacagcatagcatacccgttttcattttcagcgccggaataggcgacgtgctggaggaggtcattcgacaggctggtgtgtaccatcctaacgttaaggtcgtgagcaattttatggactttgacgagacaggcgtactgaagggctttaaaggcgagcttattcatgtcttcaataaacatgatggcgctctgcgaaatacggaatactttaaccaattgaaagataatagcaatatcattctcctgggcgatagtcagggagatttgaggatggctgatggggtggccaatgtggagcacattctgaagattgggtatctgaatgaccgggttgacgagctcctagaaaagtatatggatagctacgacatcgtccttgtgcaagacgaatccctcgaggtggctaactcgatactccagaaaatcctttag

SEQ ID NO: 191403 - DNA, 894 bp, Artificial Sequence
  derived and/or modified sequence
atgacaaaccaggagagcgccgtccatgtcaagatgatgcccgaattccagaaatccagcgtgcgcatcaagaatccaacaagagtggaggagataatatgtggccttattaagggcggtgccgctaagctgcagatcataaccgattttgatatgacactgtcccgcttcagctacaagggaaaacggtgtccaacatgccataatatcattgacaattgtaaattggtgactgatgaatgccgcaagaaactcctgcagctcaaggagaagtattatgcaatcgaagtcgacccagtgctcacagtcgaagagaaatatccttacatggtcgagtggtacactaaatcccacgggttgcttgtacaacaggccttgcctaaagccaagcttaaggaaattgtggctgaaagtgatgttatgctaaaagagggttacgaaaatttctttgataagctacagcagcattccattccagtgtttatcttctcggctgggatcggggacgtgcttgaagaagtgataagacaagccggagtctaccacccaaacgtgaaggtagtgagtaactttatggacttcgatgagactggcgttctgaaaggctttaaaggggagctgattcacgtgttcaataagcatgatggggctctgcggaataccgagtacttcaatcaactgaaggataacagcaatatcatattactcggagatagtcagggtgacctgcgtatggccgacggtgtcgctaacgtcgagcatatactgaaaatcggatacctgaacgaccgagtagacgagttactcgaaaaatacatggactcctatgacatagtgttagtacaagacgagtccctggaagtggccaatagcattttgcagaaaatcttatag

SEQ ID NO: 191404 - DNA, 1742 bp, Artificial Sequence
  derived and/or modified sequence
gtgatgctctgggatcccgcgcttccgagactcgcagtctacgcgagctgcctgtttttttcctgcttggacgcgcatgagggccccgtccatggaccgcgcggccgtggcgagggtgggcgcggtagcgagcgccagcgtgtgcgccctggtggcgggggtggtgctggctcagtacatattcaccttgaagaggaagacggggcggaagaccaagatcatcgagatgaagattggataaccaagaaatgactaatcaagagtctgccgtacatgtgaaaatgatgccagaattccagaaaagttcagttcgaatcaagaaccctacaagagtagaagaaattatctgtggtcttatcaaaggaggagctgccaaacttcagataataacggactttgatatgacactcagtagattttcatataaagggaaaagatgcccaacatgtcataatatcattgacaactgtaagctggttacagatgaatgtagaaaaaagttattgcaactaaaggaaaaatattacgctattgaagttgatcctgttcttactgtagaagagaagtacccttatatggtggaatggtatactaaatcacatggtttgcttgttcagcaagctttaccaaaagctaaacttaaagaaattgtggcagaatctgacgttatgctcaaagaaggatatgagaatttctttgataagctccaacaacatagcatccccgtgttcatattttcggctggaatcggcgatgtactagaggaagttattcgtcaagctggtgtttatcatcccaatgtcaaagttgtgtccaattttatggattttgatgaaactggggtgctcaaaggatttaaaggagaactaattcatgtatttaacaaacatgatggtgccttgaggaatacagaatatttcaatcaactaaaagacaatagtaacataattcttctgggagactcccaaggagacttaagaatggcagatggagtggccaatgttgagcacattctgaaaattggatatctaaatgatagagtggatgagcttttagaaaagtacatggactcttatgatattgttttagtacaagatgaatcattagaagtagccaactctattttacagaagattctataaacaagcattctccaagaagacctctctcctgtgggtgcaattgaactgttcatccgttcatcttgctgagagacttatttataatatatccttactctcgaagtgttccctttgtataactgaagtattttcagatatggtgaatgcattgactggaagctccttttctccacctctctcaacacactcctcaccgtatcttttaacccatttaaaaaaaaaaaaaagctaaaattagaaaaataactccctacttttccaaagtgaattttgtagtttaatgttatcatgcagcttttgaggagtcttttacactgggaaagtttgtagaaattttaaaataagttttatgaaatggtgaaataatatgcatgattttaagtattgccatttttgtaatttgggttattatgctgatggtatcaccatctcttgaaattgtgttaggtttggttattttgtctggggaaaaaatatttactggaaaagactagcagttagtgttggaaaaacctggtggtgtttacaatgttgctaatcattacaaaacattctatattgaagcactgataataaatatgaaatgcaaaacctttttaa

SEQ ID NO: 191405 - DNA, 1788 bp, Artificial Sequence
  derived and/or modified sequence
agagccagttgccagttctaatagtacagatttaccttctctttaatcgtcacataacttcaattgataatgttatgtagattgacttgtgactagctcagagctagcgaggctgtaaccaagagcatatataaagtactgtgcagcagtgcgtcacaaggtttttgcatagggcttagtcaaggcttttggaaccgccctcagttgcaccttgtgctatattagtacttctcagacaggaagaattttcttttgctggtgtagctcgtccggttaccttcaggaagattggataaccaagaaatgactaatcaagagtctgccgtacatgtgaaaatgatgccagaattccagaaaagttcagttcgaatcaagaaccctacaagagtagaagaaattatctgtggtcttatcaaaggaggagctgccaaacttcagataataacggactttgatatgacactcagtagattttcatataaagggaaaagatgcccaacatgtcataatatcattgacaactgtaagctggttacagatgaatgtagaaaaaagttattgcaactaaaggaaaaatattacgctattgaagttgatcctgttcttactgtagaagagaagtacccttatatggtggaatggtatactaaatcacatggtttgcttgttcagcaagctttaccaaaagctaaacttaaagaaattgtggcagaatctgacgttatgctcaaagaaggatatgagaatttctttgataagctccaacaacatagcatccccgtgttcatattttcggctggaatcggcgatgtactagaggaagttattcgtcaagctggtgtttatcatcccaatgtcaaagttgtgtccaattttatggattttgatgaaactggggtgctcaaaggatttaaaggagaactaattcatgtatttaacaaacatgatggtgccttgaggaatacagaatatttcaatcaactaaaagacaatagtaacataattcttctgggagactcccaaggagacttaagaatggcagatggagtggccaatgttgagcacattctgaaaattggatatctaaatgatagagtggatgagcttttagaaaagtacatggactcttatgatattgttttagtacaagatgaatcattagaagtagccaactctattttacagaagattctataaacaagcattctccaagaagacctctctcctgtgggtgcaattgaactgttcatccgttcatcttgctgagagacttatttataatatatccttactctcgaagtgttccctttgtataactgaagtattttcagatatggtgaatgcattgactggaagctccttttctccacctctctcaacacactcctcaccgtatcttttaacccatttaaaaaaaaaaaaaagctaaaattagaaaaataactccctacttttccaaagtgaattttgtagtttaatgttatcatgcagcttttgaggagtcttttacactgggaaagtttgtagaaattttaaaataagttttatgaaatggtgaaataatatgcatgattttaagtattgccatttttgtaatttgggttattatgctgatggtatcaccatctcttgaaattgtgttaggtttggttattttgtctggggaaaaaatatttactggaaaagactagcagttagtgttggaaaaacctggtggtgtttacaatgttgctaatcattacaaaacattctatattgaagcactgataataaatatgaaatgcaaaa

SEQ ID NO: 191406 - DNA, 1107 bp, Artificial Sequence
  derived and/or modified sequence
atgactaatcaagagtctgccgtacatgtgaaaatgatgccagaattccagaaaagttcagttcgaatcaagaaccctacaagagtagaagaaattatctgtggtcttatcaaaggaggagctgccaaacttcagataataacggactttgatatgacactcagtagattttcatataaagggaaaagatgcccaacatgtcataatatcattgacaactgtaagctggttacagatgaatgtagaaaaaagttattgcaactaaaggaaaaatattacgctattgaagttgatcctgttcttactgtagaagagaagtacccttatatggtggaatggtatactaaatcacatggtttgcttgttcagcaagctttaccaaaagctaaacttaaagaaattgtggcagaatctgacgttatgctcaaagaaggatatgagaatttctttgataagctccaacaacatagcatccccgtgttcatattttcggctggaatcggcgatgtactagaggaagttattcgtcaagctggtgtttatcatcccaatgtcaaagttgtgtccaattttatggattttgatgaaactggggtgctcaaaggatttaaaggagaactaattcatgtatttaacaaacatgatggtgccttgaggaatacagaatatttcaatcaactaaaagacaatagtaacataattcttctgggagactcccaaggagacttaagaatggcagatggagtggccaatgttgagcacattctgaaaattggatatctaaatgatagagtggatgagcttttagaaaagtacatggactcttatgatattgttttagtacaagatgaatcattagaagtagccaactctattttacagaagattctataaacaagcattctccaagaagacctctctcctgtgggtgcaattgaactgttcatccgttcatcttgctgagagacttatttataatatatccttactctcgaagtgttccctttgtataactgaagtattttcagatatggtgaatgcattgactggaagctccttttctccacctctctcaacacactcctcaccgtatcttttaacccattt

SEQ ID NO: 191407 - DNA, 1032 bp, Artificial Sequence
  derived and/or modified sequence
tttcttttgctggtgtagctcgtccggttaccttcaggaagattggataaccaagaaatgactaatcaagagtctgccgtacatgtgaaaatgcagaaaccagccttcttcgaagtggtcttggtgtgattctcctatccgttatcaaaaacttgaagctgtgatttgcctgagatgccagaattccagaaaagttcagttcgaatcaagaaccctacaagagtagaagaaattatctgtggtcttatcaaaggaggagctgccaaacttcagataataacggactttgatatgacactcagtagattttcatataaagggaaaagatgcccaacatgtcataatatcattgacaactgtaagctggttacagatgaatgtagaaaaaagttattgcaactaaaggaaaaatattacgctattgaagttgatcctgttcttactgtagaagagaagtacccttatatggtggaatggtatactaaatcacatggtttgcttgttcagcaagctttaccaaaagctaaacttaaagaaattgtggcagaatctgacgttatgctcaaagaaggatatgagaatttctttgataagctccaacaacatagcatccccgtgttcatattttcggctggaatcggcgatgtactagaggaagttattcgtcaagctggtgtttatcatcccaatgtcaaagttgtgtccaattttatggattttgatgaaactggggtgctcaaaggatttaaaggagaactaattcatgtatttaacaaacatgatggtgccttgaggaatacagaatatttcaatcaactaaaagacaatagtaacataattcttctgggagactcccaaggagacttaagaatggcagatggagtggccaatgttgagcacattctgaaaattggatatctaaatgatagagtggatgagcttttagaaaagtacatggactcttatgatattgttttagtacaagatgaatcattagaagtagccaactctattttacagaagattctataa

SEQ ID NO: 191408 - DNA, 894 bp, Artificial Sequence
  derived and/or modified sequence
atgaccaaccaggagagcgccgtgcacgtgaagatgatgcccgagttccagaagagcagcgtgagaatcaagaaccccaccagagtggaggagatcatctgcggcctgatcaagggcggcgccgccaagctgcagatcatcaccgacttcgacatgaccctgagcagattcagctacaagggcaagagatgccccacctgccacaacatcatcgacaactgcaagctggtgaccgacgagtgcagaaagaagctgctgcagctgaaggagaagtactacgccatcgaggtggaccccgtgctgaccgtggaggagaagtacccctacatggtggagtggtacaccaagagccacggcctgctggtgcagcaggccctgcccaaggccaagctgaaggagatcgtggccgagagcgacgtgatgctgaaggagggctacgagaacttcttcgacaagctgcagcagcacagcatccccgtgttcatcttcagcgccggcatcggcgacgtgctggaggaggtgatcagacaggccggcgtgtaccaccccaacgtgaaggtggtgagcaacttcatggacttcgacgagaccggcgtgctgaagggcttcaagggcgagctgatccacgtgttcaacaagcacgacggcgccctgagaaacaccgagtacttcaaccagctgaaggacaacagcaacatcatcctgctgggcgacagccagggcgacctgagaatggccgacggcgtggccaacgtggagcacatcctgaagatcggctacctgaacgacagagtggacgagctgctggagaagtacatggacagctacgacatcgtgctggtgcaggacgagagcctggaggtggccaacagcatcctgcagaagatcctgtag

SEQ ID NO: 191409 - DNA, 360 bp, Artificial Sequence
  derived and/or modified sequence
atgagacccagcagcctgagacagtacctggacagcgtgcccctgcccccctgccaggagcagcagcccaaggccagcgccgagctggaccacaaggcctgctacctgtgccacagcctgctgatgctggccggcgtggtggtgagctgccaggacatcacccccgaccagtggggcgagctgcagctgctgtgcatgcagctggacagacacatcagcacccagatcagagagagcccccaggccatgcacagaaccatgctgaaggacctggccacccagacctacatcagatggcaggagctgctgacccactgccagccccaggcccagtacttcagcccctggaaggacatctag

SEQ ID NO: 191410 - DNA, 360 bp, Artificial Sequence
  derived and/or modified sequence
atgcgcccctcctccctaaggcagtatcttgacagtgtacccctgccgccatgccaagagcagcagccaaaggccagcgctgagctggaccataaggcatgctatctttgccatagcctgcttatgctggccggcgttgttgtgagctgccaagacataactccggaccagtggggggaactccagctcttgtgtatgcaattagacagacacatctccacacaaatccgggaaagtccccaggcaatgcaccggacgatgttaaaggacttagccacccagacctatattaggtggcaagaactcctgacccactgccagccccaggcccagtacttcagtccttggaaggatatttag

SEQ ID NO: 191411 - DNA, 1001 bp, Artificial Sequence
  derived and/or modified sequence
cacaggggtttagaattgactggtgtaggagcagaggacctggggctggatctgggcacagcaatttgcagggcactgctgggcaggagtccctgatggccaagctgctgggctctgtatctcccacaagctgcagcggaggccccatggagcaggagcagaagcacacgttggagaactgaacttgaaggacaggacttacagcattgaggtcacacagctgtcctcgctcagccggctcctgggcctcatgaggccatcatctctcaggcaatacctggactctgtgcccttgccaccctgccaggagcaacagccaaaggctagtgccgagctagaccacaaggcctgctacctgtgccacagcttgctgatgctggccggggtagttgttagctgccaggacatcactccagaccagtggggcgagctgcagctgctgtgcatgcagttggaccgccacatcagcacgcagatccgggagagcccccaggccatgcaccgcaccatgctcaaggacctggctacccagacctacatccgttggcaggagctgctgacccactgccagccccaggcccagtatttcagcccctggaaagacatctaaagggacagggtcagggcagcccagggctcctggcttcagcaggaagtgaacaggctcagggaactggaggaagcgaagcatcaaggccagaggaggccacatgctgaccagcctgatgaggcaagagcctgcccctgccaccgccccgacccctctcctctctgcaagagcctgcctctgccaccgccccgaccccctctcctctcagcaagggatgggcctctctgcctcgcccacccctcagccctcctcccagccatctcctcttccctaaggcctctgtctccatagctctggtttccctgggcctcagtcctccccaccctccttcctctgtctccctgtcactaatgtgaggtttctttgtgcacattaaagtcttctttcagca

SEQ ID NO: 191412 - DNA, 360 bp, Artificial Sequence
  derived and/or modified sequence
atgaggcccagcagcctgcggcagtacctggacagcgtgcccctgcccccctgccaggagcagcagcccaaggccagcgctgagctggaccacaaggcctgctacctgtgccacagcctgctgatgctggccggcgtggtggtgtcctgccaggacatcaccccagaccagtggggcgagctgcagctgctgtgcatgcagctggacagacacatcagcacccagatccgggagagcccccaggccatgcacaggaccatgctgaaggacctggccacccagacctacatccgctggcaggagctgctgacccactgccagccccaggcccagtacttcagcccctggaaggacatctag

SEQ ID NO: 191413 - DNA, 360 bp, Artificial Sequence
  derived and/or modified sequence
atgcggcccagcagcctgcggcagtacctggacagcgtgcccctgcccccctgccaggagcagcagcctaaggcgagcgctgagctcgatcacaaagcatgctacctgtgccattccctcctgatgttggccggagtggtggtttcttgccaggacatcacaccagatcaatggggcgaactgcaactgttgtgcatgcaactcgaccgtcatatatctacgcaaatccgggagtcaccacaggcaatgcatcgcacaatgttgaaggatctggccacgcaaacatacatcagatggcaagagcttctgactcattgtcagccacaggcccagtacttcagtccctggaaggacatctag

SEQ ID NO: 191414 - DNA, 360 bp, Artificial Sequence
  derived and/or modified sequence
atgcggcctagctcattaagacaatatctagactccgtgcctctgccaccttgccaggagcagcagcctaaggcctcagcagagctcgatcacaaggcttgctacctgtgccatagcctgctcatgctggccggagtagtggtttcttgtcaggatattacccccgatcagtggggcgaacttcagttgctttgtatgcagctggaccgacatataagcacccaaatccgcgaaagccctcaggctatgcaccgaaccatgctcaaagatttagccacacagacatatatcagatggcaggaactccttactcactgtcagccacaagctcagtacttctccccctggaaagatatctag

SEQ ID NO: 191415 - protein, 186 aa, Artificial Sequence [sequence omitted]

SEQ ID NO: 191416 - DNA, 854 bp, Artificial Sequence
  derived and/or modified sequence
gccaaatcttaaaggatccgggagctaagccagacccgggtggcggtggcagctgcgaaacccagggagccgatgccacgtgacccaatgtggacttcttttaaacctttctaatgcccataacccagcctcagacccatggagcccacgagagactgcccgctgttcgggggcgccttttccgccatcctccccatgggggccattgacgtaagcgacctccgaccggtcccggacaatcaagaagttttctgccatcccgtgacggaccagagcctgatagtggaacttctcgagctgcaggcccacgtacggggcgaagcggctgcgcggtaccactttgaggatgttggtggcgtgcagggggctagggctgtccatgtggagtctgttcagcctctcagtttggagaacctggccctgaggggccgctgtcaagaagcctgggtcctctctggcaagcagcagatagctaaggaaaaccagcaggtagcaaaggacgtgacacttcatcaggccttgctgaggctgccccagtaccagactgatctcttgcttaccttcaatcagcccccccctgacaacaggtcatctcttggccccgaaaatctgtcacctgcaccctggagcctgggtgactttgaacagctggtgaccagtctgacccttcacgatcctaacatctttggtccccagtaaaggcgctgaagcactgcatgatgttgctgagaacttggggactcggttctgtgagggggaaaagaggttgaaaagagggtttcctcttatttcttccctgtgcgtaaacataagacaatccctcttcagaataaacttgctttataatcaatata

SEQ ID NO: 191417 - DNA, 1078 bp, Artificial Sequence
  derived and/or modified sequence
gccaaatcttaaaggatccgggagctaagccagacccgggtggcggtggcagctgcgaaacccagggagccgatgccacgtgacccaatgtggacttcttttaaacctttctaatgcccataacccagcctcagacccatggagcccacgagagactgcccgctgttcgggggcgccttttccgccatcctccccatgggggccattgacgtaagcgacctccgaccggtcccggacaatcaagaagttttctgccatcccgtgacggaccagagcctgatagtggaacttctcgagctgcaggcccacgtacggggcgaagcggctgcgcggtaccactttgaggatgttggtggcgtgcagggggctagggctgtccatgtggagtctgttcagcctctcagtttggagaacctggccctgaggggccgctgtcaagaagcctgggtcctctctggcaagcagcagatagctaaggaaaaccagcaggtagcaaaggacgtgacacttcatcaggccttgctgaggctgccccagtaccagactgatctcttgcttaccttcaatcagcccccgtaaggaggaaggaacgggcgggtatctcatgactgggttcccaggagaatcgggctgggagggacagaacagggagactcactggtgggatcctccaaggaagcaggagtgggccagaggtttggggtaactgatacccaggtcctctggggaacaggaattggcaatttccaaacctcaggcctggatgatgttctgtctccatctgttcccccaccccaagccctgacaacaggtcatctcttggccccgaaaatctgtcacctgcaccctggagcctgggtgactttgaacagctggtgaccagtctgacccttcacgatcctaacatctttggtccccagtaaaggcgctgaagcactgcatgatgttgctgagaacttggggactcggttctgtgagggggaaaagaggttgaaaagagggtttcctcttatttcttccctgtgcgtaaacataagacaatccctcttcagaataaacttgctttataatcaatata

SEQ ID NO: 191418 - DNA, 561 bp, Artificial Sequence
  derived and/or modified sequence
atggagcccaccagagactgccccctgttcggcggcgccttcagcgccatcctgcccatgggcgccatcgacgtgagcgacctgagacccgtgcccgacaaccaggaggtgttctgccaccccgtgaccgaccagagcctgatcgtggagctgctggagctgcaggcccacgtgagaggcgaggccgccgccagataccacttcgaggacgtgggcggcgtgcagggcgccagagccgtgcacgtggagagcgtgcagcccctgagcctggagaacctggccctgagaggcagatgccaggaggcctgggtgctgagcggcaagcagcagatcgccaaggagaaccagcaggtggccaaggacgtgaccctgcaccaggccctgctgagactgccccagtaccagaccgacctgctgctgaccttcaaccagcccccccccgacaacagaagcagcctgggccccgagaacctgagccccgccccctggagcctgggcgacttcgagcagctggtgaccagcctgaccctgcacgaccccaacatcttcggcccccagtag

SEQ ID NO: 191419 - DNA, 561 bp, Artificial Sequence
  derived and/or modified sequence
atggagcccacccgggattgtccgctcttcggtggtgcctttagcgccattcttccgatgggagctattgatgtatctgatttgcgaccggtgcctgataatcaggaggtcttctgtcatcccgtcactgatcaatctttgattgtggagctcctcgaacttcaggcacacgtacgaggcgaagctgctgccaggtaccactttgaggatgtgggcggagtacagggcgcacgggccgttcacgtggaatccgtccagccgctgagtctggaaaacctggctctgcgcgggcgctgccaggaggcttgggttctttcaggcaaacaacagattgccaaagagaatcagcaggtcgccaaggacgtgacactgcaccaggccctgttacgtctcccacaataccagacagatttactgctaacatttaaccagccacctccggacaatcggagctccctgggcccggagaacctgtcccctgccccatggagtctcggtgatttcgagcaattggtgacatcactgactctacacgaccctaacatcttcggcccccagtag

SEQ ID NO: 191420 - DNA, 561 bp, Artificial Sequence
  derived and/or modified sequence
atggagcccacccgggactgccccctgtttggaggagccttcagcgccatcctgcccatgggcgccattgatgtgtctgacctgcggcctgtgcctgacaaccaggaggtgttctgccaccctgtgacagaccagagcctcatcgtggagctgctggagctgcaggcccacgtgcggggggaggccgccgcccgctaccactttgaagatgtgggcggcgtgcagggcgcccgggctgtgcacgtggagagcgtgcagcccctgagcctggagaacctggccctgcggggccgctgccaggaggcctgggtgctgagcggcaagcagcagatcgccaaggagaaccagcaggtggccaaggatgtgaccctgcaccaggccctgctgcggctgccccagtaccagacagacctgctgctgaccttcaaccagcccccaccagacaacagaagcagcctgggccctgagaacctgagccctgccccctggagcctgggggactttgagcagctggtgaccagcctgaccctgcatgaccccaacatcttcggcccccagtag

SEQ ID NO: 191421 - DNA, 561 bp, Artificial Sequence
  derived and/or modified sequence
atggagcccacccgggactgccccctgttcggcggcgccttcagcgcgatcctccctatgggggccatagacgtatccgacctgagaccggtgcctgacaaccaggaagtgttttgtcatcccgtgactgaccagagcctaattgtcgagctgttggagctgcaagcccatgttcgcggggaggccgccgccaggtatcattttgaggatgtggggggcgtgcagggtgcacgcgccgttcatgttgaaagcgtgcagcccctcagtctggagaaccttgctttacgtggccgttgccaggaggcttgggtgctcagtggtaagcagcaaattgccaaggaaaaccaacaggtggcaaaagacgtgaccctgcatcaggcactcttaagactaccacagtaccagaccgatctcctgttgacattcaaccagccaccccctgataacagatccagcttagggccagaaaatctgagtccagccccgtggtccttgggtgatttcgagcagctggtgacctccttgaccctccacgacccaaacatcttcggcccacaatag

SEQ ID NO: 191422 - DNA, 561 bp, Artificial Sequence
  derived and/or modified sequence
atggagcccaccagagattgtcctttgttcgggggtgctttctctgccattctgcccatgggggctatcgacgtcagtgacctcaggcccgttccagataaccaggaggtcttttgccatccggtgaccgatcagtcattgatcgtggagttgttggaactgcaagctcacgttagaggggaggccgctgctcggtaccatttcgaagacgttgggggagtgcagggagccagagccgtccacgtagaatcggtgcagccgctgtcactggagaacctggctctgcgaggtaggtgccaggaggcatgggtcttatcggggaagcagcaaatcgccaaggaaaaccaacaagtagccaaggacgtgacactgcatcaggccttgctacgactgccacagtaccagacagacttgttactgaccttcaatcagcccccacctgacaaccgcagttctctggggcctgaaaacctctcacccgcaccctggtccttgggagattttgagcagctcgtgacaagcctcaccctccatgatcccaacatttttgggccacagtag

SEQ ID NO: 191423 - protein, 293 aa, Artificial Sequence
  derived and/or modified sequence
MTEDSQRNFRSVYYEKVGFRGVEEKKSLEILLKDDRLDTEKLCTFSQRFPLPSMYRALVWKVLLGILPPHHESHAKVMMYRKEQYLDVLHALKVVRFVSDATPQAEVYLRMYQLESGKLPRSPSFPLEPDDEVFLAIAKAMEEMVEDSVDCYWITRRFVNQLNTKYRDSLPQLPKAFEQYLNLEDGRLLTHLRMCSAAPKLPYDLWFKRCFAGCLPESSLQRVWDKVVSGSCKILVFVAVEILLTFKIKVMALNSAEKITKFLENIPQDSSDAIVSKAIDLWHKHCGTPVHSS

SEQ ID NO: 191424 - protein, 130 aa, Artificial Sequence
  derived and/or modified sequence
MTEDSQRNFRSVYYEKVGFRGVEEKKSLEILLKDDRLDTEKLCTFSQRFPLPSMYRALVWKVLLGILPPHHESHAKVMMYRKEQYLDVLHALKVVRFVSDATPQAEVYLRMYQLESGKLPRSPSFPLEPD

SEQ ID NO: 191425 - protein, 136 aa, Artificial Sequence
  derived and/or modified sequence
MTEDSQRNFRSVYYEKVGFRGVEEKKSLEILLKDDRLDTEKLCTFSQRFPLPSMYRALVWKVLLGILPPHHESHAKVMMYRKEQYLDVLHALKVVRFVSDATPQAEVYLRMYQLESGKLPRSPSFPLEPDDEVFLA

SEQ ID NO: 191426 - protein, 179 aa, Artificial Sequence
  derived and/or modified sequence
MTEDSQRNFRSVYYEKVGFRGVEEKKSLEILLKDDRLDTEKLCTFSQRFPLPSMYRALVWKVLLGILPPHHESHAKVMMYRKEQYLDVLHALKVVRFVSDATPQAEVYLRMYQLESGKLPRSPSFPLEPDDEVFLAIAKAMEEMVEDSVDCYWITRRFVNQLNTKYRDSLPQLEGINVG

SEQ ID NO: 191427 - protein, 249 aa, Artificial Sequence
  derived and/or modified sequence
MTEDSQRNFRSVYYEKVGFRGVEEKKSLEILLKDDRLDTEKLCTFSQRFPLPSMYRALVWKVLLGILPPHHESHAKVMMYRKEQYLDVLHALKVVRFVSDATPQAEVYLRMYQLESGKLPRSPSFPLEPDDEVFLAIAKAMEEMVEDSVDCYWITRRFVNQLNTKYRDSLPQLPKAFEQYLNLEDGRLLTHLRMCSAAPKLPYDLWFKRCFAGCLPESSLQRVWDKVVSGSCKILVFVAVEILLTFKIK

SEQ ID NO: 191428 - protein, 156 aa, Artificial Sequence
  derived and/or modified sequence
MTEDSQRNFRSVYYEKVGFRGVEEKKSLEILLKDDRLDTEKLCTFSQRFPLPSMYRALVWKVLLGILPPHHESHAKVMMYRKEQYLDVLHALKVVRFVSDATPQAEVYLRMYQLESGKLPRSPSFPLEPDDEVFLAIAKAMEEMVEDSVDCYWITR

SEQ ID NO: 191429 - DNA, 882 bp, Artificial Sequence
  derived and/or modified sequence
atgaccgaggacagccagagaaacttcagaagcgtgtactacgagaaggtgggcttcagaggcgtggaggagaagaagagcctggagatcctgctgaaggacgacagactggacaccgagaagctgtgcaccttcagccagagattccccctgcccagcatgtacagagccctggtgtggaaggtgctgctgggcatcctgcccccccaccacgagagccacgccaaggtgatgatgtacagaaaggagcagtacctggacgtgctgcacgccctgaaggtggtgagattcgtgagcgacgccaccccccaggccgaggtgtacctgagaatgtaccagctggagagcggcaagctgcccagaagccccagcttccccctggagcccgacgacgaggtgttcctggccatcgccaaggccatggaggagatggtggaggacagcgtggactgctactggatcaccagaagattcgtgaaccagctgaacaccaagtacagagacagcctgccccagctgcccaaggccttcgagcagtacctgaacctggaggacggcagactgctgacccacctgagaatgtgcagcgccgcccccaagctgccctacgacctgtggttcaagagatgcttcgccggctgcctgcccgagagcagcctgcagagagtgtgggacaaggtggtgagcggcagctgcaagatcctggtgttcgtggccgtggagatcctgctgaccttcaagatcaaggtgatggccctgaacagcgccgagaagatcaccaagttcctggagaacatcccccaggacagcagcgacgccatcgtgagcaaggccatcgacctgtggcacaagcactgcggcacccccgtgcacagcagctag

SEQ ID NO: 191430 - DNA, 2311 bp, Artificial Sequence
  derived and/or modified sequence
gatgtcacgtccggcggcggcggcagcggcagcggcagcggcgctgagttttgtctcccgggccgtctgggcgcgcgcgggtgtcccagaatgaaatatgactgaggactctcagagaaactttcgttcagtatattatgagaaagtggggtttcgtggagttgaagaaaagaaatcattagaaattctcctaaaagatgaccgtctggatactgagaaactttgtacttttagtcagaggttccctctcccgtccatgtaccgtgcattggtatggaaggtgcttctaggaatcttgcctccacaccacgagtccatgccaaggtgatgatgtatcgtaaggagcagtacttggatgtccttcatgccctgaaagtcgttcgctttgttagtgatgccacacctcaggctgaagtctatctccgcatgtatcagctggagtctgggaagttacctcgaagtccctcttttccactggagccagatgatgaagtgtttcttgccatagctaaagccatggaggaaatggtggaagatagtgtcgactgttactggatcacccgacgctttgtgaaccaattaaataccaagtaccgggattccttgccccagttgccaaaagcgtttgaacaatacttgaatctggaagatggcagactgctgactcatctgaggatgtgttccgcggcgcccaaacttccttatgatctctggttcaagaggtgctttgcgggatgtttgcctgaatccagtttacagagggtttgggataaagttgtgagtggatcctgtaagatcctagtttttgtagctgtcgaaattttattaacctttaaaataaaagttatggcactgaacagtgcagagaagataacaaagtttctggaaaatattccccaggacagctcagacgcgatcgtgagcaaggccattgacttgtggcacaaacactgtgggaccccggtccattcaagctgaacgcacccgctggttgtggaccgtctgccaggcaccacaatcattcctggacccccgagggcctctgagtttgagacgctggctgagatcaaatgataagaattccaatttttgttttcctaagtctttcatctgctaatctacccaacatgaaccacgggccacatgaagggccagacacattcttaagcggctcacagcctagaggtgcacatctgtgattacaatgtgcaaggtaaaactggatcaacagtttccaaggactggcatgtaataaaatatcctcaaaacaacaagcaagttgggcgtgacttagactttcactgcccatgtagaaggcactgtacattcttgcagcatctcagttggccagcaagaggtgagtcagaaaaaaaccattcagcagccacatggaagtggggctcactgggcacaaggcaaaactgtgaagaagataaagtgtctgtggttctgcattgactctattccctggagtcctcccctctcgagttcctagaattatgttatcactcttgctctatctcattcctatcaagacctgttttagaaatgggtgccacagactcagttacattcaaatgtaaacccattcattcatttagcaagttacttattagtgccagtgctgtgtcaggttctacattaggtaccagagtacagtgatgagcaaaaccagtccctgcccttctggaacagagaagactggaagaggatgggggtagccattaatcaaacagtcacagaaatgagtgcaaaatgtagctggagtaagggcttccatggtgaggcacttggtgcagggatctctggatctgaccaaatcaggaggtcaggaaaggcttccaggaggaagtgacactgtgcccagagctcagggatggaagaaggatgctccttctgggcagagagtaaggagagaagattggtgggaaggagggcaggggccagatgccgtgggtgtgatttggatctgtgtccctgccaatcacatgttgaattgtagtccccagtgttggaggtggagcctggtgggacatgattggatcatgggggtagtttttcatgaacggtttagtaccaaccacttggtgctgttctagtgagttgagtgcattctcgcgagatctggttgtttaaaagtgtgtagcacccttccctcttgctcctgctcctccaatgtgagactccttgctttccctctgttttccaccatgattggaagcttcctgaggcctcaccagaggcagatgccagcatcatgcttcctgtgcagcctgcagaactgtgagccaattaaacctcttttcgttat

SEQ ID NO: 191431 - DNA, 393 bp, Artificial Sequence
  derived and/or modified sequence
atgaccgaggacagccagagaaacttcagaagcgtgtactacgagaaggtgggcttcagaggcgtggaggagaagaagagcctggagatcctgctgaaggacgacagactggacaccgagaagctgtgcaccttcagccagagattccccctgcccagcatgtacagagccctggtgtggaaggtgctgctgggcatcctgcccccccaccacgagagccacgccaaggtgatgatgtacagaaaggagcagtacctggacgtgctgcacgccctgaaggtggtgagattcgtgagcgacgccaccccccaggccgaggtgtacctgagaatgtaccagctggagagcggcaagctgcccagaagccccagcttccccctggagcccgactag

SEQ ID NO: 191432 - DNA, 411 bp, Artificial Sequence
  derived and/or modified sequence
atgaccgaggacagccagagaaacttcagaagcgtgtactacgagaaggtgggcttcagaggcgtggaggagaagaagagcctggagatcctgctgaaggacgacagactggacaccgagaagctgtgcaccttcagccagagattccccctgcccagcatgtacagagccctggtgtggaaggtgctgctgggcatcctgcccccccaccacgagagccacgccaaggtgatgatgtacagaaaggagcagtacctggacgtgctgcacgccctgaaggtggtgagattcgtgagcgacgccaccccccaggccgaggtgtacctgagaatgtaccagctggagagcggcaagctgcccagaagccccagcttccccctggagcccgacgacgaggtgttcctggcctag

SEQ ID NO: 191433 - DNA, 540 bp, Artificial Sequence
  derived and/or modified sequence
atgaccgaggacagccagagaaacttcagaagcgtgtactacgagaaggtgggcttcagaggcgtggaggagaagaagagcctggagatcctgctgaaggacgacagactggacaccgagaagctgtgcaccttcagccagagattccccctgcccagcatgtacagagccctggtgtggaaggtgctgctgggcatcctgcccccccaccacgagagccacgccaaggtgatgatgtacagaaaggagcagtacctggacgtgctgcacgccctgaaggtggtgagattcgtgagcgacgccaccccccaggccgaggtgtacctgagaatgtaccagctggagagcggcaagctgcccagaagccccagcttccccctggagcccgacgacgaggtgttcctggccatcgccaaggccatggaggagatggtggaggacagcgtggactgctactggatcaccagaagattcgtgaaccagctgaacaccaagtacagagacagcctgccccagctggagggcatcaacgtgggctag

SEQ ID NO: 191434 - DNA, 750 bp, Artificial Sequence
  derived and/or modified sequence
atgaccgaggacagccagagaaacttcagaagcgtgtactacgagaaggtgggcttcagaggcgtggaggagaagaagagcctggagatcctgctgaaggacgacagactggacaccgagaagctgtgcaccttcagccagagattccccctgcccagcatgtacagagccctggtgtggaaggtgctgctgggcatcctgcccccccaccacgagagccacgccaaggtgatgatgtacagaaaggagcagtacctggacgtgctgcacgccctgaaggtggtgagattcgtgagcgacgccaccccccaggccgaggtgtacctgagaatgtaccagctggagagcggcaagctgcccagaagccccagcttccccctggagcccgacgacgaggtgttcctggccatcgccaaggccatggaggagatggtggaggacagcgtggactgctactggatcaccagaagattcgtgaaccagctgaacaccaagtacagagacagcctgccccagctgcccaaggccttcgagcagtacctgaacctggaggacggcagactgctgacccacctgagaatgtgcagcgccgcccccaagctgccctacgacctgtggttcaagagatgcttcgccggctgcctgcccgagagcagcctgcagagagtgtgggacaaggtggtgagcggcagctgcaagatcctggtgttcgtggccgtggagatcctgctgaccttcaagatcaagtag

SEQ ID NO: 191435 - DNA, 471 bp, Artificial Sequence
  derived and/or modified sequence
atgaccgaggacagccagagaaacttcagaagcgtgtactacgagaaggtgggcttcagaggcgtggaggagaagaagagcctggagatcctgctgaaggacgacagactggacaccgagaagctgtgcaccttcagccagagattccccctgcccagcatgtacagagccctggtgtggaaggtgctgctgggcatcctgcccccccaccacgagagccacgccaaggtgatgatgtacagaaaggagcagtacctggacgtgctgcacgccctgaaggtggtgagattcgtgagcgacgccaccccccaggccgaggtgtacctgagaatgtaccagctggagagcggcaagctgcccagaagccccagcttccccctggagcccgacgacgaggtgttcctggccatcgccaaggccatggaggagatggtggaggacagcgtggactgctactggatcaccagatag

SEQ ID NO: 191436 - DNA, 1116 bp, Artificial Sequence
  derived and/or modified sequence
gcggcggcggcagcggcagcggcagcggcgctgagttttgtctcccgggccgtctgggcgcgcgcgggtgtcccagaatgaaatatgactgaggactctcagagaaactttcgttcagtatattatgagaaagtggggtttcgtggagttgaagaaaagaaatcattagaaattctcctaaaagatgaccgtctggatactgagaaactttgtacttttagtcagaggttccctctcccgtccatgtaccgtgcattggtatggaaggtgcttctaggaatcttgcctccacaccacgagtcccatgccaaggtgatgatgtatcgtaaggagcagtacttggatgtccttcatgccctgaaagtcgttcgctttgttagtgatgccacacctcaggctgaagtctatctccgcatgtatcagctggagtctgggaagttacctcgaagtccctcttttccactggagccagatgatgaagtgtttcttgccatagctaaagccatggaggaaatggtggaagatagtgtcgactgttactggatcacccgacgctttgtgaaccaattaaataccaagtaccgggattccttgccccagttgccaaaagcgtttgaacaatacttgaatctggaagatggcagactgctgactcatctgaggatgtgttccgcggcgcccaaacttccttatgatctctggttcaagaggtgctttgcgggatgtttgcctgaatccagtttacagagggtttgggataaagttgtgagtggatcctgtaagatcctagtttttgtagctgtcgaaattttattaacctttaaaataaaagttatggcactgaacagtgcagagaagataacaaagtttctggaaaatattccccaggacagctcagacgcgatcgtgagcaaggccattgacttgtggcacaaacactgtgggaccccggtccattcaagctgaacgcacccgctggttgtggaccgtctgccaggcaccacagtgagcattgtgttcttggcatgtgatctgggaaactgattgaataatacacttttcttgctttggtgctcaaagtggtttttttcccccaataaaattatttaattgaaa

SEQ ID NO: 191437 - DNA, 882 bp, Artificial Sequence
  derived and/or modified sequence
atgaccgaagactcccaacgcaatttccgaagcgtgtactatgagaaggtgggctttaggggtgtggaggaaaagaaatccctggaaatcttactcaaggacgataggctggacactgaaaagttgtgtactttctcccagcggttccctctgccctcaatgtatagggccctggtgtggaaagtcctcctgggcattttgcctccgcatcacgaaagccacgcaaaggtcatgatgtatcgcaaggagcagtacttggatgtgttgcacgctcttaaagttgtgcgtttcgtctcagacgcgacaccgcaagcagaagtctatctccgaatgtaccagctggagagtggaaaattgccaagaagcccttccttccctcttgagcccgacgatgaggttttcctggcgatcgcgaaagcaatggaggagatggtcgaggacagtgtggactgttattggataacgaggcgctttgtcaatcaattaaacaccaaataccgagattccctaccccagttgcccaaagcttttgagcaatacctaaatctagaagatgggcgactgttaacccacctgcgaatgtgcagcgcagccccgaaacttccctacgatctgtggtttaagaggtgcttcgccggctgtctccctgaatcctccctgcagagggtttgggacaaagtcgtttccgggtcctgtaaaatcctggtgttcgtagccgtggagatattactgacttttaaaataaaggtcatggccctgaattccgccgagaagatcactaagtttctggagaatatcccacaagactccagcgatgccattgtctcaaaagcaatcgatctgtggcacaagcattgtggcaccccagtgcactcctcatag

SEQ ID NO: 191438 - DNA, 393 bp, Artificial Sequence
  derived and/or modified sequence
atgaccgaggattcacagcgaaactttcgctcagtgtactatgaaaaggtagggtttagaggcgtggaagaaaaaaagagcttagaaatcctcctgaaggacgatcgcctcgacaccgagaagttgtgcacattttcacaacggttcccattgccctccatgtacagggccttggtttggaaggtgctgttaggaatcctgccacctcaccatgaatcacatgccaaggtgatgatgtatcgcaaagagcagtatcttgacgtgctgcacgctctaaaggttgtgaggtttgtttccgatgctacacctcaggccgaagtgtatctgagaatgtatcaattagaaagcgggaagcttccccggagtccgtcttttcccctcgagcctgactag

SEQ ID NO: 191439 - DNA, 882 bp, Artificial Sequence
  derived and/or modified sequence
atgacggaagattcgcaacgtaattttcggagcgtgtattacgaaaaggtaggatttagaggtgtcgaggagaagaaatctctagagattctgctcaaagacgataggctagatacagagaagctgtgtaccttttctcagcgcttcccgctgcccagtatgtacagggccctggtgtggaaggtgttgcttgggatactgccccctcaccacgaatctcatgccaaggtaatgatgtatagaaaggaacagtatttagatgtccttcacgctctaaaagtggtgcgctttgtaagcgatgccactccacaggcagaagtttacctgaggatgtaccagctcgagtcgggtaaattgcccagaagtccaagtttccctctggaacctgacgatgaggtattcctggccatcgcaaaagccatggaggaaatggtagaggatagcgttgattgttactggatcacacgacgtttcgtgaatcaactgaacacaaagtacagagactctctcccccagctaccaaaagcatttgagcagtaccttaacctagaggacggcaggctcttgactcacctgcggatgtgttcagctgcacctaagctgccctacgacttgtggttcaaacgatgcttcgcaggatgcctgcccgaatcttcattacaacgggtctgggataaggtcgtttcaggcagctgcaagatcttggtattcgtagctgtggagatactgttaactttcaaaataaaagtgatggccctgaattctgccgagaagatcacaaaatttctagaaaatataccccaggactcctctgacgctatcgttagcaaagcaattgacctctggcataaacactgcggaactcccgtccatagctcctag

SEQ ID NO: 191440 - DNA, 411 bp, Artificial Sequence
  derived and/or modified sequence
atgaccgaggattcccagcgcaattttagatccgtgtattatgagaaggtagggtttagaggagtggaggaaaagaaatccctggaaattcttcttaaggacgacaggctggacaccgaaaaactgtgcaccttctctcaacggtttcccctcccctctatgtatagggcgttggtgtggaaagtcctgctgggaatcctgccacctcatcacgaaagccacgctaaagtgatgatgtacagaaaggaacagtatttagacgtactccacgctttgaaggtggtgcgcttcgtctccgatgctactccccaggcagaggtttacctacgtatgtaccaactagagtctgggaagttgccccgctccccttccttcccactcgaaccagatgatgaggtcttcctcgcctag

SEQ ID NO: 191441 - DNA, 540 bp, Artificial Sequence
  derived and/or modified sequence
atgactgaagatagccagcgcaattttcgcagtgtgtattatgaaaaggttggttttagaggtgtggaggagaaaaagtctctggagatactgttgaaagacgatcgcttggacaccgaaaagctgtgcacgttcagtcagagatttcctttgccgagcatgtatcgagcgctggtctggaaggtcctgctagggatcctgcctccccatcacgagagtcatgccaaagtgatgatgtatagaaaggaacaatatctcgacgtgctgcacgccctgaaggtcgtgcggttcgtgtctgatgccacaccccaggccgaggtgtacctcaggatgtaccagctggaaagcggcaaacttccacgttcacccagtttcccacttgaacctgatgacgaagtttttctggctatcgctaaagcgatggaggagatggtggaggattccgttgattgctactggatcactagacggttcgtcaaccagctgaacaccaagtatagagatagcctgccccaactggagggcattaatgtgggctag

SEQ ID NO: 191442 - DNA, 750 bp, Artificial Sequence
  derived and/or modified sequence
atgacagaggactcccagagaaactttcggtccgtgtactacgaaaaggtgggctttagaggagtcgaagagaagaagtccctggagatccttctgaaagacgataggctcgatactgaaaaattgtgtactttctcacaacgcttccccctcccatccatgtacagagcactcgtctggaaggtgctgttgggcatcttgccgccgcaccacgaatcccacgccaaggttatgatgtaccgaaaggagcagtacttggatgtcttacacgcattaaaggtggtcagattcgttagcgacgctacaccccaggcggaggtatatctgaggatgtaccagctggagtcaggcaaactcccaaggtctccttctttccctctcgagccagacgacgaagtttttctggcgatcgcaaaagcaatggaagaaatggtggaagactccgtagactgttactggatcacccgaaggttcgttaaccaactgaatactaagtacagagactccctcccacagctccctaaggcctttgaacagtacctgaacttggaggatggacgcttgcttacacacctgagaatgtgttctgccgcccccaagctaccctacgacctgtggtttaaacggtgttttgccggctgtttaccagagagcagcttgcagagggtgtgggacaaggtggtgtctgggagctgcaagatcctggtttttgtggctgtcgagatcttactgacattcaagatcaagtag

SEQ ID NO: 191443 - DNA, 471 bp, Artificial Sequence
  derived and/or modified sequence
atgaccgaggactctcagaggaactttagatccgtgtactatgaaaaggttgggtttcggggtgtggaagagaagaagtccctggagatcctgctgaaagacgatcggctcgacacagaaaagctatgcaccttctcccagagatttccgctcccctcaatgtatcgggccctcgtgtggaaagtgctgctggggatcctgcccccgcaccatgagtcccacgcaaaagtgatgatgtaccgcaaggaacaatacctggatgtgttacatgcactaaaagtagtgaggttcgtgtctgacgccacgcctcaggcagaggtttatttacggatgtatcagctcgaatcagggaagctccctagatctccttctttccccttggagccagatgacgaagtctttttggcaatcgcaaaagctatggaggaaatggtcgaggattcagtcgactgttactggatcacacgctag

SEQ ID NO: 191444 - DNA, 882 bp, Artificial Sequence
  derived and/or modified sequence
atgacagaggacagccagaggaacttccgctctgtgtactatgagaaggtgggcttccggggcgtggaggagaagaagagcctggagatcctgctgaaggatgaccggctggacacagagaagctgtgcaccttcagccagcgcttccccctgcccagcatgtaccgggccctggtgtggaaggtgctgctgggcatcctgcccccccaccacgagagccacgccaaggtgatgatgtacaggaaggagcagtacctggatgtgctgcacgccctgaaggtggtgcgctttgtgtctgatgccaccccccaggccgaggtgtacctgaggatgtaccagctggagagcggcaagctgcccaggagccccagcttccccctggagccagatgatgaggtgttcctggccatcgccaaggccatggaggagatggtggaggacagcgtggactgctactggatcaccaggagatttgtgaaccagctgaacaccaagtacagagacagcctgccccagctgcccaaggcctttgagcagtacctgaacctggaggatggccgcctgctgacccacctgaggatgtgcagcgctgcccccaagctgccctatgacctgtggttcaagcgctgctttgctggctgcctgcctgagagcagcctgcagagggtgtgggacaaggtggtgtctggcagctgcaagatcctggtgtttgtggccgtggagatcctgctgaccttcaagatcaaggtgatggccctgaacagcgctgagaagatcaccaagttcctggagaacatcccccaggacagcagtgatgccatcgtgtccaaggccatcgacctgtggcacaagcactgcggcacccctgtgcacagcagctag

SEQ ID NO: 191445 - DNA, 393 bp, Artificial Sequence
  derived and/or modified sequence
atgacagaggacagccagaggaacttccgctctgtgtactatgagaaggtgggcttccggggcgtggaggagaagaagagcctggagatcctgctgaaggatgaccggctggacacagagaagctgtgcaccttcagccagcgcttccccctgcccagcatgtaccgggccctggtgtggaaggtgctgctgggcatcctgcccccccaccacgagagccacgccaaggtgatgatgtacaggaaggagcagtacctggatgtgctgcacgccctgaaggtggtgcgctttgtgtctgatgccaccccccaggccgaggtgtacctgaggatgtaccagctggagagcggcaagctgcccaggagccccagcttccccctggagccagactag

SEQ ID NO: 191446 - DNA, 693 bp, Artificial Sequence
  derived and/or modified sequence
gcggcggcggcagcggcagcggcagcggcgctgagttttgtctcccgggccgtctgggcgcgcgcgggtgtcccaggtaccccgccgcctccctccttcccgcaggactcgtccctcctggccctgggccccaacggtgcccgcctgcccggcggtcggtcagcgcacagggcacggcttcctctgcttctcccggaccacttagtctcaacccgggtgtgtttgcactactagagactcacttttccccttcgtctttctctccctttctgtctttctgtgtctcctccaagaatgaaatatgactgaggactctcagagaaactttcgttcagtatattatgagaaagtggggtttcgtggagttgaagaaaagaaatcattagaaattctcctaaaagatgaccgtctggatactgagaaactttgtacttttagtcagaggttccctctcccgtccatgtaccgtgcattggtatggaaggtgcttctaggaatcttgcctccacaccacgagtcccatgccaaggtgatgatgtatcgtaaggagcagtacttggatgtccttcatgccctgaaagtcgttcgctttgttagtgatgccacacctcaggctgaagtctatctccgcatgtatcagctggagtctgggaagttacctcgaagtccctcttttccactggagccagatga

SEQ ID NO: 191447 - DNA, 1276 bp, Artificial Sequence
  derived and/or modified sequence
gcggcggcggcagcggcagcggcagcggcgctgagttttgtctcccgggccgtctgggcgcgcgcgggtgtcccaggtaccccgccgcctccctccttcccgcaggactcgtccctcctggccctgggccccaacggtgcccgcctgcccggcggtcggtcagcgcacagggcacggcttcctctgcttctcccggaccacttagtctcaacccgggtgtgtttgcactactagagaatgaaatatgactgaggactctcagagaaactttcgttcagtatattatgagaaagtggggtttcgtggagttgaagaaaagaaatcattagaaattctcctaaaagatgaccgtctggatactgagaaactttgtacttttagtcagaggttccctctcccgtccatgtaccgtgcattggtatggaaggtgcttctaggaatcttgcctccacaccacgagtcccatgccaaggtgatgatgtatcgtaaggagcagtacttggatgtccttcatgccctgaaagtcgttcgctttgttagtgatgccacacctcaggctgaagtctatctccgcatgtatcagctggagtctgggaagttacctcgaagtccctcttttccactggagccagatgatgaagtgtttcttgccatagctaaagccatggaggaaatggtggaagatagtgtcgactgttactggatcacccgacgctttgtgaaccaattaaataccaagtaccgggattccttgccccagttgccaaaagcgtttgaacaatacttgaatctggaagatggcagactgctgactcatctgaggatgtgttccgcggcgcccaaacttccttatgatctctggttcaagaggtgctttgcgggatgtttgcctgaatccagtttacagagggtttgggataaagttgtgagtggatcctgtaagatcctagtttttgtagctgtcgaaattttattaacctttaaaataaaagttatggcactgaacagtgcagagaagataacaaagtttctggaaaatattccccaggacagctcagacgcgatcgtgagcaaggccattgacttgtggcacaaacactgtgggaccccggtccattcaagctgaacgcacccgctggttgtggaccgtctgccaggcaccacagtgagcattgtgttcttggcatgtgatctgggaaactgattgaataatacacttttcttgctttggtgctcaaagtggtttttttcccccaataaaattatttaattgaaa

SEQ ID NO: 191448 - DNA, 411 bp, Artificial Sequence
  derived and/or modified sequence
atgacagaggacagccagaggaacttccgctctgtgtactatgagaaggtgggcttccggggcgtggaggagaagaagagcctggagatcctgctgaaggatgaccggctggacacagagaagctgtgcaccttcagccagcgcttccccctgcccagcatgtaccgggccctggtgtggaaggtgctgctgggcatcctgcccccccaccacgagagccacgccaaggtgatgatgtacaggaaggagcagtacctggatgtgctgcacgccctgaaggtggtgcgctttgtgtctgatgccaccccccaggccgaggtgtacctgaggatgtaccagctggagagcggcaagctgcccaggagccccagcttccccctggagccagatgatgaggtgttcctggcctag

SEQ ID NO: 191449 - DNA, 540 bp, Artificial Sequence
  derived and/or modified sequence
atgacagaggacagccagaggaacttccgctctgtgtactatgagaaggtgggcttccggggcgtggaggagaagaagagcctggagatcctgctgaaggatgaccggctggacacagagaagctgtgcaccttcagccagcgcttccccctgcccagcatgtaccgggccctggtgtggaaggtgctgctgggcatcctgcccccccaccacgagagccacgccaaggtgatgatgtacaggaaggagcagtacctggatgtgctgcacgccctgaaggtggtgcgctttgtgtctgatgccaccccccaggccgaggtgtacctgaggatgtaccagctggagagcggcaagctgcccaggagccccagcttccccctggagccagatgatgaggtgttcctggccatcgccaaggccatggaggagatggtggaggacagcgtggactgctactggatcaccaggagatttgtgaaccagctgaacaccaagtacagagacagcctgccccagctggagggcatcaacgtgggctag

SEQ ID NO: 191450 - DNA, 750 bp, Artificial Sequence
  derived and/or modified sequence
atgacagaggacagccagaggaacttccgctctgtgtactatgagaaggtgggcttccggggcgtggaggagaagaagagcctggagatcctgctgaaggatgaccggctggacacagagaagctgtgcaccttcagccagcgcttccccctgcccagcatgtaccgggccctggtgtggaaggtgctgctgggcatcctgcccccccaccacgagagccacgccaaggtgatgatgtacaggaaggagcagtacctggatgtgctgcacgccctgaaggtggtgcgctttgtgtctgatgccaccccccaggccgaggtgtacctgaggatgtaccagctggagagcggcaagctgcccaggagccccagcttccccctggagccagatgatgaggtgttcctggccatcgccaaggccatggaggagatggtggaggacagcgtggactgctactggatcaccaggagatttgtgaaccagctgaacaccaagtacagagacagcctgccccagctgcccaaggcctttgagcagtacctgaacctggaggatggccgcctgctgacccacctgaggatgtgcagcgctgcccccaagctgccctatgacctgtggttcaagcgctgctttgctggctgcctgcctgagagcagcctgcagagggtgtgggacaaggtggtgtctggcagctgcaagatcctggtgtttgtggccgtggagatcctgctgaccttcaagatcaagtag

SEQ ID NO: 191451 - DNA, 471 bp, Artificial Sequence
  derived and/or modified sequence
atgacagaggacagccagaggaacttccgctctgtgtactatgagaaggtgggcttccggggcgtggaggagaagaagagcctggagatcctgctgaaggatgaccggctggacacagagaagctgtgcaccttcagccagcgcttccccctgcccagcatgtaccgggccctggtgtggaaggtgctgctgggcatcctgcccccccaccacgagagccacgccaaggtgatgatgtacaggaaggagcagtacctggatgtgctgcacgccctgaaggtggtgcgctttgtgtctgatgccaccccccaggccgaggtgtacctgaggatgtaccagctggagagcggcaagctgcccaggagccccagcttccccctggagccagatgatgaggtgttcctggccatcgccaaggccatggaggagatggtggaggacagcgtggactgctactggatcaccaggtag

SEQ ID NO: 191452 - DNA, 882 bp, Artificial Sequence
  derived and/or modified sequence
atgaccgaggacagccagcggaacttccggagcgtgtactacgagaaggtgggattcagaggagtcgaagagaagaaatctcttgaaatcctcctgaaggacgatcgcttagataccgaaaagctgtgtacttttagccagcgctttcctctgccttcaatgtaccgggctctggtttggaaggttctgctcgggatcctacctccacaccacgaatcacacgctaaggtcatgatgtacagaaaagagcagtacttagatgtgctgcacgcactcaaagtggtccggttcgttagtgacgcaacacctcaagccgaggtctacctcaggatgtatcagttggagagcggaaaattgccacgctctccttcctttcctttggagcctgacgacgaagtgtttctggctattgccaaagccatggaagagatggtggaggactctgtcgactgctactggataactcggcgatttgtcaaccaactgaatacgaagtaccgggatagtctcccccaactgcctaaagcatttgagcagtatctgaatctggaagatggcaggctcctgacacacctgcggatgtgctctgccgcccctaagctaccttatgatctgtggttcaagcgttgctttgccggatgcctgcccgagtcaagcttgcagagagtgtgggataaggtggtttccgggagctgcaagatattggtatttgttgcggtggagatactattaacatttaagataaaggtcatggctctaaattcggccgagaaaattaccaagtttctcgagaatattccccaggactcgtctgatgcaatagtgagcaaggccatcgacctgtggcacaagcactgtgggaccccagtccacagctcgtag

SEQ ID NO: 191453 - DNA, 393 bp, Artificial Sequence
  derived and/or modified sequence
atgaccgaggacagccagcggaacttccggagcgtgtactacgagaaagtcgggtttaggggcgtggaagagaaaaaatccctagaaatactgctaaaagacgataggcttgataccgaaaagctgtgcaccttctctcagagatttcccttaccatccatgtacagggcgttggtgtggaaagttctgctggggattttgccaccacaccacgagagtcacgcaaaagtgatgatgtatcgaaaagagcaatacctggacgtactccatgccctgaaggtcgttaggtttgtctctgacgcaaccccgcaggcagaagtgtatctccgcatgtaccagctggagtcagggaagttgcccaggagcccaagctttccattagaaccagactag

SEQ ID NO: 191454 - DNA, 882 bp, Artificial Sequence
  derived and/or modified sequence
atgaccgaggacagccagcggaacttccggagcgtgtactacgagaaggtgggattccgaggggtcgaagaaaagaagagcctagaaattcttcttaaagacgatcgccttgatactgaaaagttgtgtaccttctctcaaagattccctcttccttccatgtacagggccctggtatggaaagtgcttctgggtattctccccccacatcacgagagtcatgcaaaggtcatgatgtataggaaggagcaatacttagatgtattgcatgccttaaaggtggtcaggttcgtcagcgatgctacccctcaggcagaagtgtatttgcgcatgtaccagctcgagagcgggaagcttccccggagtccgtcctttccactagagcctgatgacgaggtcttcctggccatcgccaaagccatggaggagatggtggaggatagcgtagattgttactggattacacggcgattcgtaaatcaactgaacaccaaataccgggactctcttccacagttgccaaaggctttcgaacagtatcttaatcttgaggacgggaggttgctaacccacttgaggatgtgctcagccgcgccaaaattgccatatgacctttggtttaaacgatgcttcgcgggttgtctccctgaatctagcctacagagagtgtgggacaaggtagtcagtggatcttgtaaaattctggtgtttgtcgccgtggagatccttctgacatttaaaattaaagttatggccttgaatagcgccgagaaaatcacaaaattcctggaaaacatcccccaggacagctccgacgccatcgtaagcaaagccattgacttgtggcacaaacattgcggtactcctgttcactcttcctag

SEQ ID NO: 191455 - DNA, 411 bp, Artificial Sequence
  derived and/or modified sequence
atgaccgaggacagccagcggaacttccggagcgtgtactacgagaaggttggattccgtggcgtggaagagaaaaaatccctcgaaattttgttaaaagacgacagactagacacagagaaactgtgtacattctcgcagaggttccctctgcccagtatgtaccgagcgttggtgtggaaagtccttttaggcatcctgccgccccatcatgagagtcatgctaaggtcatgatgtataggaaggagcagtacctcgatgttttgcatgctctgaaagtggtgagattcgtgtcggatgctaccccacaggctgaggtgtatttaagaatgtaccaactggaatcaggcaagctgccaagatccccctcttttccattagaaccggatgatgaagtgttcctcgcatag

SEQ ID NO: 191456 - DNA, 540 bp, Artificial Sequence
  derived and/or modified sequence
atgaccgaggacagccagcggaacttccggagcgtgtactacgagaaagtggggttccggggagtggaggagaagaagtccttggagattctactgaaagacgaccggctggacaccgagaagctgtgcacctttagtcagaggttcccactgccttctatgtatcgcgccttggtatggaaggtacttttgggaattctgcccccccaccacgaatctcacgcaaaggtgatgatgtaccgcaaggagcagtacctggacgtcctgcatgccctgaaggtggttagattcgtttcagacgccactccccaggctgaagtctacttgcggatgtatcagctcgagagcgggaagttaccgcgctcaccctcctttccactagaacctgatgacgaggtgttcctcgcaatcgctaaagcaatggaggaaatggtggaggattccgtggattgctactggatcacaaggagattcgtaaatcaactgaatacaaaatatagagactccttaccacagttagagggcatcaacgtggggtag

SEQ ID NO: 191457 - DNA, 750 bp, Artificial Sequence
  derived and/or modified sequence
atgaccgaggacagccagcggaacttccggagcgtgtactacgagaaggttggatttcggggcgtcgaggaaaaaaagtccctggagatcctgctgaaggatgacaggcttgacacagagaaactctgtacatttagccagcggttccctttaccttcaatgtacagagcacttgtctggaaagtattacttggcatactgccaccccaccacgagtcacacgccaaggttatgatgtaccgcaaggagcagtacttggatgtgctgcacgcgctgaaggttgtgcgattcgtcagcgacgcgaccccccaggctgaggtgtatttgaggatgtatcaactagagtctggcaagttgccccgcagcccttcttttcctctggagccggacgatgaagtgttcctcgctatcgccaaggcgatggaggaaatggttgaggacagcgtcgactgttattggatcactagacggtttgtgaatcagctaaacactaaatatagggactctctgccccaactcccaaaagcattcgagcaatatctgaatctggaagatggacggctgctgacccatctgagaatgtgcagtgccgcccctaagctcccctatgatctctggttcaagaggtgcttcgccgggtgcttgcctgagtcatcgcttcagcgcgtatgggacaaagtcgttagtggctcctgcaaaatcctggtcttcgtcgctgtcgaaatattgctcacatttaaaattaaatag

SEQ ID NO: 191458 - DNA, 471 bp, Artificial Sequence
  derived and/or modified sequence
atgaccgaggacagccagcggaacttccggagcgtgtactacgagaaggtaggcttccgcggcgtggaagaaaaaaagagtcttgagatcctgttaaaggacgaccggttagataccgagaagctttgcaccttttcccagaggttcccccttcccagcatgtaccgcgctctggtgtggaaagtgctgttgggcattctacctcctcatcacgagtctcacgcaaaggtcatgatgtatagaaaggagcaatatttggacgtccttcatgctctgaaggtggtgagatttgtgagcgacgctactcctcaggctgaagtctaccttcgaatgtaccagctggaaagcgggaaactgcctcggtccccctccttccccctcgagcccgacgacgaggtgtttttggcaatcgctaaagctatggaagagatggtggaagactccgtcgattgctactggatcacacgttag

SEQ ID NO: 191459 - DNA, 714 bp, Artificial Sequence
  derived and/or modified sequence
caacagggaccgaccaaatcgtcatgcagctgtttggatgctttaaaaaaataaatccccacactcattacgcgttttatgctgctgacttttttatttttaagacatctgctcccgaaagctcagagccctttagcatttcattttctaaacgaatcctaatctttcctgtgactgaatcggttcagaggatatcttttcaataaggaaggaagccctcccctgctcactggggacgtcgcagggtttttaaacctaaagatttactcttttgtgcacagacgctggaagcatttggaatgaaatatgactgaggactctcagagaaactttcgttcagtatattatgagaaagtggggtttcgtggagttgaagaaaagaaatcattagaaattctcctaaaagatgaccgtctggatactgagaaactttgtacttttagtcagaggttccctctcccgtccatgtaccgtgcattggtatggaaggtgcttctaggaatcttgcctccacaccacgagtcccatgccaaggtgatgatgtatcgtaaggagcagtacttggatgtccttcatgccctgaaagtcgttcgctttgttagtgatgccacacctcaggctgaagtctatctccgcatgtatcagctggagtctgggaagttacctcgaagtccctcttttccactggagccagatgatgaagtgtttcttgcc

SEQ ID NO: 191460 - DNA, 882 bp, Artificial Sequence
  derived and/or modified sequence
atgacagaggatagtcaaaggaacttcagatccgtatactatgagaaagttggcttccggggtgtagaagagaaaaaaagtttggaaatcctcctaaaagacgacagattggatacggagaaactctgcacattctcccagaggtttcctttgccctccatgtaccgcgcactggtttggaaggtgctgttgggtattttacctccgcatcatgagagccatgccaaggtgatgatgtataggaaggagcaatacctcgacgtgctgcatgcacttaaggtggtgaggttcgtcagcgacgcaacccctcaagctgaagtgtatttacgaatgtatcagctggagagtgggaaactgccaaggtccccgagttttcctctggaaccagacgatgaggtcttcctggctatcgccaaggccatggaagaaatggtagaggattccgtggactgttattggattacacgcaggttcgttaaccagctgaataccaaatatagggacagcctgccacagttacccaaagcatttgagcagtatctgaacctggaggatggcagacttctaacacatctgcggatgtgttcagcggcaccgaagcttccttatgacctgtggttcaaaagatgcttcgccggatgtctgcccgagagctcacttcagcgagtttgggataaagtagtcagcggctcatgtaagatccttgtcttcgtggcagtggagattttattaacttttaagattaaagtgatggctctgaactcagcagaaaagataacaaaattcctggagaatatacctcaagactctagcgacgcgattgtaagtaaggcaatcgatctgtggcataagcactgtgggactcctgtgcactcctcgtag

SEQ ID NO: 191461 - DNA, 1544 bp, Artificial Sequence
  derived and/or modified sequence
gatgtcacgtccggcggcggcggcagcggcagcggcagcggcgctgagttttgtctcccgggccgtctgggcgcgcgcgggtgtcccagaatgaaatatgactgaggactctcagagaaactttcgttcagtatattatgagaaagtggggtttcgtggagttgaagaaaagaaatcattagaaattctcctaaaagatgaccgtctggatactgagaaactttgtacttttagtcagaggttccctctcccgtccatgtaccgtgcattggtatggaaggtgcttctaggaatcttgcctccacaccacgagtcccatgccaaggtgatgatgtatcgtaaggagcagtacttggatgtccttcatgccctgaaagtcgttcgctttgttagtgatgccacacctcaggctgaagtctatctccgcatgtatcagctggagtctgggaagttacctcgaagtccctcttttccactggagccagatgatgaagtgtttcttgccatagctaaagccatggaggaaatggtggaagatagtgtcgactgttactggatcacccgacgctttgtgaaccaattaaataccaagtaccgggattccttgccccagttggaaggcataaatgttggctgactgtcaaatgcttgtgggaggtccccacggagtggagaagcgggagactcagcttaatcacagacaaagttgtgcatgagagacggagtctcactctgttgcccaggctggagttcaatggtgcaatgatctcggctcactgcaacctccgcctcttgggtgcaagtaactctcctgcctcagcctcccgagtagctgggattacaggtcccttcagagccgtgaaggcgggcatcctgtgacacagctgacacagcatggagccttcatctcctatgtgcgtttcttaggtcactctgaggggtggggccacaagctaccacctacagaattgatacctttagttcaaagccattgaccaacccaggttcatgaattttcaggcagaaggtaccaagacaaccccattaggcaactaggaagacaggccaggaaaggcctacgatgtcgtcattacagctgccaccgtcagagggttcattatgtgctcagaggtgcacagggcctcactggctgctggacagaacaggggctgctcccaggaccaggcagggtggggctggaaaccaacccaaggctctcaaagctccagggctgagccatggcatctctgtgccctgttccccaccacccaacaccgagcagttcctcaaatggctgaaagctcagaaaatcagttttaaaacaaactattggaggatgttttcttataccactagacattttttttgtttaacaatcgcaatagattaaatttaaaaaaatatttaggagaacatagttccagaatacagggaaaaataagaacctatgggaaaacaagttgatttctgaaaagtttcaaaactatgaaatgaccaacctgttagaattggtcaagtagttctttaatttgcaactatgtggc

SEQ ID NO: 191462 - DNA, 972 bp, Artificial Sequence
  derived and/or modified sequence
gcggcggcggcagcggcagcggcagcggcgctgagttttgtctcccgggccgtctgggcgcgcgcgggtgtcccaggtaccccgccgcctccctccttcccgcaggactcgtccctcctggccctgggccccaacggtgcccgcctgcccggcggtcggtcagcgcacagggcacggcttcctctgcttctcccggaccacttagtctcaacccggaatgaaatatgactgaggactctcagagaaactttcgttcagtatattatgagaaagtggggtttcgtggagttgaagaaaagaaatcattagaaattctcctaaaagatgaccgtctggatactgagaaactttgtacttttagtcagaggttccctctcccgtccatgtaccgtgcattggtatggaaggtgcttctaggaatcttgcctccacaccacgagtcccatgccaaggtgatgatgtatcgtaaggagcagtacttggatgtccttcatgccctgaaagtcgttcgctttgttagtgatgccacacctcaggctgaagtctatctccgcatgtatcagctggagtctgggaagttacctcgaagtccctcttttccactggagccagatgatgaagtgtttcttgccatagctaaagccatggaggaaatggtggaagatagtgtcgactgttactggatcacccgacgctttgtgaaccaattaaataccaagtaccgggattccttgccccagttgccaaaagcgtttgaacaatacttgaatctggaagatggcagactgctgactcatctgaggatgtgttccgcggcgcccaaacttccttatgatctctggttcaagaggtgctttgcgggatgtttgcctgaatccagtttacagagggtttgggataaagttgtgagtggatcctgtaagatcctagtttttgtagctgtcgaaattttattaacctttaaaataaaag

SEQ ID NO: 191463 - DNA, 393 bp, Artificial Sequence
  derived and/or modified sequence
atgaccgaggattcgcagcgcaactttaggagcgtgtattacgaaaaagtgggttttcgtggtgtcgaggagaaaaagtcgttggagattctgctcaaggatgatcgattagataccgagaaactgtgtacctttagtcagaggtttccactcccaagtatgtatagagctctggtgtggaaagtacttctgggtatcttgccaccccatcacgaatcccacgctaaggtgatgatgtatcggaaagaacaatatttggatgtgctgcacgcccttaaggtggtcaggttcgtgagcgacgccactccccaggcagaagtttatctgaggatgtatcaactcgaatcagggaaattgcccagatcaccttccttcccattagagcccgattag

SEQ ID NO: 191464 - DNA, 882 bp, Artificial Sequence
  derived and/or modified sequence
atgactgaggactcacaacgaaatttccgaagcgtgtactacgagaaggttgggttcagaggggtggaggaaaaaaagtcactagagatccttttaaaagacgataggctggacaccgaaaagttatgcaccttctcgcagaggttccccctgccttcaatgtacagagccctcgtatggaaagtcctcctagggatcctgccgcctcatcacgaatcacatgccaaggtgatgatgtaccggaaggagcagtacctcgacgtgttgcatgcacttaaagttgtacgatttgttagtgatgccaccccccaggcagaagtataccttaggatgtatcaactggaatccggaaaactcccgaggagccctagctttccactcgaacctgacgatgaagtgtttctggccatcgccaaggccatggaggaaatggttgaggattcagtggattgttactggataacccgcagattcgtcaaccagctgaacactaagtatcgagattcactgccgcagctgcctaaggcctttgaacaatatctgaatctggaagatggccgactgctcacgcacttacgcatgtgtagcgctgcgccaaagctcccatacgatctctggttcaagcggtgcttcgccggatgcctaccagaatcatcactacaacgggtttgggacaaagtagtttctggcagctgcaaaattctagtgttcgtcgcagtcgagatcctcctgactttcaagattaaggttatggcacttaacagcgctgagaagatcacgaaatttctggagaacatcccgcaggactccagcgacgctatcgtatcaaaagcaattgatctatggcacaagcactgtgggacacccgtgcactcgtcgtag

SEQ ID NO: 191465 - DNA, 411 bp, Artificial Sequence
  derived and/or modified sequence
atgacagaagattcacagagaaactttcgtagtgtttactacgagaaggtcggtttccgtggcgttgaggagaagaagtcactcgagatcctgcttaaggacgatcggctagatacggaaaagctatgtacttttagtcagcggtttccactacccagcatgtatcgtgcgctggtatggaaggtacttctgggcattctccccccacatcatgagtcacatgcaaaagtcatgatgtaccgaaaggagcaatacctcgacgtgctccatgcccttaaagtggtgagatttgtctcagacgctacaccccaagccgaagtatacttgaggatgtatcagttggaatctggcaaattacctagatcaccatcttttccactggagccagatgatgaggttttcctggcttag

SEQ ID NO: 191466 - DNA, 540 bp, Artificial Sequence
  derived and/or modified sequence
atgactgaggactctcagcggaattttcggtcggtgtactatgaaaaggttggatttcgaggggttgaagaaaaaaagagcctggaaatcctgctcaaggacgacagattggacaccgagaaattatgcaccttttcgcagagatttcctttgcccagcatgtacagggcacttgtgtggaaagtgttactcggtatcttaccccctcaccatgaatcccatgcaaaggttatgatgtataggaaggagcaatatctggacgttctgcatgcgttaaaagtggtaaggttcgtgtctgacgccacaccgcaggccgaagtgtatctacgaatgtaccagttagaaagcggaaagctgcccaggtctcctagtttccctctggaacccgacgatgaagtgtttctcgcgatagcaaaggccatggaggagatggtggaggactccgtcgactgctattggatcactcgccgtttcgttaaccagctgaacacaaagtacagagatagcctaccccagctggaggggattaatgtaggatag

SEQ ID NO: 191467 - DNA, 750 bp, Artificial Sequence
  derived and/or modified sequence
atgactgaggattctcagcgaaactttaggagtgtgtactatgaaaaagtcggttttcgcggagtggaggaaaagaaatccttagagatactgcttaaggatgacaggctcgatactgaaaagctgtgcacctttagccagcgctttccgttgcctagcatgtacagggcactggtgtggaaggtgctcctgggaattttacctcctcaccacgagtcccacgctaaggtaatgatgtacagaaaggagcagtatcttgacgttctgcacgccctcaaggttgtgaggttcgtgagtgatgctaccccccaggctgaggtctatctgcgcatgtaccagcttgagtctggtaagttaccaagatccccctccttccccctagagcctgacgatgaggtgttcttagcgatcgccaaagccatggaagagatggttgaagactcagtggattgttactggattacccgacggtttgtaaaccagctgaatactaaatacagagactctctcccccagcttccaaaagcttttgaacagtacttaaacttggaagacggtaggttgttaacacacctacgcatgtgcagcgctgcccctaagctcccttatgacctttggttcaagcggtgcttcgcagggtgcctgcctgagtcgtccctgcagcgagtttgggacaaggtcgtctctggcagctgcaaaattctggttttcgtggccgtggaaatcctactaacattcaaaatcaagtag

SEQ ID NO: 191468 - DNA, 471 bp, Artificial Sequence
  derived and/or modified sequence
atgacagaagactcccagagaaacttcagaagcgtttactacgagaaagtaggatttcgcggagtcgaggaaaagaaaagtcttgagattctgcttaaggatgaccgactagatacagagaaactatgtactttctcacagagatttccgctgccctcaatgtatagagctttggtctggaaggtcttgctgggaattctgcccccacaccacgagtctcacgccaaagtcatgatgtacaggaaggaacaatacctcgacgtgctacacgcactgaaggtggttcgcttcgtgtcagatgccactcctcaagcggaagtctatttacggatgtaccaattggagtcaggcaaactgccacgctccccctcttttccactcgagcctgatgatgaggtcttcctggctatagcaaaggctatggaggaaatggttgaggattcagtggattgctattggatcacaaggtag

SEQ ID NO: 191469 - DNA, 832 bp, Artificial Sequence
  derived and/or modified sequence
caacagggaccgaccaaatcgtcatgcagctgtttggatgctttaaaaaaataaatccccacactcattacgcgttttatgctgctgacttttttatttttaagacatctgctcccgaaagctcagagccctttagcatttcattttctaaacgaatcctaatctttcctgtgactgaatcggttcagaggatatcttttcaataaggaaggaagccctcccctgctcactggggacgtcgcagggtttttaaacctaaagatttactcttttgtgcacagacgctggaagcatttggactcacttttccccttcgtctttctctccctttctgtctttctgtgtctcctccaagaatgaaatatgactgaggactctcagagaaactttcgttcagtatattatgagaaagtggggtttcgtggagttgaagaaaagaaatcattagaaattctcctaaaagatgaccgtctggatactgagaaactttgtacttttagtcagaggttccctctcccgtccatgtaccgtgcattggtatggaaggtgcttctaggaatcttgcctccacaccacgagtcccatgccaaggtgatgatgtatcgtaaggagcagtacttggatgtccttcatgccctgaaagtcgttcgctttgttagtgatgccacacctcaggctgaagtctatctccgcatgtatcagctggagtctgggaagttacctcgaagtccctcttttccactggagccagatgatgaagtgtttcttgccatagctaaagccatggaggaaatggtggaagatagtgtcgactgttactggatcacccgac

SEQ ID NO: 191470 - protein, 166 aa, Artificial Sequence
  derived and/or modified sequence
MSEPQPRGAERDLYRDTWVRYLGYANEVGEAFRSLVPAAVVWLSYGVASSYVLADAIDKGKKAGEVPSPEAGRSARVTVAVVDTFVWQALASVAIPGFTINRVCAASLYVLGTATRWPLAVRKWTTTALGLLTIPIIIHPIDRSVDFLLDSSLRKLYPTVGKPSSS

SEQ ID NO: 191471 - DNA, 501 bp, Artificial Sequence
  derived and/or modified sequence
atgagcgagccccagcccagaggcgccgagagagacctgtacagagacacctgggtgagatacctgggctacgccaacgaggtgggcgaggccttcagaagcctggtgcccgccgccgtggtgtggctgagctacggcgtggccagcagctacgtgctggccgacgccatcgacaagggcaagaaggccggcgaggtgcccagccccgaggccggcagaagcgccagagtgaccgtggccgtggtggacaccttcgtgtggcaggccctggccagcgtggccatccccggcttcaccatcaacagagtgtgcgccgccagcctgtacgtgctgggcaccgccaccagatggcccctggccgtgagaaagtggaccaccaccgccctgggcctgctgaccatccccatcatcatccaccccatcgacagaagcgtggacttcctgctggacagcagcctgagaaagctgtaccccaccgtgggcaagcccagcagcagctag

SEQ ID NO: 191472 - DNA, 501 bp, Artificial Sequence
  derived and/or modified sequence
atgtctgagccgcagcctagaggagcggagcgcgacctgtatcgcgacacgtgggtgcgctacctgggatatgcgaatgaggtgggagaggcattccgaagtctcgtaccagctgccgtagtgtggctttcctatggtgttgcttcctcctacgttctggcagacgctatcgacaagggtaagaaagcaggagaagtaccctcccccgaggctggccggtccgctagggtgacagtggctgtggttgacactttcgtctggcaagcgctggccagcgtggctataccaggctttaccataaaccgtgtgtgtgctgccagtctgtacgtgctcggcaccgcaacccggtggccgctggcagtgcggaagtggacaactaccgccctgggcctgctaaccattcccatcatcattcaccctattgataggagcgtagacttcctcctagatagctctttgaggaagctataccccaccgtggggaagccctcaagctcctag

SEQ ID NO: 191473 - DNA, 501 bp, Artificial Sequence
  derived and/or modified sequence
atgtctgagccccagcccagaggagctgagcgggacctgtacagagacacctgggtgcgctacctgggctacgccaatgaggtgggggaggccttccgcagcctggtgcctgctgctgtggtgtggctgtcctatggagtggccagcagctatgtgctggctgatgccatcgacaagggcaagaaggccggggaggtgcccagccctgaggccggccgcagcgcccgggtgacagtggccgtggtggacacctttgtgtggcaggccctggcctctgtggccatccctggcttcaccatcaacagagtgtgtgccgccagcctgtatgtgctgggcacagccacccgctggcccctggccgtgaggaagtggaccaccacagccctgggcctgctgaccatccccatcatcatccaccccatcgacagatctgtggacttcctgctggacagcagcctgaggaagctgtaccccaccgtgggcaagcccagcagcagctag

SEQ ID NO: 191474 - DNA, 1375 bp, Artificial Sequence
  derived and/or modified sequence
gaataaagagatgctggataagcccgaggtcacaagctttgcagtgtagcatcccccaacttgatcccctgtctctttggctccaaaacctacactcagtcctgggagcgattagcgccaacagctcagagaaaacgtgacgaaaaccagtctgtaaaacccgagcctgggagaggggcttcggtgcgcggggggaatttgcagacgctccctgctggcggagatttcctgacctgtccttcggcgcgggactttcggcgggtcccggccgggcagacccaagtgccggcggcggagactgcagtggagccagtaccggctgtagtggccggggccgtggcgggagagtcatgtcagagccgcagccgcggggcgcagagcgcgatctctaccgggacacgtgggtgcgatacctgggctatgccaatgaggtgggcgaggctttccgctctcttgtgccagcggcggtggtgtggctgagctatggcgtggccagctcctacgtgctggcggatgccattgacaaaggcaagaaggctggagaggtgcccagccctgaagcaggccgcagcgccagggtgactgtggctgtggtggacacctttgtatggcaggctctagcctctgtggccattccgggcttcaccatcaaccgcgtgtgtgctgcctctctctatgtcctgggcactgccacccgctggcccctggctgtccgcaagtggaccaccaccgcgcttgggctgttgaccatccccatcattatccaccccattgacaggtcggtggatttcctcctggactccagcctgcgcaagctctacccaacagtggggaagcccagctcctcctgatcatactctggtacctggcctgtgcatcggcctcctgcttcatgtcaacctcctactcctgccagggaatgtggacacctggctccctggtgtccaaagaccctggcacctgggtgggtttgagctggacagaagcttagagacaaaggcttcaagaagcagtggctgcagggagtcacagaagggcaggacctgaacgctgtctgcttccctggaatccaagatgctgagtggaagtggaccctgggtgggcccggccctgtctttttcaggaaaattacatcctcccatggaggatgagagactgaggctcagggagggcaaggaataggcccaagatcacttggcaagctgggcacccaggacccccaggtgcttgacagagtcaccccatggtggtatggctgaacaaggagcggcagacaactcagggagaaactcaggagtgcagtaccagggacacctcaggacagattctctggccaggcccttccctgacccaataaatcctgaagaggttgtta

SEQ ID NO: 191475 - DNA, 501 bp, Artificial Sequence
  derived and/or modified sequence
atgagcgagccccagccccggggcgccgagcgggacctgtaccgggatacatgggtgcgatatctcgggtacgctaacgaggtcggcgaggctttcaggtctctagtaccagcagcagtagtgtggctcagctacggcgtggccagttcctacgtgctggccgacgccatagataaaggcaaaaaggctggcgaagtgccttctcccgaggccgggcgcagtgctcgcgtgaccgtggcagtggtggatactttcgtgtggcaggccctcgcaagtgtggccattccgggcttcacgataaacagagtttgcgctgccagcctctacgttctcggtactgctacaagatggcccttggccgtgcgcaagtggactactaccgctctgggactgctcactatcccaatcatcatacaccctattgaccggtccgtggacttcctgttggatagttcgcttagaaaactataccccaccgttggaaagcccagtagcagctag

SEQ ID NO: 191476 - DNA, 501 bp, Artificial Sequence
  derived and/or modified sequence
atgagtgaaccgcagccgagaggagcagagcgggatctgtatagggacacgtgggtgaggtatttaggctatgcaaatgaggtgggagaagccttcagatctctggtacctgccgctgtcgtctggctgtcctatggggtggcctcctcgtacgtacttgcagatgccatcgacaaaggaaagaaggcgggtgaggtccccagtccagaggctggaaggagtgctagggtgaccgtcgcagtggttgacaccttcgtttggcaggcactggcatccgtcgcgatccccggattcaccatcaaccgtgtttgtgcagccagcctgtacgtgctgggcacggcaacacgctggcccctcgccgtgcggaaatggacaacgaccgcccttgggctcctgactatacccataattatccacccaattgataggagtgtagacttcttgctggattcctctctgaggaagctgtatcctactgtgggcaagccaagttcctcctag

SEQ ID NO: 191477 - protein, 1490 aa, Artificial Sequence
  derived and/or modified sequence
MPNSERHGGKKDGSGGASGTLQPSSGGGSSNSRERHRLVSKHKRHKSKHSKDMGLVTPEAASLGTVIKPLVEYDDISSDSDTFSDDMAFKLDRRENDERRGSDRSDRLHKHRHHQHRRSRDLLKAKQTEKEKSQEVSSKSGSMKDRISGSSKRSNEETDDYGKAQVAKSSSKESRSSKLHKEKTRKERELKSGHKDRSKSHRKRETPKSYKTVDSPKRRSRSPHRKWSDSSKQDDSPSGASYGQDYDLSPSRSHTSSNYDSYKKSPGSTSRRQSVSPPYKEPSAYQSSTRSPSPYSRRQRSVSPYSRRRSSSYERSGSYSGRSPSPYGRRRSSSPFLSKRSLSRSPLPSRKSMKSRSRSPAYSRHSSSHSKKKRSSSRSRHSSISPVRLPLNSSLGAELSRKKKERAAAAAAAKMDGKESKGSPVFLPRKENSSVEAKDSGLESKKLPRSVKLEKSAPDTELVNVTHLNTEVKNSSDTGKVKLDENSEKHLVKDLKAQGTRDSKPIALKEEIVTPKETETSEKETPPPLPTIASPPPPLPTTTPPPQTPPLPPLPPIPALPQQPPLPPSQPAFSQVPASSTSTLPPSTHSKTSAVSSQANSQPPVQVSVKTQVSVTAAIPHLKTSTLPPLPLPPLLPGDDDMDSPKETLPSKPVKKEKEQRTRHLLTDLPLPPELPGGDLSPPDSPEPKAITPPQQPYKKRPKICCPRYGERRQTESDWGKRCVDKFDIIGIIGEGTYGQVYKAKDKDTGELVALKKVRLDNEKEGFPITAIREIKILRQLIHRSVVNMKEIVTDKQDALDFKKDKGAFYLVFEYMDHDLMGLLESGLVHFSEDHIKSFMKQLMEGLEYCHKKNFLHRDIKCSNILLNNSGQIKLADFGLARLYNSEESRPYTNKVITLWYRPPELLLGEERYTPAIDVWSCGCILGELFTKKPIFQANLELAQLELISRLCGSPCPAVWPDVIKLPYFNTMKPKKQYRRRLREEFSFIPSAALDLLDHMLTLDPSKRCTAEQTLQSDFLKDVELSKMAPPDLPHWQDCHELWSKKRRRQRQSGVVVEEPPPSKTSRKETTSGTSTEPVKNSSPAPPQPAPGKVESGAGDAIGLADITQQLNQSELAVLLNLLQSQTDLSIPQMAQLLNIHSNPEMQQQLEALNQSISALTEATSQQQDSETMAPEESLKEAPSAPVILPSAEQTTLEASSTPADMQNILAVLLSQLMKTQEPAGSLEENNSDKNSGPQGPRRTPTMPQEEAAACPPHILPPEKRPPEPPGPPPPPPPPPLVEGDLSSAPQELNPAVTAALLQLLSQPEAEPPGHLPHEHQALRPMEYSTRPRPNRTYGNTDGPETGFSAIDTDERNSGPALTESLVQTLVKNRTFSGSLSHLGESSSYQGTGSVQFPGDQDLRFARVPLALHPVVGQPFLKAEGSSNSVVHAETKLQNYGELGPGTTGASSSGAGLHWGGPTQSSAYGKLYRGPTRVPPRGGRGRGVPY

SEQ ID NO: 191478 - DNA, 1368 bp, Artificial Sequence
  derived and/or modified sequence
atggaaatgtatgaaaccctgggcaaagtcggtgaggggtcatatggcacagttatgaagtgtaaacacaaaaacacaggccagatcgttgctattaaaatcttctacgagagaccggagcaatctgttaataaaatcgccatgagggaaatcaagttcttaaagcagttccatcatgagaacctggtcaacctcatcgaggtgttccgacagaagaagaaaatccacttggtctttgaattcatagaccacactgtgctggacgaactccaacattattgtcatggccttgagtcaaagagattgcggaagtacctttttcaaatcctgcgggcaatcgattaccttcatagcaacaacatcatccatcgggatatcaagcctgaaaacattctggtcagtcagtcagggataacgaaactgtgtgactttgggttcgcacggactctcgccgcgcctggcgatatctatacggactacgtggctaccagatggtatcgggcgccggagctcgtgttgaaagatacaagttatggtaaacctgtggatatctgggcactcggttgcatgatcatagaaatggcgaccgggaatccataccttccaagttcttccgatcttgatctcctgcataagatcgtgctgaaagtcggcaatttgtctcctcatcttcaaaatattttctccaagtctcccatatttgcaggggtggtgctgccacaggtacaacacccgaagaacgctcggaaaaagtacccgaagctgaacgggcttctagcggatatcgtgcatgcttgtctgcagatcgacccagcagaccgtatctctagttcggatttactgcaccacgaatactttacaagggatggtttcatcgaaaagtttatgccggagctgaaagcgaaacttttgcaggaggccaaggtgaacagcttgataaaaccaaaagagtcaagtaaggaaaacgagctcagaaaggacgagcggaagactgtatatacaaataccctactcagttcgagcgtgctgggtaaggagatcgaaaaagagaagaaacccaaggagataaaagtcagggtgattaaagtgaagggcggcaggggcgacatctcggaaccaaaaaaaaaggagtatgagggaggtctggggcaacaggatgctaacgagaacgtccaccccatgagcccggacacaaagctcgtgacaatcgaacctcccaaccccattaaccctagcacgaactgtaacggcctcaaagagaatcctcattgtgggggatctgtgacaatgcccccaatcaacctgaccaattcaaacctaatggcagccaatctgagctctaatctcttccacccatccgtgcgctag

SEQ ID NO: 191479 - DNA, 1368 bp, Artificial Sequence
  derived and/or modified sequence
atggaaatgtatgagacactcggcaaggtcggtgaggggagctatggaaccgtgatgaaatgtaagcataagaacaccggacagattgtcgccattaaaatattttacgagcggcctgagcagtccgttaacaaaatagcaatgcgagagatcaagttccttaagcagtttcatcatgaaaatttggtgaacctgatcgaagtgtttagacagaaaaaaaaaatccacctcgtgttcgagtttatagatcacacagttcttgacgaacttcagcactactgccatgggctggaaagcaaacgtctgcggaaatatctcttccaaatcctgcgggccattgactatttgcattctaataacataattcacagggatatcaaacccgaaaatatcttggtaagtcaatctggaataacgaaactgtgcgatttcgggttcgccagaaccctggccgctccgggcgatatttacaccgattatgtggcaacacgctggtaccgcgcacccgagctggtactgaaagatacaagttacggcaagccggtcgacatctgggccctgggctgcatgatcatcgagatggccaccgggaacccctaccttccctcaagctctgatctagatctgctgcataaaattgtgctgaaagttggcaatttatcgccacacctgcagaacatttttagtaagagtcctatattcgccggtgtcgtgttgcctcaggtgcagcacccgaagaatgctaggaagaaatatcccaaattaaacgggctcctcgcagatattgtgcacgcctgcctgcaaatcgaccccgcggatcggatcagttcgagtgacctgttgcaccacgaatattttactcgggacggatttattgagaaattcatgccggagcttaaggccaaacttctgcaggaggcgaaagtaaacagcctcataaaacccaaggaatcttccaaggagaatgaactgcggaaagacgaaagaaaaactgtgtataccaacaccctcctctcctcatctgtgttgggtaaggaaatcgagaaggaaaagaagccaaaggagatcaaggttcgcgtaattaaagtgaaaggcgggcgaggagatatttctgaacccaaaaaaaaagagtatgaaggcgggctgggtcagcaggatgctaacgagaacgtgcatccgatgtcacctgacacaaagctagttactatagagcccccaaaccctataaatccctccacaaattgtaacggactgaaggaaaatccccattgtggtggcagtgtgactatgccccctatcaatcttacaaattctaatctgatggctgccaacctttcatccaatctttttcacccatcggtgcggtag

SEQ ID NO: 191480 - DNA, 1368 bp, Artificial Sequence
  derived and/or modified sequence
atggagatgtatgagaccctgggcaaggtgggggagggcagctatggaacagtgatgaagtgcaagcacaagaacacaggccagatcgtggccatcaagatcttctatgaaagacctgagcagagcgtgaacaagatcgccatgagggagatcaagttcctgaagcagttccaccacgagaacctggtgaacctgattgaggtgttccggcagaagaagaagatccacctggtgtttgagttcatcgaccacacagtgctggatgagctgcagcactactgccacggcctggagagcaagaggctgaggaagtacctgttccagatcctgcgggccatcgactacctgcacagcaacaacatcatccaccgggacatcaagccagagaacatcctggtgtcccagagcggcatcaccaagctgtgtgactttggatttgcccggaccctggccgcccctggggacatctacacagattatgtggccacccgctggtaccgggcccctgagctggtgctgaaggacaccagctatggcaagcctgtggacatctgggccctgggctgcatgatcatcgagatggccaccggcaacccctacctgcccagcagcagtgacctggacctgctgcacaagatcgtgctgaaggtgggcaacctgagcccccacctgcagaacatcttcagcaagagccccatctttgctggggtggtgctgccccaggtgcagcaccccaagaatgccaggaagaagtaccccaagctgaatggcctgctggccgacatcgtgcacgcctgcctgcagattgatcctgctgaccgcatcagcagcagtgacctgctgcaccacgagtacttcaccagagatggcttcatcgagaagttcatgcctgagctgaaggccaagctgctgcaggaggccaaggtgaacagcctcatcaagcccaaggagagcagcaaagaaaatgagctgaggaaggatgagaggaagacagtgtacaccaacaccctgctgagcagctctgtgctgggcaaggagattgagaaggagaagaagcccaaggagatcaaggtgcgggtcatcaaggtgaagggcggccgcggggacatcagcgagcccaagaagaaggagtatgagggcggcctgggccagcaggatgccaatgaaaatgtgcaccccatgagcccagacaccaagctggtgaccatcgagccccccaaccccatcaaccccagcaccaactgcaatggcctgaaggagaacccccactgcggcggctctgtgaccatgccacccatcaacctgaccaacagcaacctgatggccgccaacctgagcagcaacctcttccaccccagcgtgaggtag

SEQ ID NO: 191481 - DNA, 1368 bp, Artificial Sequence
  derived and/or modified sequence
atggagatgtacgagaccctgggcaaggtgggcgagggcagctacgggactgtcatgaagtgcaaacacaagaacaccggccagatcgttgccattaagatattctatgagcggcccgaacagtctgtgaacaagatcgccatgcgcgagatcaaattcctaaaacagtttcaccatgaaaaccttgtcaacttgatcgaggtgtttcgtcagaagaaaaagatacacctggtgttcgagtttattgatcataccgtcctggacgagctccagcattactgccacggcttggagagcaagcggctgcgtaaatacctgtttcagatcctccgagctatcgattaccttcactccaacaacatcatccaccgtgacattaaacctgagaacatcttagtctcgcagtcaggaattactaaactgtgtgactttggcttcgcccgcaccttggccgctcccggtgatatctataccgactacgtcgcaacccggtggtaccgcgcccctgagttggtcctgaaggatacttcctatggcaagcccgtcgatatatgggccctaggttgcatgatcatcgagatggccacaggcaacccgtatctgccctccagttccgatttagatcttcttcataaaatagtgcttaaagtgggcaatctaagcccccacctccagaacatttttagcaaatcaccaatcttcgccggagtggtactgccccaggtacagcaccccaaaaatgctcggaagaaatatcctaaactgaacggactgctcgccgacatagtccacgcatgtttgcaaattgatccagcagaccgaatttcctccagtgatctcttgcatcacgagtactttaccagagacggcttcattgaaaaattcatgcctgagctcaaggctaagctgttgcaggaggctaaagtcaattcacttattaaacccaaggaatcatctaaagagaatgagctccgaaaagacgaaagaaaaacggtctacaccaacacactgttatccagctccgtattggggaaggagatagaaaaggaaaagaaaccgaaagaaattaaagttagggttatcaaggtcaaaggaggacgcggggacatctcagagccgaagaagaaggagtatgagggcgggcttggccagcaagatgccaacgagaacgttcatccaatgtcccccgacacaaagctcgttactatcgagccccccaaccccatcaatccttcaactaactgcaacgggttaaaagagaatccccattgtggtgggtcggtgaccatgccccccattaacttgacaaactcaaacttgatggccgcgaatttatcctcaaatctgtttcaccctagtgtccgttag

SEQ ID NO: 191482 - DNA, 1368 bp, Artificial Sequence
  derived and/or modified sequence
atggagatgtacgagaccctgggcaaggtgggcgagggcagctacggcacggtgatgaagtgcaagcacaagaacacggggcagatcgtcgcaattaaaatcttctacgaaagacccgagcaatcagttaacaaaatcgctatgcgcgagatcaaattcttgaaacagttccaccatgaaaacctggtgaacctgatcgaggtgtttcgacagaaaaaaaagatccatctggtcttcgagttcatcgatcacaccgtactggacgagctgcaacattactgccatggactggagagcaaacgactccggaagtacttgttccagatcctgagggctatcgactacttacactctaacaatattattcaccgggacattaagcctgagaacatactcgtttctcaatccggcatcacaaaactctgcgatttcgggttcgcacgcacccttgctgcccctggtgacatctacactgattatgtggctacccgatggtatcgtgctcccgagcttgtgctcaaggatacatcctacggaaaaccagtggatatttgggccctgggatgcatgattattgagatggctacgggtaatccttatctgccatcttcctccgatttggatctgcttcacaaaattgtattgaaggttgggaacctctctccccacctccaaaacatcttcagtaagtctcctatcttcgccggagtagtcctaccacaggtgcagcacccgaagaacgctcggaaaaaataccccaagctgaacggcctcttagccgatattgtgcacgcatgccttcaaattgaccccgccgatagaatttctagcagcgatctcctgcaccacgagtacttcactagggacgggttcatcgagaagtttatgccagaactgaaagctaagttgctgcaggaggctaaggtgaactctctgatcaaaccaaaggagtcttctaaagaaaatgagctccggaaagacgaacgcaagacggtctacacaaacacattgctctcaagcagtgtgcttgggaaagaaatagaaaaagagaagaagcctaaagaaataaaagtgcgtgtgattaaagtgaaagggggacggggcgacatatcggagccaaagaagaaagaatacgagggggggctcggacagcaggatgctaacgaaaatgtccacccgatgagtccggacactaagctggtcacaattgagcccccgaaccctatcaacccaagtaccaactgtaacggcctgaaggagaacccacactgcggcggctctgtgacaatgccgcccatcaatttgacaaatagcaatcttatggccgccaatttgtctagtaacttgttccacccatccgtgaggtag

SEQ ID NO: 191483 - DNA, 1368 bp, Artificial Sequence
  derived and/or modified sequence
atggagatgtacgagactttaggcaaagtcggagagggatcctacggaacagttatgaaatgcaagcacaaaaatacaggacagatagtagctataaaaattttttacgagcgtcccgaacaatccgtaaataagatcgccatgcgagaaattaaattcctcaagcagttccaccacgagaatttggtgaacctgatcgaggtgtttcgacaaaagaagaagattcacttggtgttcgagttcatcgatcatactgtgctggacgagcttcaacactattgtcacggcctggagagcaagcgtcttagaaagtacctgttccagattttgagggcgatagactaccttcacagcaacaatatcatccatcgcgatatcaagcccgagaatattttggttagtcagtctggtatcactaagttgtgtgactttggattcgccaggaccctcgccgctccaggcgacatttatacagactatgtagcaacaagatggtaccgcgcacccgagctcgtgctgaaagacaccagttatggcaagccagtcgatatctgggctttgggttgtatgattatcgagatggcaaccgggaatccctacttgccaagttccagcgatctggacctgttgcataagattgtgctgaaagtggggaacttgtcaccacacctccagaatatcttcagcaagtctccgatttttgccggagttgtcttgcctcaagtgcagcaccccaagaacgcgaggaagaaatatcctaagctcaatggactccttgccgatatagtgcacgcttgcctgcaaattgatccagcggatcggatctctagctccgacttgctacaccatgagtatttcacacgggacggcttcattgagaagtttatgccagagttaaaggctaagctcctgcaggaggctaaagtcaacagcctgattaaacctaaggaatcgtcgaaggaaaatgaattgaggaaagatgagaggaaaactgtgtatacaaacaccctgctctcctcttccgtgttgggtaaggagattgagaaagaaaaaaaacccaaggaaatcaaggttcgcgtaatcaaggtgaaaggcggacgcggagatataagcgaacctaaaaaaaaagagtatgaaggcggtctgggccaacaagacgcaaacgaaaatgtacatcccatgtcacctgatactaaactggtgaccattgaacccccaaacccaatcaatccgagcactaactgtaatggcctgaaagagaatccccactgcggcggatcagtgacaatgccgccaattaacctgaccaatagcaatttgatggcagcaaatctgtcaagtaacctgtttcacccaagtgtgcgctag

SEQ ID NO: 191484 - DNA, 1368 bp, Artificial Sequence
  derived and/or modified sequence
atggagatgtatgaaaccttagggaaggttggagaaggatcctatggaaccgtgatgaaatgcaaacataagaacaccggacagattgtggccattaagatattttacgagaggcccgagcagtccgttaacaaaatcgctatgcgagagataaagttcctgaaacaatttcaccatgagaatctggtaaacttgattgaagtgttccgccagaagaagaagatccacctcgtgttcgagttcatcgaccacaccgttttggatgagctgcagcactactgccatgggcttgaatctaaacgccttcgcaaatacctctttcagatactgcgggctatcgactatttgcactctaataacattatccatagggatatcaaacctgaaaatatcctggtaagccagtcggggataactaaattatgtgatttcgggtttgctagaacccttgcagctccaggggacatctatacagactatgttgctacccgatggtatcgagccccagagttagtgctgaaagacacgtcctacggcaaaccagtggatatttgggcgcttggttgtatgattattgagatggccactggaaatccataccttccatcaagctcagatttagatctacttcataaaatcgtgctcaaggtcgggaacctctcccctcatctgcagaatatcttcagcaaatctccaattttcgctggtgtggtgctgccgcaagtgcagcatcccaaaaacgcacgtaagaagtatcccaagctgaacgggctgcttgctgacatcgtccacgcctgtctccagattgatcccgcagaccgaatcagcagtagtgatctactgcatcatgaatattttactagagacggctttattgagaagttcatgccagaattgaaagctaagttgttgcaagaagcaaaagttaactccctgattaagccaaaggagtccagtaaagaaaatgagcttagaaaggatgagcgaaagaccgtctacacaaatacacttctgtccagcagcgtcctgggaaaggagatcgaaaaggaaaaaaagcccaaagaaattaaagtgcgggtgatcaaagtgaagggtggcagaggagatatctcagaacctaagaaaaaagaatacgaaggaggcctaggccagcaggatgccaacgaaaatgtccatccaatgtcaccggacaccaagcttgttacaatcgaaccacctaatcctataaacccttctacaaactgtaacgggttgaaggagaacccccattgcggagggagcgtcacaatgccacccattaacttaaccaatagtaacttgatggccgcaaacctctctagtaatctgtttcacccctcggtcaggtag

SEQ ID NO: 191485 - DNA, 1619 bp, Artificial Sequence
  derived and/or modified sequence
ggaactacgcagagccagaccagcgggaccacagaatgggctgaggcggcggcggctgtttggataaagtcaacagcgggacgtggggcgtgacgccgtagtaaaagcccagcttgaaaatggagatgtatgaaacccttggaaaagtgggagagggaagttacggaacagtcatgaaatgtaaacataagaatactgggcagatagtggccattaagatattttatgagagaccagaacaatctgtcaacaaaattgcgatgagagaaataaagtttctaaagcaatttcatcacgaaaacctggtcaatctgattgaagtttttagacagaaaaagaaaattcatttggtatttgaatttattgaccacacagtattagatgagttacaacattattgtcatggactagagagtaagcgacttagaaaatacctcttccagatccttcgagcaattgactatcttcacagtaataatatcattcatcgagatataaaacctgagaatattttagtatcccagtcaggaattactaagctctgtgattttggttttgcacgaacactagcagctcctggggacatttatacggactatgtggccacacgctggtatagagctcccgaattagtattaaaagatacttcttatggaaaacctgtggatatctgggctttgggctgtatgatcattgagatggccactggaaatccctatcttcctagtagttctgatttggatttactccataaaattgttttgaaagtgggcaatttgtcacctcacttgcagaatatcttttccaagagccccatttttgctggggtagttcttcctcaagttcaacaccccaaaaatgcaagaaaaaaatatccaaagcttaatggattgttggcagatatagttcatgcttgtttacaaattgatcctgctgacaggatatcatctagtgatcttttgcatcatgagtattttactagagatggatttattgaaaaattcatgccagaactgaaagctaaattactgcaggaagcaaaagtcaattcattaataaagccaaaagagagttctaaagaaaatgaactcaggaaagatgaaagaaaaacagtttataccaatacactgctaagtagttcagttttgggaaaggaaatagaaaaagagaaaaagcccaaggagatcaaagtcagagttattaaagtcaaaggaggaagaggagatatctcagaaccaaaaaagaaagagtatgaaggtggacttggtcaacaggatgcaaatgaaaatgttcatcctatgtctccagatacaaaacttgtaaccattgaaccaccaaaccctatcaatcccagcactaactgtaatggcttgaaagaaaatccacattgcggaggttctgtgacaatgccacccatcaatctaactaacagtaatttgatggctgcaaatctcagttcaaatctctttcaccccagtgtgaggtgagctgtaacagagaagaaacctaaataatacaacattcctgtataatggtatttcaaagaatcgtgttcatagtgtctgtatgtaaactgaacttgaagaaaatatattgaaattaaagctgtataatgggcc

SEQ ID NO: 191486 - DNA, 1501 bp, Artificial Sequence
  derived and/or modified sequence
atggagatgtatgaaacccttggaaaagtgggagagggaagttacggaacagtcatgaaatgtaaacataagaatactgggcagatagtggccattaagatattttatgagagaccagaacaatctgtcaacaaaattgcgatgagagaaataaagtttctaaagcaatttcatcacgaaaacctggtcaatctgattgaagtttttagacagaaaaagaaaattcatttggtatttgaatttattgaccacacagtattagatgagttacaacattattgtcatggactagagagtaagcgacttagaaaatacctcttccagatccttcgagcaattgactatcttcacagtaataatatcattcatcgagatataaaacctgagaatattttagtatcccagtcaggaattactaagctctgtgattttggttttgcacgaacactagcagctcctggggacatttatacggactatgtggccacacgctggtatagagctcccgaattagtattaaaagatacttcttatggaaaacctgtggatatctgggctttgggctgtatgatcattgagatggccactggaaatccctatcttcctagtagttctgatttggatttactccataaaattgttttgaaagtgggcaatttgtcacctcacttgcagaatatcttttccaagagccccatttttgctggggtagttcttcctcaagttcaacaccccaaaaatgcaagaaaaaaatatccaaagcttaatggattgttggcagatatagttcatgcttgtttacaaattgatcctgctgacaggatatcatctagtgatcttttgcatcatgagtattttactagagatggatttattgaaaaattcatgccagaactgaaagctaaattactgcaggaagcaaaagtcaattcattaataaagccaaaagagagttctaaagaaaatgaactcaggaaagatgaaagaaaaacagtttataccaatacactgctaagtagttcagttttgggaaaggaaatagaaaaagagaaaaagcccaaggagatcaaagtcagagttattaaagtcaaaggaggaagaggagatatctcagaaccaaaaaagaaagagtatgaaggtggacttggtcaacaggatgcaaatgaaaatgttcatcctatgtctccagatacaaaacttgtaaccattgaaccaccaaaccctatcaatcccagcactaactgtaatggcttgaaagaaaatccacattgcggaggttctgtgacaatgccacccatcaatctaactaacagtaatttgatggctgcaaatctcagttcaaatctctttcaccccagtgtgaggtgagctgtaacagagaagaaacctaaataatacaacattcctgtataatggtatttcaaagaatcgtgttcatagtgtctgtatgtaaactgaacttgaagaaaatatattgaaattaaagctgtataatgggcca

SEQ ID NO: 191487 - DNA, 1368 bp, Artificial Sequence
  derived and/or modified sequence
atggagatgtacgagaccctgggcaaggtgggcgagggcagctacggcaccgtgatgaagtgcaagcacaagaacaccggccagatcgtggccatcaagatcttctacgagagacccgagcagagcgtgaacaagatcgccatgagagagatcaagttcctgaagcagttccaccacgagaacctggtgaacctgatcgaggtgttcagacagaagaagaagatccacctggtgttcgagttcatcgaccacaccgtgctggacgagctgcagcactactgccacggcctggagagcaagagactgagaaagtacctgttccagatcctgagagccatcgactacctgcacagcaacaacatcatccacagagacatcaagcccgagaacatcctggtgagccagagcggcatcaccaagctgtgcgacttcggcttcgccagaaccctggccgcccccggcgacatctacaccgactacgtggccaccagatggtacagagcccccgagctggtgctgaaggacaccagctacggcaagcccgtggacatctgggccctgggctgcatgatcatcgagatggccaccggcaacccctacctgcccagcagcagcgacctggacctgctgcacaagatcgtgctgaaggtgggcaacctgagcccccacctgcagaacatcttcagcaagagccccatcttcgccggcgtggtgctgccccaggtgcagcaccccaagaacgccagaaagaagtaccccaagctgaacggcctgctggccgacatcgtgcacgcctgcctgcagatcgaccccgccgacagaatcagcagcagcgacctgctgcaccacgagtacttcaccagagacggcttcatcgagaagttcatgcccgagctgaaggccaagctgctgcaggaggccaaggtgaacagcctgatcaagcccaaggagagcagcaaggagaacgagctgagaaaggacgagagaaagaccgtgtacaccaacaccctgctgagcagcagcgtgctgggcaaggagatcgagaaggagaagaagcccaaggagatcaaggtgagagtgatcaaggtgaagggcggcagaggcgacatcagcgagcccaagaagaaggagtacgagggcggcctgggccagcaggacgccaacgagaacgtgcaccccatgagccccgacaccaagctggtgaccatcgagccccccaaccccatcaaccccagcaccaactgcaacggcctgaaggagaacccccactgcggcggcagcgtgaccatgccccccatcaacctgaccaacagcaacctgatggccgccaacctgagcagcaacctgttccaccccagcgtgagatag

SEQ ID NO: 191488 - protein, 229 aa, Artificial Sequence
  derived and/or modified sequence
MQDEDGYITLNIKTRKPALISVGSASSSWWRVMALILLILCVGMVVGLVALGIWSVMQRNYLQGENENRTGTLQQLAKRFCQYVVKQSELKGTFKGHKCSPCDTNWRYYGDSCYGFFRHNLTWEESKQYCTDMNATLLKIDNRNIVEYIKARTHLIRWVGLSRQKSNEVWKWEDGSVISENMFEFLEDGKGNMNCAYFHNGKMHPTFCENKHYLMCERKAGMTKVDQLP

SEQ ID NO: 191489 - DNA, 952 bp, Artificial Sequence
  derived and/or modified sequence
ctatgaagaagcttcctggaaaacaataagcaaaggaaaacaaatgtgtcccatctcacatggttctaccctactaaagacaggaagatcataaactgacagatactgaaattgtaaagttggaaactacattttgcaaagtcattgaactctgagctcagttgcagtactcgggaagccatgcaggatgaagatggatacatcaccttaaatattaaaactcggaaaccagctctcatctccgttggctctgcatcctcctcctggtggcgtgtgatggctttgattctgctgatcctgtgcgtggggatggttgtcgggctggtggctctggggatttggtctgtcatgcagcgcaattacctacaaggtgagaatgaaaatcgcacaggaactctgcaacaattagcaaagcgcttctgtcaatatgtggtaaaacaatcagaactaaagggcactttcaaaggtcataaatgcagcccctgtgacacaaactggagatattatggagatagctgctatgggttcttcaggcacaacttaacatgggaagagagtaagcagtactgcactgacatgaatgctactctcctgaagattgacaaccggaacattgtggagtacatcaaagccaggactcatttaattcgttgggtcggattatctcgccagaagtcgaatgaggtctggaagtgggaggatggctcggttatctcagaaaatatgtttgagtttttggaagatggaaaaggaaatatgaattgtgcttattttcataatgggaaaatgcaccctaccttctgtgagaacaaacattatttaatgtgtgagaggaaggctggcatgaccaaggtggaccaactaccttaatgcaaagaggtggacaggataacacagataagggctttattgtacaataaaagatatgtatgaatgcatcagtagctgaaaa

SEQ ID NO: 191490 - DNA, 690 bp, Artificial Sequence
  derived and/or modified sequence
atgcaggacgaggacggctacatcaccctgaacatcaagaccagaaagcccgccctgatcagcgtgggcagcgccagcagcagctggtggagagtgatggccctgatcctgctgatcctgtgcgtgggcatggtggtgggcctggtggccctgggcatctggagcgtgatgcagagaaactacctgcagggcgagaacgagaacagaaccggcaccctgcagcagctggccaagagattctgccagtacgtggtgaagcagagcgagctgaagggcaccttcaagggccacaagtgcagcccctgcgacaccaactggagatactacggcgacagctgctacggcttcttcagacacaacctgacctgggaggagagcaagcagtactgcaccgacatgaacgccaccctgctgaagatcgacaacagaaacatcgtggagtacatcaaggccagaacccacctgatcagatgggtgggcctgagcagacagaagagcaacgaggtgtggaagtgggaggacggcagcgtgatcagcgagaacatgttcgagttcctggaggacggcaagggcaacatgaactgcgcctacttccacaacggcaagatgcaccccaccttctgcgagaacaagcactacctgatgtgcgagagaaaggccggcatgaccaaggtggaccagctgccctag

SEQ ID NO: 191491 - DNA, 690 bp, Artificial Sequence
  derived and/or modified sequence
atgcaggacgaggatgggtacattaccctcaatattaaaaccagaaaaccagccctgatttcagtgggtagtgcctcctcaagctggtggagagttatggccctgattctattaattttatgtgtcggtatggtggttggcttggtcgcattggggatctggtcggtaatgcagaggaattacctacaaggcgagaacgagaacagaaccggtacactgcagcagcttgccaagcggttctgtcagtatgtcgtaaagcaatccgaactgaaaggtaccttcaagggacacaaatgctcgccttgcgacacaaattggagatactacggtgatagctgctacgggttcttccggcacaacctcacatgggaggagtccaaacaatactgtacggatatgaacgctacattgctgaagattgataatagaaacatcgtggaatatatcaaggccaggacccatttgatacgatgggtcggcctgtccagacaaaaatcgaacgaggtctggaagtgggaggacggttccgtaattagcgaaaacatgtttgagttcctggaagacggaaaagggaacatgaattgtgcctactttcacaacggcaaaatgcacccaaccttttgcgaaaataagcattacctgatgtgcgagaggaaagcaggaatgacaaaggttgatcagttaccctag

SEQ ID NO: 191492 - DNA, 690 bp, Artificial Sequence
  derived and/or modified sequence
atgcaggatgaagatggctacatcaccctgaacatcaagaccaggaagccagccctgatctctgtgggcagcgccagcagctcctggtggagggtgatggccctgatcctgctgatcctgtgtgtgggcatggtggtgggcctggtggccctgggcatctggagcgtgatgcagaggaactacctgcagggagaaaatgaaaatagaacaggcaccctgcagcagctggccaagcgcttctgccagtatgtggtgaagcagagcgagctgaagggcaccttcaagggccacaagtgcagcccctgtgacaccaactggagatactatggagacagctgctacggcttcttccgccacaacctgacctgggaggagagcaagcagtactgcacagacatgaatgccaccctgctgaagattgacaacagaaatattgtggagtacatcaaggcccggacccacctgatccgctgggtgggcctgagccggcagaagagcaatgaggtgtggaagtgggaggatggcagcgtcatcagcgagaacatgtttgagttcctggaggatggcaagggcaacatgaactgtgcctacttccacaacgggaagatgcaccccaccttctgtgagaacaagcactacctgatgtgtgagaggaaggccggcatgaccaaggtggaccagctgccctag

SEQ ID NO: 191493 - DNA, 690 bp, Artificial Sequence
  derived and/or modified sequence
atgcaggacgaggacggctacatcaccctgaacatcaagacccggaagcctgcccttatatcggtaggctctgcttcctcatcatggtggagagttatggcactgatcttgttgatcttgtgcgttggcatggtggtagggcttgttgccttggggatctggagcgtgatgcagcgcaactatctgcaaggcgagaatgagaatcggacaggcacattgcagcagctggcaaagcgtttttgtcagtatgtggtgaagcagagcgagctgaagggtacttttaaaggtcacaagtgttccccttgcgataccaactggcgctactatggggacagctgttatggctttttccgccacaatctgacatgggaggagtctaaacagtactgcactgacatgaatgctaccctcctcaagatcgataatcgaaacatagtagaatacattaaagcaagaacacacctcattcgatgggttggtctgagtagacagaagtcgaatgaggtatggaaatgggaagacggatccgtgatcagtgagaatatgttcgagtttctggaggatggcaaaggcaacatgaactgcgcttactttcataacggtaaaatgcaccccactttctgtgagaacaagcattatttgatgtgcgagaggaaggccggcatgaccaaggtagaccagttaccttag

SEQ ID NO: 191494 - DNA, 690 bp, Artificial Sequence
  derived and/or modified sequence
atgcaggatgaggacggctatattactcttaatattaagacaaggaaacccgcactcatctctgtgggctccgcctcttcaagctggtggcgcgttatggcattaattctgttaatcctgtgcgtcgggatggttgttggtctcgtagccctggggatttggtctgttatgcagcgcaactatcttcagggcgaaaacgaaaacaggaccgggacactccaacagctagccaagcggttttgtcagtacgtggtgaagcaatcagaacttaagggcacatttaaagggcataaatgctccccctgcgatacaaattggaggtattatggggatagttgttacggtttctttcgacataacctgacctgggaagaatcaaagcagtattgcaccgatatgaatgctacactgctcaagatcgacaatagaaatatcgtggaatacatcaaagctaggacccatcttatccgctgggtcggcctgagtcggcagaagtccaacgaagtgtggaagtgggaagacggctcagtgataagcgaaaatatgtttgaatttctcgaggatggcaaaggcaacatgaactgcgcttactttcacaatggcaaaatgcaccctaccttttgcgagaataaacactatctgatgtgtgagcgcaaagccggaatgacgaaggtggaccagctcccctag

SEQ ID NO: 191495 - protein, 453 aa, Artificial Sequence
  derived and/or modified sequence
MPGSSGAGMEAAVAPGRDAPAPAASQPSGCGKHNSPERKVYMDYNATTPLEPEVIQAMTKAMWEAWGNPSSPYSAGRKAKDIINAARESLAKMIGGKPQDIIFTSGGTESNNLVIHSVVKHFHANQTSKGHTGGHHSPVKGAKPHFITSSVEHDSIRLPLEHLVEEQVAAVTFVPVSKVSGQAEVDDILAAVRPTTRLVTIMLANNETGIVMPVPEISQRIKALNQERVAAGLPPILVHTDAAQALGKQRVDVEDLGVDFLTIVGHKFYGPRIGALYIRGLGEFTPLYPMLFGGGQERNFRPGTENTPMIAGLGKAAELVTQNCEAYEAHMRDVRDYLEERLEAEFGQKRIHLNSQFPGTQRLPNTCNFSIRGPRLQGHVVLAQCRVLMASVGAACHSDHGDQPSPVLLSYGVPFDVARNALRLSVGRSTTRAEVDLVVQDLKQAVAQLEDQA

SEQ ID NO: 191496 - protein, 235 aa, Artificial Sequence
  derived and/or modified sequence
FSNPFCGETFPRKPDLKGTHRWAPQPSEGGQAPFHYFLGGTRLHPAAPGAPGGRTSGSLLNVKMMKMKTFMMICFHLINTVTFVPVSKVSGQAEVDDILAAVRPTTRLVTIMLANNETGIVMPVPEISQRIKALNQERVAAGLPPILVHTDAAQALGKQRVDVEDLGVDFLTIVGHKFYGPRIGALYIRGLGEFTPLYPMLFGGGQERNFRPGTENTPMIAGLGKVSPGELEEMS

SEQ ID NO: 191497 - protein, 317 aa, Artificial Sequence
  derived and/or modified sequence
MEAAVAPGRDAPAPAASQPSGCGKHNSPERKVYMDYNATTPLEPEVIQAMTKAMWEAWGNPSSPYSAGRKAKDIINAARESLAKMIGGKPQDIIFTSGGTESNNLVIHSVVKHFHANQTSKGHTGGHHSPVKGAKPHFITSSVEHDSIRLPLEHLVEEQVAAVTFVPVSKVSGQAEVDDILAAVRPTTRLVTIMLANNETGIVMPVPEISQRIKALNQERVAAGLPPILVHTDAAQALGKQRVDVEDLGVDFLTIVGHKFYGPRIGALYIRGLGEFTPLYPMLFGGGQERNFRPGTENTPMIAGLGKVSPGELEEMS

SEQ ID NO: 191498 - protein, 351 aa, Artificial Sequence
  derived and/or modified sequence
MEAAVAPGRDAPAPAASQPSGCGKHNSPERKVYMDYNATTPLEPEVIQAMTKAMWEAWGNPSSPYSAAVTFVPVSKVSGQAEVDDILAAVRPTTRLVTIMLANNETGIVMPVPEISQRIKALNQERVAAGLPPILVHTDAAQALGKQRVDVEDLGVDFLTIVGHKFYGPRIGALYIRGLGEFTPLYPMLFGGGQERNFRPGTENTPMIAGLGKAAELVTQNCEAYEAHMRDVRDYLEERLEAEFGQKRIHLNSQFPGTQRLPNTCNFSIRGPRLQGHVVLAQCRVLMASVGAACHSDHGDQPSPVLLSYGVPFDVARNALRLSVGRSTTRAEVDLVVQDLKQAVAQLEDQA

SEQ ID NO: 191499 - protein, 239 aa, Artificial Sequence
  derived and/or modified sequence
MEAAVAPGRDAPAPAASQPSGCGKHNSPERKVYMDYNATTPLEPEVIQAMTKAMWEAWGNPSSPYSAGRKAKDIINAARESLAKMIGGKPQDIIFTSGGTEAAELVTQNCEAYEAHMRDVRDYLEERLEAEFGQKRIHLNSQFPGTQRLPNTCNFSIRGPRLQGHVVLAQCRVLMASVGAACHSDHGDQPSPVLLSYGVPFDVARNALRLSVGRSTTRAEVDLVVQDLKQAVAQLEDQA

SEQ ID NO: 191500 - protein, 445 aa, Artificial Sequence
  derived and/or modified sequence
MEAAVAPGRDAPAPAASQPSGCGKHNSPERKVYMDYNATTPLEPEVIQAMTKAMWEAWGNPSSPYSAGRKAKDIINAARESLAKMIGGKPQDIIFTSGGTESNNLVIHSVVKHFHANQTSKGHTGGHHSPVKGAKPHFITSSVEHDSIRLPLEHLVEEQVAAVTFVPVSKVSGQAEVDDILAAVRPTTRLVTIMLANNETGIVMPVPEISQRIKALNQERVAAGLPPILVHTDAAQALGKQRVDVEDLGVDFLTIVGHKFYGPRIGALYIRGLGEFTPLYPMLFGGGQERNFRPGTENTPMIAGLGKAAELVTQNCEAYEAHMRDVRDYLEERLEAEFGQKRIHLNSQFPGTQRLPNTCNFSIRGPRLQGHVVLAQCRVLMASVGAACHSDHGDQPSPVLLSYGVPFDVARNALRLSVGRSTTRAEVDLVVQDLKQAVAQLEDQA

SEQ ID NO: 191501 - DNA, 1362 bp, Artificial Sequence
  derived and/or modified sequence
atgcccggctccagtggcgccggcatggaagctgccgtggctccaggccgtgatgcgccagctccagccgcctcacagcccagtggttgcgggaagcataattcccctgagcgcaaggtgtacatggactacaatgccacaacgccactggaacccgaggttattcaggcgatgaccaaggctatgtgggaggcatggggaaacccaagcagcccctattccgcgggccgaaaggcaaaagacatcatcaatgcagcaagggagtctctcgccaaaatgatcggaggcaagccccaagatatcatttttacttctgggggcactgagtctaacaatctcgtgatccattctgtggttaagcattttcatgccaaccagacctctaagggacacaccggaggacatcatagtcctgtaaaaggagccaaaccgcacttcatcaccagcagcgtggaacacgactctatcagactcccattggaacaccttgtcgaggagcaggtggccgccgtcaccttcgtccctgtgagcaaggtctccgggcaggcggaagtcgatgacattctggcggccgtcagacctaccactaggttggtgactataatgttggcaaacaatgagaccggaatcgtgatgcccgtgcccgaaatttctcagcggatcaaagccctcaatcaggaacgggtggccgccggactgccaccgattttagtccacaccgacgcagcacaggcgctgggtaaacaacgggtggacgtcgaggatctgggcgtggacttcctcacgattgtgggacacaaattctatgggcccaggattggagcactgtacataagaggtctaggcgagtttactcccctctatccaatgctcttcggcggaggccaggagaggaattttcgacccggcaccgaaaatactcctatgatcgcggggcttggcaaagcggctgagcttgttacccagaactgcgaggcttacgaggcccatatgagagacgtgagagactatctagaagagaggctggaagcagaattcgggcagaagcgtatacacttaaattctcagttccccggtacccaaagactgcctaacacctgtaacttttccattcggggcccccgcctgcagggccacgtggttctcgcacaatgtcgggtgctgatggccagcgtcggcgcagcatgccactccgaccacggtgaccagcctagccctgtgctactgagctatggggttccttttgatgtcgctcgaaacgccctacgtcttagcgtgggtcgcagtacaacccgagctgaggtcgatctcgtggtacaggacctaaaacaagccgttgcccaattggaggaccaggcatag

SEQ ID NO: 191502 - DNA, 708 bp, Artificial Sequence
  derived and/or modified sequence
ttcagtaatcctttctgtggagagacttttccccgtaaacccgacttaaaggggactcatcgctgggccccccagccatcagaagggggacaggccccgttccactacttcctgggcgggacccgactgcaccctgccgccccaggcgctcccgggggacgcacatctggttcactgctaaacgtcaaaatgatgaaaatgaagactttcatgatgatttgcttccatttaattaacaccgtcacatttgtccccgtatctaaagtgtctggccaggccgaggtcgacgatatcctggctgccgtgagaccaaccactagactggtaactattatgttggcaaataatgagaccgggatcgtgatgccagtcccagagatatcccagcgcattaaggcactgaatcaggagcgggtggccgccgggttgcccccaattcttgtgcacactgacgccgcacaggccttggggaaacagcgcgtagatgttgaagacctcggcgtagacttcctgactatagtagggcacaaattttatggccctcggatcggcgctctgtacataagaggtctcggtgaattcactcccctctacccaatgctattcggaggaggccaggagcggaattttcgcccgggcacagagaatacgcctatgattgcagggctcgggaaagtctctccaggagagctggaggaaatgagttag

SEQ ID NO: 191503 - DNA, 954 bp, Artificial Sequence
  derived and/or modified sequence
atggaggccgctgtggcccctggccgtgatgcaccagcacctgcagcctctcagccctctggatgtggtaaacacaattcccctgagcggaaggtctacatggattacaacgctaccaccccactcgaacccgaggtcatccaggctatgaccaaagccatgtgggaggcgtgggggaatccctcatccccgtactctgcaggtcgcaaggccaaggacattattaacgctgcaagggaatcacttgcaaagatgattggtggcaagccacaggacatcatctttaccagcggagggaccgagagcaacaatctagtgatccacagcgtagtcaaacatttccacgcaaatcagacctctaaaggtcacacagggggtcaccattctcccgttaagggagccaaaccccactttatcactagctcagtggagcacgatagtatcaggctccccctggaacatcttgtggaggagcaagtggcggccgtgacttttgtccccgtatccaaggtttctggccaagcagaagtggatgacatcctggctgctgttcgtccgacgacacgcttggttactatcatgttagccaacaatgagactggtattgtgatgccggtgcctgagatatcacaacgaataaaagctctcaaccaggaaagagttgcggccggccttcccccaatactggtgcacactgacgctgcccaggctctgggaaaacagcgggttgatgtggaggatctcggtgtggatttcctcaccatagtgggccacaagttttacggcccccgtattggcgctttgtacattcggggcctgggcgaattcacgcccctgtatcccatgcttttcgggggcggccaggaaagaaactttaggcctggcacagaaaatacacccatgattgccggactcggcaaagtcagtccaggcgagctggaggagatgagctag

SEQ ID NO: 191504 - DNA, 1056 bp, Artificial Sequence
  derived and/or modified sequence
atggaagccgctgtggcgccaggtcgcgacgctccggctcctgctgcatctcaaccttccggatgtggaaaacacaattctccagaacgcaaagtttacatggattataacgcgactaccccactagagcctgaggtcatccaggcaatgacaaaggctatgtgggaagcgtggggcaacccaagtagtccatactcagctgcagtgacctttgtccctgtgagtaaggtgagcggccaggctgaagtcgacgatattctggcggcagtgcgccctaccacgcgtttggtcaccatcatgctggccaataatgagacgggcatcgtcatgccagtcccggagataagccagaggatcaaggctctgaaccaggagagggtggctgcaggcctgccacccatcttagtccataccgatgcggcacaagcgcttgggaaacagcgggtcgacgtagaagaccttggcgttgactttttgacaatcgtcggtcataaattttatggcccacgtattggcgcactttacattcgggggctcggagaattcacccccctttatcctatgctgttcggtggaggccaagaaaggaacttccggccaggtactgagaataccccaatgatagcagggttgggaaaagctgctgagcttgtcacgcagaattgtgaggcctatgaagcccatatgcgcgacgtaagagactatctggaagagcggcttgaagccgaattcggccaaaagcgcatccacctcaactctcagtttcctggaacccagagactccccaacacatgtaatttctccattcggggaccaagattacaaggccatgtcgtattagcacagtgccgcgtgctgatggccagtgtcggcgccgcgtgccattctgaccatggcgatcagcctagcccagtgctactgagctatggggttccatttgatgttgcacggaacgcactgagattgtccgtaggacgctccaccacccgcgccgaagtggaccttgtcgtccaggacctgaagcaggcagttgctcagctggaagaccaggcatag

SEQ ID NO: 191505 - DNA, 720 bp, Artificial Sequence
  derived and/or modified sequence
atggaggcagccgtggctcctggacgcgatgccccagcccccgccgctagccagccttccggatgtgggaaacataatagtccggagaggaaagtttacatggactacaatgccaccactcctctcgaacctgaagtcattcaggccatgactaaagcaatgtgggaagcatggggaaatccatcaagtccatattccgcgggcaggaaggccaaagacattatcaatgctgcgagagagtccctcgctaagatgatcggcggtaaaccccaggacattatctttacctctggaggaacagaggccgcagagctggtgacacaaaactgtgaggcttatgaggcgcacatgagagacgttcgcgattatctggaagagaggcttgaggccgaatttggccagaaacggatccatcttaactcccagttcccagggacacagaggctccccaatacttgcaacttttctattcgcgggcctcggttacagggacatgtggtgctcgcacagtgccgtgtgcttatggcgtctgttggcgctgcatgccacagcgaccatggagatcagcctagcccagtcctcctttcatatggagtgccgttcgatgtagccagaaatgctctgagactgagcgtcgggagaagcaccactcgggcagaagttgacctcgttgttcaagacttgaaacaagctgtggcacagctggaggaccaagcatag

SEQ ID NO: 191506 - DNA, 1338 bp, Artificial Sequence
  derived and/or modified sequence
atggaggctgcagtggcgcctggacgggatgcacccgcaccagctgctagccagccaagcggctgtgggaaacacaattctccggagcgcaaagtctacatggactataatgccacaacaccactggagcctgaagtgatccaggccatgaccaaagctatgtgggaggcttggggaaacccaagtagtccctattctgcaggccggaaagccaaagatatcataaacgccgctagggagagtctggctaaaatgatagggggaaagcctcaggacatcatcttcacgtcaggagggaccgaatcgaacaacctcgtgatacacagcgtggtgaagcattttcacgccaatcagacctcgaaaggacacactggtgggcaccattcaccagtcaagggcgcaaagccccatttcatcacgtcatccgtcgaacacgattccattcggttgccgctggagcatctggtggaggagcaggttgccgcagtcacgtttgtgcccgtgtctaaagtgtctggacaggctgaagtcgatgatattcttgcagcagtccgacctacaaccagattggtcaccatcatgctcgctaataatgaaactggcatagtcatgcccgttccagagatcagccagagaatcaaggctttaaaccaggagcgagtggccgctgggctgcccccaatcctggttcatactgatgccgcccaggcgcttggcaagcaaagggtagatgtggaggatttgggcgtggactttctgactattgtcggtcataagttttacgggccacggatcggggccctttatatccggggtctcggcgagttcacaccgctctacccaatgttgttcggcggagggcaagagcgtaatttcaggcctggaaccgagaacactccaatgattgcaggccttggaaaagccgcagagctggtgacccagaattgtgaggcttatgaagcccacatgagagacgttcgcgactatttggaggagagattggaagcagagttcggacagaaacggatacaccttaactctcaattcccaggcacccagcgcttacccaatacatgtaatttctccattcgcgggcctcgtctccagggacacgttgtgttggcccagtgccgggttctcatggcttccgtcggggcggcgtgccacagcgaccacggcgatcagccctcaccagtgctgctgtcttatggggtgccatttgatgttgccaggaacgccctcagactctctgtcggccgctcgactacaagggccgaggttgacctcgtcgtccaagacctcaagcaggcggtcgcacagttagaggaccaggcctag

SEQ ID NO: 191507 - DNA, 1362 bp, Artificial Sequence
  derived and/or modified sequence
atgcctggcagcagtggagctggcatggaggccgctgtggcccctggaagagatgccccagccccagctgccagccagcccagcggctgtgggaagcacaacagccctgagaggaaggtgtacatggactacaatgccaccacccccctggagcctgaggtgatccaggccatgaccaaggccatgtgggaggcctggggcaaccccagcagcccctacagcgctggcaggaaggccaaggacatcatcaatgctgcccgggagagcctggccaagatgattggaggcaagccccaggacatcatcttcaccagcggcggcacagagagcaacaacctggtgatccacagcgtggtgaagcacttccacgccaaccagaccagcaagggccacactggaggccaccacagccctgtgaagggggccaagccccacttcatcaccagctctgtggagcatgacagcatccggctgcccctggagcacctggtggaggagcaggtggccgctgtgacctttgtgcctgtgtccaaggtgtctggccaggccgaggtggatgacatcctggccgctgtgcggcccaccacccggctggtgaccatcatgctggccaacaatgagaccggcatcgtgatgcctgtgcctgagatcagccagaggatcaaggccctgaaccaggagcgggtggccgccggcctgccccccatcctggtgcacacagatgctgcccaggccctgggcaagcagagggtggatgtggaggacctgggcgtggacttcctgaccatcgtgggccacaagttctacggccccagaattggagccctgtacatccggggcctgggggagttcacccccctgtaccccatgctgtttggaggcggccaggagaggaacttccggcccggcacagagaacacccccatgattgctggcctgggcaaggctgctgagctggtgacccagaactgtgaggcctatgaggcccacatgagagatgtgcgggactacctggaggagcggctggaggccgagtttggccagaagaggatccacctgaacagccagtttcctggcacccagaggctgcccaacacctgcaacttcagcatccggggcccccggctgcagggccacgtggtgctggcccagtgccgggtgctgatggcctctgtgggcgccgcctgccacagcgaccacggggaccagcccagccctgtgctgctgtcctatggagtgccctttgatgtggccagaaatgccctgcggctgtctgtgggccgcagcaccaccagggctgaggtggacctggtggtgcaggacctgaagcaggccgtggcccagctggaggaccaggcctag

SEQ ID NO: 191508 - DNA, 708 bp, Artificial Sequence
  derived and/or modified sequence
ttcagcaaccccttctgtggggagaccttccccaggaagccagacctgaagggcacccaccgctgggccccccagcccagcgagggcggccaggcccccttccactacttcctgggcggcacccggctgcaccctgctgcccctggggcccctgggggccgcaccagcggcagcctgctgaatgtgaagatgatgaagatgaagaccttcatgatgatctgcttccacctgatcaacacagtgacctttgtgcctgtgtccaaggtgtctggccaggccgaggtggatgacatcctggccgctgtgcggcccaccacccggctggtgaccatcatgctggccaacaatgagaccggcatcgtgatgcctgtgcctgagatcagccagaggatcaaggccctgaaccaggagcgggtggccgccggcctgccccccatcctggtgcacacagatgctgcccaggccctgggcaagcagagggtggatgtggaggacctgggcgtggacttcctgaccatcgtgggccacaagttctacggccccagaattggagccctgtacatccggggcctgggggagttcacccccctgtaccccatgctgtttggaggcggccaggagaggaacttccggcccggcacagagaacacccccatgattgctggcctgggcaaggtgtccccaggagagctggaggagatgtcctag

SEQ ID NO: 191509 - DNA, 954 bp, Artificial Sequence
  derived and/or modified sequence
atggaggccgctgtggcccctggaagagatgccccagccccagctgccagccagcccagcggctgtgggaagcacaacagccctgagaggaaggtgtacatggactacaatgccaccacccccctggagcctgaggtgatccaggccatgaccaaggccatgtgggaggcctggggcaaccccagcagcccctacagcgctggcaggaaggccaaggacatcatcaatgctgcccgggagagcctggccaagatgattggaggcaagccccaggacatcatcttcaccagcggcggcacagagagcaacaacctggtgatccacagcgtggtgaagcacttccacgccaaccagaccagcaagggccacactggaggccaccacagccctgtgaagggggccaagccccacttcatcaccagctctgtggagcatgacagcatccggctgcccctggagcacctggtggaggagcaggtggccgctgtgacctttgtgcctgtgtccaaggtgtctggccaggccgaggtggatgacatcctggccgctgtgcggcccaccacccggctggtgaccatcatgctggccaacaatgagaccggcatcgtgatgcctgtgcctgagatcagccagaggatcaaggccctgaaccaggagcgggtggccgccggcctgccccccatcctggtgcacacagatgctgcccaggccctgggcaagcagagggtggatgtggaggacctgggcgtggacttcctgaccatcgtgggccacaagttctacggccccagaattggagccctgtacatccggggcctgggggagttcacccccctgtaccccatgctgtttggaggcggccaggagaggaacttccggcccggcacagagaacacccccatgattgctggcctgggcaaggtgtccccaggagagctggaggagatgtcctag

SEQ ID NO: 191510 - DNA, 1056 bp, Artificial Sequence
  derived and/or modified sequence
atggaggccgctgtggcccctggaagagatgccccagccccagctgccagccagcccagcggctgtgggaagcacaacagccctgagaggaaggtgtacatggactacaatgccaccacccccctggagcctgaggtgatccaggccatgaccaaggccatgtgggaggcctggggcaaccccagcagcccctacagcgctgctgtgacctttgtgcctgtgtccaaggtgtctggccaggccgaggtggatgacatcctggccgctgtgcggcccaccacccggctggtgaccatcatgctggccaacaatgagaccggcatcgtgatgcctgtgcctgagatcagccagaggatcaaggccctgaaccaggagcgggtggccgccggcctgccccccatcctggtgcacacagatgctgcccaggccctgggcaagcagagggtggatgtggaggacctgggcgtggacttcctgaccatcgtgggccacaagttctacggccccagaattggagccctgtacatccggggcctgggggagttcacccccctgtaccccatgctgtttggaggcggccaggagaggaacttccggcccggcacagagaacacccccatgattgctggcctgggcaaggctgctgagctggtgacccagaactgtgaggcctatgaggcccacatgagagatgtgcgggactacctggaggagcggctggaggccgagtttggccagaagaggatccacctgaacagccagtttcctggcacccagaggctgcccaacacctgcaacttcagcatccggggcccccggctgcagggccacgtggtgctggcccagtgccgggtgctgatggcctctgtgggcgccgcctgccacagcgaccacggggaccagcccagccctgtgctgctgtcctatggagtgccctttgatgtggccagaaatgccctgcggctgtctgtgggccgcagcaccaccagggctgaggtggacctggtggtgcaggacctgaagcaggccgtggcccagctggaggaccaggcctag

SEQ ID NO: 191511 - DNA, 720 bp, Artificial Sequence
  derived and/or modified sequence
atggaggccgctgtggcccctggaagagatgccccagccccagctgccagccagcccagcggctgtgggaagcacaacagccctgagaggaaggtgtacatggactacaatgccaccacccccctggagcctgaggtgatccaggccatgaccaaggccatgtgggaggcctggggcaaccccagcagcccctacagcgctggcaggaaggccaaggacatcatcaatgctgcccgggagagcctggccaagatgattggaggcaagccccaggacatcatcttcaccagcggcggcacagaggccgctgagctggtgacccagaactgtgaggcctatgaggcccacatgagagatgtgcgggactacctggaggagcggctggaggccgagtttggccagaagaggatccacctgaacagccagtttcctggcacccagaggctgcccaacacctgcaacttcagcatccggggcccccggctgcagggccacgtggtgctggcccagtgccgggtgctgatggcctctgtgggcgccgcctgccacagcgaccacggggaccagcccagccctgtgctgctgtcctatggagtgccctttgatgtggccagaaatgccctgcggctgtctgtgggccgcagcaccaccagggctgaggtggacctggtggtgcaggacctgaagcaggccgtggcccagctggaggaccaggcctag

SEQ ID NO: 191512 - DNA, 1338 bp, Artificial Sequence
  derived and/or modified sequence
atggaggccgctgtggcccctggaagagatgccccagccccagctgccagccagcccagcggctgtgggaagcacaacagccctgagaggaaggtgtacatggactacaatgccaccacccccctggagcctgaggtgatccaggccatgaccaaggccatgtgggaggcctggggcaaccccagcagcccctacagcgctggcaggaaggccaaggacatcatcaatgctgcccgggagagcctggccaagatgattggaggcaagccccaggacatcatcttcaccagcggcggcacagagagcaacaacctggtgatccacagcgtggtgaagcacttccacgccaaccagaccagcaagggccacactggaggccaccacagccctgtgaagggggccaagccccacttcatcaccagctctgtggagcatgacagcatccggctgcccctggagcacctggtggaggagcaggtggccgctgtgacctttgtgcctgtgtccaaggtgtctggccaggccgaggtggatgacatcctggccgctgtgcggcccaccacccggctggtgaccatcatgctggccaacaatgagaccggcatcgtgatgcctgtgcctgagatcagccagaggatcaaggccctgaaccaggagcgggtggccgccggcctgccccccatcctggtgcacacagatgctgcccaggccctgggcaagcagagggtggatgtggaggacctgggcgtggacttcctgaccatcgtgggccacaagttctacggccccagaattggagccctgtacatccggggcctgggggagttcacccccctgtaccccatgctgtttggaggcggccaggagaggaacttccggcccggcacagagaacacccccatgattgctggcctgggcaaggctgctgagctggtgacccagaactgtgaggcctatgaggcccacatgagagatgtgcgggactacctggaggagcggctggaggccgagtttggccagaagaggatccacctgaacagccagtttcctggcacccagaggctgcccaacacctgcaacttcagcatccggggcccccggctgcagggccacgtggtgctggcccagtgccgggtgctgatggcctctgtgggcgccgcctgccacagcgaccacggggaccagcccagccctgtgctgctgtcctatggagtgccctttgatgtggccagaaatgccctgcggctgtctgtgggccgcagcaccaccagggctgaggtggacctggtggtgcaggacctgaagcaggccgtggcccagctggaggaccaggcctag

SEQ ID NO: 191513 - DNA, 1362 bp, Artificial Sequence
  derived and/or modified sequence
atgcccggcagcagcggcgccggcatggaggccgccgtggcccccgggagagatgcaccagcccctgcggcctctcaaccttcaggatgcgggaagcacaatagcccagagcgtaaggtgtacatggactacaatgccacgacccctttggaaccagaggtgatccaagccatgacaaaggctatgtgggaggcctgggggaatccttcttccccttattcagcaggaaggaaggcaaaagatattatcaacgcagccagggagagcttagctaagatgatcggcggaaaaccccaagatattatctttactagtggtggaaccgagtctaataacctggtgatccactcagtggttaaacactttcatgccaatcagacatcaaaagggcacactggagggcaccattctccagtgaagggggcaaaaccacactttatcaccagctccgttgaacacgactcgattagattgccgctggagcacctggtcgaggagcaagtagctgctgttacattcgtgccagtgtctaaggtgagcgggcaagcagaggttgatgatattctagctgctgtgaggcccactacaaggttggtcaccattatgctcgctaataatgagactgggattgtgatgcctgtgccggagattagtcagagaattaaggcccttaatcaggagagggtggctgctgggcttccacccatcctggttcacactgacgccgcccaggctctgggcaagcagcgggtggacgtagaggacctgggggtggactttctcactatcgttggccataaattctacggcccccgcattggcgcgctgtacatccgcggattgggagaattcacacccctttaccctatgttatttggaggcggccaagagaggaattttcgtcctggtaccgaaaacacgccaatgatcgctggcctcggaaaagccgctgaactggtcactcagaactgtgaagcttacgaagcacacatgcgagacgtgcgcgactaccttgaggaaaggctggaggctgagtttggacaaaaacgcatccatctcaacagtcagttccccggtacgcagaggctgccgaatacatgtaatttcagcataagaggcccaaggctgcagggacatgtggtccttgcccaatgtcgggttctgatggcttcggtgggggcagcttgtcatagcgatcacggagaccagccctccccagttttgctctcctatggagtgccatttgacgtcgcacgaaatgcccttagactgtcggtggggagatcaaccacgagggccgaagttgacctcgtggtacaggacctaaagcaggcagttgcccagttggaggatcaagcatag

SEQ ID NO: 191514 - DNA, 708 bp, Artificial Sequence
  derived and/or modified sequence
ttcagcaaccccttctgcggcgagaccttcccccggaagcccgacctgaagggaacacatagatgggcacctcaaccttccgaaggagggcaggccccctttcattattttttgggaggaacacggctgcaccccgccgctccaggagcaccaggagggcgaacttccggctccctcctaaacgtgaaaatgatgaagatgaaaacctttatgatgatttgcttccatctgatcaacactgtcactttcgtgccggtgtccaaagtgtccggacaagccgaggtggacgatatccttgcggctgtcagacctaccacacgtctggtcacgatcatgctggcaaataacgagactgggattgttatgccagttcccgaaatctcacagcgtatcaaggccttaaaccaggagcgtgttgctgctggcctgcccccaatcctggttcatactgacgccgctcaagctctgggcaagcagcgggtggatgtggaagacctgggcgtcgactttttgacgatcgtggggcataaattttacggcccaaggatcggcgcactttatatcagggggttaggagaattcacccccctgtaccccatgctgtttggaggggggcaggagcgcaattttcggcctggaacggagaacacacctatgatcgccggacttggaaaggtcagtccaggtgaattggaggagatgtcatag

SEQ ID NO: 191515 - DNA, 954 bp, Artificial Sequence
  derived and/or modified sequence
atggaggccgccgtggcccccggccgggacgcccccgcccccgccgcatcacagccgtcaggttgcggtaaacacaactcgcctgaacggaaggtatatatggactataatgccaccacaccactcgagccagaagtgatccaagccatgacgaaggcaatgtgggaagcgtggggaaatccaagtagcccatactctgctgggcgcaaggctaaggatatcattaatgcggctcgggagtcgctggcaaagatgattggcggcaaaccacaggacattatctttaccagtgggggcaccgagtcgaataacctggtcattcacagcgtggtgaagcactttcatgccaaccaaaccagcaaggggcatacaggaggccatcactctcctgtgaagggcgccaaacctcactttatcacatcttctgttgagcacgattcaatcagattgcccctcgagcacctggtagaagaacaggtcgccgctgtcacattcgtgcccgtgtccaaggtaagcggacaagccgaagttgatgatatcctggcagcagtacgaccgacgactcggctcgttaccataatgcttgcgaataacgaaaccggcattgtgatgcctgtgcctgaaatcagtcaaagaatcaaagctctcaaccaggagcgcgtcgctgccggcctccctcccattctggtgcataccgacgccgcacaggctcttggtaagcagcgcgttgatgtcgaggacttgggcgttgactttctgacgattgtgggccataaattttacgggccccgtattggcgccctttacattcgcggcttgggagagttcactcctttgtatccaatgttgttcggcggtggccaggagcgcaacttccgtcccggaacagaaaacacgcccatgatagcaggcctgggcaaggtgtcccccggggagttggaggaaatgagctag

SEQ ID NO: 191516 - DNA, 1056 bp, Artificial Sequence
  derived and/or modified sequence
atggaggccgccgtggcccccggccgggacgcccccgcccccgccgcttcacaaccgtccgggtgcggcaagcacaatagcccagagcgaaaggtttacatggactacaatgctacgacccctctggaaccagaggtgatacaggccatgactaaggcgatgtgggaagcctggggcaatccgtcttcaccctattccgcggcagtaacatttgtcccagtgtccaaggtctcaggccaagccgaggtggatgatatccttgccgcagttaggcccaccaccaggctggtcacaattatgctggcaaataatgagaccggtatagtgatgccagtacccgaaatctcacagaggattaaggccctgaatcaagagcgagtggccgccgggctgccacctatactggttcatacagatgccgcacaggcccttgggaaacagcgcgtcgacgtggaggatctgggggtggactttctgactatcgtgggccataagttttatggccctagaatcggcgccttgtacattagggggctgggcgagtttacacccctatatcctatgctgtttggtggcgggcaggagcggaatttcagaccgggcactgagaacacgcccatgatagctggactcggaaaggcggctgagcttgttacccagaactgtgaagcttatgaagctcatatgagagacgtgcgagactacttggaagaaagactggaggccgagttcggccagaagcgcattcacttgaatagccaattccctggcacccagaggttgcctaatacgtgcaatttcagcattcggggcccccgtcttcagggacacgttgtgctagcacagtgccgcgtgctgatggcatctgtcggggcagcatgccattccgaccatggggaccagccttctcctgtgctgctgagctatggcgtgcccttcgacgtcgcacgcaatgctcttagactctctgtaggtcgctcgaccacgcgggctgaggtcgatctggttgtccaggacctgaaacaggccgtggcacagctcgaggaccaggcctag

SEQ ID NO: 191517 - DNA, 720 bp, Artificial Sequence
  derived and/or modified sequence
atggaggccgccgtggcccccggccgggacgcccccgcccccgccgctagtcagcccagcgggtgcggaaagcataattctccagagagaaaggtgtatatggattataatgcaacaacccccctggagccagaagtcatacaagccatgaccaaagcaatgtgggaagcttggggaaatccttcctcaccctacagcgccggcaggaaggcaaaagacatcattaacgctgcacgggagtcactggccaagatgatcgggggcaaacctcaggacattatcttcacctccgggggaacggaagctgctgagctggttacacaaaactgcgaggcctacgaggcccatatgagggatgtccgagattatctggaggagcgcttggaagccgaattcgggcagaagcgcattcacttaaacagtcagttcccagggacccagagactcccaaacacatgtaacttttctataagaggacctaggttgcaggggcatgtggtactagcccagtgtcgcgtgcttatggcctcagttggcgcagcgtgtcacagtgaccatggagaccaaccctcgccagtgttgctatcctatggcgtccccttcgatgtggcccgaaatgcgctgcgactgtccgtcgggcggtctaccacccgtgccgaggtggacctggtcgtccaggacctcaagcaggcggtggcccagctagaagatcaggcctag

SEQ ID NO: 191518 - DNA, 1338 bp, Artificial Sequence
  derived and/or modified sequence
atggaggccgccgtggcccccggccgggacgcccccgcccccgccgccagtcagcctagtggctgcgggaaacacaacagtcccgaaaggaaggtgtacatggactacaacgctaccacgccactggagccagaagtgattcaggccatgaccaaggccatgtgggaagcatggggaaacccctcctctccatacagtgcggggcgtaaggctaaagacatcatcaatgctgcccgcgagtcccttgcaaagatgattggcggcaagccacaggacataattttcacgtcaggaggcaccgagtcaaataatctcgtcatccattctgtcgttaagcactttcacgctaatcagactagtaaaggacacacaggtggccaccactcaccagtgaaaggagccaaaccacactttatcacgtcttcagtggaacatgatagtataagactgcccctcgagcacttagtggaggagcaggtggctgccgtgacttttgtccctgtttctaaggtgagtgggcaggccgaggttgacgacatccttgccgcagtgcgtccaaccacccgactggtgacaatcatgttagcaaacaacgagactggtatagtaatgcctgtgcccgaaatctcccagcgcatcaaggccctgaaccaagaaagagtcgcggctggacttccacccattctagtgcacacagatgccgcccaggcgttaggaaagcagagagtggacgttgaggacctgggagtggatttcttaactattgtgggtcacaagttctatggcccacgcatcggcgcactttacattcggggcctgggagagtttacccctttgtaccctatgttgttcggcggcgggcaggaacgcaattttcgacccggtaccgaaaatactccaatgatagccggcctgggcaaggctgccgaactcgttacacagaactgtgaagcctatgaggctcacatgcgggatgtaagggactaccttgaggagcgtctggaggctgaatttgggcagaaaaggattcatctaaattcacagttccccggaactcagcgactgcccaacacatgcaatttttctatacgaggccccagactgcaaggccacgtcgtcttggcacagtgccgcgtcctgatggcaagcgtgggagccgcatgtcatagtgatcacggcgaccaacccagccccgtcttactgtcatatggagtgcctttcgacgtagcgcggaatgccttaaggctcagcgttggacgtagcaccacccgtgccgaagtggatttagtggtgcaggacctaaaacaggccgtcgcgcagctggaggaccaggcttag

SEQ ID NO: 191519 - DNA, 1362 bp, Artificial Sequence
  derived and/or modified sequence
atgcccggatcctctggagctggaatggaggctgccgtggctcctggtcgcgacgctcccgctcccgctgctagtcagccatcaggatgcggtaagcacaattcgccagaacgcaaagtgtacatggactataatgctacaacccccctcgagcccgaagtcattcaggccatgaccaaagccatgtgggaggcatggggtaacccctctagcccatatagtgcaggcaggaaagcaaaggatattattaatgccgcaagagagtccttggcaaaaatgattgggggtaaacctcaagacatcattttcacaagtggcggaaccgagtcgaataacttggtcattcacagcgtcgtgaagcactttcacgctaatcagacatcgaaaggccatactggtggccaccactcacccgtgaaaggtgccaagccccattttatcacatcctcagtggaacacgattccatccggttaccacttgagcatttggtggaagaacaggtggctgccgttacctttgtacccgtgtccaaggtcagtggacaagctgaagttgacgacatcctggcagctgtccgaccaaccacccgcctggtgacaataatgctggccaacaatgaaactggaatcgtcatgccagtcccagagatctctcagagaataaaagcattgaatcaggagagagtggccgcaggtcttcccccaattctcgtgcacacagacgccgcacaggctttgggaaagcagcgagtggacgtcgaggacctcggcgttgacttcctcactattgtgggacataagttctatgggccacgaattggtgcactctatattagagggttgggcgagtttacgcccctgtatcctatgctctttggaggaggccaggagaggaactttcggcctggtaccgagaataccccaatgattgccggactcgggaaggccgctgagctggtgacccagaactgcgaggcatatgaggcacacatgcgggacgtgcgggattacctagaggagcgactggaggcagagttcggccaaaagcgtattcatctgaattctcagttccctggaactcagaggctccctaatacgtgtaactttagtatccgtgggcctaggctccagggacacgtcgtcctagcccagtgccgcgtccttatggcctcagtgggggcagcatgccatagtgatcacggggatcagccttctcctgtgttgctcagttacggtgttccgtttgacgtcgcaagaaacgcactgcggctgtccgtagggaggtcaacaacgcgtgcagaggtggacttagttgtccaggatttaaaacaggcggttgctcagctggaggatcaagcatag

SEQ ID NO: 191520 - DNA, 708 bp, Artificial Sequence
  derived and/or modified sequence
ttttcaaacccgttctgtggagagactttcccgaggaagcctgacctgaaaggcacacatagatgggcgccacaaccttccgaaggcggtcaagcaccctttcactatttcctggggggtacgaggctccatcccgctgcccctggcgctcctggcggtcgtacttccggttccctgcttaacgtgaagatgatgaaaatgaagaccttcatgatgatttgcttccatctgatcaatacagttaccttcgttccggtgtctaaggtctcggggcaggctgaagtcgatgacatcttggcagcagtacgcccaacgacgcgccttgtgaccatcatgttggctaataatgaaacggggattgtcatgccagttccagagatctctcagaggatcaaggcactcaaccaggaaagggttgccgctggcttgccccctatcctcgtacacactgatgccgcacaagcgcttggcaaacaaagagtcgatgtagaggatctgggggtcgatttcctgaccatcgtggggcacaagttctacggccctaggataggagcactttacattcgcggactgggcgaattcacaccgctatacccaatgctcttcggagggggacaggaacgcaatttcagacctggcacggagaacactccaatgatagccggtctcggaaaagtttctccgggagagctggaagagatgtcctag

SEQ ID NO: 191521 - DNA, 954 bp, Artificial Sequence
  derived and/or modified sequence
atggaggctgccgtggcgcctgggagagacgccccagcacctgcggcaagccagccatccgggtgtggaaaacataacagccctgaacgcaaggtgtatatggattataacgctaccactcccctggagcccgaggtgatccaggccatgaccaaggctatgtgggaggcctgggggaatccaagttcaccttatagcgccggacggaaggctaaggatatcattaacgcggcaagagaaagtttagcaaaaatgataggcggaaaaccacaagatattattttcacatcaggcggtaccgagtcgaacaacctggtaatccacagcgtggtgaaacattttcatgcgaatcagaccagcaaaggtcatactggtggacatcatagcccagtcaaaggtgcgaagcctcactttattacaagttcagtggagcacgactccatccggctcccactggagcatctggtcgaggagcaggtcgccgcagtgaccttcgtgcctgtgtctaaggtgtcaggccaagccgaggtcgatgacatacttgctgccgtgcgcccaacgacacgacttgtgacaataatgttagctaacaacgaaaccggcatcgtcatgcctgtcccggaaatttcccagcggatcaaggccctgaatcaggagcgggtcgctgcagggctgcctcccatactggtgcacacagatgcagcgcaagctctgggcaaacagcgggtcgacgtggaggacctcggcgtggacttccttaccatcgtcggccacaagttttacggaccgcgaattggggcactgtatatcaggggtctaggtgaatttaccccactttatccaatgctgtttggcggaggacaggaacggaacttccgcccaggtacggagaacactcctatgattgctggactgggtaaggtcagccccggagaacttgaggagatgtcatag

SEQ ID NO: 191522 - DNA, 1056 bp, Artificial Sequence
  derived and/or modified sequence
atggaagccgctgtcgcgccaggcagggacgccccagcacccgcagctagtcagccgtccggatgtgggaagcacaactctcccgaacggaaggtatacatggactacaatgctaccactccacttgagcctgaggtgatacaggccatgaccaaggcgatgtgggaggcctggggaaatccctcttccccttactccgctgccgtaaccttcgttccagtgagcaaagtgagtgggcaggccgaagtcgatgacattctggccgcagttcggccaacgacccgcctagtgacaatcatgctcgcaaataacgagactggtattgtgatgcctgtgccagaaatcagtcagagaattaaggctctgaatcaggaacgtgtggctgcgggtctgccaccaatcctcgtccatacagatgctgcccaagctctggggaaacagcgtgttgatgtggaggatttgggggtcgactttctcactatcgtgggacacaagttctacggaccaagaatcggcgctctgtacatcaggggactgggcgagtttacccctctgtaccccatgttatttggtggtggtcaggaacgaaactttaggcctgggacggaaaatacgcctatgattgcaggcctcggaaaggcagctgagcttgtgacccagaattgtgaagcctacgaggcgcatatgcgtgatgttagggattatctggaggagcgcctggaggccgagttcggacagaaaaggatccacctcaatagtcagttccccggtacccaaaggttgcctaacacttgtaactttagcatccgtggacctcggctccaaggacatgttgtgttggcccagtgtcgcgtactcatggcgtctgtgggggcagcctgccacagtgaccacggcgaccaaccgtctccagtccttcttagctacggggtacccttcgacgtggcgcgtaatgctctcaggttgtctgttgggaggtctaccactagggccgaggtggatctcgtcgtccaggacctgaagcaggcagtggcccagctggaagaccaggcctag

SEQ ID NO: 191523 - DNA, 720 bp, Artificial Sequence
  derived and/or modified sequence
atggaagccgcagtagcacctggccgtgacgctcctgcacccgcagcgtcccagccctcaggctgtggtaaacacaactctccagagagaaaagtgtacatggattataacgcaacaacacctctggaacctgaggtgatccaggccatgacgaaagccatgtgggaagcttggggcaacccaagcagcccatattccgcgggacgcaaggcaaaggacatcattaacgctgctcgcgaaagcctcgcgaaaatgatcggcggtaagccccaagacataatctttacaagtggcggtaccgaggcggctgagctcgtgacccagaattgcgaggcctatgaagctcatatgcgcgacgtacgggactatcttgaagaacgtctcgaagcggagtttggacagaagcggatccacctgaacagccaattcccgggaacacagcgattacctaatacatgtaacttctctattagaggccctcgtctacaaggacacgtggttctggcacagtgccgggtcctgatggcctctgtgggagcggcttgccacagcgaccatggcgatcagccaagtcctgttttgctctcatacggcgttccattcgatgtggctaggaacgccctgcgactcagcgtgggacggagcactactcgcgcagaagtagacctcgtggtgcaagacctaaagcaggccgtggcccaactggaggaccaggcctag

SEQ ID NO: 191524 - DNA, 1338 bp, Artificial Sequence
  derived and/or modified sequence
atggaggccgcagtggcacccggacgagatgctccagcaccagccgctagtcagccgagcggttgtggcaaacacaactctcctgagcggaaagtatacatggactacaatgcaacgaccccactggaacccgaagttatccaagcaatgaccaaggcgatgtgggaagcctggggcaacccctcctctccttatagcgccggacgtaaggctaaagacataatcaatgcagcacgggagtccttggccaaaatgatcgggggtaagccacaggatatcatatttacctctggcggaacagagagcaacaaccttgtgattcactcagtggtgaagcactttcatgccaatcaaacgtcaaaggggcacaccggcggtcatcatagccccgttaagggagcgaaaccccatttcatcacctcaagtgtggagcacgactctattcgcctcccattagagcaccttgtcgaggaacaggtcgcagccgtcacatttgtgccagtctccaaggttagtggacaggctgaggtggacgacatactcgccgcagtccgccctacaacacgtctggttaccattatgctggcaaataacgagaccggtatcgtgatgccagtgccagaaatctcacagcgaatcaaggccctcaaccaggagcgagtggcagcaggccttccacctatcttagttcatacagacgcagcccaggcattgggcaagcagagggtggacgttgaagatctgggagtggactttctgacaatagttggacataaattctacggccctcgaatcggggcactttatattcgtgggcttggagaattcacacctctgtatcccatgctcttcggcggaggccaagagcgaaatttccgcccaggtaccgaaaatacgccgatgatcgccggtctggggaaggcagccgagctcgtaactcagaactgtgaggcctacgaggctcacatgcgggatgtgagggattacctcgaagagcggctcgaggcagagttcggccagaagcgaatccatttaaattcgcaatttcccggaactcagcgactgccgaatacatgcaacttttccatcaggggcccaaggctacagggtcacgttgtgctggcccagtgtcgggttctcatggcaagcgtcggagccgcttgccacagtgaccacggagatcagccttctccggtactcctctcatacggagttccgttcgacgtcgcaagaaatgccctccgactcagcgtggggcgatccaccactcgcgctgaagtggacctcgtcgttcaagacttaaagcaagcagtcgcgcagctcgaagatcaggcttag

SEQ ID NO: 191525 - DNA, 2562 bp, Artificial Sequence
  derived and/or modified sequence
cccgctgggggctcggcggccctctgaagcgggtggattggctggggtgcttcgctcagccaatccggacgcgcccgggcgtcgcggccccgcctcctccccggcgctctgggcccgtagcgctccgcgggaaggaggctggatgcccggcagcagtggggcggggatggaggcggccgtggcgccggggagggatgcgccggcacccgcggcgagtcagcccagcggctgcgggaaacacaactcgccggagaggaaagtttatatggactataatgcaacgactcccctggagccagaagttatccaggccatgaccaaggccatgtgggaagcctggggaaatcccagcagcccgtattcagcaggaagaaaggccaaggatattataaatgcagctcgggaaagcctcgcgaagatgataggggggaaacctcaagatataatcttcacttccgggggcactgagtcaaataatttagtaatccattctgtggtgaaacatttccacgcaaaccagacctcaaagggacacacaggtgggcaccacagcccagtgaagggggccaagccccatttcattacttcctcggtggaacacgactccatccggctgcccctggagcacctggtggaagaacaagtggcagcggtcacctttgtcccggtgtccaaggtgagcgggcaggcagaggtggacgacatcctcgcggcagtccgcccgaccacacgcctcgtgaccatcatgctggccaacaatgagactggcattgtcatgcctgtccctgaaatcagtcagcgcattaaagccctgaaccaggaacgggtggcagctgggctacctcccatcctcgtgcacacggatgctgcacaggccttggggaagcagcgcgtggatgtggaggacctgggcgtggacttccttacaatcgtggggcacaagttttatggtcccaggattggcgcactttatatacgaggacttggtgaatttacccctctctaccctatgctatttggaggtggacaagaacggaatttcaggccagggacagagaacaccccaatgattgctggccttgggaaggccgcggagctggtgacccagaactgcgaggcttatgaggcccacatgagggacgtccgcgactacctggaagagaggctggaagctgaattcggtcagaagagaatccatctgaatagccagtttccaggcacccagcggcttcccaatacctgtaacttttccatccggggaccccggcttcaaggccacgtggtgcttgcgcagtgccgagtgctgatggccagtgtgggggccgcgtgccactcggaccacggggaccagccgtccccagtgctgctgagctacggtgtccccttcgacgtggccaggaacgcgctccggctcagcgtgggccgcagcaccaccagggccgaggtggacctcgtcgtgcaggacctgaagcaggccgtggcgcagctggaggaccaggcctagcactggggccgccttccccaccccgcttctgggaagcccgtggcagggcacagggttgtccctccagttccctcctgagggctgtgccaggatgactgtctcatgccccctctgcattttgtcctggagtgccagcgagtgtgcacccccagtttccttccctggacccctgcagagctcacagggcccaggacaccaacgccgcataggactgcccacatgggaccgcccacataggaccgcccacataggaccgcccacatgggaccgcccacatgggaccgcccacatgggaccgcccacatagaaccgtcctccagtggtgaagcggaaacacttagctttatccaccctccccactgggaactgggcacgcctgttgtgagtgccctttcctggaaggtgtttttatctggaagatagaatccaagtatttataactcattgtcagccaaatgctatcatgaacgtaggaaacttgatttttttgttttgatcatggcctctacatgcacctttccagagtggtctcttctcaggccctttttagtccctttccaaagctgcccccaccaccctgctcctctggcctcagtgcacagtggcccccagcctcggccaggcctgctctgctcagcgcccaccgcccaccacccctcctgcttccccgagcctgaccctgttccgcccactggcaatcagggctgcgcacttccctgtccacggtccccaggccttcctgtcttgtcccttttgatcattattaactcagggtttcagctccaacctcgctgagttggtgcagctccaggtcattcctggggtgggaatcggatcatccctgactcagcttttaccttaattttatttgcagaggattcttttctcaaaatgctctggcatttggacacacatcacatgtcgatatttgcataggagtcattttcagtggaataacatttttaatgtgtggttttacggttcaaggaactacttgatgattttgaggaaacacttgccagaaactaaattaacgaataaaagatttcagtgcccga

SEQ ID NO: 191526 - DNA, 1083 bp, Artificial Sequence
  derived and/or modified sequence
ggcgctctgggcccgtagcgctccgcgggaaggaggctggatgcccggcagcagtggggcggggatggaggcggccgtggcgccggggagggatgcgccggcacccgcggcgagtcagcccagcggctgcgggaaacacaactcgccggagaggaaagtttatatggactataatgcaacgactcccctggagccagaagttatccaggccatgaccaaggccatgtgggaagcctggggaaatcccagcagcccgtattcagcaggaagaaaggccaaggatattataaatgcagctcgggaaagcctcgcgaagatgataggggggaaacctcaagatataatcttcacttccgggggcactgagtcaaataatttagtaatccattctgtggtgaaacatttccacgcaaaccagacctcaaagggacacacaggtgggcaccacagcccagtgaagggggccaagccccatttcattacttcctcggtggaacacgactccatccggctgcccctggagcacctggtggaagaacaagtggcagcctactcaatgtgaagatgatgaagatgaagacctttatgatgatctgcttccacttaattaatacggtcacctttgtcccggtgtccaaggtgagcgggcaggcagaggtggacgacatcctcgcggcagtccgcccgaccacacgcctcgtgaccatcatgctggccaacaatgagactggcattgtcatgcctgtccctgaaatcagtcagcgcattaaagccctgaaccaggaacgggtggcagctgggctacctcccatcctcgtgcacacggatgctgcacaggccttggggaagcagcgcgtggatgtggaggacctgggcgtggacttccttacaatcgtggggcacaagttttatggtcccaggattggcgcactttatatacgaggacttggtgaatttacccctctctaccctatgctatttggaggtggacaagaacggaatttcaggccagggacagagaacaccccaatgattgctggccttgggaaggtgagccctggtgagcttgaggagatgagttga

SEQ ID NO: 191527 - DNA, 1774 bp, Artificial Sequence
  derived and/or modified sequence
atgcccggcagcagtggggcggggatggaggcggccgtggcgccggggagggatgcgccggcacccgcggcgagtcagcccagcggctgcgggaaacacaactcgccggagaggaaagtttatatggactataatgcaacgactcccctggagccagaagttatccaggccatgaccaaggccatgtgggaagcctggggaaatcccagcagcccgtattcagcaggaagaaaggccaaggatattataaatgcagctcgggaaagcctcgcgaagatgataggggggaaacctcaagatataatcttcacttccgggggcactgagtcaaataatttagtaatccattctgtggtgaaacatttccacgcaaaccagacctcaaagggacacacaggtgggcaccacagcccagtgaagggggccaagccccatttcattacttcctcggtggaacacgactccatccggctgcccctggagcacctggtggaagaacaagtggcagcggtcacctttgtcccggtgtccaaggtgagcgggcaggcagaggtggacgacatcctcgcggcagtccgcccgaccacacgcctcgtgaccatcatgctggccaacaatgagactggcattgtcatgcctgtccctgaaatcagtcagcgcattaaagccctgaaccaggaacgggtggcagctgggctacctcccatcctcgtgcacacggatgctgcacaggccttggggaagcagcgcgtggatgtggaggacctgggcgtggacttccttacaatcgtggggcacaagttttatggtcccaggattggcgcactttatatacgaggacttggtgaatttacccctctctaccctatgctatttggaggtggacaagaacggaatttcaggccagggacagagaacaccccaatgattgctggccttgggaaggtgagccctggtgagcttgaggagatgagttgattgctttgtcatcagtgtccccagcggctctagtaggaatctggggctttagggagatcatattcgtgatctcataagcggactgacaagaaaaagcctggaatctgatttatcaacctggagagctgtactttttcagatctgtggattagtggcacttgtttagcatttaaaagggaaaaactccttgtctgtgtctcttctgacatgagaaacagtgatactgttacagcagaggtgaagtgtcaagctgcaggttcaccattcccaaaggcgtcggcagcccccgcaccatcgacgttctgtccccgattggtctgtggggtggccaatccagcacctgccaccagccctccactggggcctgtcctgcttctgcgacagtaaccaggctcaggttttgccgtgcgaaggcagaggtactggttacacctcggcgtctgcaggctgctccctcactgtgcggcctctggtcaaaggccaccaccttcaagcaaccctccatgaaccacagctacattggttcccccatgtcccctgctgtcaccctctatccctgacactgctttatttcccctatctgatgtttctctgtagtgtgttcagatgtatgccccaccttctgcttccccgagagcaggggcttggccatgtcggcctcagtatccccagtacagagaaagggcttagcgcccaggaggccgggccttgggaagagtatgaatggattccctgttacttagaatattcaaaattatattattaacagtgataactgtggctacatttactagaa

SEQ ID NO: 191528 - DNA, 1186 bp, Artificial Sequence
  derived and/or modified sequence
atgcccggcagcagtggggcggggatggaggcggccgtggcgccggggagggatgcgccggcacccgcggcgagtcagcccagcggctgcgggaaacacaactcgccggagaggaaagtttatatggactataatgcaacgactcccctggagccagaagttatccaggccatgaccaaggccatgtgggaagcctggggaaatcccagcagcccgtattcagcagcggtcacctttgtcccggtgtccaaggtgagcgggcaggcagaggtggacgacatcctcgcggcagtccgcccgaccacacgcctcgtgaccatcatgctggccaacaatgagactggcattgtcatgcctgtccctgaaatcagtcagcgcattaaagccctgaaccaggaacgggtggcagctgggctacctcccatcctcgtgcacacggatgctgcacaggccttggggaagcagcgcgtggatgtggaggacctgggcgtggacttccttacaatcgtggggcacaagttttatggtcccaggattggcgcactttatatacgaggacttggtgaatttacccctctctaccctatgctatttggaggtggacaagaacggaatttcaggccagggacagagaacaccccaatgattgctggccttgggaaggccgcggagctggtgacccagaactgcgaggcttatgaggcccacatgagggacgtccgcgactacctggaagagaggctggaagctgaattcggtcagaagagaatccatctgaatagccagtttccaggcacccagcggcttcccaatacctgtaacttttccatccggggaccccggcttcaaggccacgtggtgcttgcgcagtgccgagtgctgatggccagtgtgggggccgcgtgccactcggaccacggggaccagccgtccccagtgctgctgagctacggtgtccccttcgacgtggccaggaacgcgctccggctcagcgtgggccgcagcaccaccagggccgaggtggacctcgtcgtgcaggacctgaagcaggccgtggcgcagctggaggaccaggcctagcactggggccgccttccccaccccgcttctgggaagcccgtggcagggcacagggttgtccctccagttccctcctgagggctgtgccaggatgactgtctcatgc

SEQ ID NO: 191529 - DNA, 1261 bp, Artificial Sequence
  derived and/or modified sequence
gatggaggcggccgtggcgccggggagggatgcgccggcacccgcggcgagtcagcccagcggctgcgggaaacacaactcgccggagaggaaagtttatatggactataatgcaacgactcccctggagccagaagttatccaggccatgaccaaggccatgtgggaagcctggggaaatcccagcagcccgtattcagcaggaagaaaggccaaggatattataaatgcagctcgggaaagcctcgcgaagatgataggggggaaacctcaagatataatcttcacttccgggggcactgaggccgcggagctggtgacccagaactgcgaggcttatgaggcccacatgagggacgtccgcgactacctggaagagaggctggaagctgaattcggtcagaagagaatccatctgaatagccagtttccaggcacccagcggcttcccaatacctgtaacttttccatccggggaccccggcttcaaggccacgtggtgcttgcgcagtgccgagtgctgatggccagtgtgggggccgcgtgccactcggaccacggggaccagccgtccccagtgctgctgagctacggtgtccccttcgacgtggccaggaacgcgctccggctcagcgtgggccgcagcaccaccagggccgaggtggacctcgtcgtgcaggacctgaagcaggccgtggcgcagctggaggaccaggcctagcactggggccgccttccccaccccgcttctgggaagcccgtggcagggcacagggttgtccctccagttccctcctgagggctgtgccaggatgactgtctcatgccccctctgcattttgtcctggagtgccagcgagtgtgcacccccagtttccttccctggacccctgcagagctcacagggcccaggacaccaacgccgcataggactgcccacatgggaccgcccacataggaccgcccacataggaccgcccacatgggaccgcccacatgggaccgcccacatgggaccgcccacatagaaccgtcctccagtggtgaagcggaaacacttagctttatccaccctccccactgggaactgggcacgcctgttgtgagtgccctttcctggaaggtgtttttatctggaagatagaatccaagtatttataactcattgtcagccaaatgctatcatgaacgtaggaaacttgatttttttgttttgatcatggcctctacatgcacctttccagagtggtctcttctcagg

SEQ ID NO: 191530 - DNA, 2459 bp, Artificial Sequence
  derived and/or modified sequence
ggcgctctgggcccgtagcgctccgcgggaaggaggctggatgcccggcagcagtggggcggggatggaggcggccgtggcgccggggagggatgcgccggcacccgcggcgagtcagcccagcggctgcgggaaacacaactcgccggagaggaaagtttatatggactataatgcaacgactcccctggagccagaagttatccaggccatgaccaaggccatgtgggaagcctggggaaatcccagcagcccgtattcagcaggaagaaaggccaaggatattataaatgcagctcgggaaagcctcgcgaagatgataggggggaaacctcaagatataatcttcacttccgggggcactgagtcaaataatttagtaatccattctgtggtgaaacatttccacgcaaaccagacctcaaagggacacacaggtgggcaccacagcccagtgaagggggccaagccccatttcattacttcctcggtggaacacgactccatccggctgcccctggagcacctggtggaagaacaagtggcagcggtcacctttgtcccggtgtccaaggtgagcgggcaggcagaggtggacgacatcctcgcggcagtccgcccgaccacacgcctcgtgaccatcatgctggccaacaatgagactggcattgtcatgcctgtccctgaaatcagtcagcgcattaaagccctgaaccaggaacgggtggcagctgggctacctcccatcctcgtgcacacggatgctgcacaggccttggggaagcagcgcgtggatgtggaggacctgggcgtggacttccttacaatcgtggggcacaagttttatggtcccaggattggcgcactttatatacgaggacttggtgaatttacccctctctaccctatgctatttggaggtggacaagaacggaatttcaggccagggacagagaacaccccaatgattgctggccttgggaaggccgcggagctggtgacccagaactgcgaggcttatgaggcccacatgagggacgtccgcgactacctggaagagaggctggaagctgaattcggtcagaagagaatccatctgaatagccagtttccaggcacccagcggcttcccaatacctgtaacttttccatccggggaccccggcttcaaggccacgtggtgcttgcgcagtgccgagtgctgatggccagtgtgggggccgcgtgccactcggaccacggggaccagccgtccccagtgctgctgagctacggtgtccccttcgacgtggccaggaacgcgctccggctcagcgtgggccgcagcaccaccagggccgaggtggacctcgtcgtgcaggacctgaagcaggccgtggcgcagctggaggaccaggcctagcactggggccgccttccccaccccgcttctgggaagcccgtggcagggcacagggttgtccctccagttccctcctgagggctgtgccaggatgactgtctcatgccccctctgcattttgtcctggagtgccagcgagtgtgcacccccagtttccttccctggacccctgcagagctcacagggcccaggacaccaacgccgcataggactgcccacatgggaccgcccacataggaccgcccacataggaccgcccacatgggaccgcccacatgggaccgcccacatgggaccgcccacatagaaccgtcctccagtggtgaagcggaaacacttagctttatccaccctccccactgggaactgggcacgcctgttgtgagtgccctttcctggaaggtgtttttatctggaagatagaatccaagtatttataactcattgtcagccaaatgctatcatgaacgtaggaaacttgatttttttgttttgatcatggcctctacatgcacctttccagagtggtctcttctcaggccctttttagtccctttccaaagctgcccccaccaccctgctcctctggcctcagtgcacagtggcccccagcctcggccaggcctgctctgctcagcgcccaccgcccaccacccctcctgcttccccgagcctgaccctgttccgcccactggcaatcagggctgcgcacttccctgtccacggtccccaggccttcctgtcttgtcccttttgatcattattaactcagggtttcagctccaacctcgctgagttggtgcagctccaggtcattcctggggtgggaatcggatcatccctgactcagcttttaccttaattttatttgcagaggattcttttctcaaaatgctctggcatttggacacacatcacatgtcgatatttgcataggagtcattttcagtggaataacatttttaatgtgtggttttacggttcaaggaactacttgatgattttgaggaaacacttgccagaaactaaattaacgaataaaagatttcagtgcccg

SEQ ID NO: 191531 - DNA, 1362 bp, Artificial Sequence
  derived and/or modified sequence
atgcccggcagcagcggcgccggcatggaggccgccgtggcccccggcagagacgcccccgcccccgccgccagccagcccagcggctgcggcaagcacaacagccccgagagaaaggtgtacatggactacaacgccaccacccccctggagcccgaggtgatccaggccatgaccaaggccatgtgggaggcctggggcaaccccagcagcccctacagcgccggcagaaaggccaaggacatcatcaacgccgccagagagagcctggccaagatgatcggcggcaagccccaggacatcatcttcaccagcggcggcaccgagagcaacaacctggtgatccacagcgtggtgaagcacttccacgccaaccagaccagcaagggccacaccggcggccaccacagccccgtgaagggcgccaagccccacttcatcaccagcagcgtggagcacgacagcatcagactgcccctggagcacctggtggaggagcaggtggccgccgtgaccttcgtgcccgtgagcaaggtgagcggccaggccgaggtggacgacatcctggccgccgtgagacccaccaccagactggtgaccatcatgctggccaacaacgagaccggcatcgtgatgcccgtgcccgagatcagccagagaatcaaggccctgaaccaggagagagtggccgccggcctgccccccatcctggtgcacaccgacgccgcccaggccctgggcaagcagagagtggacgtggaggacctgggcgtggacttcctgaccatcgtgggccacaagttctacggccccagaatcggcgccctgtacatcagaggcctgggcgagttcacccccctgtaccccatgctgttcggcggcggccaggagagaaacttcagacccggcaccgagaacacccccatgatcgccggcctgggcaaggccgccgagctggtgacccagaactgcgaggcctacgaggcccacatgagagacgtgagagactacctggaggagagactggaggccgagttcggccagaagagaatccacctgaacagccagttccccggcacccagagactgcccaacacctgcaacttcagcatcagaggccccagactgcagggccacgtggtgctggcccagtgcagagtgctgatggccagcgtgggcgccgcctgccacagcgaccacggcgaccagcccagccccgtgctgctgagctacggcgtgcccttcgacgtggccagaaacgccctgagactgagcgtgggcagaagcaccaccagagccgaggtggacctggtggtgcaggacctgaagcaggccgtggcccagctggaggaccaggcctag

SEQ ID NO: 191532 - DNA, 708 bp, Artificial Sequence
  derived and/or modified sequence
ttcagcaaccccttctgcggcgagaccttccccagaaagcccgacctgaagggcacccacagatgggccccccagcccagcgagggcggccaggcccccttccactacttcctgggcggcaccagactgcaccccgccgcccccggcgcccccggcggcagaaccagcggcagcctgctgaacgtgaagatgatgaagatgaagaccttcatgatgatctgcttccacctgatcaacaccgtgaccttcgtgcccgtgagcaaggtgagcggccaggccgaggtggacgacatcctggccgccgtgagacccaccaccagactggtgaccatcatgctggccaacaacgagaccggcatcgtgatgcccgtgcccgagatcagccagagaatcaaggccctgaaccaggagagagtggccgccggcctgccccccatcctggtgcacaccgacgccgcccaggccctgggcaagcagagagtggacgtggaggacctgggcgtggacttcctgaccatcgtgggccacaagttctacggccccagaatcggcgccctgtacatcagaggcctgggcgagttcacccccctgtaccccatgctgttcggcggcggccaggagagaaacttcagacccggcaccgagaacacccccatgatcgccggcctgggcaaggtgagccccggcgagctggaggagatgagctag

SEQ ID NO: 191533 - DNA, 954 bp, Artificial Sequence
  derived and/or modified sequence
atggaggccgccgtggcccccggcagagacgcccccgcccccgccgccagccagcccagcggctgcggcaagcacaacagccccgagagaaaggtgtacatggactacaacgccaccacccccctggagcccgaggtgatccaggccatgaccaaggccatgtgggaggcctggggcaaccccagcagcccctacagcgccggcagaaaggccaaggacatcatcaacgccgccagagagagcctggccaagatgatcggcggcaagccccaggacatcatcttcaccagcggcggcaccgagagcaacaacctggtgatccacagcgtggtgaagcacttccacgccaaccagaccagcaagggccacaccggcggccaccacagccccgtgaagggcgccaagccccacttcatcaccagcagcgtggagcacgacagcatcagactgcccctggagcacctggtggaggagcaggtggccgccgtgaccttcgtgcccgtgagcaaggtgagcggccaggccgaggtggacgacatcctggccgccgtgagacccaccaccagactggtgaccatcatgctggccaacaacgagaccggcatcgtgatgcccgtgcccgagatcagccagagaatcaaggccctgaaccaggagagagtggccgccggcctgccccccatcctggtgcacaccgacgccgcccaggccctgggcaagcagagagtggacgtggaggacctgggcgtggacttcctgaccatcgtgggccacaagttctacggccccagaatcggcgccctgtacatcagaggcctgggcgagttcacccccctgtaccccatgctgttcggcggcggccaggagagaaacttcagacccggcaccgagaacacccccatgatcgccggcctgggcaaggtgagccccggcgagctggaggagatgagctag

SEQ ID NO: 191534 - DNA, 1056 bp, Artificial Sequence
  derived and/or modified sequence
atggaggccgccgtggcccccggcagagacgcccccgcccccgccgccagccagcccagcggctgcggcaagcacaacagccccgagagaaaggtgtacatggactacaacgccaccacccccctggagcccgaggtgatccaggccatgaccaaggccatgtgggaggcctggggcaaccccagcagcccctacagcgccgccgtgaccttcgtgcccgtgagcaaggtgagcggccaggccgaggtggacgacatcctggccgccgtgagacccaccaccagactggtgaccatcatgctggccaacaacgagaccggcatcgtgatgcccgtgcccgagatcagccagagaatcaaggccctgaaccaggagagagtggccgccggcctgccccccatcctggtgcacaccgacgccgcccaggccctgggcaagcagagagtggacgtggaggacctgggcgtggacttcctgaccatcgtgggccacaagttctacggccccagaatcggcgccctgtacatcagaggcctgggcgagttcacccccctgtaccccatgctgttcggcggcggccaggagagaaacttcagacccggcaccgagaacacccccatgatcgccggcctgggcaaggccgccgagctggtgacccagaactgcgaggcctacgaggcccacatgagagacgtgagagactacctggaggagagactggaggccgagttcggccagaagagaatccacctgaacagccagttccccggcacccagagactgcccaacacctgcaacttcagcatcagaggccccagactgcagggccacgtggtgctggcccagtgcagagtgctgatggccagcgtgggcgccgcctgccacagcgaccacggcgaccagcccagccccgtgctgctgagctacggcgtgcccttcgacgtggccagaaacgccctgagactgagcgtgggcagaagcaccaccagagccgaggtggacctggtggtgcaggacctgaagcaggccgtggcccagctggaggaccaggcctag

SEQ ID NO: 191535 - DNA, 720 bp, Artificial Sequence
  derived and/or modified sequence
atggaggccgccgtggcccccggcagagacgcccccgcccccgccgccagccagcccagcggctgcggcaagcacaacagccccgagagaaaggtgtacatggactacaacgccaccacccccctggagcccgaggtgatccaggccatgaccaaggccatgtgggaggcctggggcaaccccagcagcccctacagcgccggcagaaaggccaaggacatcatcaacgccgccagagagagcctggccaagatgatcggcggcaagccccaggacatcatcttcaccagcggcggcaccgaggccgccgagctggtgacccagaactgcgaggcctacgaggcccacatgagagacgtgagagactacctggaggagagactggaggccgagttcggccagaagagaatccacctgaacagccagttccccggcacccagagactgcccaacacctgcaacttcagcatcagaggccccagactgcagggccacgtggtgctggcccagtgcagagtgctgatggccagcgtgggcgccgcctgccacagcgaccacggcgaccagcccagccccgtgctgctgagctacggcgtgcccttcgacgtggccagaaacgccctgagactgagcgtgggcagaagcaccaccagagccgaggtggacctggtggtgcaggacctgaagcaggccgtggcccagctggaggaccaggcctag

SEQ ID NO: 191536 - DNA, 1338 bp, Artificial Sequence
  derived and/or modified sequence
atggaggccgccgtggcccccggcagagacgcccccgcccccgccgccagccagcccagcggctgcggcaagcacaacagccccgagagaaaggtgtacatggactacaacgccaccacccccctggagcccgaggtgatccaggccatgaccaaggccatgtgggaggcctggggcaaccccagcagcccctacagcgccggcagaaaggccaaggacatcatcaacgccgccagagagagcctggccaagatgatcggcggcaagccccaggacatcatcttcaccagcggcggcaccgagagcaacaacctggtgatccacagcgtggtgaagcacttccacgccaaccagaccagcaagggccacaccggcggccaccacagccccgtgaagggcgccaagccccacttcatcaccagcagcgtggagcacgacagcatcagactgcccctggagcacctggtggaggagcaggtggccgccgtgaccttcgtgcccgtgagcaaggtgagcggccaggccgaggtggacgacatcctggccgccgtgagacccaccaccagactggtgaccatcatgctggccaacaacgagaccggcatcgtgatgcccgtgcccgagatcagccagagaatcaaggccctgaaccaggagagagtggccgccggcctgccccccatcctggtgcacaccgacgccgcccaggccctgggcaagcagagagtggacgtggaggacctgggcgtggacttcctgaccatcgtgggccacaagttctacggccccagaatcggcgccctgtacatcagaggcctgggcgagttcacccccctgtaccccatgctgttcggcggcggccaggagagaaacttcagacccggcaccgagaacacccccatgatcgccggcctgggcaaggccgccgagctggtgacccagaactgcgaggcctacgaggcccacatgagagacgtgagagactacctggaggagagactggaggccgagttcggccagaagagaatccacctgaacagccagttccccggcacccagagactgcccaacacctgcaacttcagcatcagaggccccagactgcagggccacgtggtgctggcccagtgcagagtgctgatggccagcgtgggcgccgcctgccacagcgaccacggcgaccagcccagccccgtgctgctgagctacggcgtgcccttcgacgtggccagaaacgccctgagactgagcgtgggcagaagcaccaccagagccgaggtggacctggtggtgcaggacctgaagcaggccgtggcccagctggaggaccaggcctag

SEQ ID NO: 191537 - protein, 103 aa, Artificial Sequence
  derived and/or modified sequence
MRQRLLPSVTSLLLVALLFPGSSQARHVNHSATEALGELRERAPGQGTNGFQLLRHAVKRDLLPPRTPPYQVHISHREARGPSFRICVDFLGPRWARGCSTGN

SEQ ID NO: 191538 - DNA, 312 bp, Artificial Sequence
  derived and/or modified sequence
atgcgacagcgcctactgccgtccgtgactagcctgctcctagtggccctgctatttcccggatcctctcaagctcgccacgtgaaccactccgcaacagaagctttgggcgaattgcgcgagagggcccctggtcagggtaccaatggcttccaactgctccggcatgctgtgaagagagacctcctgccacctcgcacccccccttaccaggtgcatatttctcaccgcgaggctcggggaccttcttttagaatctgcgtagacttcctgggacctaggtgggcccgaggctgcagcacgggaaattag

SEQ ID NO: 191539 - DNA, 312 bp, Artificial Sequence
  derived and/or modified sequence
atgagacaaaggctactaccatcagttacttcactcctgctggtagcactcctcttccctggatcttcacaagcacggcacgtgaaccacagcgcaacagaagctcttggcgaacttcgagagagagcaccaggccagggtacaaatggctttcaattgctgcgacacgctgtcaagcgcgacctactgcccccacgaaccccaccatatcaagttcatatctcccatcgggaagctcgggggccatccttccgaatttgtgtagacttccttggacctcgatgggcaagaggctgttccaccggcaactag

SEQ ID NO: 191540 - DNA, 312 bp, Artificial Sequence
  derived and/or modified sequence
atgagacaaaggctactaccatcagttacttcactcctgctggtagcactcctcttccctggatcttcacaagcacggcacgtgaaccacagcgcaacagaagctcttggcgaacttcgagagagagcaccaggccagggtacaaatggctttcaattgctgcgacacgctgtcaagcgcgacctactgcccccacgaaccccaccatatcaagttcatatctcccatcgggaagctcgggggccatccttccgaatttgtgtagacttccttggacctcgatgggcaagaggctgttccactggtaactag

SEQ ID NO: 191541 - DNA, 312 bp, Artificial Sequence
  derived and/or modified sequence
atgagacagagactgctgcccagcgtgaccagcctgctgctggtggccctgctgttccccggcagcagccaggccagacacgtgaaccacagcgccaccgaggccctgggcgagctgagagagagagcccccggccagggcaccaacggcttccagctgctgagacacgccgtgaagagagacctgctgccccccagaacccccccctaccaggtgcacatcagccacagagaggccagaggccccagcttcagaatctgcgtggacttcctgggccccagatgggccagaggctgcagcaccggcaactag

SEQ ID NO: 191542 - DNA, 312 bp, Artificial Sequence
  derived and/or modified sequence
atgcgccagaggttactgccaagcgtcacgtccttacttctggtcgcgctgttgtttcccggaagcagtcaagcgcggcacgtgaatcattccgcaaccgaggccctcggagaactaagggagcgtgcacccgggcagggtaccaatggcttccagttgctccgccatgccgtgaagcgagaccttctgccgccccgcacacctccctatcaagtgcacatttcgcaccgtgaagcacgcggccccagctttagaatctgcgtggacttcttgggaccccgctgggcgagaggctgcagtacagggaactag

SEQ ID NO: 191543 - DNA, 312 bp, Artificial Sequence
  derived and/or modified sequence
atgaggcagaggctgctgcccagcgtgaccagcctgctgctggtggccctgctcttccctggcagcagccaggcccggcacgtgaaccacagcgccacagaggccctgggggagctgcgggagcgggcccctggccagggcaccaacggcttccagctgctgcggcatgctgtgaagagggacctgctgccccccaggaccccaccctaccaggtgcacatcagccaccgggaggcccggggccccagcttccgcatctgtgtggacttcctgggcccccgctgggcccggggctgcagcactggaaattag

SEQ ID NO: 191544 - DNA, 312 bp, Artificial Sequence
  derived and/or modified sequence
atgcggcagcggctgctgcccagcgtgaccagcctgctgctggtggccttactctttccaggatcctcacaagcccgacacgtgaaccactccgccacagaagcactcggtgagctaagagagcgggctcctggacaaggtaccaacggcttccagctgctgcgccacgccgttaaacgcgatcttctgccaccccgcacacctccatatcaggtgcatatcagtcatagagaagcaaggggccctagctttagaatctgtgtggactttctgggaccccggtgggctaggggctgctccacaggtaattag

SEQ ID NO: 191545 - RNA, 312 nt, Artificial Sequence
  derived and/or modified sequence
augagacaaaggcuacuaccaucaguuacuucacuccugcugguagcacuccucuucccuggaucuucacaagcacggcacgugaaccacagcgcaacagaagcucuuggcgaacuucgagagagagcaccaggccaggguacaaauggcuuucaauugcugcgacacgcugucaagcgcgaccuacugcccccacgaaccccaccauaucaaguucauaucucccaucgggaagcucgggggccauccuuccgaauuuguguagacuuccuuggaccucgaugggcaagaggcuguuccaccggcaacuag

SEQ ID NO: 191546 - RNA, 312 nt, Artificial Sequence
  derived and/or modified sequence
augagacaaaggcuacuaccaucaguuacuucacuccugcugguagcacuccucuucccuggaucuucacaagcacggcacgugaaccacagcgcaacagaagcucuuggcgaacuucgagagagagcaccaggccaggguacaaauggcuuucaauugcugcgacacgcugucaagcgcgaccuacugcccccacgaaccccaccauaucaaguucauaucucccaucgggaagcucgggggccauccuuccgaauuuguguagacuuccuuggaccucgaugggcaagaggcuguuccacugguaacuag

SEQ ID NO: 191547 - protein, 632 aa, Artificial Sequence
  derived and/or modified sequence
MNRYTTIRQLGDGTYGSVLLGRSIESGELIAIKKMKRKFYSWEECMNLREVKSLKKLNHANVVKLKEVIRENDHLYFIFEYMKENLYQLIKERNKLFPESAIRNIMYQILQGLAFIHKHGFFHRDLKPENLLCMGPELVKIADFGLAREIRSKPPYTDYVSTRWYRAPEVLLRSTNYSSPIDVWAVGCIMAEVYTLRPLFPGASEIDTIFKICQVLGTPKKTDWPEGYQLSSAMNFRWPQCVPNNLKTLIPNASSEAVQLLRDMLQWDPKKRPTASQALRYPYFQVGHPLGSTTQNLQDSEKPQKGILEKAGPPPYIKPVPPAQPPAKPHTRISSRQHQASQPPLHLTYPYKAEVSRTDHPSHLQEDKPSPLLFPSLHNKHPQSKITAGLEHKNGEIKPKSRRRWGLISRSTKDSDDWADLDDLDFSPSLSRIDLKNKKRQSDDTLCRFESVLDLKPSEPVGTGNSAPTQTSYQRRDTPTLRSAAKQHYLKHSRYLPGISIRNGILSNPGKEFIPPNPWSSSGLSGKSSGTMSVISKVNSVGSSSTSSSGLTGNYVPSFLKKEIGSAMQRVHLAPIPDPSPGYSSLKAMRPHPGRPFFHTQPRSTPGLIPRPPAAQPVHGRTDWASKYASRR

SEQ ID NO: 191548 - DNA, 1899 bp, Artificial Sequence
  derived and/or modified sequence
atgaacagatatacaactattcggcaattgggagatgggacctacggatctgtcctccttgggaggtctatcgagtctggtgagctgatcgcaatcaagaagatgaagcgaaaattttatagctgggaggagtgcatgaacctgagggaggtcaagtcactgaaaaagttgaaccatgcaaacgttgtgaagctgaaggaagtgatcagagagaacgaccatctttactttatttttgagtacatgaaagagaatctgtaccagctcataaaagagcggaataaactctttcctgagtcagcaattcgcaatataatgtatcagattttgcaagggttggccttcatccataagcacggcttctttcacagggatctcaaacctgagaacttgttgtgtatgggacctgagctcgttaaaattgccgatttcgggctggctcgcgagatcaggagcaaaccaccgtacactgactatgtctcaacaagatggtatcgggcaccggaggtactactgcgcagtacgaattattccagcccaattgatgtgtgggccgtgggttgtattatggctgaggtttatactctgcgcccactgttccctggggcctccgaaatcgataccatttttaagatctgtcaagtcctggggacccccaagaagacggactggcccgaggggtaccagctcagttctgctatgaattttcgctggcctcagtgcgtgccaaataacttaaaaactctcatacctaacgcctcatccgaggcagtgcagctcttacgggatatgctacagtgggatcccaagaagagaccaacagcctctcaagcgctgcgttacccatatttccaagttggccaccctctggggtccacgacacagaacctgcaggatagcgagaaaccccaaaaagggattctggaaaaggctgggcctcccccgtacataaagcctgtgcctccggcgcagccacccgcaaagcctcacacaagaatttctagccggcagcaccaagcaagtcagcctcccctccacctcacatacccctacaaagctgaggtcagtcgcacagatcacccttcacacctacaggaagacaagcctagccccttactttttccatctcttcacaacaaacacccgcagagcaagatcacagctgggctggaacacaaaaacggggaaatcaagccaaagagcaggagacgatggggcttgatatccagaagcaccaaggactctgatgattgggccgacttggacgacctggatttttcaccctcactctcccgcatagatcttaagaacaagaagcgccagtctgacgatacgctgtgtcgtttcgagagtgttctggacctgaaacccagcgagcctgtcggtactggaaacagcgctccaacccagacgtcctatcagcgccgcgacacaccaacccttaggagtgctgccaagcagcactacctaaaacactcccgctatctgcccggcatatccatacgtaatgggatactctccaaccctggcaaagagttcattcctcctaacccttggtcttcctctgggcttagcggcaagtcaagcgggaccatgagcgtcattagcaaggtcaactccgtcgggtcgtcatctacaagctcctcaggtctgaccggaaattacgtgcctagctttcttaaaaaggagatcgggagcgctatgcaacgcgtccacctggcaccgattcccgacccgtctcccggctactcatctttgaaggctatgcggccacatccgggaaggcccttttttcatacgcagccccggtctacgcctggtttgataccccgaccacctgctgcacagccagttcatggaagaaccgattgggcaagcaagtacgcttcccgacgctag

SEQ ID NO: 191549 - DNA, 1899 bp, Artificial Sequence
  derived and/or modified sequence
atgaacagatatactaccatccggcagttgggcgatggcacctatggctcggtgctgctgggccggagtatagaaagtggcgaacttattgccatcaaaaagatgaaacggaagttttacagctgggaagagtgtatgaacctgagagaagtgaaaagcctgaagaagttgaatcacgccaatgtggtcaaactcaaggaagtcatcagagaaaatgaccacctctattttatcttcgagtacatgaaagaaaatctgtaccagctgatcaaggagagaaataagctgtttcctgagtctgccatccgcaacatcatgtaccaaatcttacaagggctggccttcatccacaagcatggctttttccatcgcgacctgaagccagaaaatttattatgcatgggacctgaactcgtgaagattgcagattttggcctggcgcgtgaaatacgctcgaagcccccgtatactgactatgtatctacgcgctggtaccgggcccccgaggtactgctgcggagtactaattactcatcccccatcgatgtatgggctgtcggctgcataatggctgaagtatacaccttaaggcctctcttccctggagcttcggaaattgacaccatctttaagatttgtcaggtcctaggcacgcccaaaaagacagattggcccgaaggctatcaactgtccagcgctatgaactttagatggcctcagtgtgtccctaacaatcttaaaaccctcatccccaacgcaagcagcgaggccgttcagttactgagagatatgctacaatgggatccaaagaagagaccaactgcgtcacaggcactgagatacccatatttccaggttggccaccctctgggttccaccacacaaaaccttcaggacagtgagaaaccccaaaagggcatcctcgagaaagctggcccacccccttacattaagccagtgcctcctgcacagccgccagccaaacctcatacccgtataagttcccgccagcatcaggccagccagccacccttgcatctaacatacccctataaagcagaggtcagccgaaccgatcatcctagccacctgcaggaagataagccgagccccttgcttttccctagcctccacaacaaacaccctcagtctaagattactgccgggcttgagcacaaaaatggtgagatcaagcccaagtccaggcgccgttggggcctgatctctagaagcacgaaggacagcgatgactgggcagacctcgacgacttagacttctcccctagtctttctagaatcgacttaaagaacaagaagaggcagagcgacgacactctgtgtcggtttgagtctgtgctcgacctgaaaccatccgaacctgtcggaaccggcaatagtgcccccacccagacgtcatatcaaagaagggacacgcccaccttaagaagcgcagctaagcagcactacttaaagcacagcaggtatctgccaggcatttcgatacgaaacgggatactgtccaatcctggaaaagaattcatccctcctaatccctggtcaagctccggcctgtcaggaaagagcagcggcacgatgagcgtcataagcaaagtgaacagcgttggcagtagctcaaccagttcctcagggttaactggcaattacgtccctagtttcctcaaaaaagagataggaagtgctatgcagagggtgcacctcgctcctatccccgacccttccccaggctattcatcactgaaggcaatgaggcctcaccctggcaggccgttcttccacacccagcctagatctactcctggtctgattcccaggcctccagctgctcagccagtacacggtcgaaccgactgggcctcgaagtacgcctcccggcggtag

SEQ ID NO: 191550 - DNA, 6116 bp, Artificial Sequence
  derived and/or modified sequence
gcgccgtgcggcccgtgcgactcgccggacctcgcgggcgtccctgtacggagccctcggccggtcctagcagggattgtccccatttccagctccggagcgggcggctgcgccccgctcgtcgaggagctgcgctcacctcaggggcgggcccccgcctgcgttcgcggcgccagcagaagactgatttttggaaatatgtatttgggagacagtcacgtcctattgaataccttgtgctggtgctgccatcgaaaaatctggttacactctggggaggactgctaccactgcagaactgaaccacttcggccgtgagatgagtgtccggcctgagcaggcacaccatgaatagatacacaacaatcaggcagctcggggatggaacctacggttccgtcctgctgggaagaagcattgagtctggggagctgatcgctattaaaaaaatgaaaagaaaattttattcctgggaggaatgcatgaaccttcgggaggttaagtctttaaagaagctcaaccatgccaatgtagtcaaattaaaagaagttatcagggaaaatgatcatctttattttatcttcgagtacatgaaggaaaatctttaccagctcattaaagagagaaataagttgtttcctgagtctgctataaggaatatcatgtatcagatattacaaggactcgcatttattcacaaacacggcttctttcatcgagacttaaagcctgagaacctcctctgcatgggaccagaacttgtgaaaattgcagactttggtttggcccgagaaatacgatcaaaacctccatatacagattatgtatctaccagatggtacagggctccagaagtactcctgaggtctaccaactacagctcccccattgacgtctgggcggtgggctgcatcatggcagaagtttacaccctcaggccactcttccctggagccagtgaaattgacacaatattcaaaatttgccaagtgctggggacaccaaaaaagactgactggcctgaaggctatcaactttcaagtgcaatgaacttccgttggccacagtgtgtacccaataacttaaagaccttgattcccaatgctagcagtgaagcagtccagctcctgagagacatgcttcagtgggatcccaagaaacgaccaacagctagtcaggcacttcgatatccttacttccaagttggacacccactaggcagcaccacacaaaaccttcaggattcagaaaaaccacagaaaggcatcctggaaaaggcaggcccacctccttatattaagccagtcccacctgcccagccaccagccaagccacacacacgaatttcttcacgacagcatcaagccagccagccccctctgcatctcacgtacccctacaaagcagaggtctccaggacagatcacccaagccatctccaggaggacaagccaagcccgttgcttttcccatccctccacaacaagcatccacagtcgaaaatcacagctggcctggagcacaaaaatggtgagataaagccaaagagtaggagaaggtggggtcttatttccaggtcaacaaaggattcagatgattgggctgacttggatgacttggatttcagtccatccctcagcaggattgacctgaaaaacaagaaaagacagagtgatgacactctctgcaggtttgagagtgttttggacctgaagccctctgagcctgtgggcacaggaaacagtgcccccacccagacgtcatatcagcggcgagacacgcccaccctgagatctgcagccaagcagcactatttgaagcactctcgatacttgcctgggatcagtataagaaatggcatactctcgaatccaggcaaggaatttattccacctaatccatggtctagttctggcttgtctggaaaatcttcagggacaatgtcagtaatcagcaaagtaaattcagttggttccagctctacaagttctagtggactgactggaaactatgtcccttcctttctgaaaaaagaaatcggttctgctatgcagagggtacacctagcacctattccagacccttcccctggttattcctccctgaaggccatgagacctcatcctgggcgaccattcttccacacccagcctagaagcactcctgggttgataccacggcctccagccgcccagccagtgcatggccggacagactgggcttccaagtacgcatctcggcgatgactgtctgccttggtgatgaatctcttcctagggagaagcaggatactttccctcagctgactggtgttctacctgcaagatgtgcagagggcataaaagcaaatcaacactttatagttattcttctgaactaagacatgtcaatattcttttttaaagtttttttttaaaatattgatttgaatgcagtaggcttttttgtataaaattattttattctaaaactgggtcccattattttcttaaacaacagcattttgtatatatggattatgttttagcattttatacagtcaactttgtaatgaactttttaaaaattaattgattttcctttggggttccagataatattttctacagattttgaaaaatgtaataatattaatgcagtattgcaacaggggtgcaatttaaggctatgtgatagagggttatttactcagtgtgtgcagatatttatgaagtggtgaaatttcaagtgtggctcactaggtacttcaggccttcttggactgttgttagaaaagtgatcctctgcttttcttagtaggtcattggtttgatttttggataccactctgctgttctaaaaggactattatattatataattcactttgttttacttttgttccccagatgaaagaactctaagtaaatacattttaaaaaatttttctgacaccctttaatgtggttgcagatctcagatgaaaccaagcttaattatactatgccattatattctaatttattccatttttgaaatcaagttgtatgtgtaccaataaaagagatttctgcttcaaaaggctctcaacatgaaggttaacacagtcaatcaaacttacattcctgccaagatgcatggccaaaaaactaagtatcaaagcagcagaaggtttttgattatagtaactgagatggaattttgtgcctagctcagttctccagatctggctaggagcagtcaatgactaatgttctgtcctagccaaattctcaggacaatttggggagcagaaagagttatggcagaggttccactcatctacaaagtcacagtcacatgccacatttgatctcctaaccctggtgtagtttctttcaagagtgagaactttatttgttgggcagaggctgttccattgagaggaatgtttacagcagtttcaaaaatgacaaagtcagtttggagacagaaaaagacaaaaggtccagtctcatccatctctatatggtacatttgcctcacttatggttgccttaaaggcaagagggaaggtcaccatcagtgaacgcaatgcaatctcaacagtgtattgattcatattctcctagggctcaaactactctctattggttccaggataatgacaaattgaaccatatgtaagtaatcttttattttttattttttttttgagacagagtctcactctgtcacccaggctggagtgcagtggcgcgatcttagctctctgcaacctctgcctcccaggttcaagcctcctgagtaactgggactacaggcgcccgccaccacgcccagctaattttttgtatttttagtagagacggggtttcactgtgttagccaggacggcctcgatctcctgacctcgtgatccaccctcctccacctcccaaagtactgggattacaggcatgagccactgcacccagccaagtgatcatttttataggttaaaatgataggtgaaatgaatatagacactttcatatggttcaacctaatgacttggtaaattattgccttggtgtattaataatatgttgcattctgaacaaataaccatggcttccaaagggccctaacctaaaatcggagagtaatttatgctttggagaatttgactcaaatatatacttgaccaagcaccatgatccctaggggcatgagaaaagcacataatggatgtggatgtgataggtggtcttttcctgttaacaagctggcagcaaagcttcagaaaatatatatgcaagcacaacttgaagctgaattcatttctgtattatattctcaactcgttatctaaagcatcagaacatgtgttttcagagatgagtcctttactataaggttaatatttattttcattttctgtattatatatgaaaagtaaattaatgtgaaacctggcccagcttgctggaaagcaggttttaaattgtaaatattccttagaggagcaaatggattgtttaataccatagtctcagtaatctagcttatataaggtcattacattttttaactgaaaaacctagttacctgattattgcacattataaaattgtttttctaatactttatagggcccaacttcagaaaatacttcgcttttttctttttatgctttcgtttgtttaccagcaagcaacttccctggggaagccaaacacatattcataaaaaaaatcaagtagctgatgtgcagttgagaaaactagaggactgaaaaaacaaattttaactagcaaatgctgtgaattactcttcctccccttctctgaaatgggtaaaggacaaattgtgtaaaaaaacctatgcactatagaagggaatagtaaccatttcttttgtctctctgtttctgttctgactgagaacctgcagccatttcttgttacatgaaaacaaaatgctacttgttacctctattttttgttactatacaattatgaaatgtaatgtaagacaccaacagaaatgatatacctgtaactgtacctatcaggactatacctcatttacagtcagaaagcttactgggatgtcaggaaatgatacagggttggttctcatttcgtgccgaaatgagacagaaattcagtgacgaaggtgcgttgtaggggtattgatgtgccccaggtagtgccagcagagtagggaaaactgcatttgcataaaaactactcttgacatgattgttcattttacaaaaaaattccattaattaccaagccctcacccagcccatgtgtgataggatttatgtaggaagaaacttgattttcaaataattttttaaatgtatctcttgcctaaaggactatatacatctaataaagtaacactgtgtcatcttctggagttatcaaaaattgtatacaatcaagacaacacaagaattattttatttttgagtgcaaatacaggtactgttggagttgatgggcaccatgctttctcatgaagtagcatttccctaccatcaagccattgttttgtgccattcaggagaggaaaaaaaggaatttatgctgtacatttcagttcagtgtatgaccaaaagcaatatgtttataagaagatgtttgacatactaattattttatatcatttaaaccatactgtagcaacataatatatggagctaatttgtagaattatttttacgatttccaaacaaatgtactgtactgttatataatttattgtgaggaccttctcatggaagccattaggaaaacaaactagaggtaaatatcacattaatctgtattatcaatttctcatagacactgtgctaatgtgaattttaaatgacctgcatcaagtcttctgatctcagataactcagtacagatagcaattagtcagctgatttgattacaatggagtaaccgacaatatatttatttataaagcacatattcataataacgagaagaattcagaaaaccacttaagcaagacccttctgaaataaaaaatgttgctttttaaatagtttgtcctaaggtgtttaaaacatgtcaaccttatgtaaggaaaaatttcctggtccaaataaagttgaagtttaagaaaaattgatttgagtgttctgtttttgt

SEQ ID NO: 191551 - DNA, 6227 bp, Artificial Sequence
  derived and/or modified sequence
ggaaaacggccgggttcctgctgcactaccatgcgccgtgcggcccgtgcgactcgccggacctcgcgggcgtccctgtacggagccctcggccggtcctagcagggattgtccccatttccagctccggagcgggcggctgcgccccgctcgtcgaggagctgcgctcacctcaggggcgggcccccgcctgcgttcgcggcgccaagaagagtattcctttccacttacaactaaataagacctgcttttgctggagctgtgctaggctgagggaattccacactgaattttacaagcgggatggatttctctaaggcagaagactgatttttggaaatatgtatttgggagacagtcacgtcctattgaataccttgtgctggtgctgccatcgaaaaatctggttacactctggggaggactgctaccactgcagaactgaaccacttcggccgtgagatgagtgtccggcctgagcaggcacaccatgaatagatacacaacaatcaggcagctcggggatggaacctacggttccgtcctgctgggaagaagcattgagtctggggagctgatcgctattaaaaaaatgaaaagaaaattttattcctgggaggaatgcatgaaccttcgggaggttaagtctttaaagaagctcaaccatgccaatgtagtcaaattaaaagaagttatcagggaaaatgatcatctttattttatcttcgagtacatgaaggaaaatctttaccagctcattaaagagagaaataagttgtttcctgagtctgctataaggaatatcatgtatcagatattacaaggactcgcatttattcacaaacacggcttctttcatcgagacttaaagcctgagaacctcctctgcatgggaccagaacttgtgaaaattgcagactttggtttggcccgagaaatacgatcaaaacctccatatacagattatgtatctaccagatggtacagggctccagaagtactcctgaggtctaccaactacagctcccccattgacgtctgggcggtgggctgcatcatggcagaagtttacaccctcaggccactcttccctggagccagtgaaattgacacaatattcaaaatttgccaagtgctggggacaccaaaaaagactgactggcctgaaggctatcaactttcaagtgcaatgaacttccgttggccacagtgtgtacccaataacttaaagaccttgattcccaatgctagcagtgaagcagtccagctcctgagagacatgcttcagtgggatcccaagaaacgaccaacagctagtcaggcacttcgatatccttacttccaagttggacacccactaggcagcaccacacaaaaccttcaggattcagaaaaaccacagaaaggcatcctggaaaaggcaggcccacctccttatattaagccagtcccacctgcccagccaccagccaagccacacacacgaatttcttcacgacagcatcaagccagccagccccctctgcatctcacgtacccctacaaagcagaggtctccaggacagatcacccaagccatctccaggaggacaagccaagcccgttgcttttcccatccctccacaacaagcatccacagtcgaaaatcacagctggcctggagcacaaaaatggtgagataaagccaaagagtaggagaaggtggggtcttatttccaggtcaacaaaggattcagatgattgggctgacttggatgacttggatttcagtccatccctcagcaggattgacctgaaaaacaagaaaagacagagtgatgacactctctgcaggtttgagagtgttttggacctgaagccctctgagcctgtgggcacaggaaacagtgcccccacccagacgtcatatcagcggcgagacacgcccaccctgagatctgcagccaagcagcactatttgaagcactctcgatacttgcctgggatcagtataagaaatggcatactctcgaatccaggcaaggaatttattccacctaatccatggtctagttctggcttgtctggaaaatcttcagggacaatgtcagtaatcagcaaagtaaattcagttggttccagctctacaagttctagtggactgactggaaactatgtcccttcctttctgaaaaaagaaatcggttctgctatgcagagggtacacctagcacctattccagacccttcccctggttattcctccctgaaggccatgagacctcatcctgggcgaccattcttccacacccagcctagaagcactcctgggttgataccacggcctccagccgcccagccagtgcatggccggacagactgggcttccaagtacgcatctcggcgatgactgtctgccttggtgatgaatctcttcctagggagaagcaggatactttccctcagctgactggtgttctacctgcaagatgtgcagagggcataaaagcaaatcaacactttatagttattcttctgaactaagacatgtcaatattcttttttaaagtttttttttaaaatattgatttgaatgcagtaggcttttttgtataaaattattttattctaaaactgggtcccattattttcttaaacaacagcattttgtatatatggattatgttttagcattttatacagtcaactttgtaatgaactttttaaaaattaattgattttcctttggggttccagataatattttctacagattttgaaaaatgtaataatattaatgcagtattgcaacaggggtgcaatttaaggctatgtgatagagggttatttactcagtgtgtgcagatatttatgaagtggtgaaatttcaagtgtggctcactaggtacttcaggccttcttggactgttgttagaaaagtgatcctctgcttttcttagtaggtcattggtttgatttttggataccactctgctgttctaaaaggactattatattatataattcactttgttttacttttgttccccagatgaaagaactctaagtaaatacattttaaaaaatttttctgacaccctttaatgtggttgcagatctcagatgaaaccaagcttaattatactatgccattatattctaatttattccatttttgaaatcaagttgtatgtgtaccaataaaagagatttctgcttcaaaaggctctcaacatgaaggttaacacagtcaatcaaacttacattcctgccaagatgcatggccaaaaaactaagtatcaaagcagcagaaggtttttgattatagtaactgagatggaattttgtgcctagctcagttctccagatctggctaggagcagtcaatgactaatgttctgtcctagccaaattctcaggacaatttggggagcagaaagagttatggcagaggttccactcatctacaaagtcacagtcacatgccacatttgatctcctaaccctggtgtagtttctttcaagagtgagaactttatttgttgggcagaggctgttccattgagaggaatgtttacagcagtttcaaaaatgacaaagtcagtttggagacagaaaaagacaaaaggtccagtctcatccatctctatatggtacatttgcctcacttatggttgccttaaaggcaagagggaaggtcaccatcagtgaacgcaatgcaatctcaacagtgtattgattcatattctcctagggctcaaactactctctattggttccaggataatgacaaattgaaccatatgtaagtaatcttttattttttattttttttttgagacagagtctcactctgtcacccaggctggagtgcagtggcgcgatcttagctctctgcaacctctgcctcccaggttcaagcctcctgagtaactgggactacaggcgcccgccaccacgcccagctaattttttgtatttttagtagagacggggtttcactgtgttagccaggacggcctcgatctcctgacctcgtgatccaccctcctccacctcccaaagtactgggattacaggcatgagccactgcacccagccaagtgatcatttttataggttaaaatgataggtgaaatgaatatagacactttcatatggttcaacctaatgacttggtaaattattgccttggtgtattaataatatgttgcattctgaacaaataaccatggcttccaaagggccctaacctaaaatcggagagtaatttatgctttggagaatttgactcaaatatatacttgaccaagcaccatgatccctaggggcatgagaaaagcacataatggatgtggatgtgataggtggtcttttcctgttaacaagctggcagcaaagcttcagaaaatatatatgcaagcacaacttgaagctgaattcatttctgtattatattctcaactcgttatctaaagcatcagaacatgtgttttcagagatgagtcctttactataaggttaatatttattttcattttctgtattatatatgaaaagtaaattaatgtgaaacctggcccagcttgctggaaagcaggttttaaattgtaaatattccttagaggagcaaatggattgtttaataccatagtctcagtaatctagcttatataaggtcattacattttttaactgaaaaacctagttacctgattattgcacattataaaattgtttttctaatactttatagggcccaacttcagaaaatacttcgcttttttctttttatgctttcgtttgtttaccagcaagcaacttccctggggaagccaaacacatattcataaaaaaaatcaagtagctgatgtgcagttgagaaaactagaggactgaaaaaacaaattttaactagcaaatgctgtgaattactcttcctccccttctctgaaatgggtaaaggacaaattgtgtaaaaaaacctatgcactatagaagggaatagtaaccatttcttttgtctctctgtttctgttctgactgagaacctgcagccatttcttgttacatgaaaacaaaatgctacttgttacctctattttttgttactatacaattatgaaatgtaatgtaagacaccaacagaaatgatatacctgtaactgtacctatcaggactatacctcatttacagtcagaaagcttactgggatgtcaggaaatgatacagggttggttctcatttcgtgccgaaatgagacagaaattcagtgacgaaggtgcgttgtaggggtattgatgtgccccaggtagtgccagcagagtagggaaaactgcatttgcataaaaactactcttgacatgattgttcattttacaaaaaaattccattaattaccaagccctcacccagcccatgtgtgataggatttatgtaggaagaaacttgattttcaaataattttttaaatgtatctcttgcctaaaggactatatacatctaataaagtaacactgtgtcatcttctggagttatcaaaaattgtatacaatcaagacaacacaagaattattttatttttgagtgcaaatacaggtactgttggagttgatgggcaccatgctttctcatgaagtagcatttccctaccatcaagccattgttttgtgccattcaggagaggaaaaaaaggaatttatgctgtacatttcagttcagtgtatgaccaaaagcaatatgtttataagaagatgtttgacatactaattattttatatcatttaaaccatactgtagcaacataatatatggagctaatttgtagaattatttttacgatttccaaacaaatgtactgtactgttatataatttattgtgaggaccttctcatggaagccattaggaaaacaaactagaggtaaatatcacattaatctgtattatcaatttctcatagacactgtgctaatgtgaattttaaatgacctgcatcaagtcttctgatctcagataactcagtacagatagcaattagtcagctgatttgattacaatggagtaaccgacaatatatttatttataaagcacatattcataataacgagaagaattcagaaaaccacttaagcaagacccttctgaaataaaaaatgttgctttttaaatagtttgtcctaaggtgtttaaaacatgtcaaccttatgtaaggaaaaatttcctggtccaaataaagttgaagttt

SEQ ID NO: 191552 - DNA, 1899 bp, Artificial Sequence
  derived and/or modified sequence
atgaaccgctacaccaccatccggcagctgggagatggcacctacggctctgtgctgctgggccgcagcattgagagcggggagctgattgccatcaagaagatgaagaggaagttctacagctgggaggagtgcatgaacctgcgggaggtgaagagcctgaagaagctgaaccacgccaacgtggtgaagctgaaggaggtgatcagagaaaatgaccacctgtacttcatctttgagtacatgaaggagaacctgtaccagctgatcaaggagaggaacaagctgtttcctgagagcgccatccggaacatcatgtaccagatcctgcagggcctggccttcatccacaagcacggcttcttccaccgggacctgaagccagagaacctgctgtgcatgggccctgagctggtgaagattgctgactttggcctggcccgggagatccgcagcaagccaccctacacagattatgtgtccacccgctggtaccgggcccctgaggtgctgctgcggagcaccaactacagcagccccattgatgtgtgggccgtgggctgcatcatggccgaggtgtacaccctgcggcccctcttccctggggccagcgagattgacaccatcttcaagatctgccaggtgctgggcacccccaagaagacagactggccagagggctaccagctgagcagcgccatgaacttccgctggccccagtgtgtgcccaacaacctgaagaccctcatccccaatgccagcagcgaggccgtgcagctgctgcgggacatgctgcagtgggaccccaagaagaggcccacagccagccaggccctgcgctacccctacttccaggtgggccaccccctgggcagcaccacccagaacctgcaggacagcgagaagccccagaagggcatcctggagaaggccggccccccaccctacatcaagcctgtgcccccagcccagcccccagccaagccccacacccgcatcagcagccggcagcaccaggccagccagccccccctgcacctgacctacccctacaaggccgaggtgtccaggacagaccaccccagccacctgcaggaggacaagcccagccccctgctcttccccagcctgcacaacaagcacccccagagcaagatcacagctggcctggagcacaagaatggagagatcaagcccaagagcagaagacgctggggcctcatcagccgcagcaccaaggacagtgatgactgggccgacctggatgacctggacttcagccccagcctgagcagaattgacctgaagaacaagaagaggcagagtgatgacaccctgtgccgctttgaatctgtgctggacctgaagcccagcgagcctgtgggcactggaaacagcgcccccacccagaccagctaccagaggcgggacacccccaccctgcggtctgctgccaagcagcactacctgaagcacagccgctacctgcccggcatcagcatcagaaatggcatcctgagcaaccctgggaaggagttcatcccccccaacccctggagcagcagcggcctgagcggcaagagcagcggcaccatgtctgtcatcagcaaggtgaacagcgtgggcagcagcagcaccagcagcagcggcctgaccggcaactacgtgcccagcttcctgaagaaggagatcggcagcgccatgcagagggtgcacctggcccccatcccagaccccagccctggctacagcagcctgaaggccatgaggccccaccctggccggcccttcttccacacccagcccaggagcaccccaggcctcatcccccggcccccagctgcccagcctgtgcacggccgcacagactgggccagcaaatatgccagcagaagatag

SEQ ID NO: 191553 - DNA, 1899 bp, Artificial Sequence
  derived and/or modified sequence
atgaaccggtacaccaccatccggcagctgggcgacggcacctacggatccgtgcttctggggcgatccattgagagtggggaactgatcgcgataaagaaaatgaagcgaaagttttactcgtgggaggagtgtatgaacttgagagaggtgaagagccttaagaagctaaaccacgccaacgtcgtgaaactgaaggaggtaattcgggagaacgatcatctctatttcatttttgaatacatgaaggaaaatctgtaccagctgataaaagagcgaaacaagctatttcctgaatctgccatccggaacatcatgtaccagatcctacagggactcgctttcattcacaaacacggttttttccacagagacctgaagcctgaaaatttgctctgtatgggaccagaactggtgaagatagcagacttcggccttgctcgcgagatccgttcaaaaccaccctataccgactacgtgtccactcgatggtacagggccccagaagttttactccggtcaaccaattacagcagccccattgacgtttgggcagtcggctgcattatggccgaggtctatacactgcgcccactgttcccaggcgcctcggaaattgacaccatctttaagatctgtcaagtactgggcaccccgaagaaaactgattggcctgagggctaccagctgagttcagccatgaactttagatggcctcagtgcgttcctaacaatctgaagactttgattccaaacgccagctcggaggcggtgcagctgctacgcgacatgctgcagtgggatcccaagaagcgtccaacagcctctcaggcactgcggtatccttactttcaggttggccaccctctcggttcgaccacacaaaacctccaggattctgaaaagccgcagaagggcattctggagaaggctgggcctccgccttacattaaaccagtccctcctgcgcagcccccagcaaagccccatacccgcatcagcagtaggcagcatcaagcttctcagccccctctgcacttaacttatccctacaaggctgaggtgagcagaactgatcacccctctcatctccaggaggacaagccatcccctctgctattcccctctttgcataataagcatccccaatcgaagattacagccggtctcgagcataaaaacggggagattaagccgaaatccaggcgtcgatgggggctgatctccagatcgactaaggatagtgacgattgggcggatcttgatgacctggactttagcccgtccctgtcacgcattgatttgaagaataaaaaacgccagtctgatgatacactctgccgatttgaaagcgtgctcgatctcaagccctccgagccagtcggaacaggcaacagcgcaccaactcagacatcttatcagagaagagacacaccaactcttcgcagcgcagccaagcagcattacttgaagcacagtcgttatctccccggtataagcattaggaatggtatcctgtctaaccccgggaaagaatttataccacccaatccctggagctcctctggattatcaggaaagtcgtctgggacaatgagcgtaattagtaaggtgaatagcgtggggagcagtagcacatcaagctctggactgaccgggaattatgtacctagcttcctgaagaaagaaatagggagcgcgatgcagagggtgcacttggctcccatacccgacccatcacctgggtattcatcgctgaaggccatgcgcccgcacccaggccgccccttcttccatactcagccccgctccacacctggactgattcctcggccacccgcggctcagcccgtacatgggaggacagactgggcaagcaaatacgcctctcgcaggtag

SEQ ID NO: 191554 - DNA, 1899 bp, Artificial Sequence
  derived and/or modified sequence
atgaaccggtacaccaccatccggcagctgggcgacggcacctacggatctgtgctgctggggcggagcatcgagtccggagagttaatcgccataaagaaaatgaaaagaaagttttattcctgggaggagtgtatgaatctaagggaagtgaaatccctgaagaaattaaatcatgcaaatgtggtaaagctaaaggaagttatcagggagaatgaccatctttatttcattttcgaatacatgaaagaaaacttgtatcagctgataaaggaacgcaataaactgttccctgaaagcgcaatacgaaatattatgtaccagatactgcagggactagctttcatccacaaacatgggttcttccaccgggatctgaaaccagagaatctcctctgtatgggcccagagcttgtgaaaatcgctgacttcggccttgcccgagaaatccggagtaaaccaccatacacagactacgtgtcgacccggtggtaccgtgcgcctgaagtactcctcagaagcaccaactattcatcgcccatcgacgtctgggccgtcggctgtatcatggcagaggtgtacactctgcgccccttgtttcccggagctagcgaaatcgatacaattttcaagatctgtcaggttctgggcacacccaagaagaccgattggcccgagggctaccagttgtcttcagccatgaacttccgctggccccagtgcgttcctaataatctcaagacattaattccaaatgcttcctctgaggcagttcagctgttgcgggacatgctgcaatgggatccgaaaaagcggccaaccgccagccaggccctccgatatccgtatttccaggtggggcaccctctgggttctacgactcagaatctgcaggatagtgagaagccacagaaaggaattctagagaaagctggtcctcccccgtacatcaaacctgtgccacccgcccagcccccagccaagcctcataccagaatttcctcgcgtcaacaccaggcaagtcaaccccccctccacttgacttatccttacaaagccgaagtcagccggacggatcatccaagccacctgcaggaggataaaccgtccccacttctttttccgtcacttcacaacaaacatccacagtcaaaaattaccgccgggctcgagcataagaacggcgagataaaacctaaatcacgcagaaggtggggcctcataagccgctcaacaaaagatagcgacgactgggccgaccttgatgatcttgacttttcaccgtctctgagcagaattgatcttaagaataagaaaaggcagagtgatgacacattatgtcggtttgagagcgtgctggaccttaagccgtcagagccagtgggaacgggtaactctgcaccaactcagacttcctatcagcgacgggacacaccaaccctgaggtccgccgctaagcagcattacctgaaacacagccgctatctgcccgggatttctattaggaatggtatcctgtcaaaccccggcaaggaatttattcctccaaacccatggtcctcaagtgggctctccggcaaatcctctggcaccatgagcgttatctccaaagttaactcagtcggatcaagctctacttcaagtagcgggctaacaggcaactacgtcccttctttccttaagaaagagattggaagcgccatgcagagggttcaccttgccccaatcccagacccttctcctggatatagctcactgaaagcgatgcgcccgcaccccggcaggcctttctttcatacccagcctcggagtacccccggcctgatacctcggccacctgctgcccaacccgtccacggccgcactgactgggccagtaagtatgcctctcggcggtag

SEQ ID NO: 191555 - DNA, 1899 bp, Artificial Sequence
  derived and/or modified sequence
atgaatcgatacactactataaggcaactcggcgacggaacctatggatcagtccttttggggagatctatcgagagcggtgagcttatcgctattaaaaagatgaagcgtaagttctatagttgggaagagtgcatgaacctacgcgaagtcaagagcctgaagaaactcaatcacgccaatgtggtgaagctgaaagaagtaattcgtgaaaatgaccacctctactttatattcgagtatatgaaggaaaatctttaccagctgattaaagaaaggaacaagttgtttcccgagtccgctattcggaatattatgtatcaaatcctccaggggttggcattcatccacaagcacggcttttttcaccgtgatctcaagcccgaaaatttactctgcatgggaccagaactcgtaaagattgctgacttcggtctggcacgtgagatcagaagtaagccaccctacactgactacgtttcaacacgatggtaccgtgctcctgaagtgctgctcaggtcaactaactacagctccccaatcgatgtgtgggcagtgggatgtatcatggcggaagtatacaccctgcgtcccctgttccctggcgcatccgagatcgacaccatctttaaaatttgtcaggtgctgggtacgccgaagaagacagactggcccgagggataccagctttcatctgccatgaatttccgctggccccagtgcgtgcctaataatctaaaaacactgattcccaacgcatcttccgaggctgtgcagttgttgcgtgacatgcttcagtgggaccccaagaaaaggccaactgcttcacaggccttgcgctatccgtacttccaggtgggccatcctcttgggtccacaacccagaacctccaggactccgaaaaaccacaaaaaggcatcctcgaaaaagctggtcctccgccttatattaagccggtgccccctgctcagccgccagcaaagccccacactcgcatcagctctcgtcagcatcaagcgtcccagcccccactgcatcttacctatccttataaggcggaagttagccgcacggatcatccatcccacctgcaggaggataaaccaagtccactgctgttcccctctctacataataagcatcctcagtccaagataacagccggactggaacataagaatggcgaaattaagccaaaaagcaggcggaggtgggggctcatcagtcgcagcaccaaggactccgacgactgggccgaccttgacgatcttgacttttctccctccctatctaggatcgacctgaagaacaagaagcgccagtctgacgacaccctgtgccgtttcgaatctgtgctggatctgaagccctctgaaccagtggggaccggaaattcagctcccacacagaccagctaccagcgtcgggatacccctacattgagatctgcagcgaaacaacactatctgaaacacagtcgttacttgcctggaatcagtattaggaatggcattctgagcaaccctggaaaagaattcattccgccaaacccttggtccagttccgggttgtctggcaaatccagcggaactatgagtgtgatctccaaagtgaattctgtcgggagtagttctacctccagttcgggcttaaccggcaactatgtccccagcttcctgaagaaagagattgggtcggccatgcaaagggtccatttagccccaatcccagacccctctcctggttactcatccttgaaggcaatgcgccctcacccaggccgtcctttttttcacacacagcccaggtcaaccccagggctgatcccaagaccgccagcagcccaacccgtgcacggaagaaccgactgggccagtaagtatgcatcacgtaggtag

SEQ ID NO: 191556 - DNA, 1899 bp, Artificial Sequence
  derived and/or modified sequence
atgaatagatacacaactatccggcagctgggagatgggacatacgggagcgtgctgctcggccgttccattgagtcaggtgaattaattgccataaagaagatgaagcggaagttttacagctgggaagagtgtatgaaccttcgtgaagtgaagtcactgaagaagctgaaccacgcaaatgtggttaagctgaaagaggtaatcagagaaaacgaccatctgtacttcatcttcgaatacatgaaggagaatctgtaccagttgataaaggagcgcaacaagctgtttcctgagtcagctatcagaaacattatgtaccagattttgcagggattagctttcattcacaagcatggattcttccacagggatctgaaacccgagaatctcttatgcatgggcccagaattggtgaagatcgccgacttcggcctggctcgcgagatccggtctaagcccccttacactgattatgtttctactaggtggtatagggccccagaagtgctcctgagaagtacgaactacagcagtcctatcgatgtgtgggcagtggggtgcatcatggcggaggtttatacattgaggcctttattccctggggcatccgagattgataccattttcaaaatttgccaggtgctgggtacacctaagaaaaccgactggccggaaggttatcagctcagttcagcaatgaactttcggtggccacagtgtgtgcccaataacctgaaaacgctgatccccaacgcctccagcgaggctgtacagcttctgagagatatgctccagtgggatccaaagaaaagacctaccgcctcccaggctctaagatacccatacttccaagtgggacacccgctgggatctacgacacaaaatctgcaggactctgaaaagccgcagaagggaatcttggagaaggcaggtccacctccttacattaaaccggtcccaccagctcaacctcctgccaagccccatacgaggatctcatctcggcagcatcaggccagtcagcccccactgcacttaacttacccctataaggccgaagtcagccggaccgatcacccctcgcacctacaggaggacaagcctagccccctgctgttccctagcctgcataataaacatcctcagtccaagattacggctggccttgaacataaaaacggagaaataaaacctaagagcaggcggaggtggggcctcatctcccgcagcacgaaagactccgacgattgggcggatctggatgacctggactttagtccctcattgtccagaatcgacctgaagaacaaaaaacgtcagagcgacgacaccttgtgtcggttcgaaagcgtgttagatttaaagccgagtgaaccagttggtacaggcaacagtgcgcctacccagacttcctaccagcgcagagatacacctaccctcaggagcgcagccaaacagcattatctcaagcacagcagatatcttccgggaatctctatccgaaacggcatcctgtcgaaccctggcaaggagttcatccccccaaatccatggtcaagtagtggtctgtctggtaagtctagcggtacaatgtctgtgattagcaaagtaaacagcgtgggttctagttctacgtcctcatcggggctaactggcaattatgtccctagcttcctgaagaaagagatcggctcggccatgcagcgcgtacatctagcgccaatccccgacccgtccccaggctactcaagcctcaaggctatgcgtccgcacccaggacgaccattttttcatactcagccacgctccacaccagggctgattcctcgaccccctgccgctcagcccgtgcacggtcggacggactgggcaagcaagtacgcgagtagaagatag

SEQ ID NO: 191557 - DNA, 1899 bp, Artificial Sequence
  derived and/or modified sequence
atgaacagatacaccaccatcagacagctgggcgacggcacctacggcagcgtgctgctgggcagaagcatcgagagcggcgagctgatcgccatcaagaagatgaagagaaagttctacagctgggaggagtgcatgaacctgagagaggtgaagagcctgaagaagctgaaccacgccaacgtggtgaagctgaaggaggtgatcagagagaacgaccacctgtacttcatcttcgagtacatgaaggagaacctgtaccagctgatcaaggagagaaacaagctgttccccgagagcgccatcagaaacatcatgtaccagatcctgcagggcctggccttcatccacaagcacggcttcttccacagagacctgaagcccgagaacctgctgtgcatgggccccgagctggtgaagatcgccgacttcggcctggccagagagatcagaagcaagcccccctacaccgactacgtgagcaccagatggtacagagcccccgaggtgctgctgagaagcaccaactacagcagccccatcgacgtgtgggccgtgggctgcatcatggccgaggtgtacaccctgagacccctgttccccggcgccagcgagatcgacaccatcttcaagatctgccaggtgctgggcacccccaagaagaccgactggcccgagggctaccagctgagcagcgccatgaacttcagatggccccagtgcgtgcccaacaacctgaagaccctgatccccaacgccagcagcgaggccgtgcagctgctgagagacatgctgcagtgggaccccaagaagagacccaccgccagccaggccctgagatacccctacttccaggtgggccaccccctgggcagcaccacccagaacctgcaggacagcgagaagccccagaagggcatcctggagaaggccggcccccccccctacatcaagcccgtgccccccgcccagccccccgccaagccccacaccagaatcagcagcagacagcaccaggccagccagccccccctgcacctgacctacccctacaaggccgaggtgagcagaaccgaccaccccagccacctgcaggaggacaagcccagccccctgctgttccccagcctgcacaacaagcacccccagagcaagatcaccgccggcctggagcacaagaacggcgagatcaagcccaagagcagaagaagatggggcctgatcagcagaagcaccaaggacagcgacgactgggccgacctggacgacctggacttcagccccagcctgagcagaatcgacctgaagaacaagaagagacagagcgacgacaccctgtgcagattcgagagcgtgctggacctgaagcccagcgagcccgtgggcaccggcaacagcgcccccacccagaccagctaccagagaagagacacccccaccctgagaagcgccgccaagcagcactacctgaagcacagcagatacctgcccggcatcagcatcagaaacggcatcctgagcaaccccggcaaggagttcatcccccccaacccctggagcagcagcggcctgagcggcaagagcagcggcaccatgagcgtgatcagcaaggtgaacagcgtgggcagcagcagcaccagcagcagcggcctgaccggcaactacgtgcccagcttcctgaagaaggagatcggcagcgccatgcagagagtgcacctggcccccatccccgaccccagccccggctacagcagcctgaaggccatgagaccccaccccggcagacccttcttccacacccagcccagaagcacccccggcctgatccccagaccccccgccgcccagcccgtgcacggcagaaccgactgggccagcaagtacgccagcagaagatag

SEQ ID NO: 191558 - protein, 977 aa, Artificial Sequence
  derived and/or modified sequence
MASSHSSSPVPQGSSSDVFFKIEVDPSKHIRPVPSLPDVCPKEPTGDSHSLYVAPSLVTDQHRWTVYHSKVNLPAALNDPRLAKRESDFFTKTWGLDFVDTEVIPSFYLPQISKEHFTVYQQEISQREKIHERCKNICPPKDTFERTLLHTHDKSRTDLEQVPKIFMKPDFALDDSLTFNSVLPWSHFNTAGGKGNRDAASSKLLQEKLSHYLDIVEVNIAHQISLRSEAFFHAMTSQHELQDYLRKTSQAVKMLRDKIAQIDKVMCEGSLHILRLALTRNNCVKVYNKLKLMATVHQTQPTVQVLLSTSEFVGALDLIATTQEVLQQELQGIHSFRHLGSQLCELEKLIDKMMIAEFSTYSHSDLNRPLEDDCQVLEEERLISLVFGLLKQRKLNFLEIYGEKMVITAKNIIKQCVINKVSQTEEIDTDVVVKLADQMRMLNFPQWFDLLKDIFSKFTIFLQRVKATLNIIHSVVLSVLDKNQRTRELEEISQQKNAAKDNSLDTEVAYLIHEGMFISDAFGEGELTPIAVDTTSQRNASPNSEPCSSDSVSEPECTTDSSSSKEHTSSSAIPGGVDIMVSEDMKLTDSELGKLANNIQELLYSASDICHDRAVKFLMSRAKDGFLEKLNSMEFITLSRLMETFILDTEQICGRKSTSLLGALQSQAIKFVNRFHEERKTKLSLLLDNERWKQADVPAEFQDLVDSLSDGKIALPEKKSGATEERKPAEVLIVEGQQYAVVGTVLLLIRIILEYCQCVDNIPSVTTDMLTRLSDLLKYFNSRSCQLVLGAGALQVVGLKTITTKNLALSSRCLQLIVHYIPVIRAHFEARLPPKQYSMLRHFDHITKDYHDHIAEISAKLVAIMDSLFDKLLSKYEVKAPVPSACFRNICKQMTKMHEAIFDLLPEEQTQMLFLRINASYKLHLKKQLSHLNVINDGGPQNGLVTADVAFYTGNLQALKGLKDLDLNMAEIWEQKR

SEQ ID NO: 191559 - protein, 966 aa, Artificial Sequence
  derived and/or modified sequence
MASSHSSSPVPQGSSSDVFFKIEVDPSKHIRPVPSLPDVCPKEPTGDSHSLYVAPSLVTDQHRWTVYHSKVNLPAALNDPRLAKRESDFFTKTWGLDFVDTEVIPSFYLPQISKEHFTVYQQEISQREKIHERCKNICPPKDTFERTLLHTHDKSRTDLEQVPKIFMKPDFALDDSLTFNSVLPWSHFNTAGGKGNRDAASSKLLQEKLSHYLDIVEVNIAHQISLRSEAFFHAMTSQHELQDYLRKTSQAVKMLRDKIAQIDKVMCEGSLHILRLALTRNNCVKVYNKLKLMATVHQTQPTVQVLLSTSEFVGALDLIATTQEVLQQELQGIHSFRHLGSQLCELEKLIDKMMIAEFSTYSHSDLNRPLEDDCQVLEEERLISLVFGLLKQRKLNFLEIYGEKMVITAKNIIKQCVINKVSQTEEIDTDVVVKLADQMRMLNFPQWFDLLKDIFSKFTIFLQRVKATLNIIHSVVLSVLDKNQRTRELEEISQQKNAAKDNSLDTEVAYLIHEGMFISDAFGEGELTPIAVDTTSQRNASPNSEPCSSDSVSEPECTTDSSSSKEHTSSSAIPGGVDIMVSEDMKLTDSELGKLANNIQELLYSASDICHDRAVKFLMSRAKDGFLEKLNSMEFITLSRLMETFILDTEQICGRKSTSLLGALQSQAIKFVNRFHEERKTKLSLLLDNERWKQADVPAEFQDLVDSLSDGKIALPEKKSGATEERKPAEVLIVEGQQYAVVGTVLLLIRIILEYCQCVDNIPSVTTDMLTRLSDLLKYFNSRSCQLVLGAGALQVVGLKTITTKNLALSSRCLQLIVHYIPVIRAHFEARLPPKQYSMLRHFDHITKDYHDHIAEISAKLVAIMDSLFDKLLSKYEVKAPVPSACFRNICKQMTKMHEAIFDLLPEEQTQMLFLRINASYKLHLKKQLSHLNVINDGGPQNGLVTADVAFYTGNLQALKGLKIWM

SEQ ID NO: 191560 - DNA, 2934 bp, Artificial Sequence
  derived and/or modified sequence
atggccagcagccacagcagcagccccgtgccccagggcagcagcagcgacgtgttcttcaagatcgaggtggaccccagcaagcacatcagacccgtgcccagcctgcccgacgtgtgccccaaggagcccaccggcgacagccacagcctgtacgtggcccccagcctggtgaccgaccagcacagatggaccgtgtaccacagcaaggtgaacctgcccgccgccctgaacgaccccagactggccaagagagagagcgacttcttcaccaagacctggggcctggacttcgtggacaccgaggtgatccccagcttctacctgccccagatcagcaaggagcacttcaccgtgtaccagcaggagatcagccagagagagaagatccacgagagatgcaagaacatctgcccccccaaggacaccttcgagagaaccctgctgcacacccacgacaagagcagaaccgacctggagcaggtgcccaagatcttcatgaagcccgacttcgccctggacgacagcctgaccttcaacagcgtgctgccctggagccacttcaacaccgccggcggcaagggcaacagagacgccgccagcagcaagctgctgcaggagaagctgagccactacctggacatcgtggaggtgaacatcgcccaccagatcagcctgagaagcgaggccttcttccacgccatgaccagccagcacgagctgcaggactacctgagaaagaccagccaggccgtgaagatgctgagagacaagatcgcccagatcgacaaggtgatgtgcgagggcagcctgcacatcctgagactggccctgaccagaaacaactgcgtgaaggtgtacaacaagctgaagctgatggccaccgtgcaccagacccagcccaccgtgcaggtgctgctgagcaccagcgagttcgtgggcgccctggacctgatcgccaccacccaggaggtgctgcagcaggagctgcagggcatccacagcttcagacacctgggcagccagctgtgcgagctggagaagctgatcgacaagatgatgatcgccgagttcagcacctacagccacagcgacctgaacagacccctggaggacgactgccaggtgctggaggaggagagactgatcagcctggtgttcggcctgctgaagcagagaaagctgaacttcctggagatctacggcgagaagatggtgatcaccgccaagaacatcatcaagcagtgcgtgatcaacaaggtgagccagaccgaggagatcgacaccgacgtggtggtgaagctggccgaccagatgagaatgctgaacttcccccagtggttcgacctgctgaaggacatcttcagcaagttcaccatcttcctgcagagagtgaaggccaccctgaacatcatccacagcgtggtgctgagcgtgctggacaagaaccagagaaccagagagctggaggagatcagccagcagaagaacgccgccaaggacaacagcctggacaccgaggtggcctacctgatccacgagggcatgttcatcagcgacgccttcggcgagggcgagctgacccccatcgccgtggacaccaccagccagagaaacgccagccccaacagcgagccctgcagcagcgacagcgtgagcgagcccgagtgcaccaccgacagcagcagcagcaaggagcacaccagcagcagcgccatccccggcggcgtggacatcatggtgagcgaggacatgaagctgaccgacagcgagctgggcaagctggccaacaacatccaggagctgctgtacagcgccagcgacatctgccacgacagagccgtgaagttcctgatgagcagagccaaggacggcttcctggagaagctgaacagcatggagttcatcaccctgagcagactgatggagaccttcatcctggacaccgagcagatctgcggcagaaagagcaccagcctgctgggcgccctgcagagccaggccatcaagttcgtgaacagattccacgaggagagaaagaccaagctgagcctgctgctggacaacgagagatggaagcaggccgacgtgcccgccgagttccaggacctggtggacagcctgagcgacggcaagatcgccctgcccgagaagaagagcggcgccaccgaggagagaaagcccgccgaggtgctgatcgtggagggccagcagtacgccgtggtgggcaccgtgctgctgctgatcagaatcatcctggagtactgccagtgcgtggacaacatccccagcgtgaccaccgacatgctgaccagactgagcgacctgctgaagtacttcaacagcagaagctgccagctggtgctgggcgccggcgccctgcaggtggtgggcctgaagaccatcaccaccaagaacctggccctgagcagcagatgcctgcagctgatcgtgcactacatccccgtgatcagagcccacttcgaggccagactgccccccaagcagtacagcatgctgagacacttcgaccacatcaccaaggactaccacgaccacatcgccgagatcagcgccaagctggtggccatcatggacagcctgttcgacaagctgctgagcaagtacgaggtgaaggcccccgtgcccagcgcctgcttcagaaacatctgcaagcagatgaccaagatgcacgaggccatcttcgacctgctgcccgaggagcagacccagatgctgttcctgagaatcaacgccagctacaagctgcacctgaagaagcagctgagccacctgaacgtgatcaacgacggcggcccccagaacggcctggtgaccgccgacgtggccttctacaccggcaacctgcaggccctgaagggcctgaaggacctggacctgaacatggccgagatctgggagcagaagagatag

SEQ ID NO: 191561 - DNA, 2901 bp, Artificial Sequence
  derived and/or modified sequence
atggccagcagccacagcagcagccccgtgccccagggcagcagcagcgacgtgttcttcaagatcgaggtggaccccagcaagcacatcagacccgtgcccagcctgcccgacgtgtgccccaaggagcccaccggcgacagccacagcctgtacgtggcccccagcctggtgaccgaccagcacagatggaccgtgtaccacagcaaggtgaacctgcccgccgccctgaacgaccccagactggccaagagagagagcgacttcttcaccaagacctggggcctggacttcgtggacaccgaggtgatccccagcttctacctgccccagatcagcaaggagcacttcaccgtgtaccagcaggagatcagccagagagagaagatccacgagagatgcaagaacatctgcccccccaaggacaccttcgagagaaccctgctgcacacccacgacaagagcagaaccgacctggagcaggtgcccaagatcttcatgaagcccgacttcgccctggacgacagcctgaccttcaacagcgtgctgccctggagccacttcaacaccgccggcggcaagggcaacagagacgccgccagcagcaagctgctgcaggagaagctgagccactacctggacatcgtggaggtgaacatcgcccaccagatcagcctgagaagcgaggccttcttccacgccatgaccagccagcacgagctgcaggactacctgagaaagaccagccaggccgtgaagatgctgagagacaagatcgcccagatcgacaaggtgatgtgcgagggcagcctgcacatcctgagactggccctgaccagaaacaactgcgtgaaggtgtacaacaagctgaagctgatggccaccgtgcaccagacccagcccaccgtgcaggtgctgctgagcaccagcgagttcgtgggcgccctggacctgatcgccaccacccaggaggtgctgcagcaggagctgcagggcatccacagcttcagacacctgggcagccagctgtgcgagctggagaagctgatcgacaagatgatgatcgccgagttcagcacctacagccacagcgacctgaacagacccctggaggacgactgccaggtgctggaggaggagagactgatcagcctggtgttcggcctgctgaagcagagaaagctgaacttcctggagatctacggcgagaagatggtgatcaccgccaagaacatcatcaagcagtgcgtgatcaacaaggtgagccagaccgaggagatcgacaccgacgtggtggtgaagctggccgaccagatgagaatgctgaacttcccccagtggttcgacctgctgaaggacatcttcagcaagttcaccatcttcctgcagagagtgaaggccaccctgaacatcatccacagcgtggtgctgagcgtgctggacaagaaccagagaaccagagagctggaggagatcagccagcagaagaacgccgccaaggacaacagcctggacaccgaggtggcctacctgatccacgagggcatgttcatcagcgacgccttcggcgagggcgagctgacccccatcgccgtggacaccaccagccagagaaacgccagccccaacagcgagccctgcagcagcgacagcgtgagcgagcccgagtgcaccaccgacagcagcagcagcaaggagcacaccagcagcagcgccatccccggcggcgtggacatcatggtgagcgaggacatgaagctgaccgacagcgagctgggcaagctggccaacaacatccaggagctgctgtacagcgccagcgacatctgccacgacagagccgtgaagttcctgatgagcagagccaaggacggcttcctggagaagctgaacagcatggagttcatcaccctgagcagactgatggagaccttcatcctggacaccgagcagatctgcggcagaaagagcaccagcctgctgggcgccctgcagagccaggccatcaagttcgtgaacagattccacgaggagagaaagaccaagctgagcctgctgctggacaacgagagatggaagcaggccgacgtgcccgccgagttccaggacctggtggacagcctgagcgacggcaagatcgccctgcccgagaagaagagcggcgccaccgaggagagaaagcccgccgaggtgctgatcgtggagggccagcagtacgccgtggtgggcaccgtgctgctgctgatcagaatcatcctggagtactgccagtgcgtggacaacatccccagcgtgaccaccgacatgctgaccagactgagcgacctgctgaagtacttcaacagcagaagctgccagctggtgctgggcgccggcgccctgcaggtggtgggcctgaagaccatcaccaccaagaacctggccctgagcagcagatgcctgcagctgatcgtgcactacatccccgtgatcagagcccacttcgaggccagactgccccccaagcagtacagcatgctgagacacttcgaccacatcaccaaggactaccacgaccacatcgccgagatcagcgccaagctggtggccatcatggacagcctgttcgacaagctgctgagcaagtacgaggtgaaggcccccgtgcccagcgcctgcttcagaaacatctgcaagcagatgaccaagatgcacgaggccatcttcgacctgctgcccgaggagcagacccagatgctgttcctgagaatcaacgccagctacaagctgcacctgaagaagcagctgagccacctgaacgtgatcaacgacggcggcccccagaacggcctggtgaccgccgacgtggccttctacaccggcaacctgcaggccctgaagggcctgaagatctggatgtag

SEQ ID NO: 191562 - DNA, 2934 bp, Artificial Sequence
  derived and/or modified sequence
atggcctcatcgcacagcagttctcctgtgcctcagggctctagtagtgatgtcttctttaaaattgaagttgacccttccaaacacatacgccccgtgccatcattgcctgatgtttgtcccaaggagcctaccggtgattcacactcattgtatgtggcgccctccctcgtgacagatcagcaccggtggaccgtgtaccattccaaagtgaatttgcctgcagccctcaacgaccctcggctggccaagcgcgaatcagatttcttcacaaaaacctggggccttgacttcgtggatactgaggtgattcccagcttctatctgcctcagatttctaaagagcattttacggtttatcagcaggagatatctcagagagagaaaattcacgagcgttgcaaaaacatctgtcctcctaaagacacattcgagaggacccttcttcacacccatgataagtctagaactgaccttgagcaggtgcccaaaattttcatgaagcccgatttcgccttggacgatagtcttacctttaatagcgttctgccctggtcacattttaataccgcagggggaaagggcaatagggacgcggcttcaagtaagctgttacaggagaagcttagccactacctcgacattgtcgaagtgaatatcgcccaccagatctcacttaggagcgaggctttttttcatgccatgacctctcaacatgagctgcaagattacctcaggaagactagccaagccgtcaagatgttacgcgataagatcgcacagattgataaggtaatgtgcgagggctcgttgcacatcctacgactggcactgacaagaaacaattgcgtgaaggtttacaataaactgaaattaatggccacagtccaccagacccaacctaccgttcaggtgctgttgagcactagcgagtttgtgggagcactcgacctcatcgccaccacacaagaggtactccaacaggagctccaggggattcattccttccgtcatctagggtctcagctctgcgagcttgaaaagcttattgacaagatgatgattgctgagttttcaacctactcacattcggaccttaatagaccgttagaggacgactgccaggtgctggaggaagaacggctgatcagtctggttttcgggttgcttaagcagcgcaagctcaacttcctagagatatacggggaaaaaatggtgatcaccgctaaaaatatcatcaagcaatgtgtgatcaataaagtgtctcagacggaggagattgacacagatgtcgtcgtaaaactggccgaccagatgcgcatgttaaacttcccccagtggtttgacctcctgaaagatatcttctctaagtttaccatctttttgcagagagtgaaggccaccttaaatatcattcatagcgtggtgctgtccgtgcttgataagaatcagcggacacgggagcttgaggagattagccagcagaaaaatgccgcaaaggataactccctcgatactgaagtggcttacttgatacatgagggtatgtttataagcgacgcttttggagaaggagaactgacacccattgccgtggacacaaccagtcaacgaaatgcgtctcctaactcggaaccgtgctcaagtgattcagtttccgagcctgagtgcaccactgactccagctcaagcaaagaacacacttcgagcagtgccatccccggcggggtagacatcatggtgtccgaagatatgaaactgaccgattccgaactgggaaaacttgcgaacaatatccaagaactactctacagcgcttccgacatctgccacgatagggccgttaagttcctgatgtcaagggcaaaggatggttttctggagaagctgaacagcatggaattcatcaccctgtcgaggttgatggagacattcattttggataccgaacagatctgcggtcggaaatctactagtctgcttggggccctgcagtcacaggccatcaaatttgtgaacaggtttcacgaagaacgcaagactaagctaagtctgcttctggacaatgaacggtggaagcaggctgacgtaccagcagagttccaggatctggtcgactcactcagtgatgggaagatagccctccccgagaagaaatccggagcaaccgaggagaggaagcccgcggaagtgttgattgtggaggggcagcagtacgccgttgtcgggaccgtgctgctgctgattagaattatactcgaatattgccagtgcgtggataatataccttccgtgactactgacatgctgacccggctgagcgatctactaaaatatttcaacagtcggtcctgccagctggtgctcggcgctggcgcattgcaggtggtggggctcaaaactatcactacgaagaacttagcactgagtagccgatgtcttcaactaatcgtgcattacataccagtgatccgtgcgcattttgaagcacgccttccgcccaagcagtacagcatgctgagacatttcgatcatattactaaggactatcacgaccatattgctgagatttccgctaagttagttgccattatggactcactgttcgataaacttttatcaaaatacgaggtgaaagctccggtaccatccgcatgtttcagaaatatctgtaagcagatgaccaagatgcatgaagccattttcgacctacttcccgaggaacaaacccagatgctgttcctgcgtataaatgcttcctataaactgcacctgaagaagcagctctcccatctgaacgtaatcaatgacggcggtccccagaatgggctggtgacggcagacgtggccttctatacgggcaacctccaagcactaaagggactgaaggacttggacctcaatatggcggagatctgggaacaaaagcgatag

SEQ ID NO: 191563 - DNA, 2901 bp, Artificial Sequence
  derived and/or modified sequence
atggcctcaagccattcaagttcccctgtcccccaaggctcctcctctgatgtcttctttaagatagaggtagatccaagcaagcacattaggccggtaccgtcccttcccgacgtgtgtccaaaggagccaactggcgactcccatagtctgtatgtcgcaccatctctggttacggaccagcataggtggactgtctatcattctaaggttaacctgccagcagcccttaacgatccccggcttgcaaaacgcgaatctgatttttttaccaagacctgggggctcgattttgtggacactgaggtgatccccagcttttacttgccacagatcagtaaggagcacttcactgtctaccagcaggagatctctcagagggaaaaaattcacgagaggtgcaagaacatctgccctcctaaagatacctttgaacgcacactgctgcatacccacgataagtcgcgaacggatctcgaacaggttcccaagattttcatgaagcccgacttcgctctggatgacagtctcactttcaattctgtgctcccatggtcccattttaacacagctggcggcaaggggaacagggatgctgcaagctctaagctgctccaagaaaaattatcacactacctggacattgtcgaggttaacatcgcccaccagatctctctgagatcagaagccttcttccacgcgatgacttcccaacacgagcttcaagactacctccggaagaccagtcaggccgtgaaaatgttaagagataaaatagcccaaatcgataaggtgatgtgtgagggttccctgcatatcttacggttagctctgacaagaaacaactgtgtgaaagtgtataacaaactcaagctgatggcaaccgtgcatcaaacccaacccaccgtccaggttttattaagtacatcggaattcgttggagctctcgacctcatcgccactacacaggaggttctccagcaagagttgcagggcatacattcgtttagacacctgggaagtcaactttgtgagttagaaaaactgatcgataagatgatgattgccgagttcagcacatattcacattctgatctgaatcgccctcttgaggatgattgtcaggtgctggaggaagaacgactcatctcccttgttttcggtctgctgaagcaaagaaaactgaatttcctggagatctatggggaaaaaatggtcatcacagccaagaacattatcaaacaatgcgttatcaataaggtgtcgcagaccgaagagattgacacagacgtggtggttaagctggctgaccagatgcgaatgctgaattttcctcagtggtttgacctgctgaaggacatattctccaagtttaccatttttttgcagcgggtgaaggcaactctgaacatcattcatagcgtagttttgtcagtactcgacaagaatcagagaacccgagaattagaggagattagccaacagaagaacgccgctaaagataattcgctcgacaccgaggttgcttaccttatacacgaagggatgtttattagcgacgcatttggcgagggcgagctcactcccatcgctgtcgacactacttcgcagagaaatgccagcccgaattctgaaccatgttctagtgacagtgtgtccgagcctgaatgtactacagattcatcctcttccaaagaacacacatcaagtagcgctatacctggcggagtggacatcatggtttctgaggatatgaaactgacggatagtgaacttggaaagttagcaaacaatattcaagaactgctttattcagcttctgacatatgtcacgaccgggcggttaaatttctgatgtcccgggcaaaggatggatttctggaaaaactgaattctatggaattcattaccctgagtaggttaatggagacgttcattttggacaccgagcagatctgtggaaggaaatccacctccctgttaggagcgctgcagtcccaggccattaagtttgtgaaccggttccacgaagaacgaaaaaccaaactgtcccttcttttagacaacgagcgatggaaacaggccgatgtacctgcggaatttcaggacttggtggattcactgtcagacgggaagattgctctgccagagaagaaatcgggcgctacagaggagcgtaagcctgcagaagttctaatcgtggaaggtcaacagtacgctgtggttggcacggtcctgctactaattagaattattctcgaatactgtcaatgtgtggataatattccttccgtaacaactgatatgctgaccaggctcagcgatctcctgaaatactttaactctcgttcttgtcagttggtgttgggggccggcgccttgcaagtcgtcggcttgaagactataactacaaagaatctggccctgtctagcagatgtttgcagctaatagtccattatattccggtgataagggcccatttcgaagctagacttcctcccaaacagtattctatgctgagacacttcgatcacattactaaggattatcacgatcatatcgccgaaattagtgcaaaactggtggcaattatggattctctgtttgacaaactcctttccaaatatgaagtgaaggccccagttccatccgcatgctttagaaacatctgtaagcagatgacgaagatgcacgaggctattttcgatctgctgccagaagaacagacacaaatgctcttcttgagaatcaatgcgagttacaaattacacctgaagaagcaactgtctcatctgaatgtcataaacgatgggggccctcagaacggactggtgaccgccgacgtagcgttctatacaggcaatctgcaggctttaaaaggcctgaagatctggatgtag

SEQ ID NO: 191564 - DNA, 2934 bp, Artificial Sequence
  derived and/or modified sequence
atggccagcagccacagcagcagccctgtgccccagggcagcagcagtgatgtgttcttcaagattgaggtggaccccagcaagcacatccggcctgtgcccagcctgcctgatgtgtgccccaaggagcccactggagacagccacagcctgtatgtggcccccagcctggtgacagaccagcaccgctggacagtgtaccacagcaaggtgaacctgcctgctgccctgaatgacccccggctggccaagcgggagagtgacttcttcaccaagacctggggcctggactttgtggacacagaggtgatccccagcttctacctgccccagatcagcaaggagcacttcaccgtgtaccagcaggagatcagccagcgggagaagatccacgagcgctgcaagaacatctgcccccccaaggacacctttgagaggaccctgctgcacacccatgacaagagcaggacagacctggagcaggtgcccaagatcttcatgaagccagactttgccctggatgacagcctgaccttcaacagcgtgctgccctggagccacttcaacacagctgggggcaagggcaacagagatgctgccagcagcaagctgctgcaggagaagctgagccactacctggacatcgtggaggtgaacatcgcccaccagatcagcctgcggtctgaggccttcttccacgccatgaccagccagcacgagctgcaggactacctgaggaagaccagccaggccgtgaagatgctgcgggacaagatcgcccagattgacaaggtgatgtgtgagggcagcctgcacatcctgcggctggccctgaccaggaacaactgtgtgaaggtgtacaacaagctgaagctgatggccaccgtgcaccagacccagcccaccgtgcaggtgctgctgagcaccagcgagtttgtgggcgccctggacctgattgccaccacccaggaggtgctgcagcaggagctgcagggcatccacagcttccgccacctgggcagccagctgtgtgagctggagaagctgattgacaagatgatgattgctgagttcagcacctacagccacagcgacctgaaccggcccctggaggatgactgccaggtgctggaggaggagcggctcatcagcctggtgtttggcctgctgaagcagaggaagctgaacttcctggagatctatggagagaagatggtgatcacagccaagaacatcatcaagcagtgtgtgatcaacaaggtgtcccagacagaggagattgacacagatgtggtggtgaagctggccgaccagatgaggatgctgaacttcccccagtggtttgacctgctgaaggacatcttcagcaagttcaccatcttcctgcagagggtgaaggccaccctgaacatcatccacagcgtggtgctgtctgtgctggacaagaaccagaggacccgggagctggaggagatcagccagcagaagaatgctgccaaggacaacagcctggacacagaggtggcctacctgattcatgagggcatgttcatcagtgatgccttcggggagggggagctgacccccatcgctgtggacaccaccagccagagaaatgccagccccaacagcgagccctgcagcagtgacagcgtgtctgagcctgagtgcaccacagacagcagcagcagcaaggagcacaccagcagcagcgccatccctgggggcgtggacatcatggtgtctgaggacatgaagctgacagacagcgagctgggcaagctggccaacaacatccaggagctgctgtacagcgccagtgacatctgccacgacagagctgtgaagttcctgatgagccgggccaaggatggcttcctggagaagctgaacagcatggagttcatcaccctgagccggctgatggagaccttcatcctggacacagagcagatctgtggcaggaagagcaccagcctgctgggcgccctgcagagccaggccatcaagtttgtgaaccgcttccacgaggagaggaagaccaagctgagcctgctgctggacaatgaacgctggaagcaggctgatgtgcctgctgagttccaggacctggtggacagcctgagtgatggcaagatcgccctgcctgagaagaagagcggggccacagaggagaggaagccagctgaggtgctgattgtggagggccagcagtatgctgtggtgggcaccgtgctgctgctgatccgcatcatcctggagtactgccagtgtgtggacaacatccccagcgtgaccacagacatgctgacccggctgagtgacctgctgaagtacttcaacagccgcagctgccagctggtgctgggcgctggggccctgcaggtggtgggcctgaagaccatcaccaccaagaacctggccctgagcagccgctgcctgcagctgattgtgcactacatccctgtgatccgggcccactttgaggcccggctgccccccaagcagtacagcatgctgcggcactttgaccacatcaccaaggactaccatgaccacatcgccgagatcagcgccaagctggtggccatcatggacagcctgtttgacaagctgctgagcaaatatgaggtgaaggcccctgtgcccagcgcctgcttcaggaacatctgcaagcagatgaccaagatgcatgaggccatctttgacctgctgcctgaggagcagacccagatgctgttcctgcgcatcaatgccagctacaagctgcacctgaagaagcagctgagccacctgaatgtcatcaatgatggcggcccccagaatggcctggtgacagcagatgtggccttctacacaggcaacctgcaggccctgaagggcctgaaggacctggacctgaacatggccgagatctgggagcagaagaggtag

SEQ ID NO: 191565 - DNA, 2901 bp, Artificial Sequence
  derived and/or modified sequence
atggccagcagccacagcagcagccctgtgccccagggcagcagcagtgatgtgttcttcaagattgaggtggaccccagcaagcacatccggcctgtgcccagcctgcctgatgtgtgccccaaggagcccactggagacagccacagcctgtatgtggcccccagcctggtgacagaccagcaccgctggacagtgtaccacagcaaggtgaacctgcctgctgccctgaatgacccccggctggccaagcgggagagtgacttcttcaccaagacctggggcctggactttgtggacacagaggtgatccccagcttctacctgccccagatcagcaaggagcacttcaccgtgtaccagcaggagatcagccagcgggagaagatccacgagcgctgcaagaacatctgcccccccaaggacacctttgagaggaccctgctgcacacccatgacaagagcaggacagacctggagcaggtgcccaagatcttcatgaagccagactttgccctggatgacagcctgaccttcaacagcgtgctgccctggagccacttcaacacagctgggggcaagggcaacagagatgctgccagcagcaagctgctgcaggagaagctgagccactacctggacatcgtggaggtgaacatcgcccaccagatcagcctgcggtctgaggccttcttccacgccatgaccagccagcacgagctgcaggactacctgaggaagaccagccaggccgtgaagatgctgcgggacaagatcgcccagattgacaaggtgatgtgtgagggcagcctgcacatcctgcggctggccctgaccaggaacaactgtgtgaaggtgtacaacaagctgaagctgatggccaccgtgcaccagacccagcccaccgtgcaggtgctgctgagcaccagcgagtttgtgggcgccctggacctgattgccaccacccaggaggtgctgcagcaggagctgcagggcatccacagcttccgccacctgggcagccagctgtgtgagctggagaagctgattgacaagatgatgattgctgagttcagcacctacagccacagcgacctgaaccggcccctggaggatgactgccaggtgctggaggaggagcggctcatcagcctggtgtttggcctgctgaagcagaggaagctgaacttcctggagatctatggagagaagatggtgatcacagccaagaacatcatcaagcagtgtgtgatcaacaaggtgtcccagacagaggagattgacacagatgtggtggtgaagctggccgaccagatgaggatgctgaacttcccccagtggtttgacctgctgaaggacatcttcagcaagttcaccatcttcctgcagagggtgaaggccaccctgaacatcatccacagcgtggtgctgtctgtgctggacaagaaccagaggacccgggagctggaggagatcagccagcagaagaatgctgccaaggacaacagcctggacacagaggtggcctacctgattcatgagggcatgttcatcagtgatgccttcggggagggggagctgacccccatcgctgtggacaccaccagccagagaaatgccagccccaacagcgagccctgcagcagtgacagcgtgtctgagcctgagtgcaccacagacagcagcagcagcaaggagcacaccagcagcagcgccatccctgggggcgtggacatcatggtgtctgaggacatgaagctgacagacagcgagctgggcaagctggccaacaacatccaggagctgctgtacagcgccagtgacatctgccacgacagagctgtgaagttcctgatgagccgggccaaggatggcttcctggagaagctgaacagcatggagttcatcaccctgagccggctgatggagaccttcatcctggacacagagcagatctgtggcaggaagagcaccagcctgctgggcgccctgcagagccaggccatcaagtttgtgaaccgcttccacgaggagaggaagaccaagctgagcctgctgctggacaatgaacgctggaagcaggctgatgtgcctgctgagttccaggacctggtggacagcctgagtgatggcaagatcgccctgcctgagaagaagagcggggccacagaggagaggaagccagctgaggtgctgattgtggagggccagcagtatgctgtggtgggcaccgtgctgctgctgatccgcatcatcctggagtactgccagtgtgtggacaacatccccagcgtgaccacagacatgctgacccggctgagtgacctgctgaagtacttcaacagccgcagctgccagctggtgctgggcgctggggccctgcaggtggtgggcctgaagaccatcaccaccaagaacctggccctgagcagccgctgcctgcagctgattgtgcactacatccctgtgatccgggcccactttgaggcccggctgccccccaagcagtacagcatgctgcggcactttgaccacatcaccaaggactaccatgaccacatcgccgagatcagcgccaagctggtggccatcatggacagcctgtttgacaagctgctgagcaaatatgaggtgaaggcccctgtgcccagcgcctgcttcaggaacatctgcaagcagatgaccaagatgcatgaggccatctttgacctgctgcctgaggagcagacccagatgctgttcctgcgcatcaatgccagctacaagctgcacctgaagaagcagctgagccacctgaatgtcatcaatgatggcggcccccagaatggcctggtgacagcagatgtggccttctacacaggcaacctgcaggccctgaagggcctgaagatctggatgtag

SEQ ID NO: 191566 - DNA, 2934 bp, Artificial Sequence
  derived and/or modified sequence
atggccagcagccacagcagcagccccgtgccccagggcagcagctcagacgtcttcttcaagatcgaagttgaccctagcaagcatattcgcccagtgccgtctctccccgatgtgtgtcctaaagaaccaacaggtgactcacattccctctacgtggccccgtctctagtaaccgaccaacataggtggaccgtttatcattcaaaggttaatctccccgccgcactcaacgatcctcgactggccaagagagaatcagattttttcacgaagacctggggactggacttcgtcgacacagaagtcattccctcgttctacttgcctcaaatttcaaaagaacatttcaccgtttatcagcaggagatatcccagcgggaaaaaattcacgaaagatgtaaaaatatctgtcctcccaaggatacattcgaacgcacgctgttacacacccacgataagagtcgcactgatctggaacaggtccccaaaatttttatgaagccagatttcgccttggatgattcccttacgttcaactctgttctgccctggtcccattttaacaccgcggggggaaaagggaatagagacgccgcctcgtccaaactgctgcaggagaagctgtcacattacctggacatcgtggaggtgaatattgcacatcagatctctcttaggagcgaagcattttttcatgccatgacttcacaacatgagctccaggattacctgcgcaagactagccaggccgtcaagatgctccgggataaaatagcacaaatcgacaaagtcatgtgcgagggaagtttacatattctacgccttgcattgacgcggaataactgcgtgaaagtgtacaacaagctgaagctcatggctactgtgcaccagacacaacctacagtccaggtgcttctttctacctctgagttcgtgggtgccctggacctgatcgcaaccactcaggaggttctgcagcaagagctgcaggggatccattcatttagacatcttggctctcagctttgtgaactagagaagctgatcgataaaatgatgatcgccgaattcagcacgtactcacactcggatctgaaccggccattggaggacgactgtcaggtcttggaggaagaacgcctgatcagtttagtcttcggactgctgaaacaaagaaaactcaatttcctggaaatttacggggaaaagatggtgattaccgcgaagaacattattaaacagtgcgtgatcaacaaggtatcccaaacggaggagattgatactgacgtcgtcgtcaagctggccgaccagatgaggatgttgaattttccccagtggtttgatttgctgaaggacatattctcaaaattcactatttttctccagcgggtgaaagcgacacttaacattatacactctgtcgtcctctccgtgcttgataagaaccagcgtacgcgggaactcgaggagataagccagcaaaaaaatgccgccaaggacaacagcctggacactgaggtggcctacctgatacacgaggggatgtttatctctgacgcatttggggaaggagagttgacaccaattgcagtggatacgacctcccagcgtaacgcatcaccaaactcagagccctgctctagtgattccgtctcagagccagaatgcacaaccgattcatcctcctcaaaggagcacacctcctccagcgcaatccccggcggcgtcgatatcatggtgagcgaagacatgaaacttactgacagtgagcttggaaagctggcaaataacattcaagaactgttgtacagtgcttcagacatctgtcatgatcgtgcagtgaaattcctcatgtctcgggctaaggatgggttcctggagaaactcaattccatggagtttatcaccctttccaggctgatggaaacatttatcctcgacaccgagcaaatctgtggaagaaaatctacatctctgcttggcgctctgcagtcccaggcaattaaattcgtgaatcggttccacgaagaacggaagaccaagctgtcactcctgctagataacgaacgctggaagcaggccgatgtgccggcagaattccaagatctggtggatagtctctcagatggaaaaattgccctccccgaaaaaaagtccggagcaaccgaagaaaggaagccagccgaagtattgatcgtggagggccagcagtatgctgttgtgggcaccgtcctgctgctgattaggatcattttagagtattgtcagtgcgtagacaacatccccagtgttactaccgacatgctcaccagattgtccgatttgctgaaatatttcaacagccgctcttgtcagctcgtgcttggcgccggagcgctacaggtggtggggctgaaaactataacaactaaaaacttagcactctcttctcggtgtttacagctcattgtgcactacattcccgtcattcgcgctcacttcgaggctcggttgcccccaaagcagtattcgatgctgaggcacttcgaccacatcacaaaagactatcacgaccacattgcagagatctctgccaaactggtcgcaatcatggacagtttgttcgataaactgctaagcaaatatgaagtcaaggcccccgttccctctgcttgctttcggaacatatgcaagcaaatgactaaaatgcacgaggccatcttcgatctgctgccagaagagcaaacacaaatgctcttcctgaggattaatgcatcctacaagttgcatttgaaaaagcaactgtctcacctaaacgtcatcaacgatggcgggccccagaacggcctggtaacagctgatgtcgctttttacaccggcaacctgcaggctctgaagggcctaaaggacctggacttgaacatggccgaaatctgggagcaaaagagatag

SEQ ID NO: 191567 - DNA, 2901 bp, Artificial Sequence
  derived and/or modified sequence
atggccagcagccacagcagcagccccgtgccccagggcagcagctccgatgtatttttcaaaatcgaggttgatccctccaagcatatacggcctgtgcccagcctccccgatgtttgtcctaaggagcccactggtgattcacactcactttacgtagctccgtctcttgtaactgatcagcatcgctggaccgtctaccattctaaggtcaaccttcctgccgcgttgaacgatccgcggttagccaagagggagagcgattttttcacaaagacctggggactagacttcgttgacacggaggtaatccccagtttctacttaccacagatatcgaaggagcacttcactgtgtaccagcaggaaataagccagcgcgagaaaatacacgaaagatgcaaaaacatttgcccacccaaggacacctttgagaggactctcttgcatacacatgataaatccaggacggacttagagcaagtgcccaagatcttcatgaagccagactttgcactggatgactccttgactttcaattccgttctcccatggtctcactttaacaccgcaggtggcaaggggaatagggatgctgcatcaagtaaattgctgcaagaaaagctgagccattacctggacatcgtggaggtgaacatcgcgcaccagatcagcttacgaagcgaggctttttttcatgccatgacttcgcagcatgagcttcaggactatctcagaaagaccagccaggcggtcaaaatgcttcgggataagatagcccagatcgacaaggtaatgtgcgagggctcgcttcatattttgagactcgctctgacccgaaacaactgcgtgaaagtctataataagctgaaactgatggccaccgtgcaccaaacccaaccgacagtgcaggtgctcctcagtactagcgagttcgtgggagccctggacctgattgccaccacccaagaggtcttgcagcaggaacttcagggtattcattcattccggcatctcggctcccagctgtgtgagctcgaaaaactgatcgacaagatgatgatagctgagttcagtacttattcgcattctgatctgaaccggcctttggaggacgattgccaggtgcttgaagaggagagattgatttccttagttttcggattactgaagcagcgaaagctcaattttctcgaaatctatggggaaaaaatggtgattacagccaaaaacattattaaacagtgtgttatcaacaaggtaagtcagacagaagaaattgatacagatgtggttgtaaaactggcggaccagatgcgaatgctcaatttcccccagtggttcgatctgcttaaggatatattctctaagtttacaatcttcctgcagcgcgttaaggcaacactgaatatcatccactctgtggttctgagcgtccttgacaagaaccaaaggacgagggaactggaagagatcagccagcagaaaaatgccgctaaggataactccttagacactgaggtggcctatctcatccacgagggaatgtttatttcggacgcgtttggagagggtgagctcacccccattgccgtggatacaacatcacagagaaacgcctctcccaactcagagccctgctcttctgatagcgtgagtgagcccgagtgcacaacagatagcagtagttccaaagaacatacatcttcttcagcaatacccggaggcgtggacatcatggttagcgaggacatgaagctcactgacagtgagttgggcaagttggccaacaacattcaagaactactctacagtgcttctgatatatgtcacgatcgagcagtaaaattccttatgagccgggccaaggatggctttctcgaaaagctgaactccatggagttcattactctgtctcgccttatggaaactttcatcttggatactgaacaaatttgcggccggaaaagcaccagcttgctcggcgctctccagtcccaggctatcaagttcgtgaatcgattccacgaggaacgaaaaaccaaactaagccttcttctggataacgaacgttggaagcaggcggacgtgccggctgagttccaggatttggtggactcgctgagcgatggtaagattgccttgccagagaaaaaatcaggcgcaacggaggaacgaaaaccagccgaagtgctaatagttgagggccagcagtacgctgtggtgggcactgtgctgctgctgattcggataatactggaatactgtcagtgtgtggataatatcccatctgtgaccaccgacatgttgacccggctgagtgatcttcttaagtattttaactctcgatcttgtcagctggtgctcggggccggcgctctccaggtggtggggttaaaaactatcacaaccaagaacttagctctgagtagtaggtgcctgcagttaatcgtgcattatatacctgtgataagggctcatttcgaagccagactgccaccaaaacaatactctatgttacgccatttcgaccacattacaaaagattatcacgatcatattgccgaaatttcggctaagctggtcgcaattatggattccttgtttgacaagcttctgagcaaatacgaagtcaaagcccccgtaccaagcgcctgttttcgaaacatttgcaagcagatgacaaaaatgcacgaggccattttcgatctcttgccagaggagcagacacagatgttgtttctgagaatcaatgcgtcttataagctccatctgaagaaacagctgtcacacctcaatgttatcaacgatggaggacctcagaacggcctcgtgaccgcggacgtagcattctatacaggaaacctgcaggccctcaaagggttgaagatctggatgtag

SEQ ID NO: 191568 - DNA, 2934 bp, Artificial Sequence
  derived and/or modified sequence
atggcaagctcacattcatccagccctgtcccccaaggcagttctagcgacgtgttctttaagatcgaggtagatccgagtaagcatatccgcccagtcccctctctgcctgacgtgtgtcctaaggagcctaccggtgattcccactcactgtatgttgccccaagtcttgtcaccgaccagcacaggtggacagtgtatcactctaaagtgaatctgcctgccgcactcaacgaccccaggctcgccaagcgagaatcggacttttttactaagacatggggcttggatttcgttgacaccgaagttattcccagtttttacctgccgcagatttcaaaagagcacttcaccgtctatcaacaagagatttcccaaagagagaaaatacatgagagatgcaagaatatatgccctcctaaggacaccttcgagagaacactgcttcatacgcacgacaagtccaggacagacctagaacaggtacctaagatcttcatgaaacccgatttcgcacttgatgactctctaacctttaactctgtgctcccctggtcccatttcaacacagctgggggtaaggggaaccgggatgcggcatcgtcaaaactattgcaggaaaagctttcacactacctggatattgtggaggtgaatatcgcacaccaaatctctctcaggtctgaagcgtttttccatgcaatgacgtctcagcacgagttgcaggattacctgcggaagacgtctcaggctgtaaagatgttgcgcgacaagatagcccagatcgacaaggtcatgtgtgaaggaagcctccacattcttcgtctcgcactcacacgtaacaactgcgtcaaggtatataacaagctgaaactgatggctacagttcaccagacccagccgacggtgcaagttcttctctccacatccgaatttgtgggtgccctcgacctgatcgccactacccaggaggtcctgcagcaagagctacaggggattcactcctttcgacaccttgggtctcagctatgtgagctagaaaagctgatagacaaaatgatgatcgctgaatttagcacatattcccacagtgacttgaaccggccactggaggatgactgccaggtcttggaggaagagcgcctgatctctcttgtgttcggtttgctcaagcagcgaaagctcaatttcctcgaaatctacggtgagaaaatggtaattaccgcgaagaacattataaaacagtgcgttataaataaggtaagtcaaactgaggagattgatacagatgtcgtggtcaagctggctgaccagatgaggatgctgaactttcctcagtggtttgacttactgaaggatatatttagcaaattcacaatattcctacaacgggttaaggccaccctcaatattatccacagcgtagtgctttccgtcctggataaaaaccagcgcacaagagaattggaggaaatcagtcaacagaaaaacgcagccaaagataatagtttggatacggaagtggcctatctgattcacgagggcatgtttatctcagacgcatttggcgagggtgagctgaccccaattgccgtagacactacttcacagagaaacgcatcgcccaactccgaaccctgctcctctgacagtgtgagtgagccggagtgcactactgattcttcctcaagcaaagaacacacctccagttccgccataccgggtggggtagatattatggtgtccgaggacatgaaactgacagacagcgagctgggcaagctggccaacaacattcaggagttgctgtatagcgctagtgacatctgtcacgatagagcggtcaaattcctgatgagccgggctaaggacggattccttgagaaacttaatagcatggaattcataacattatccaggttgatggagaccttcatcctggacacagaacagatctgtgggagaaagtcaacatcgcttctcggagcactgcagagccaagccatcaagttcgtgaacaggttccacgaggaacgaaagaccaagctatcactgttgctggataacgagcgttggaagcaggcagacgtcccagccgaattccaggacctagtcgatagcctgtctgacggtaaaatagctcttcctgagaaaaaatccggggcaacagaggagaggaagcccgcagaggtgctgatcgtcgaggggcagcagtatgctgtcgttgggaccgtgttactccttatccggattattttggagtattgtcagtgcgttgataacattccaagcgtcactaccgatatgctgactcgcctctccgatctgctcaagtacttcaatagccgcagctgtcagctggtactgggcgctggcgctcttcaagttgtcggcctcaagaccataaccaccaaaaacctagctttgtcttccaggtgtctccagctgatagtccactatattccggtaatacgggcacatttcgaggcaagactcccccctaagcagtactcaatgctgcggcacttcgatcacattaccaaagattatcacgatcatatcgccgaaatttcagcaaaacttgtggctattatggacagcttattcgataaactcttgagcaagtatgaagtgaaggcccctgtcccctcagcatgcttccggaacatttgtaagcagatgaccaagatgcatgaggcaattttcgatttgctgcccgaggagcagacccagatgctgtttctccgtattaatgcatcctacaaactccacttgaagaaacagttgtctcatttaaacgtcatcaacgatggtggcccacagaacggtctagtcactgccgacgtggcattctacaccggcaaccttcaggcactaaaaggactcaaagatcttgatcttaacatggcagagatttgggaacagaagcgttag

SEQ ID NO: 191569 - DNA, 2901 bp, Artificial Sequence
  derived and/or modified sequence
atggccagctctcatagttcctcacctgttccccagggttcatcgagtgacgtgtttttcaaaattgaggtggaccccagtaaacatatccgacccgtcccttccctgccagacgtttgccccaaagaaccaaccggcgactcacattccctgtatgtcgcacctagccttgtcaccgatcagcatcggtggaccgtgtatcattctaaagtgaacctccccgctgccctgaacgatcccagattggcaaaacgggagagtgatttctttacaaagacctggggcctggacttcgtcgatacagaagtgatcccctccttctacttaccccaaatctcaaaagaacacttcacagtataccaacaagagatcagccagcgagagaagatccatgaacgatgtaaaaatatctgcccccctaaggatacctttgagcggaccctcctgcatacacatgataaatctcggacagacttggaacaggttcctaagattttcatgaagccagattttgccctggacgattctctcacatttaattcagtactgccatggtcccactttaacacggccggtggcaagggaaatcgagatgcggcttcctccaaactgcttcaggaaaagctgtctcattacctggatatcgtggaagtcaatatagcccaccagatatcattgcggtctgaggccttctttcatgccatgaccagccagcatgaattgcaggactaccttagaaagacctcacaggctgtaaagatgctgcgtgataaaattgcccagattgacaaggtcatgtgcgagggaagtctgcacatcttacggttggcacttactcgtaacaactgtgttaaggtgtataataaactgaagttaatggcgacagtgcaccagacacagccgaccgtccaggtgctgctttcaacgtctgaatttgtgggggcactggatctgattgccactacccaagaggtgctccagcaggaactgcagggcatccattcctttcggcatctcggatcacagttatgcgagcttgagaagctgatcgacaagatgatgattgcagagttttctacatactcccacagcgatctgaacagacccctggaggatgactgtcaggttctagaggaggagagactgattagtctggtgttcggactgctaaagcagaggaagctgaacttcctggagatctatggggagaaaatggtgattacagctaaaaatataattaagcagtgtgttataaacaaggtttcacagactgaggaaatcgatacggacgtcgttgtcaaactggctgaccagatgaggatgttgaatttcccccagtggttcgacctcttgaaggacatcttctcaaaattcacgatttttcttcagcgagttaaggccaccctgaatatcatccactctgtggtgctgtctgtcctcgacaagaatcagcggacccgcgagctggaggaaatctcacagcagaaaaatgcggcaaaagataatagtctggacactgaggtggcctacttgatccacgagggcatgtttatttcggatgccttcggcgaaggagagctcacgccaatcgccgtggacactacgtcccagcgaaacgctagccccaattccgaaccttgtagcagtgattcagtttctgagccagagtgtacaaccgattcttcctccagcaaggaacataccagcagtagcgccattccaggcggagtcgatatcatggtttctgaagatatgaagctgaccgacagcgagctgggaaagttggctaacaacatccaagagttgctctacagcgctagcgacatctgccacgaccgcgctgtcaaatttctcatgtctagggcaaaggatgggtttctggagaagctaaatagtatggaatttattacgctgtcacggctcatggaaacctttatcctggacacagagcaaatttgcggcaggaagtccactagcctcttgggggctctgcagtcacaggctatcaaattcgtgaaccggtttcacgaggagcgcaagacaaagttatctctactgctggataacgagcgctggaagcaagccgacgtaccagctgagtttcaggatcttgtggacagcctctctgatggaaaaatagctcttccagagaaaaagagtggcgcaaccgaagagcgaaagccggctgaggtgttgatcgtggaaggccagcagtacgctgtcgttggcacagtccttcttcttatccgtatcattctcgagtattgtcagtgcgtggacaacattccatccgtgaccactgacatgctcacacggttgtccgacttactgaaatacttcaacagccgaagctgtcaactcgttcttggtgccggtgcattgcaggtggtgggcctgaaaacgatcactaccaagaatctggcgctatcttcacggtgtttgcagctcatagtgcattatatccctgtgatccgggctcattttgaagctcgattaccacccaagcagtattcaatgctgagacatttcgaccacattacaaaggattatcacgatcacatcgccgagatcagcgcaaagctggtcgccattatggactcgctgttcgacaagttgctatccaaatatgaggtaaaggccccagtgccatcggcatgttttcgaaatatatgcaaacagatgaccaagatgcatgaggctatttttgacctcttgcctgaggagcagactcaaatgctgttcctgagaattaatgccagctacaaactccatttgaaaaagcaattatcccacctgaacgttatcaacgatggtgggcctcaaaacggcctggttaccgctgatgtagccttctataccggaaatctgcaggcactgaaagggcttaaaatttggatgtag

SEQ ID NO: 191570 - DNA, 3463 bp, Artificial Sequence
  derived and/or modified sequence
gggaacccgggctcgggcccggccgggcgccgggcggcggcggccgtggagcagcagcctcggtgcgacgtggagggctggaggcggcggcgatgcactaggcctcgctcagggcggctgccccgggacccgcagttgagtggtgattttatgcaatggcttcaagccacagttcttcaccagtgcctcaaggaagcagcagtgatgttttctttaaaatagaggtagatccgtcaaaacacattcgacctgtgccatcactgccagatgtgtgtcccaaggaacccacaggtgattcacatagtttatatgttgccccatctctagttacagatcaacatagatggactgtatatcattccaaagtaaatctcccagcagcattaaacgatcctagattagcaaaaagagaatctgacttcttcacaaaaacatggggattggactttgtggacactgaagtcataccttcattctacctcccacagatcagcaaggaacattttacagtatatcaacaggaaatctctcagagagagaagattcatgagagatgcaagaatatttgtcctcctaaagataccttcgaaaggactcttttacatactcatgataaatccaggacagatctggagcaagtacctaagatttttatgaaaccagattttgccttggatgattccttaacttttaattcagttttaccatggtctcattttaatactgctggtggaaaaggaaatcgtgatgcagcttcctcaaagttgcttcaagaaaagctgagccattatctggatattgtggaagtaaacattgctcaccagatctctctacgttcagaagcattttttcatgcaatgacctctcaacacgagttgcaggactacctcaggaaaacttcccaggctgtaaaaatgcttcgagataaaattgcacagattgataaagtaatgtgtgaaggatcactccacattttaagactggcacttaccagaaataattgtgttaaagtatacaataagctgaagttaatggccactgtacaccagactcagcctacagtacaggtgttattatctacttctgaatttgttggagcattggacttaatagcaacaacacaagaggttctacagcaggaacttcagggcattcacagtttccggcatttgggatcacagctttgtgaattagaaaaactgatagataaaatgatgattgcagaattttctacttattctcacagtgacttaaatagaccactggaagatgactgtcaagttttagaagaggaaagactaatatctcttgtatttggacttttaaaacaaagaaagcttaattttttagaaatctatggtgaaaaaatggttattacagcaaagaatatcattaaacagtgtgtgattaataaagtttcacaaacagaagaaatagacacagatgttgttgtgaagcttgcagatcagatgagaatgttgaattttccccagtggtttgatctgctcaaggatattttctctaagtttacaattttcctacagagagtgaaggcaacattaaatatcattcacagtgttgttctctcagttcttgacaaaaaccaaaggactagagaattggaagagatttcacaacagaagaatgctgcaaaagataattcactggacacagaggtggcttatttaatccatgaaggcatgtttataagtgatgcattcggtgagggtgagctaacacctatagcagttgacactacctctcaaagaaatgcatctccaaatagtgagccctgcagcagtgattctgtatccgagccagaatgtactactgattcttcatccagcaaagagcacacatcatcatctgctattccaggaggtgtggatattatggtcagtgaagatatgaaattaactgactcagagctaggaaagctggcaaataatatccaggaattattatatagtgcctcagatatatgccatgatcgagctgtcaaatttctcatgtcaagagcaaaggatggttttcttgagaagctaaattccatggaattcataacactttctagattaatggaaacattcattttagacaccgaacagatctgtggaagaaaaagcacgtcattacttggagcacttcagagccaagctattaagtttgtaaataggtttcatgaagagagaaaaaccaagctcagcctcctcttagacaatgagcgctggaagcaagcagatgttcctgcagaatttcaggatcttgttgattctctgtcagatgggaagattgctttacctgaaaaaaaatcaggagccacagaagaaaggaaaccagctgaagttcttattgtcgagggacaacagtatgcagttgttggaaccgtattgctgttaataagaattatccttgaatattgccagtgtgtggataacatcccatctgttactactgacatgcttactcgtctgtcagatttattgaagtacttcaattcaagaagttgccagttagttcttggagctggtgcactgcaagttgttggactaaaaacgataactacaaaaaatttggctctttcttcacgatgtttgcagttaattgtgcactacattcctgtgatccgggctcattttgaagctcgactaccacctaagcaatatagcatgcttaggcattttgatcatatcactaaggactaccatgatcacatagctgaaatatcagctaagcttgtagcgataatggatagcttatttgacaagctgttatctaagtatgaagtgaaggctcctgttccttctgcctgtttcaggaatatttgtaagcaaatgacaaaaatgcacgaagctatatttgatctccttccagaagaacaaacacagatgttatttttaagaattaatgcaagttataaactccacttgaaaaagcagttatctcacttaaatgtgataaatgatggaggacctcaaaatgggttggtcacagcagatgtagctttttacactggaaatcttcaagccttaaaaggccttaaagatttggacctaaatatggccgaaatttgggagcagaagaggtgatgtcatcctggaaaactgggtagttcatctgaccatgggatgtgtttgttatgaagaaaatctggatgcctgtgattcgagaattgaacctgaaacccaaagtgaactggggtgggggaagggaaaaaggaaagtatcaagtgttgggaaactggattcagtgggatctacaaggaatgtcatttttgtgcatcctacagtgaggagtaactgatcaggtgtctataacatttttcattctctctggaaacagactcaggtttctttggaccaaatccaaaagaacacatagctgtaacacagctgtagttgactagaatgctctgtatactttatattaaaaaatgctttgcatttcttccagtgcaatgaaa

SEQ ID NO: 191571 - DNA, 3061 bp, Artificial Sequence
  derived and/or modified sequence
gcgggggcgggaacccgggctcgggcccggccgggcgccgggcggcggcggccgtggagcagcagcctcggtgcgacgtggagggctggaggcggcggcgatgcactaggcctcgctcagggcggctgccccgggacccgcagttgagtggtgattttatgcaatggcttcaagccacagttcttcaccagtgcctcaaggaagcagcagtgatgttttctttaaaatagaggtagatccgtcaaaacacattcgacctgtgccatcactgccagatgtgtgtcccaaggaacccacaggtgattcacatagtttatatgttgccccatctctagttacagatcaacatagatggactgtatatcattccaaagtaaatctcccagcagcattaaacgatcctagattagcaaaaagagaatctgacttcttcacaaaaacatggggattggactttgtggacactgaagtcataccttcattctacctcccacagatcagcaaggaacattttacagtatatcaacaggaaatctctcagagagagaagattcatgagagatgcaagaatatttgtcctcctaaagataccttcgaaaggactcttttacatactcatgataaatccaggacagatctggagcaagtacctaagatttttatgaaaccagattttgccttggatgattccttaacttttaattcagttttaccatggtctcattttaatactgctggtggaaaaggaaatcgtgatgcagcttcctcaaagttgcttcaagaaaagctgagccattatctggatattgtggaagtaaacattgctcaccagatctctctacgttcagaagcattttttcatgcaatgacctctcaacacgagttgcaggactacctcaggaaaacttcccaggctgtaaaaatgcttcgagataaaattgcacagattgataaagtaatgtgtgaaggatcactccacattttaagactggcacttaccagaaataattgtgttaaagtatacaataagctgaagttaatggccactgtacaccagactcagcctacagtacaggtgttattatctacttctgaatttgttggagcattggacttaatagcaacaacacaagaggttctacagcaggaacttcagggcattcacagtttccggcatttgggatcacagctttgtgaattagaaaaactgatagataaaatgatgattgcagaattttctacttattctcacagtgacttaaatagaccactggaagatgactgtcaagttttagaagaggaaagactaatatctcttgtatttggacttttaaaacaaagaaagcttaattttttagaaatctatggtgaaaaaatggttattacagcaaagaatatcattaaacagtgtgtgattaataaagtttcacaaacagaagaaatagacacagatgttgttgtgaagcttgcagatcagatgagaatgttgaattttccccagtggtttgatctgctcaaggatattttctctaagtttacaattttcctacagagagtgaaggcaacattaaatatcattcacagtgttgttctctcagttcttgacaaaaaccaaaggactagagaattggaagagatttcacaacagaagaatgctgcaaaagataattcactggacacagaggtggcttatttaatccatgaaggcatgtttataagtgatgcattcggtgagggtgagctaacacctatagcagttgacactacctctcaaagaaatgcatctccaaatagtgagccctgcagcagtgattctgtatccgagccagaatgtactactgattcttcatccagcaaagagcacacatcatcatctgctattccaggaggtgtggatattatggtcagtgaagatatgaaattaactgactcagagctaggaaagctggcaaataatatccaggaattattatatagtgcctcagatatatgccatgatcgagctgtcaaatttctcatgtcaagagcaaaggatggttttcttgagaagctaaattccatggaattcataacactttctagattaatggaaacattcattttagacaccgaacagatctgtggaagaaaaagcacgtcattacttggagcacttcagagccaagctattaagtttgtaaataggtttcatgaagagagaaaaaccaagctcagcctcctcttagacaatgagcgctggaagcaagcagatgttcctgcagaatttcaggatcttgttgattctctgtcagatgggaagattgctttacctgaaaaaaaatcaggagccacagaagaaaggaaaccagctgaagttcttattgtcgagggacaacagtatgcagttgttggaaccgtattgctgttaataagaattatccttgaatattgccagtgtgtggataacatcccatctgttactactgacatgcttactcgtctgtcagatttattgaagtacttcaattcaagaagttgccagttagttcttggagctggtgcactgcaagttgttggactaaaaacgataactacaaaaaatttggctctttcttcacgatgtttgcagttaattgtgcactacattcctgtgatccgggctcattttgaagctcgactaccacctaagcaatatagcatgcttaggcattttgatcatatcactaaggactaccatgatcacatagctgaaatatcagctaagcttgtagcgataatggatagcttatttgacaagctgttatctaagtatgaagtgaaggctcctgttccttctgcctgtttcaggaatatttgtaagcaaatgacaaaaatgcacgaagctatatttgatctccttccagaagaacaaacacagatgttatttttaagaattaatgcaagttataaactccacttgaaaaagcagttatctcacttaaatgtgataaatgatggaggacctcaaaatgggttggtcacagcagatgtagctttttacactggaaatcttcaagccttaaaaggccttaaaatctggatg

SEQ ID NO: 191572 - protein, 390 aa, Artificial Sequence
  derived and/or modified sequence
MAAQKDLWDAIVIGAGIQGCFTAYHLAKHRKRILLLEQFFLPHSRGSSHGQSRIIRKAYLEDFYTRMMHECYQIWAQLEHEAGTQLHRQTGLLLLGMKENQELKTIQANLSRQRVEHQCLSSEELKQRFPNIRLPRGEVGLLDNSGGVIYAYKALRALQDAIRQLGGIVRDGEKVVEINPGLLVTVKTTSRSYQAKSLVITAGPWTNQLLRPLGIEMPLQTLRINVCYWREMVPGSYGVSQAFPCFLWLGLCPHHIYGLPTGEYPGLMKVSYHHGNHADPEERDCPTARTDIGDVQILSSFVRDHLPDLKPEPAVIESCMYTNTPDEQFILDRHPKYDNIVIGAGFSGHGFKLAPVVGKILYELSMKLTPSYDLAPFRISRFPSLGKAHL

SEQ ID NO: 191573 - protein, 131 aa, Artificial Sequence
  derived and/or modified sequence
GTISCSTGTLQRRNLGPERQTGLLLLGMKENQELKTIQANLSRQRVEHQCLSSEELKQRFPNIRLPRGEVGLLDNSGGVIYAYKALRALQDAIRQLGGIVRDGEKVVEINPGLLVTVKTTSRSYQAKSLVI

SEQ ID NO: 191574 - DNA, 396 bp, Artificial Sequence
  derived and/or modified sequence
ggcaccatcagctgcagcaccggcaccctgcagagaagaaacctgggccccgagagacagaccggcctgctgctgctgggcatgaaggagaaccaggagctgaagaccatccaggccaacctgagcagacagagagtggagcaccagtgcctgagcagcgaggagctgaagcagagattccccaacatcagactgcccagaggcgaggtgggcctgctggacaacagcggcggcgtgatctacgcctacaaggccctgagagccctgcaggacgccatcagacagctgggcggcatcgtgagagacggcgagaaggtggtggagatcaaccccggcctgctggtgaccgtgaagaccaccagcagaagctaccaggccaagagcctggtgatctag

SEQ ID NO: 191575 - DNA, 1173 bp, Artificial Sequence
  derived and/or modified sequence
atggccgcccagaaggatttatgggatgcaattgtgatcggtgctggaattcaggggtgtttcaccgcgtaccacctggcgaagcacaggaaaaggatcttgctcctagaacaattctttctcccacattccagggggtcttcccacggtcagagccggatcattcgaaaggcctatctcgaagatttttacacccggatgatgcacgagtgctatcagatttgggcccagctggagcatgaagccgggacccagctgcaccggcagactgggttgctgcttcttggtatgaaagagaatcaggaactgaaaaccatccaagcaaatctgtcccggcaaagagtggagcaccagtgcctctcatccgaagagctgaaacagaggttccccaatattcgactcccacgcggtgaggttggcctgctagacaactctgggggggtgatctacgcatataaggccctcagggctctccaagacgctatccggcagcttggtggaatcgtaagagacggagaaaaggtggtggagatcaatcctgggctcctggtcaccgtcaaaaccacttctcggtcataccaagctaagagcctagtgatcaccgctgggccatggacaaatcagctgcttcgcccactcggcatcgaaatgccactccagaccttacggatcaacgtatgttattggagggagatggtacctggtagctatggtgtgagtcaagcgtttccatgttttctgtggctgggtctgtgcccacaccacatttatggcttgcctacaggggagtaccctggattaatgaaagtttcctaccatcacgggaaccacgctgaccccgaggagagagactgccccacagctcgcacagacataggggatgttcagatcttgtcatctttcgtgagggatcacctgcctgatctgaagccagagcctgccgttatcgagagctgtatgtatacaaatacaccagatgaacaattcatcttagatagacacccgaaatacgataatatcgtgataggggccggcttcagcggccacggattcaagcttgcccctgtggtgggcaaaattctgtatgagctcagtatgaaactgacccccagttacgacctggcacctttccgtatttcacggtttccgtcgctcggcaaagcccatctgtag

SEQ ID NO: 191576 - DNA, 396 bp, Artificial Sequence
  derived and/or modified sequence
ggcaccatttcctgttctactggaaccttgcagagaagaaatctcggtcctgagcgccaaacgggactgctgctgctgggaatgaaggaaaaccaggagctcaaaacgattcaagccaacctgtccaggcaacgggtggagcatcaatgcctgagttcagaggagttgaaacagcggtttcccaacatccgcctgcccaggggcgaggtggggctcctagataactctgggggtgtcatctatgcttataaagcactaagagccctacaagacgccatccgccagctaggtggcatcgtcagagatggggaaaaagtagtcgagatcaatcctggacttctggtgacagtaaaaacgacgagtaggtcgtatcaggcgaagtctctggttatatag

SEQ ID NO: 191577 - DNA, 1173 bp, Artificial Sequence
  derived and/or modified sequence
atggccgcccagaaggacctgtgggatgccatcgtgattggagctggcatccagggctgcttcaccgcctaccacctggccaagcacaggaagaggatcctgctgctggagcagttcttcctgccccacagccggggcagcagccacggccagagccgcatcatcaggaaggcctacctggaggacttctacaccaggatgatgcatgagtgctaccagatctgggcccagctggagcacgaggccggcacccagctgcaccggcagacaggcctgctgctgctgggcatgaaggagaaccaggagctgaagaccatccaggccaacctgagccggcagagggtggagcaccagtgcctgagcagcgaggagctgaagcagcgcttccccaacatccggctgcccagaggagaggtgggcctgctggacaacagcggaggagtcatctatgcctacaaggccctgcgggccctgcaggatgccatccggcagctgggcggcatcgtgagagatggagagaaggtggtggagatcaaccctggcctgctggtgacagtgaagaccaccagccgcagctaccaggccaagagcctggtgatcacagctggcccctggaccaaccagctgctgcggcccctgggcatcgagatgcccctgcagaccctgcgcatcaacgtgtgctactggagggagatggtgcccggcagctatggagtgtcccaggccttcccctgcttcctgtggctgggcctgtgcccccaccacatctacggcctgcccactggagagtacccaggcctgatgaaggtgtcctaccaccacggcaaccacgccgaccctgaggagcgggactgccccacagccaggacagacattggagatgtgcagatcctgagcagctttgtgcgggaccacctgcctgacctgaagccagagcctgctgtgattgagagctgcatgtacaccaacaccccagatgagcagttcatcctggacagacaccccaagtatgacaacatcgtcatcggggccggcttcagcggccacggcttcaagctggcccctgtggtgggcaagatcctgtatgagctgtccatgaagctgacccccagctatgacctggcccccttccgcatcagccgcttccccagcctgggcaaggcccacctgtag

SEQ ID NO: 191578 - DNA, 396 bp, Artificial Sequence
  derived and/or modified sequence
ggcaccatcagctgcagcacaggcaccctgcagaggaggaacctgggccctgagcggcagacaggcctgctgctgctgggcatgaaggagaaccaggagctgaagaccatccaggccaacctgagccggcagagggtggagcaccagtgcctgagcagcgaggagctgaagcagcgcttccccaacatccggctgcccagaggagaggtgggcctgctggacaacagcggcggcgtcatctatgcctacaaggccctgcgggccctgcaggatgccatccggcagctgggcggcatcgtgagagatggagagaaggtggtggagatcaaccctggcctgctggtgacagtgaagaccaccagccgcagctaccaggccaagagcctggtgatctag

SEQ ID NO: 191579 - DNA, 1173 bp, Artificial Sequence
  derived and/or modified sequence
atggccgcccagaaggacctgtgggacgccatcgtgatcggcgccggcattcagggatgcttcaccgcctaccacctggctaagcacaggaagcgcatcctgctcctggagcaattcttcctcccccactctcggggttcatctcacgggcagtcgagaatcattaggaaggcctacctagaggacttctacactaggatgatgcacgagtgttatcagatctgggcacagctggagcacgaagccgggacccaactccacaggcagactgggctcctcttactgggcatgaaagagaatcaggagttgaaaactatccaggccaatctgtcacgtcagagggtggagcaccagtgtctctcctccgaagaattgaaacagcgctttcctaatatcagactgcctcgcggagaagttgggctgctagacaattccggtggggtgatatacgcttacaaggcccttcgtgccctgcaggatgccattagacagttgggcggaatagtccgggacggggaaaaggtggtggagattaatcccggccttctcgtgacagtgaagaccacatcccgctcctaccaagccaagtccctcgtcattaccgccggcccgtggactaaccagctgctgagacctctggggattgagatgcccttacagacactgcggattaacgtatgctactggagggaaatggtcccaggttcttacggggtgagtcaggctttcccttgttttctgtggctcgggctgtgcccccatcacatttatgggctccccaccggggagtacccaggactcatgaaggtgtcataccaccatggtaatcacgccgatccggaagagagagactgccccaccgcacgcacggatattggagatgtccagatcctaagttcctttgtgagagaccatctcccggatcttaagccagagcccgccgtgatcgagtcctgcatgtatacgaacacccccgatgagcagtttatcctagatcgccaccccaagtacgacaacatcgtgattggcgccgggttctctggccacggtttcaaactcgcacccgttgtaggcaagatcctgtatgaactgagtatgaagctgacccctagctatgatctggcaccattccgaatctctcggtttccatctctcggaaaggcccatctttag

SEQ ID NO: 191580 - DNA, 396 bp, Artificial Sequence
  derived and/or modified sequence
ggcaccatcagctgcagcaccggcaccctgcagcggcggaacctgggcccagagcggcagacaggtctgctgctgttaggtatgaaggagaaccaggagctgaagacgatccaggcaaacctgtcacggcagcgcgtggaacatcagtgcctgtcttcagaagagctcaaacagagattcccaaacatccgcctccctaggggcgaggtaggcctgcttgataattctgggggagtgatttacgcgtacaaagccctgagagcgctccaggatgctatccggcagttgggtggaatcgtgcgggatggcgaaaaagtcgtagagatcaacccaggtttgctggtcaccgtgaagacaaccagccggtcctaccaggcaaaatcactcgtcatctag

SEQ ID NO: 191581 - DNA, 1173 bp, Artificial Sequence
  derived and/or modified sequence
atggccgcacagaaggacctttgggacgccatcgtcattggagctggtattcagggctgcttcacagcttatcacctggctaaacataggaaacgtatcctcctcttggaacagtttttccttccccatagtagaggcagcagtcacggacagagccggatcatccggaaagcgtacctggaagacttttatacaaggatgatgcacgagtgttatcagatttgggcccagttggaacatgaagcaggtacccagctgcatagacagaccgggctcctccttctgggcatgaaagagaatcaagagctgaagacaatccaggccaatctttcccgccagagagttgagcaccagtgtctgtcatcagaggaactgaagcagagattcccaaacatcagactgccacgaggagaggtgggactgctagacaacagcgggggtgtgatctatgcttacaaagcattacgtgccctccaagatgccatccgccagctgggtggcattgttagagacggtgaaaaagtcgtagaaattaaccccggactactcgtcacagtgaagacaacgagcaggtcctaccaggccaaatctctcgtgatcaccgccggtccatggactaaccagctattgcgaccgctggggatagaaatgccactccagacacttcgcatcaatgtgtgctactggcgggagatggtcccgggaagttacggggtgagccaggcttttccctgcttcctgtggcttggcctgtgcccgcaccacatctacggcctgcctaccggcgaataccctggtctgatgaaggtgtcctaccatcatggcaaccatgctgatcccgaagagcgggattgccctacagcacggactgacattggagacgttcagatcctgagctccttcgtgagagaccacctccctgatctgaaaccagaacctgccgtaatcgagtcatgcatgtatacgaatacgcccgatgagcaattcatactcgaccgccatcctaaatacgataacatagtcatcggagccggatttagtggtcatggcttcaagttagcaccagtggttgggaaaatcctttatgagctgagcatgaaactgacgccatcttacgacctcgctcccttccggataagtagattcccgtcactcgggaaggctcacctgtag

SEQ ID NO: 191582 - DNA, 394 bp, Artificial Sequence
  derived and/or modified sequence
ggaaccatcagttgttcaacaggcacgttacagaggaggaatctgggcccagagaggcagactggattactgctgctgggaatgaaagagaatcaagaattaaagacaatccaggccaatctgtcgaggcagagggtagaacaccagtgtctttcatctgaggaactgaagcaacgtttcccaaatattcggttgcccaggggagaagtggggctcttggacaattccggaggagttatctatgcatataaggccctcagagccctgcaggatgcaattcgacagctaggaggcatagtgcgtgacggagagaaggtggtggagataaacccagggctactggtcacggtgaaaaccacctccaggagctaccaagctaagagcttggtcatca

SEQ ID NO: 191583 - DNA, 396 bp, Artificial Sequence
  derived and/or modified sequence
gggacaatcagctgtagcactggcaccctccaacgccgaaatctaggacccgagcggcagaccggccttctgctgctcggcatgaaagagaaccaagagcttaagacaatccaggccaatctctccaggcagcgggtagaacatcagtgtttatcctccgaggagctcaagcagaggtttcctaatatccgtctgccaaggggcgaagtggggttgctggacaattcggggggtgtgatatatgcctataaagccctccgcgcactacaggatgctataaggcagctcgggggtattgtccgcgatggagaaaaggtagtggaaatcaatcctggcttgctggttaccgtaaaaactacgagtagatcataccaagcgaagagcctcgtcatatag

SEQ ID NO: 191584 - DNA, 2410 bp, Artificial Sequence
  derived and/or modified sequence
gagacaggaaggtggcaaaggaaggagcccatttgcatgacaataattgagccaagaatagaaagccacagggatgcaagggtgaggctggcggctgagctgggctaaacctcacaaatcagactacccagctctgctccgcaggggaagggagactgagccctgggccaggcttggcagagagggaagcgggaggacacgaccccagggcattgtgggaacactggccaggctggactttgccttcctcctcgtcctttagccgggagcctgtctttgcttgcctttgcctttgaggctctgtggctgtggggctgagtggcatcatggcggctcagaaagatctctgggacgccattgtgattggggcggggatccagggctgcttcactgcataccacctggccaaacacaggaagaggatcctcctgctggagcagttctttctaccacactcccgaggaagctcccatggacaaagccggataatccgaaaggcgtacctggaagacttttacacccggatgatgcatgagtgctatcagatatgggcccagctggagcacgaggctggaacccaattgcacaggcagactggattactgctgctgggaatgaaagagaatcaagaattaaagacaatccaggccaatctgtcgaggcagagggtagaacaccagtgtctttcatctgaggaactgaagcaacgtttcccaaatattcggttgcccaggggagaagtggggctcttggacaattccggaggagttatctatgcatataaggccctcagagccctgcaggatgcaattcgacagctaggaggcatagtgcgtgacggagagaaggtggtggagataaacccagggctactggtcacggtgaaaaccacctccaggagctaccaagctaagagcttggtcatcacagcaggtccttggaccaaccagctcctccgtcccctgggcattgagatgcctctccagaccctgcggatcaacgtgtgttactggcgagagatggttcctgggagctatggtgtgtcccaggcctttccgtgcttcctgtggctgggcttgtgtccccaccacatctacggactgcccacaggagagtacccagggctgatgaaggtcagctatcaccacggcaaccacgcagaccctgaggagcgggactgccccacagcacgcacagacatcggagacgtccagatcctgagcagctttgtcagagatcacttacctgatctgaagcccgagcctgctgtcattgagagctgcatgtacacgaatacccctgatgagcagttcattctcgatcgccacccaaagtatgacaacattgtcattggtgctggattctctgggcacgggttcaagctggcccctgtggtggggaagatcctgtatgaattaagcatgaaattaacaccatcttatgacttggcaccttttcgaatcagccgtttcccaagcctgggcaaagcccacctttgacctctggccagaagcctcccttctgtgcacaggagccagtttcacagatggagaagatgtctcagatgaagggagtgtccctgagatatcatccttttcttctgcctcgcctgaatcccccataaacaccagatgattgagtctaccttctttccttggcccgctccctttttcttctgcctcacttgaatcccccgtaaacaccagacgattgagtctaccttcttttcttggccacctccccattcacaactactttctcgctcccagaaggttgatcagatattctacaatcacagagtagcaaggacgtttgagatgggtatatcagtaagaagagggcacaagaactggctctggagaccaaagcagttgttaaaaattctctttgctgggggccgggtgtggtggctcacacctgtaatctcggcactttggggggctgagacaggcggatcacctgaggccaggaattcaagaccagcctggccaacatggtgaaaccctatctccactaaaaatacaaaattagctgggtgtggtggcgcatgcctgtaatcccagctacttgggagactgaggcaagagaatcacttgaacccgggaggtggaggtggcagtgagccgagattgcgccattgcactccagcctgggcaaaaagagtgagactctgtctcaaaaaaaaaacaaaacaaaaaaaacctctttgctggtatatttgaagagcttgggatggatttgactaaatctgccccgaggagggtgaacaaggtgatctcagagatcactactgctcttggagttccttctcctaaagctaaggccagcctccatcacaaatgcccataaaatctggctcgtctttgatgaacaataaatatttgttgaacaaataaataactgccctgca

SEQ ID NO: 191585 - DNA, 1173 bp, Artificial Sequence
  derived and/or modified sequence
atggccgcccagaaggacctgtgggacgccatcgtgatcggcgccggcatccagggctgcttcaccgcctaccacctggccaagcacagaaagagaatcctgctgctggagcagttcttcctgccccacagcagaggcagcagccacggccagagcagaatcatcagaaaggcctacctggaggacttctacaccagaatgatgcacgagtgctaccagatctgggcccagctggagcacgaggccggcacccagctgcacagacagaccggcctgctgctgctgggcatgaaggagaaccaggagctgaagaccatccaggccaacctgagcagacagagagtggagcaccagtgcctgagcagcgaggagctgaagcagagattccccaacatcagactgcccagaggcgaggtgggcctgctggacaacagcggcggcgtgatctacgcctacaaggccctgagagccctgcaggacgccatcagacagctgggcggcatcgtgagagacggcgagaaggtggtggagatcaaccccggcctgctggtgaccgtgaagaccaccagcagaagctaccaggccaagagcctggtgatcaccgccggcccctggaccaaccagctgctgagacccctgggcatcgagatgcccctgcagaccctgagaatcaacgtgtgctactggagagagatggtgcccggcagctacggcgtgagccaggccttcccctgcttcctgtggctgggcctgtgcccccaccacatctacggcctgcccaccggcgagtaccccggcctgatgaaggtgagctaccaccacggcaaccacgccgaccccgaggagagagactgccccaccgccagaaccgacatcggcgacgtgcagatcctgagcagcttcgtgagagaccacctgcccgacctgaagcccgagcccgccgtgatcgagagctgcatgtacaccaacacccccgacgagcagttcatcctggacagacaccccaagtacgacaacatcgtgatcggcgccggcttcagcggccacggcttcaagctggcccccgtggtgggcaagatcctgtacgagctgagcatgaagctgacccccagctacgacctggcccccttcagaatcagcagattccccagcctgggcaaggcccacctgtag

SEQ ID NO: 191586 - protein, 447 aa, Artificial Sequence
  derived and/or modified sequence
MSASKIPLFKMKDLILILCLLEMSFAVPFFPQQSGTPGMASLSLETMRQLGSLQRLNTLSQYSRYGFGKSFNSLWMHGLLPPHSSLPWMRPREHETQQYEYSLPVHPPPLPSQPSLKPQQPGLKPFLQSAAATTNQATALKEALQPPIHLGHLPLQEGELPLVQQQVAPSDKPPKPELPGVDFADPQGPSLPGMDFPDPQGPSLPGLDFADPQGSTIFQIARLISHGPMPQNKQSPLYPGMLYVPFGANQLNAPARLGIMSSEEVAGGREDPMAYGAMFPGFGGMRPGFEGMPHNPAMGGDFTLEFDSPVAATKGPENEEGGAQGSPMPEANPDNLENPAFLTELEPAPHAGLLALPKDDIPGLPRSPSGKMKGLPSVTPAAADPLMTPELADVYRTYDADMTTSVDFQEEATMDTTMAPNSLQTSMPGNKAQEPEMMHDAWHFQEP

SEQ ID NO: 191587 - protein, 432 aa, Artificial Sequence
  derived and/or modified sequence
MSASKIPLFKMKDLILILCLLEMSFAVPFFPQQSGTPGMASLSLETMRQLGSLQRLNTLSQYSRYGFGKSFNSLWMHGLLPPHSSLPWMRPREHETQQPSLKPQQPGLKPFLQSAAATTNQATALKEALQPPIHLGHLPLQEGELPLVQQQVAPSDKPPKPELPGVDFADPQGPSLPGMDFPDPQGPSLPGLDFADPQGSTIFQIARLISHGPMPQNKQSPLYPGMLYVPFGANQLNAPARLGIMSSEEVAGGREDPMAYGAMFPGFGGMRPGFEGMPHNPAMGGDFTLEFDSPVAATKGPENEEGGAQGSPMPEANPDNLENPAFLTELEPAPHAGLLALPKDDIPGLPRSPSGKMKGLPSVTPAAADPLMTPELADVYRTYDADMTTSVDFQEEATMDTTMAPNSLQTSMPGNKAQEPEMMHDAWHFQEP

SEQ ID NO: 191588 - protein, 446 aa, Artificial Sequence [sequence omitted]

SEQ ID NO: 191589 - DNA, 1487 bp, Artificial Sequence
  derived and/or modified sequence
gggaaataagagagaaaagaagagtaagaagaaatataagagccaccatgtccgcgtcaaaaatcccactctttaagatgaaagatctcatcctcattctctgccttttggagatgtcctttgcagtgcctttcttcccccagcagtccggcacccctggtatggccagcctttcgctggaaacaatgaggcagctcggcagccttcagcgactgaacacattgtcgcagtattcccgctacggtttcgggaagtcgttcaatagcttgtggatgcatgggttgcttcccccacactcgtcactgccctggatgaggccaagagaacacgagacacagcaatatgagtactcgcttccagtgcatcctccccctcttcccagccagccttcgctcaagccacagcagcctgggttgaagcctttcttgcagtccgcagccgcgacaacgaatcaggccactgctctgaaagaagccttgcagccgcctattcaccttgggcatctcccgctccaagaaggcgagctgccacttgtacagcagcaggtcgccccttcggacaagcccccaaaaccggaactccccggtgtcgattttgctgaccctcaagggccctcattgcctggaatggactttcccgatccccaaggcccgtcgcttccgggtttggatttcgcagacccgcaaggatcgacaatctttcaaattgcgcggcttatctcgcacgggcctatgccgcagaataagcagtcacccctgtaccccggaatgctttatgtcccctttggggccaatcagctcaatgcccctgcccgattgggcatcatgtcgtcagaagaggtagcaggtgggcgcgaggatccgatggcgtacggggccatgttccccggattcggtggtatgagacccgggttcgaggggatgcctcacaacccggcgatgggtggcgattttaccttggagtttgattcgcccgtggcggcgactaaaggaccggagaacgaagagggtggtgcgcagggatccccgatgccggaagccaatccggataacctcgagaatccggctttcctgacggagctcgagccagcgccgcatgccgggttgctggcgctccctaaagatgacatccctggccttccccggtcccctagcggaaagatgaagggtctgccgtccgtgacaccggctgccgcggaccccctgatgacgccagaactcgccgacgtctatcgcacctacgatgcagacatgacgacgtcggtggacttccaagaagaagcgacaatggacacgacaatggcgccgaactcgctgcagacctcgatgccgggaaacaaggcgcaagagcccgagatgatgcacgacgcgtggcactttcaagagccataatgagctgccttctgcggggcttgccttctggccatgcccttcttctctcccttgcacctgtacctcttggtctttgaataaagcctgagtaggaag

SEQ ID NO: 191590 - DNA, 1344 bp, Artificial Sequence
  derived and/or modified sequence
atgagcgccagcaagatccccctgttcaagatgaaggacctgatcctgatcctgtgcctgctggagatgagcttcgccgtgcccttcttcccccagcagagcggcacccccggcatggccagcctgagcctggagaccatgagacagctgggcagcctgcagagactgaacaccctgagccagtacagcagatacggcttcggcaagagcttcaacagcctgtggatgcacggcctgctgcccccccacagcagcctgccctggatgagacccagagagcacgagacccagcagtacgagtacagcctgcccgtgcaccccccccccctgcccagccagcccagcctgaagccccagcagcccggcctgaagcccttcctgcagagcgccgccgccaccaccaaccaggccaccgccctgaaggaggccctgcagccccccatccacctgggccacctgcccctgcaggagggcgagctgcccctggtgcagcagcaggtggcccccagcgacaagccccccaagcccgagctgcccggcgtggacttcgccgacccccagggccccagcctgcccggcatggacttccccgacccccagggccccagcctgcccggcctggacttcgccgacccccagggcagcaccatcttccagatcgccagactgatcagccacggccccatgccccagaacaagcagagccccctgtaccccggcatgctgtacgtgcccttcggcgccaaccagctgaacgcccccgccagactgggcatcatgagcagcgaggaggtggccggcggcagagaggaccccatggcctacggcgccatgttccccggcttcggcggcatgagacccggcttcgagggcatgccccacaaccccgccatgggcggcgacttcaccctggagttcgacagccccgtggccgccaccaagggccccgagaacgaggagggcggcgcccagggcagccccatgcccgaggccaaccccgacaacctggagaaccccgccttcctgaccgagctggagcccgccccccacgccggcctgctggccctgcccaaggacgacatccccggcctgcccagaagccccagcggcaagatgaagggcctgcccagcgtgacccccgccgccgccgaccccctgatgacccccgagctggccgacgtgtacagaacctacgacgccgacatgaccaccagcgtggacttccaggaggaggccaccatggacaccaccatggcccccaacagcctgcagaccagcatgcccggcaacaaggcccaggagcccgagatgatgcacgacgcctggcacttccaggagccctag

SEQ ID NO: 191591 - DNA, 1299 bp, Artificial Sequence
  derived and/or modified sequence
atgagcgccagcaagatccccctgttcaagatgaaggacctgatcctgatcctgtgcctgctggagatgagcttcgccgtgcccttcttcccccagcagagcggcacccccggcatggccagcctgagcctggagaccatgagacagctgggcagcctgcagagactgaacaccctgagccagtacagcagatacggcttcggcaagagcttcaacagcctgtggatgcacggcctgctgcccccccacagcagcctgccctggatgagacccagagagcacgagacccagcagcccagcctgaagccccagcagcccggcctgaagcccttcctgcagagcgccgccgccaccaccaaccaggccaccgccctgaaggaggccctgcagccccccatccacctgggccacctgcccctgcaggagggcgagctgcccctggtgcagcagcaggtggcccccagcgacaagccccccaagcccgagctgcccggcgtggacttcgccgacccccagggccccagcctgcccggcatggacttccccgacccccagggccccagcctgcccggcctggacttcgccgacccccagggcagcaccatcttccagatcgccagactgatcagccacggccccatgccccagaacaagcagagccccctgtaccccggcatgctgtacgtgcccttcggcgccaaccagctgaacgcccccgccagactgggcatcatgagcagcgaggaggtggccggcggcagagaggaccccatggcctacggcgccatgttccccggcttcggcggcatgagacccggcttcgagggcatgccccacaaccccgccatgggcggcgacttcaccctggagttcgacagccccgtggccgccaccaagggccccgagaacgaggagggcggcgcccagggcagccccatgcccgaggccaaccccgacaacctggagaaccccgccttcctgaccgagctggagcccgccccccacgccggcctgctggccctgcccaaggacgacatccccggcctgcccagaagccccagcggcaagatgaagggcctgcccagcgtgacccccgccgccgccgaccccctgatgacccccgagctggccgacgtgtacagaacctacgacgccgacatgaccaccagcgtggacttccaggaggaggccaccatggacaccaccatggcccccaacagcctgcagaccagcatgcccggcaacaaggcccaggagcccgagatgatgcacgacgcctggcacttccaggagccctag

SEQ ID NO: 191592 - DNA, 1341 bp, Artificial Sequence
  derived and/or modified sequence
atgagcgccagcaagatccccctgttcaagatgaaggacctgatcctgatcctgtgcctgctggagatgagcttcgccgtgcccttcttcccccagcagagcggcacccccggcatggccagcctgagcctggagaccatgagacagctgggcagcctgcagagactgaacaccctgagccagtacagcagatacggcttcggcaagagcttcaacagcctgtggatgcacggcctgctgcccccccacagcagcctgccctggatgagacccagagagcacgagacccagcagtacgagtacagcctgcccgtgcaccccccccccctgcccagccagcccagcctgaagccccagcagcccggcctgaagcccttcctgcagagcgccgccgccaccaccaaccaggccaccgccctgaaggaggccctgcagccccccatccacctgggccacctgcccctgcaggagggcgagctgcccctggtgcagcagcaggtggcccccagcgacaagccccccaagcccgagctgagagtggacttcgccgacccccagggccccagcctgcccggcatggacttccccgacccccagggccccagcctgcccggcctggacttcgccgacccccagggcagcaccatcttccagatcgccagactgatcagccacggccccatgccccagaacaagcagagccccctgtaccccggcatgctgtacgtgcccttcggcgccaaccagctgaacgcccccgccagactgggcatcatgagcagcgaggaggtggccggcggcagagaggaccccatggcctacggcgccatgttccccggcttcggcggcatgagacccggcttcgagggcatgccccacaaccccgccatgggcggcgacttcaccctggagttcgacagccccgtggccgccaccaagggccccgagaacgaggagggcggcgcccagggcagccccatgcccgaggccaaccccgacaacctggagaaccccgccttcctgaccgagctggagcccgccccccacgccggcctgctggccctgcccaaggacgacatccccggcctgcccagaagccccagcggcaagatgaagggcctgcccagcgtgacccccgccgccgccgaccccctgatgacccccgagctggccgacgtgtacagaacctacgacgccgacatgaccaccagcgtggacttccaggaggaggccaccatggacaccaccatggcccccaacagcctgcagaccagcatgcccggcaacaaggcccaggagcccgagatgatgcacgacgcctggcacttccaggagccctag

SEQ ID NO: 191593 - DNA, 2005 bp, Artificial Sequence
  derived and/or modified sequence
gagaagtacagagcaagtcccacgcacagtcctgaaaaaaattttaatcttcttttcttagaactatcttggttggcatcatcaggccctgagagcacagtgcatgtcagcatctaagattccacttttcaaaatgaaggacctgatactgatcctatgcctcctggaaatgagttttgcagtgccgttctttcctcagcaatctggaacaccgggtatggctagtttgagccttgagacaatgagacagttgggaagtctgcagagattaaacacactttctcagtattctagatacggctttggaaaatcatttaattctttgtggatgcacggtctcctcccaccacattcctctcttccatggatgaggccaagagaacatgaaactcaacagtatgaatattctttgcctgtgcatcccccacctctcccatcacagccatccttgaagcctcaacagccaggactgaaaccttttctccagtctgctgctgcaaccaccaaccaggccacagcactgaaagaagcacttcagcctccaattcacctgggacatctgcccttgcaggaaggagaactgcctctggttcagcagcaggtggcaccatcagataagccaccaaagcctgagctcccaggagtagattttgctgatccacaaggtccatcactcccaggaatggattttcctgatccacaaggtccatcactcccaggattggattttgctgatccacaaggttcaacaattttccaaatagcccgtttgatttctcacggaccaatgccacaaaataaacaatctccactttatccaggaatgttgtacgtgccttttggagcaaatcaattgaatgcccctgccagacttggcatcatgagttcagaagaagtggcaggcgggagagaagacccaatggcctatggagccatgtttccaggatttggaggcatgaggcccggctttgagggaatgccccacaacccagctatgggcggtgacttcactctggaatttgactccccagtggctgccaccaaaggccctgagaacgaagaaggaggtgcacaaggctcccctatgccggaggccaacccagacaatctagaaaacccagctttccttacagagctagaacctgctccccacgcagggctccttgctctccctaaggatgacattcccggcctgccaaggagcccttcagggaagatgaagggactccccagcgtcaccccagcagctgctgacccactgatgacccctgaattagctgatgtttataggacctacgatgctgacatgaccacatccgtggatttccaggaagaagcaaccatggataccacgatggccccaaactctctgcaaacatccatgccaggaaacaaagcccaggagcccgagatgatgcatgacgcatggcatttccaagagccctgacagctctaagatattagctactttctgtatgcacaagcttcccagctttgtccccacagtgtacctttttgctaaaacacttattacccttctgcagcaaaggcattaaaagcgctaagcatatattaataaatgcaagtggctagaaatagtgtaggtccccttcttgctttcaatatcttgttgaaataaaatgtgtcaattgtctctgtgatttagaaacactattaataacatcagagcaaggttctaagggtctcagcatttgatcatcactttttcttagctgtcttaagcattatagaatttctcttaccagcatgacactattatattcaggaaacatggcactgcttttttctctaagcaaaggcaaatatcctcataattctaagctaattcatttaaactttattaaatggggattggtggaaaactcctgactggtattactgggtttggtataatttaatttaaaattctcatttatagagtattttatttaatctagtataaaaaatctagcctattttaaataaagaatttttctcactgaaa

SEQ ID NO: 191594 - DNA, 1512 bp, Artificial Sequence
  derived and/or modified sequence
aattttaatcttcttttcttagaactatcttggttggcatcatcaggccctgagagcacagtgcatgtcagcatctaagattccacttttcaaaatgaaggacctgatactgatcctatgcctcctggaaatgagttttgcagtgccgttctttcctcagcaatctggaacaccgggtatggctagtttgagccttgagacaatgagacagttgggaagtctgcagagattaaacacactttctcagtattctagatacggctttggaaaatcatttaattctttgtggatgcacggtctcctcccaccacattcctctcttccatggatgaggccaagagaacatgaaactcaacagccatccttgaagcctcaacagccaggactgaaaccttttctccagtctgctgctgcaaccaccaaccaggccacagcactgaaagaagcacttcagcctccaattcacctgggacatctgcccttgcaggaaggagaactgcctctggttcagcagcaggtggcaccatcagataagccaccaaagcctgagctcccaggagtagattttgctgatccacaaggtccatcactcccaggaatggattttcctgatccacaaggtccatcactcccaggattggattttgctgatccacaaggttcaacaattttccaaatagcccgtttgatttctcacggaccaatgccacaaaataaacaatctccactttatccaggaatgttgtacgtgccttttggagcaaatcaattgaatgcccctgccagacttggcatcatgagttcagaagaagtggcaggcgggagagaagacccaatggcctatggagccatgtttccaggatttggaggcatgaggcccggctttgagggaatgccccacaacccagctatgggcggtgacttcactctggaatttgactccccagtggctgccaccaaaggccctgagaacgaagaaggaggtgcacaaggctcccctatgccggaggccaacccagacaatctagaaaacccagctttccttacagagctagaacctgctccccacgcagggctccttgctctccctaaggatgacattcccggcctgccaaggagcccttcagggaagatgaagggactccccagcgtcaccccagcagctgctgacccactgatgacccctgaattagctgatgtttataggacctacgatgctgacatgaccacatccgtggatttccaggaagaagcaaccatggataccacgatggccccaaactctctgcaaacatccatgccaggaaacaaagcccaggagcccgagatgatgcatgacgcatggcatttccaagagccctgacagctctaagatattagctactttctgtatgcacaagcttcccagctttgtccccacagtgtacctttttgctaaaacacttattacccttctgcagcaaaggcattaaaagcgctaagcatatattaataaatgcaagtggctagaaa

SEQ ID NO: 191595 - DNA, 1979 bp, Artificial Sequence
  derived and/or modified sequence
cacgcacagtcctgaaaaaaattttaatcttcttttcttagaactatcttggttggcatcatcaggccctgagagcacagtgcatgtcagcatctaagattccacttttcaaaatgaaggacctgatactgatcctatgcctcctggaaatgagttttgcagtgccgttctttcctcagcaatctggaacaccgggtatggctagtttgagccttgagacaatgagacagttgggaagtctgcagagattaaacacactttctcagtattctagatacggctttggaaaatcatttaattctttgtggatgcacggtctcctcccaccacattcctctcttccatggatgaggccaagagaacatgaaactcaacagtatgaatattctttgcctgtgcatcccccacctctcccatcacagccatccttgaagcctcaacagccaggactgaaaccttttctccagtctgctgctgcaaccaccaaccaggccacagcactgaaagaagcacttcagcctccaattcacctgggacatctgcccttgcaggaaggagaactgcctctggttcagcagcaggtggcaccatcagataagccaccaaagcctgagttgcgagtagattttgctgatccacaaggtccatcactcccaggaatggattttcctgatccacaaggtccatcactcccaggattggattttgctgatccacaaggttcaacaattttccaaatagcccgtttgatttctcacggaccaatgccacaaaataaacaatctccactttatccaggaatgttgtacgtgccttttggagcaaatcaattgaatgcccctgccagacttggcatcatgagttcagaagaagtggcaggcgggagagaagacccaatggcctatggagccatgtttccaggatttggaggcatgaggcccggctttgagggaatgccccacaacccagctatgggcggtgacttcactctggaatttgactccccagtggctgccaccaaaggccctgagaacgaagaaggaggtgcacaaggctcccctatgccggaggccaacccagacaatctagaaaacccagctttccttacagagctagaacctgctccccacgcagggctccttgctctccctaaggatgacattcccggcctgccaaggagcccttcagggaagatgaagggactccccagcgtcaccccagcagctgctgacccactgatgacccctgaattagctgatgtttataggacctacgatgctgacatgaccacatccgtggatttccaggaagaagcaaccatggataccacgatggccccaaactctctgcaaacatccatgccaggaaacaaagcccaggagcccgagatgatgcatgacgcatggcatttccaagagccctgacagctctaagatattagctactttctgtatgcacaagcttcccagctttgtccccacagtgtacctttttgctaaaacacttattacccttctgcagcaaaggcattaaaagcgctaagcatatattaataaatgcaagtggctagaaatagtgtaggtccccttcttgctttcaatatcttgttgaaataaaatgtgtcaattgtctctgtgatttagaaacactattaataacatcagagcaaggttctaagggtctcagcatttgatcatcactttttcttagctgtcttaagcattatagaatttctcttaccagcatgacactattatattcaggaaacatggcactgcttttttctctaagcaaaggcaaatatcctcataattctaagctaattcatttaaactttattaaatggggattggtggaaaactcctgactggtattactgggtttggtataatttaatttaaaattctcatttatagagtattttatttaatctagtataaaaaatctagcctattttaaataaagaatttttctcactg

SEQ ID NO: 191596 - DNA, 1344 bp, Artificial Sequence
  derived and/or modified sequence
atgtcggcctccaaaattccgctctttaagatgaaggacctgattcttattttatgtctgctggagatgtcattcgccgtaccattttttccccagcaaagcggtacacctggcatggccagtttatctctagagacgatgaggcagcttggctcactacagagactgaataccttgtctcagtactctcgctacggatttgggaagtcttttaactccctgtggatgcacggcctgctgcctccgcactcttcactgccctggatgagacctcgggagcatgaaacacaacagtatgaatattctctgcccgtacacccaccaccacttccatcacagcccagcctgaagccacaacagcctggactgaaacctttcctccaatccgccgcggctaccaccaaccaggccaccgcgctaaaggaggctttgcagccacctattcacctcggacatttgcccctgcaagaaggtgagcttccccttgtacaacagcaagtggcgccatctgacaagcctccaaaacccgaactccccggcgttgacttcgccgacccccagggcccttcgcttcctggcatggatttccctgatccacagggtcccagcctgccaggtctcgattttgccgatccacagggcagcaccatttttcagatagcgcgtctgatctctcacgggccgatgccgcagaacaaacagtcaccgctgtacccaggcatgctttacgtaccgtttggggccaaccagctcaacgcacccgcacggttgggtattatgagctctgaagaggtcgccggcggtcgcgaggatccaatggcttatggtgccatgttccccggattcggcggaatgcggcccggtttcgaaggcatgccacataatcccgcaatgggcggggacttcacactggaattcgatagcccagtcgctgctactaagggccctgagaatgaggaaggcggtgcgcagggttccccaatgcccgaggcaaatccagacaacctggagaacccagcattcctcaccgaactcgagcccgctcctcatgcaggcttgttagctctcccgaaagatgatattccagggctgccgcgatcaccctctggaaaaatgaaaggactgcccagcgtcacacctgccgcggcggatccccttatgaccccagagctggccgatgtctataggacctacgatgcggatatgactacctccgttgacttccaagaggaggccacaatggataccacgatggccccaaactcattacaaaccagcatgccaggcaataaagctcaggagcctgagatgatgcacgacgcctggcacttccaggaaccttag

SEQ ID NO: 191597 - DNA, 1299 bp, Artificial Sequence
  derived and/or modified sequence
atgagtgcttctaaaataccattatttaagatgaaagatctcatcctgattctttgtctcctggagatgtcatttgccgtcccctttttcccgcagcagtcgggaacccctggaatggcaagcctgagtctcgaaaccatgcgtcagctgggctctctccagaggcttaataccttgagtcagtattcacgatatggatttggaaagtcttttaatagcctctggatgcatggactgcttccaccacatagtagtttgccatggatgaggccacgggagcacgagacgcaacagcccagccttaaacctcagcaaccggggcttaaacccttcttacagtcggccgccgccactacaaaccaggccactgctctcaaggaggctctgcagcctccaatacatctgggacacctgccactccaggagggagaactgccgctcgttcagcaacaggtagcaccaagcgacaagccccccaagcctgagctgccaggagtcgattttgctgacccccagggcccatctctgccgggcatggactttccagatcctcaaggcccatccctgccaggcttagacttcgcagacccccagggaagtaccattttccagatcgcccgccttatctcgcacggcccaatgcctcagaacaaacaaagcccactgtatcccggtatgctttacgtgccgttcggtgccaaccagctgaatgcccctgccagactgggcattatgagcagtgaagaagttgccggagggagagaggaccccatggcttatggtgccatgttcccaggtttcggaggaatgcggcctggttttgagggaatgccacacaaccccgctatgggcggcgatttcacactagagttcgacagccccgttgccgccacaaaaggcccggagaacgaggaaggcggggcacaggggagcccaatgcccgaggccaacccagataatctggagaaccctgcctttctgacagaactggagcccgctcctcacgccggtctgctagcgttgcctaaggatgatattccaggcctgcccaggagtcctagcggaaagatgaaagggcttcctagtgtcacccctgcggctgccgatcccctcatgacaccggagctcgccgacgtctatagaacctatgacgcggatatgacaacatctgtggacttccaggaagaagctaccatggataccacaatggcaccaaacagcttgcaaactagcatgcccggtaataaggcccaggagcctgaaatgatgcacgatgcctggcatttccaggaaccatag

SEQ ID NO: 191598 - DNA, 1341 bp, Artificial Sequence
  derived and/or modified sequence
atgagcgctagcaagatccctctctttaaaatgaaagatctgatcctgattctttgtttactggagatgtcttttgctgttccattcttcccacagcagtcgggtacaccaggcatggcctcgctttccttagaaacgatgcggcagttggggagcctgcaaagattaaataccctgagtcagtacagcagatacggtttcggtaagtcattcaattccctgtggatgcatggcttgctaccaccccactcatctctcccttggatgcgtcctcgagagcacgaaacacagcagtatgaatactcgctacctgttcacccgccgccattacctagccagccatccctgaagcctcagcagcccggattgaagccatttcttcagtccgcagcagccacaactaatcaagccacagcactgaaagaggccctacaaccgccaatccatttagggcatctgccactccaggagggagaattacccctcgtccagcagcaggttgctcccagcgacaagcctccgaaacctgaactgcgcgtggactttgcggaccctcagggcccgagtctgcctggtatggacttccctgatccccaggggccctctttaccagggctcgacttcgccgatccgcagggatccactatcttccaaatcgcccggcttatctctcacggacctatgccccagaataagcagagcccactttatcctggcatgctgtacgtgcctttcggcgcgaatcagctaaacgcaccggcacggctcgggatcatgtcttcagaggaggtggctggagggcgagaagatccgatggcgtatggagctatgttccccgggttcggtggaatgaggccaggatttgaggggatgcctcataatcctgccatgggcggcgacttcacactggaatttgattcacccgttgccgcaacaaaaggtcctgagaacgaagaagggggggcgcagggttctcccatgccggaagccaaccccgacaacctggaaaacccagctttccttacagagctagagcccgctccccacgctgggctgctggccctgccaaaagatgatattcccggcctcccacgatcgccatccggaaagatgaaagggctgccatccgttactccggcagcagccgatcccctgatgacccctgaactagctgacgtgtacaggacttacgatgccgacatgacgacgtccgtggatttccaggaagaggcgactatggatacaacaatggcaccaaattctttgcagacctccatgccaggcaataaggcgcaggagcccgagatgatgcacgacgcctggcatttccaagaaccctag

SEQ ID NO: 191599 - DNA, 1344 bp, Artificial Sequence
  derived and/or modified sequence
atgtctgccagcaagatccccctcttcaagatgaaggacctgatcctgatcctgtgcctgctggagatgagctttgctgtgcccttcttcccccagcagagcggcaccccaggcatggccagcctgagcctggagaccatgaggcagctgggcagcctgcagaggctgaacaccctgagccagtacagccgctatggctttgggaagagcttcaacagcctgtggatgcacggcctgctgcccccccacagcagcctgccctggatgaggccccgggagcacgagacccagcagtatgagtacagcctgcctgtgcaccccccacccctgcccagccagcccagcctgaagccccagcagcccggcctgaagcccttcctgcagagcgctgctgccaccaccaaccaggccacagccctgaaggaggccctgcagccccccatccacctgggccacctgcccctgcaggagggggagctgcccctggtgcagcagcaggtggcccccagcgacaagccacccaagccagagctgcccggggtggactttgctgacccccagggccccagcctgcccggcatggacttcccagacccccagggccccagcctgcccggcctggactttgctgacccccagggcagcaccatcttccagatcgcccggctcatcagccacggccccatgccccagaacaagcagagccccctgtacccaggcatgctgtatgtgccctttggagccaaccagctgaatgccccagcccggctgggcatcatgagcagcgaggaggtggccggcggccgggaggaccccatggcctatggagccatgtttcctggctttggaggcatgaggcctggctttgagggcatgccccacaacccagccatgggcggggacttcaccctggagtttgacagccctgtggccgccaccaagggcccagaaaatgaggagggcggggcccagggcagccccatgcctgaggccaacccagacaacctggagaacccagccttcctgacagagctggagcccgcccctcatgctggcctgctggccctgcccaaggatgacatccctggcctgcccaggagccccagcggcaagatgaagggcctgcccagcgtgaccccagctgctgctgaccccctgatgaccccagagctggctgatgtgtaccgcacctatgatgctgacatgaccacctctgtggacttccaggaggaggccaccatggacaccaccatggcccccaacagcctgcagacctccatgcctggcaacaaggcccaggagcctgagatgatgcatgatgcctggcacttccaggagccctag

SEQ ID NO: 191600 - DNA, 1299 bp, Artificial Sequence
  derived and/or modified sequence
atgtctgccagcaagatccccctcttcaagatgaaggacctgatcctgatcctgtgcctgctggagatgagctttgctgtgcccttcttcccccagcagagcggcaccccaggcatggccagcctgagcctggagaccatgaggcagctgggcagcctgcagaggctgaacaccctgagccagtacagccgctatggctttgggaagagcttcaacagcctgtggatgcacggcctgctgcccccccacagcagcctgccctggatgaggccccgggagcacgagacccagcagcccagcctgaagccccagcagcccggcctgaagcccttcctgcagagcgctgctgccaccaccaaccaggccacagccctgaaggaggccctgcagccccccatccacctgggccacctgcccctgcaggagggggagctgcccctggtgcagcagcaggtggcccccagcgacaagccacccaagccagagctgcccggggtggactttgctgacccccagggccccagcctgcccggcatggacttcccagacccccagggccccagcctgcccggcctggactttgctgacccccagggcagcaccatcttccagatcgcccggctcatcagccacggccccatgccccagaacaagcagagccccctgtacccaggcatgctgtatgtgccctttggagccaaccagctgaatgccccagcccggctgggcatcatgagcagcgaggaggtggccggcggccgggaggaccccatggcctacggggccatgtttcctggctttggaggcatgaggcctggctttgagggcatgccccacaacccagccatgggcggggacttcaccctggagtttgacagccctgtggccgccaccaagggcccagaaaatgaggagggcggggcccagggcagccccatgcctgaggccaacccagacaacctggagaacccagccttcctgacagagctggagcccgcccctcatgctggcctgctggccctgcccaaggatgacatccctggcctgcccaggagccccagcggcaagatgaagggcctgcccagcgtgaccccagctgctgctgaccccctgatgaccccagagctggctgatgtgtaccgcacctatgatgctgacatgaccacctctgtggacttccaggaggaggccaccatggacaccaccatggcccccaacagcctgcagacctccatgcctggcaacaaggcccaggagcctgagatgatgcatgatgcctggcacttccaggagccctag

SEQ ID NO: 191601 - DNA, 1341 bp, Artificial Sequence
  derived and/or modified sequence
atgtctgccagcaagatccccctcttcaagatgaaggacctgatcctgatcctgtgcctgctggagatgagctttgctgtgcccttcttcccccagcagagcggcaccccaggcatggccagcctgagcctggagaccatgaggcagctgggcagcctgcagaggctgaacaccctgagccagtacagccgctatggctttgggaagagcttcaacagcctgtggatgcacggcctgctgcccccccacagcagcctgccctggatgaggccccgggagcacgagacccagcagtatgagtacagcctgcctgtgcaccccccacccctgcccagccagcccagcctgaagccccagcagcccggcctgaagcccttcctgcagagcgctgctgccaccaccaaccaggccacagccctgaaggaggccctgcagccccccatccacctgggccacctgcccctgcaggagggggagctgcccctggtgcagcagcaggtggcccccagcgacaagccacccaagccagagctgcgggtggactttgctgacccccagggccccagcctgcccggcatggacttcccagacccccagggccccagcctgcccggcctggactttgctgacccccagggcagcaccatcttccagatcgcccggctcatcagccacggccccatgccccagaacaagcagagccccctgtacccaggcatgctgtatgtgccctttggagccaaccagctgaatgccccagcccggctgggcatcatgagcagcgaggaggtggccggcggccgggaggaccccatggcctacggggccatgtttcctggctttggaggcatgaggcctggctttgagggcatgccccacaacccagccatgggcggggacttcaccctggagtttgacagccctgtggccgccaccaagggcccagaaaatgaggagggcggggcccagggcagccccatgcctgaggccaacccagacaacctggagaacccagccttcctgacagagctggagcccgcccctcatgctggcctgctggccctgcccaaggatgacatccctggcctgcccaggagccccagcggcaagatgaagggcctgcccagcgtgaccccagctgctgctgaccccctgatgaccccagagctggctgatgtgtaccgcacctatgatgctgacatgaccacctctgtggacttccaggaggaggccaccatggacaccaccatggcccccaacagcctgcagacctccatgcctggcaacaaggcccaggagcctgagatgatgcatgatgcctggcacttccaggagccctag

SEQ ID NO: 191602 - DNA, 1344 bp, Artificial Sequence
  derived and/or modified sequence
atgagcgccagcaagatccccctgttcaagatgaaggacctgatcttgatcttgtgtctgctcgagatgtctttcgccgtacctttcttcccgcagcagtccggcacgcctggcatggcgagcttatctcttgagaccatgcggcagctggggtctctgcaacggctgaataccctttctcaatattcccgctatgggtttggaaagtcttttaactctttatggatgcacggccttctccctcctcacagttctctgccatggatgaggccaagagaacacgaaactcagcagtacgaatattccctccccgtgcatccaccacccctgccaagtcagccaagtctgaaaccgcagcaaccagggcttaagcccttcttacagtcagcagcggccacaaccaaccaggcaactgcgctgaaggaagccctgcagccgcccatacacctcggccatctgccgctgcaggaaggggaacttccacttgtgcagcaacaggtggcgcctagtgataagcctccaaagccggaattacctggggttgattttgccgaccctcaggggccgagtttaccgggaatggattttcctgatccccagggcccctcactacccggcttggatttcgcagaccctcagggatcgaccatcttccaaattgcgagactcattagccacggccccatgccccaaaacaagcagagtccactttatcctggtatgctctacgtgcctttcggggccaaccagttgaacgcccccgctagactcggcataatgagctctgaggaggtggcaggaggcagggaggacccgatggcctacggagccatgttccctggcttcggcgggatgcgcccgggattcgaaggtatgcctcataacccagctatggggggagacttcacgctggaattcgatagtcccgttgctgccactaagggccctgaaaacgaagagggtggcgcccaaggttcccccatgcctgaggcaaatccagacaacctggaaaatccggccttcctcacagagctggaaccggcaccacacgccggcctcctagcacttccaaaagatgatatcccagggctgcctcggtctccctctggcaaaatgaaagggctcccctccgtgactcctgcagccgccgacccgctgatgactcccgagctcgccgacgtgtaccggacatatgacgctgacatgactaccagcgtggattttcaggaagaggcaaccatggacacgaccatggcccctaacagtctgcagacctctatgcccggcaacaaggctcaggaacctgaaatgatgcatgacgcgtggcattttcaggagccctag

SEQ ID NO: 191603 - DNA, 1299 bp, Artificial Sequence
  derived and/or modified sequence
atgagcgccagcaagatccccctgttcaagatgaaggacctgatcctcatcctctgccttttagaaatgtccttcgcagtgccgttttttcctcagcagtcgggtacccccggcatggcttcactgtctctggaaacaatgaggcagctgggctccctccagagattgaataccctatcccagtattcgagatacggctttgggaagagctttaacagcctctggatgcatggactcctccccccgcattcatccctgccttggatgcgaccccgcgagcatgagacacagcagccgagcctgaaacctcaacagcccgggcttaaacctttcctccagtccgctgctgcaacgacgaaccaggccaccgccttgaaggaagctctgcagcctcccatccacctgggtcacctgccgctgcaggagggggagcttccattggtccaacagcaggttgcccccagtgacaaacctcctaagcccgaactccctggtgtcgactttgcggatccacaggggccttccctgcccggcatggacttccctgatccgcaaggccccagtctgccaggcctggatttcgcagatccccaaggctctaccatcttccagatcgcccgtctgatcagccacgggccaatgccacaaaacaaacaaagcccactatatcctggtatgttgtacgtcccctttggagctaaccagctgaacgcgcctgcccgactgggaataatgtcctccgaggaggtggccggcggccgcgaggaccccatggcatatggggccatgttcccagggttcgggggaatgcgtcccgggttcgaggggatgccccacaaccctgctatgggaggagatttcaccctcgagttcgactcaccagtggccgccaccaaaggtcctgagaatgaggaggggggtgcccaaggctccccgatgcccgaggcaaaccccgacaacctcgaaaatccagcctttctcacagagctcgaacctgctcctcatgcggggctattagctttacccaaggatgacattcctgggctgccaaggagtccttccggaaagatgaaagggctgccctccgtcaccccagccgctgccgacccactcatgactcccgagctggcagacgtgtacaggacttatgacgctgacatgaccacctccgttgacttccaggaagaggcaaccatggacaccacaatggctcctaattcactacagacctcgatgccaggcaataaggcgcaggagccggagatgatgcatgatgcttggcatttccaggagccttag

SEQ ID NO: 191604 - DNA, 1341 bp, Artificial Sequence
  derived and/or modified sequence
atgagcgccagcaagatccccctgttcaagatgaaggacctgatcctgatcctgtgcctactggagatgagtttcgcggtacccttttttccccagcagtcaggcacccctggcatggcctccttatcacttgagactatgcggcagctggggtcattgcaacgcctgaacaccctctctcaatacagccgttatggcttcggcaagtctttcaacagtctgtggatgcatggcttgttacccccacacagttccctgccctggatgagacctcgtgagcacgaaacccaacagtatgagtattctctgcctgtgcacccaccccccttgccgagtcaacctagtctgaagccgcagcagcccgggctcaagccattcctgcagagcgcggcagctactactaatcaagctactgcccttaaggaagccctgcagcctcctatccacctgggtcatctgcctctccaagaaggcgagctgcccctggtgcaacagcaagtggccccttcagacaagccaccaaagcctgaacttagagtagattttgccgatccacagggtcctagtttacctggcatggatttcccagacccacagggcccttctcttcccggtctagacttcgccgacccacagggctcgactatatttcagatcgcaagacttatcagccatggtcctatgccacagaacaagcagtcaccactgtatcccggcatgctctatgtaccgttcggggctaatcagcttaacgcgccagcccgcctcgggatcatgtccagcgaagaggttgccggaggtagagaggaccctatggcatacggagccatgtttcctggctttggtggtatgcgtcccggtttcgaaggcatgccacacaatcctgcaatgggaggcgattttacattggagtttgatagtcccgtcgccgccaccaaaggtcctgagaacgaggagggtggcgcacagggtagccccatgccggaggcaaatccagacaacctggaaaatcccgctttcctcactgaactcgagcctgcaccccatgcaggcctactggcactgcccaaagacgatattccaggactgccccggtccccgtccggcaaaatgaaaggacttccgtcagtgacacctgccgccgcagaccccctcatgaccccggagctagccgacgtgtacagaacttatgacgcggatatgacgacatctgtggatttccaagaggaggcaactatggacaccacaatggctccaaactccctgcagacatccatgccaggtaataaggcacaggagcccgaaatgatgcacgatgcgtggcactttcaagaaccctag

SEQ ID NO: 191605 - DNA, 1344 bp, Artificial Sequence
  derived and/or modified sequence
atgagcgcatctaagattccattgttcaagatgaaagatctcatcttgatactgtgtttgctcgagatgtccttcgccgtgcccttcttcccacaacaaagcgggactcctggcatggccagcctctcactggagacaatgcgccaacttggatcccttcagcgtcttaacacactttctcagtactccagatatgggttcggtaagtccttcaatagtctttggatgcacggcctgctgccaccccacagtagtctcccttggatgcgaccaagagagcatgagacacaacagtacgagtacagccttcccgtgcatcccccaccacttccttcacagccttctctcaaaccccagcagcccggactgaaaccgttcctgcagagcgccgctgccacaactaatcaggccaccgcgctgaaggaggctttgcagcccccaattcacctgggtcatttaccattgcaagagggtgagctgcccctggtgcagcagcaggtcgcacccagcgacaagccacccaagcccgaactgccaggggtagattttgctgacccgcaagggccttctctgcctggcatggatttccctgatccacagggaccaagtttgccgggtttggattttgccgaccctcagggcagcaccattttccagatcgcgcgtcttatctctcacggacccatgccgcaaaataagcagtcccccctgtaccccggaatgctttatgtgccatttggggcaaatcagttaaacgctcccgcacgccttgggatcatgtcctccgaagaggttgcaggagggagagaagacccaatggcctatggggctatgttcccagggtttgggggtatgcggccaggttttgaaggtatgccccacaatcctgctatgggaggagactttacattggaatttgactcaccagtggctgctactaaaggacctgaaaacgaagaaggcggagctcagggcagccctatgcccgaagcgaatcccgataatctcgagaatcctgccttcctcaccgagctggaacctgcaccccacgccggactgctagcgctccctaaggacgatatccctggattaccccgtagccctagcggcaaaatgaaaggactcccctcagtcacgcctgccgcagctgaccctctgatgacccccgaactagcagatgtttaccggacttacgatgccgatatgactacaagcgtggactttcaggaagaagctaccatggataccaccatggcaccaaactcacttcagacctcaatgccaggaaataaggcccaagagccagagatgatgcacgatgcctggcattttcaggaaccttag

SEQ ID NO: 191606 - DNA, 1299 bp, Artificial Sequence
  derived and/or modified sequence
atgtccgcttcaaagatccccctgtttaagatgaaggatctcatcctgatcctgtgccttctcgagatgtctttcgcggtgcccttcttcccccagcagtcaggcacacctggcatggctagcttgagcttggaaacaatgagacagctcggatccctgcaacgtctgaacactttatcccagtattcaaggtatggtttcggtaaatcctttaacagcttgtggatgcatggtctgctacccccacattctagcctgccatggatgcggccacgagaacatgagacccaacagccatctctgaagccccagcagccaggtttaaagcccttcctgcaatcagctgcagctaccacaaatcaggcaaccgccttaaaagaggctctgcagccacccatccatctcggacacctgccgctgcaggaaggcgaactgcctttggttcaacaacaggtggcgccatcagacaaacctcccaaacccgagttgcctggcgtggactttgcggatccccagggaccttctttgccaggaatggattttcccgaccctcagggcccatcactgcctggtttggatttcgccgatccccaagggtcaactatttttcaaatagccagactgatcagccacgggccaatgccccagaataaacaaagccccctctatcccggaatgttatacgtaccgttcggcgcaaatcaactcaacgccccagcgagactgggaataatgtcttctgaagaggttgcaggtggcagggaggacccaatggcgtacggggctatgtttcctggcttcgggggtatgcggccaggtttcgagggaatgccccataatccagccatgggaggtgactttacactggaatttgacagccctgtagcagcgacgaaaggaccggagaacgaggaaggaggagctcaaggaagccctatgcccgaagcaaatccagataacttggagaatcccgctttcttgacagagctggagcctgcaccacacgctgggttgctcgcattgcccaaagacgatataccaggtcttcctaggagccccagtgggaagatgaagggcttgccctcagtcacccccgctgctgctgacccattgatgactccagaactggccgacgtgtacagaacctacgacgccgacatgactacatctgtggacttccaagaggaggccactatggatactacgatggccccaaattctctccagacatccatgccgggaaacaaagcccaggaacctgaaatgatgcatgacgcttggcacttccaggagccttag

SEQ ID NO: 191607 - DNA, 1341 bp, Artificial Sequence
  derived and/or modified sequence
atgagcgcgtccaaaatccctctgtttaagatgaaggacttgatactgatcctctgtctactcgaaatgtctttcgctgtacctttctttcctcagcaaagtgggactccaggcatggcttcattgtctctggagactatgcgacagctgggctcactccagagattaaatacactgtcccagtactctcggtacgggttcggtaagtcttttaattccttgtggatgcatggcctgctgccaccacatagcagcctgccatggatgcggccacgcgaacacgagacccagcagtacgagtactccctgcctgtgcatccccctcctctgccatctcaacctagtcttaagcctcagcaacccggactcaaaccctttctccagagcgccgcagcaaccacaaatcaggccactgccctgaaagaagccttgcagccaccgatccatctgggacatctcccattgcaggaaggggagctgccactggtgcaacagcaggtcgctccttccgacaaaccacccaagccagaacttagggttgatttcgctgatcctcagggtccttctctaccaggtatggatttccctgatccgcaaggaccttctctccctgggctggactttgctgatccacagggatctaccatattccagattgccagactgattagccacgggcctatgccccagaacaagcaaagcccactgtacccgggtatgttgtacgtcccttttggagctaatcagctgaatgccccagccagactgggaattatgtcaagcgaggaagtcgctggcggaagagaggaccccatggcatacggggctatgttccctggcttcggaggtatgcgccctggatttgagggaatgccgcataatcctgctatgggcggtgatttcaccctggagtttgatagccctgtggccgcaacaaaaggcccagaaaacgaggagggaggggcacaggggagccccatgccagaggcaaaccccgacaacctcgaaaacccagccttcctgacggagcttgagccggctccccacgccggtctgctggccttgcccaaagacgacatacctggcttaccccgatctccttctggaaagatgaagggcctgcccagtgttaccccggctgccgctgatccgctcatgactcccgagcttgccgatgtttaccgaacatacgatgctgacatgactacctcggtggacttccaagaggaggcaactatggacaccactatggcaccaaattccctccaaacatccatgccagggaataaggcacaggaacctgagatgatgcatgatgcatggcacttccaggagccctag

SEQ ID NO: 191608 - DNA, 1344 bp, Artificial Sequence
  derived and/or modified sequence
atgtctgcttccaagatccctctgttcaaaatgaaggacctgatcctgatcctctgtcttttggaaatgagttttgccgttccctttttcccgcaacagtccggcactccaggcatggcaagcttgtctctggagacaatgcggcaactcggcagtttgcaaaggcttaatacactgtcccagtatagtaggtacggctttgggaaatcatttaacagtctctggatgcacggactcctcccaccacattcctccctaccctggatgcggcctcgcgaacatgaaacgcagcagtatgaatattcactacccgtccatcctcctcctctcccttcccaaccctccctgaagccacaacagcccggtctaaagccattcttgcagagtgctgcggcaacaacaaaccaggccaccgccctgaaggaagccctccagccgccaatccacttaggacacttacctcttcaagaaggagagctgcccctggtacagcagcaggtggcaccatccgacaaacctccaaaacctgagctgccaggcgtggatttcgctgatccgcagggacctagcctaccaggcatggactttccggatccccagggcccaagcctgcctgggttggattttgcagacccgcagggcagtactattttccagatcgcaaggttaatttcccacggcccaatgcctcagaataagcaatcccctctctacccggggatgctgtacgtaccatttggcgctaatcaactgaatgcccccgctcggctaggcatcatgagttctgaagaggtcgcaggaggcagggaagacccaatggcttacggcgccatgttcccaggttttgggggcatgaggccgggattcgaaggtatgccacacaaccccgcaatgggcggggattttacactggaatttgactcacctgtcgccgcaaccaaaggccccgaaaacgaggaaggaggtgcacagggatcccctatgcccgaggctaatccagataaccttgaaaacccagcatttctgaccgaacttgaaccggcccctcacgctggcctgctggctttgccaaaagacgacatccccggcctgccaaggagtccctctggaaaaatgaaaggactgccctcagtgacacctgccgctgcagatcctctaatgacacctgagctcgccgacgtctatcgcacttacgacgctgatatgacgacaagtgtcgattttcaggaagaggccacaatggataccacaatggcgccaaatagcttacaaacatctatgccaggaaataaggcgcaagaacccgaaatgatgcacgatgcatggcattttcaagaaccttag

SEQ ID NO: 191609 - DNA, 1299 bp, Artificial Sequence
  derived and/or modified sequence
atgagcgcctctaagatcccgctgtttaagatgaaagatttgattctgatactctgtctgttggagatgagctttgctgttcctttctttccccaacaatcagggaccccaggtatggcaagtttgagcctggaaacgatgcgccagctgggatccctgcagcggctcaacacactctcacaatactcaaggtatgggtttggtaaaagcttcaactctctatggatgcacggcctgttacccccacactcctctctgccctggatgaggccacgagagcacgagacccaacagccctctttgaaacctcaacaacccggtctcaagcctttcctgcaaagcgccgcagcaaccactaatcaagcaacagccctcaaggaagctctgcaaccacccatccatctcggtcatttgcccctgcaggagggcgaactacccctagtccagcagcaggtggcgccttccgataagccacccaagcccgagcttcccggcgtggatttcgctgacccgcaagggccctccctcccaggaatggatttcccagacccacagggtcctagccttcctggtctggacttcgccgatcctcaaggcagcaccattttccaaatcgctagactcatttctcacggccccatgcctcagaataagcagtctcccctgtatccgggaatgctctatgtgccattcggagctaatcagctgaatgctcctgcgcgactgggcataatgtcttcagaagaagtcgcaggggggcgcgaggatcctatggcatacggtgccatgttccccgggttcggcggcatgcgtcctggctttgaggggatgccccataaccctgcgatggggggcgactttacactcgaatttgacagccctgtggctgctaccaaggggccagaaaatgaagaaggtggagcccagggaagccctatgccagaagccaatccagacaatctagagaaccctgcgtttttgaccgagttggagcctgcaccacacgccggacttctggccctgccgaaggatgacattcccggactgccaagatcaccatctggcaaaatgaagggcctcccaagcgttacccccgcagccgccgaccctttgatgacgcctgagctggcagacgtataccggacatacgacgcggacatgacaacctcagttgattttcaggaagaagccacaatggacacaaccatggccccaaattctcttcaaacctcaatgcctggcaataaggcacaggaaccagagatgatgcacgatgcctggcactttcaggagccttag

SEQ ID NO: 191610 - DNA, 1341 bp, Artificial Sequence
  derived and/or modified sequence
atgagcgcgtccaaaattccccttttcaagatgaaagacctgatcctgatactttgcttgcttgaaatgagcttcgcagtcccattcttccctcagcaatctggcacacccggaatggccagtctgtctctcgaaactatgcgccagctgggttcccttcagcgactcaatactctgagccagtactcccgctatggctttgggaagtcatttaactccttgtggatgcatggcctacttcccccccactcttccctcccctggatgcgaccaagagaacacgaaacacagcagtacgaatatagcctgcccgttcatcctccaccattaccttcacaaccttcactgaagcctcagcagcctggccttaagccgtttctacagtctgccgccgccacaactaaccaggccactgcccttaaggaagccctccagcctcccattcacctcgggcacttgcccctccaggaaggtgaattgcctctggtgcaacagcaggtggcacccagcgacaaaccaccaaaacccgagctgagagttgattttgctgatccacagggcccttccttacccggtatggattttcctgatccacaaggcccctccttgcctggattggactttgccgatccgcagggatcaactattttccaaattgctaggctcatcagccacgggccgatgccccaaaacaaacagtcccctctgtatccgggtatgctctacgttcccttcggggctaaccagcttaatgctccagcccgactgggaatcatgtcttcagaagaggtcgccggcggccgggaggaccctatggcgtacggggctatgttcccaggtttcggcggtatgaggccgggttttgaaggcatgccacataaccctgccatggggggagacttcacactggagttcgacagccctgttgctgcaacaaaggggcccgaaaatgaagaaggcggcgcccaagggagccccatgccggaagccaaccccgataatctcgaaaaccccgctttccttacggagctggaaccggcgccccacgctggccttcttgccctgcccaaggacgatattccggggctaccaagatcgccatctggaaaaatgaaaggtctaccaagcgttaccccagccgccgcggacccgctgatgacgccagagctcgccgacgtgtaccgaacctacgacgccgacatgaccaccagtgtagacttccaggaggaagccacaatggacacaacaatggctcccaactccttgcagacctccatgccagggaataaggcccaagagccagaaatgatgcacgatgcatggcacttccaagagccctag

SEQ ID NO: 191611 - DNA, 1344 bp, Artificial Sequence
  derived and/or modified sequence
atgtccgcctctaaaattccgctgtttaagatgaaagatttaatcctgatattatgccttttagagatgtcctttgctgtgccttttttcccgcaacagagcggaacacccggaatggcatcactcagcttggaaacaatgcggcagcttggttctctacagagacttaacacattgtcgcaatactctcgttacggattcgggaaaagcttcaattcactctggatgcatggacttcttcccccacatagcagcctgccatggatgcgtccgagagaacacgaaacccagcaatatgaatacagtctgcccgtgcaccccccacctctcccatctcagccaagcttgaagcctcaacagccaggtctgaagccttttctgcagagtgcagccgccacaactaaccaagctacagcactgaaagaagcccttcagccccctattcacttgggacacctgcccttgcaagagggagagctgcctctggtacagcagcaggtcgcaccatccgacaaacccccaaagcccgaactgcccggagtggacttcgcagatccccaaggaccatctctgcccggaatggatttcccggatccacaaggaccctcgttaccaggcctcgactttgctgatcctcaagggagtaccatttttcagattgctcgtctcataagccacggtccgatgccgcagaataaacagtcacccctgtaccccggtatgttatacgtgccatttggcgcgaaccagctaaacgctcccgccaggctcgggattatgagctccgaagaagtcgctgggggcagagaagaccctatggcatacggtgctatgtttcctggctttggaggtatgagacccgggtttgaaggcatgccccacaatcccgcaatgggcggtgattttaccctggagtttgattcacccgtcgccgcgacaaagggacccgaaaacgaagaaggtggtgcacagggttcccctatgcccgaagccaaccccgacaacctcgagaaccctgcatttttgactgaactggaacccgccccgcacgcgggcttgctggccctccccaaggacgacattccaggactcccgcgaagcccttctggaaaaatgaaaggcctccctagcgtcactcctgccgcagccgacccacttatgactcctgagctcgccgacgtttaccgcacttatgatgccgatatgacaacaagcgtagatttccaggaagaagctactatggataccacaatggctcccaactctcttcagacgagcatgcccggtaacaaggcgcaggaaccagaaatgatgcacgacgcatggcacttccaagaaccctag

SEQ ID NO: 191612 - DNA, 1299 bp, Artificial Sequence
  derived and/or modified sequence
atgagtgcatcaaagatcccactgtttaagatgaaagatttgattttaatcctatgtctcctggaaatgtcttttgcagtcccattttttcctcagcagagcggcacacccggtatggccagcctttccctcgagacaatgcgccaattaggttctctacagcgacttaacaccttatcccagtattcaagatatggctttggcaaaagttttaactcactatggatgcacgggcttctcccaccccactcatccctgccttggatgcggccaagggaacatgaaacgcagcagccaagcctaaaaccccagcaaccagggcttaagccctttcttcagtcagccgccgctacaaccaatcaggccactgccctcaaagaggccctccagcccccaattcatctcggtcacctgccactgcaggagggagagctgccgcttgttcagcaacaggtcgcaccaagcgataagccacctaaaccggagttgccaggggtggacttcgcagacccacagggccccagccttcccggcatggacttcccagatccccaaggcccctcattgcctggacttgatttcgccgatcctcagggctctacgatcttccaaatcgctagactgatatcacatggaccgatgccacaaaacaagcagtcaccgctataccctggaatgctgtacgttcctttcggggccaaccagctcaacgcccccgcaagactgggaattatgtcttccgaagaagtggccggcggacgagaagaccctatggcctacggtgctatgtttcctggatttggcggtatgagaccaggtttcgagggcatgccccacaatcccgctatggggggagactttactctggagttcgactctccagtggcagccacaaaaggccccgaaaatgaagagggcggcgcccagggatcccccatgcccgaggccaaccctgataacttagagaatccagcctttctgacagaattagaacctgcgccccacgccggtctacttgcgcttcccaaagacgatattcccggcctaccacgttccccctcaggtaaaatgaaaggactcccttctgtgaccccagccgccgctgacccactcatgacgccggagcttgctgatgtataccggacatacgatgccgatatgaccacaagcgtggattttcaggaagaggccacaatggacacgaccatggcccctaactcacttcagacatcaatgccggggaacaaagcacaagaaccagagatgatgcacgatgcttggcactttcaagaaccttag

SEQ ID NO: 191613 - DNA, 1341 bp, Artificial Sequence
  derived and/or modified sequence
atgagcgcgtccaaaattccccttttcaagatgaaagacctgatcctgatactttgcttgcttgaaatgagcttcgcagtcccattcttccctcagcaatctggcacacccggaatggccagtctgtctctcgaaactatgcgccagctgggttcccttcagcgactcaatactctgagccagtactcccgctatggctttgggaagtcatttaactccttgtggatgcatggcctacttcccccccactcttccctcccctggatgcgaccaagagaacacgaaacacagcagtacgaatacagcctgccagtgcatcccccccccttgccctctcagccttccttgaagccccagcaaccaggactcaagccatttctccagagcgcagccgccaccacaaatcaggctacagctcttaaagaagccttacagcccccaatccacctgggccatttaccacttcaggagggagaactgccactggtgcagcagcaagtggcgccatctgacaaaccccccaagccggaactccgcgtggacttcgctgatcctcagggccccagtctccctggcatggatttccccgaccctcagggcccatcgctgccgggactcgattttgccgatcctcaaggctccacaatctttcagatcgcacgcttaatttctcacggcccaatgcctcagaacaaacagtctcccctttatcccggtatgttgtacgttcccttcggtgcaaaccagctgaacgcacctgcgcggctaggaattatgtcctcagaggaggtggcaggaggcagggaagatcccatggcttacggtgcaatgtttcctggcttcggtgggatgagaccaggattcgaaggtatgccccataaccccgcaatggggggggactttacattggagttcgactctccagtggcagcaactaagggtcctgaaaatgaagaaggcggcgcacaaggctctcccatgcccgaggcaaacccagacaatctcgagaacccagcctttttgacagaactggaacctgctccccacgccggcctgctggccctccctaaagatgacatacctggactgcccagatccccatccggaaaaatgaaaggactacctagtgtaactcccgcagccgcagacccactgatgacgccagaactggcggatgtgtacagaacgtatgatgcagacatgactacttcagttgatttccaggaggaagccacgatggacacaactatggcgccgaactctctacagacaagtatgcccgggaataaggcacaggaacctgagatgatgcatgatgcctggcacttccaagaaccctag

SEQ ID NO: 191614 - DNA, 1341 bp, Artificial Sequence
  derived and/or modified sequence
atgtccgcgtctaagattcctttgttcaagatgaaggacctgattctcatcctgtgcctgctggaaatgtccttcgccgtgcctttcttcccgcagcagtcaggtacacccggtatggccagtctgtccctggaaacaatgaggcaactcggtagtctccaaaggctgaacaccctgtcccagtactcaaggtacggttttggaaagtctttcaactctttgtggatgcacggactgctcccccctcacagctcactgccctggatgaggccacgcgaacatgagacccaacagtatgagtactctttgcccgtgcatccacctcctttgccgtctcagcctagcctgaagccgcaacaacccggacttaaaccatttttgcagtccgccgccgctactaccaaccaggccaccgccttgaaggaagcacttcagccacccatccatctcggtcacctgccgctccaagaaggcgaactgcccctggtgcagcaacaagtcgcaccctctgacaaaccaccgaaaccagaactgccaggcgtagattttgctgacccacaaggtccaagcctccccggcatggactttcccgacccacagggcccttctctgccaggtcttgattttgcagatccccagggttccaccatctttcagattgccagattgatctctcacggcccgatgccacagaataagcagtctcctctctatcctggtatgctgtacgtgccattcggtgctaatcaacttaatgctcccgctcgcctcggtattatgagtagcgaggaagtggccggcggaagggaggaccctatggcttatggcgcgatgttccctggcttcggaggtatgcgccccggatttgaaggcatgccgcataacccggccatgggtggtgattttacactggaattcgattctcctgtcgctgctacaaaaggccctgagaacgaggaaggcggagcccaaggcagtccaatgcccgaggctaaccccgataacctggagaaccccgccttcctgactgagcttgagcctgccccccacgctggtctgttggcgcttccaaaggatgacataccgggcctgccaagaagcccctccggcaaaatgaaaggtcttcccagtgtgacgccagctgccgccgatcctttgatgacccctgaactggccgacgtgtataggacctacgacgctgatatgactacgtctgtggactttcaagaggaggcaacgatggataccacaatggctccgaattccctgcagaccagtatgcccggcaataaggctcaggagcccgagatgatgcatgacgcttggcacttccaggagcca

SEQ ID NO: 191615 - DNA, 1341 bp, Artificial Sequence
  derived and/or modified sequence
atgagcgcgagtaagattccactcttcaagatgaaagacctgatcctgattctctgcctgctcgagatgtcatttgcagtgccttttttcccgcaacaaagcggcaccccgggaatggcctcactctccctcgagactatgcgccagctgggttcactgcagcggctgaacaccctgtctcagtattcaagatacggcttcggaaagtcttttaactcactgtggatgcacggattgttgccgcctcactcctcgctgccttggatgcgcccacgggaacacgaaacccagcaatacgaatactcgctgcctgtccacccgcctccactgccatcacagccgtccctcaagcctcagcaaccaggactcaagccattcctccaaagcgcggcagcaactaccaaccaagcgactgccctgaaagaagcgcttcaacccccgattcatctcgggcacctgccactccaagaaggagagctcccgctggtgcagcagcaggtggctccgagcgacaaaccgccgaagccggaactgcccggagtggacttcgccgatccccagggaccatcgctgccaggaatggatttcccggacccacaaggcccttcgctgccgggcctggatttcgccgatccgcaagggagcacgattttccagatcgccagactgatatcacatggaccgatgccccagaacaagcaatcaccgctgtacccgggaatgctttacgtgccattcggagccaaccaactgaatgcccctgcccggctcgggatcatgtcgtcggaagaggttgcaggaggccgcgaggaccccatggcatacggagcaatgttcccaggtttcggagggatgcggccgggatttgaaggaatgccacacaacccggcgatgggaggagatttcacccttgagttcgacagcccagtcgccgcaaccaagggaccggagaatgaagaaggaggggcccagggatccccgatgccggaggcaaatccggacaacctcgagaacccggcatttctcaccgagctggaaccagcgcctcatgccggattgctcgccctgcctaaggatgatatccctggtctgccacgctcgccttcaggaaagatgaaaggcctgccgtccgtgactccggcagcggccgacccgctcatgaccccagagctggccgacgtgtacaggacttacgacgccgacatgaccaccagcgtggacttccaggaagaagctaccatggacactactatggctccgaattcactgcagacgtccatgccgggaaacaaggcccaggaaccggagatgatgcacgacgcgtggcactttcaagagcct

SEQ ID NO: 191616 - DNA, 1341 bp, Artificial Sequence
  derived and/or modified sequence
atgagcgctagcaaaatacccctcttcaaaatgaaggacctcatcctcattctctgcctgctggagatgagtttcgccgtaccatttttccctcagcagagtggtactcctgggatggcatctctcagcctggaaacgatgcggcagcttggctctttgcagcgactgaatacactatcccagtactccagatacggattcgggaagagtttcaatagcctttggatgcatggactgctgccaccgcacagtagcttaccttggatgagaccaagggagcacgaaactcaacagtacgaatacagtctgccagtccacccgcctcctctgccttcacagccctcactgaagccccagcagcccggactgaaaccattcctccagtctgccgctgccactactaatcaggctaccgctctgaaggaagccctgcagccgcctatccatctgggccacttgcctttacaggagggcgagctgcccttggtgcaacagcaggtggctccatctgacaaaccaccaaagcccgagctgcccggggtcgatttcgccgacccacagggtccttctttaccgggcatggatttccctgacccacaagggccgtctctccccgggctggacttcgccgacccacagggctctacgattttccagatcgcaaggctgatttctcatggccccatgccgcagaataagcagtctccactctaccccgggatgttatacgttcctttcggcgccaatcaacttaatgctcccgctcgtctgggaatcatgtcgtccgaagaagttgccggtggaagagaagatccaatggcgtatggggctatgtttcccggcttcggggggatgcgacctgggtttgagggaatgccccacaaccctgctatgggaggggactttaccctcgagtttgattctccagtcgccgctacgaaggggcccgaaaacgaggagggtggtgcccagggaagccccatgccggaggcaaatccagataatcttgaaaacccagcctttttgaccgagttggagcccgctccccatgccgggctgctggccctgcctaaggatgatattcccggtttgcctcgctcccctagcggtaagatgaaaggattgccgtctgttacccccgccgcggccgacccactgatgacccctgagctggcggatgtctacagaacttacgatgctgatatgactacaagcgtggacttccaggaggaagcaaccatggacaccacaatggcccccaatagcctacaaacttctatgcccgggaataaggcgcaggagccagagatgatgcatgacgcttggcatttccaagagcct

SEQ ID NO: 191617 - DNA, 1341 bp, Artificial Sequence
  derived and/or modified sequence
atgtcggcctcaaagatccccctcttcaaaatgaaagaccttatccttattctgtgtctgctcgaaatgtcgtttgccgtccccttttttccacagcaatcaggtacccctggcatggctagcctttccctggaaaccatgcggcagctgggatcgctgcagaggctgaataccctgagccaatactcccgctacggcttcggaaaatcgtttaactccctctggatgcatggtttgctgccgccgcactctagccttccgtggatgcgtcctagggaacatgagactcagcaatacgagtactcactgccggtccatcctccacctctgccatcacagccatccctcaagccccagcagccagggctgaagccgttcttgcaaagcgccgccgcgacgactaaccaggcgacggcactcaaagaagcgctgcaaccgccaatccatctgggacaccttccactgcaagaaggagaattgccactggtgcaacagcaagtggcaccgtccgataagcctcccaagccggaactgccaggagtggattttgccgacccacagggaccttccctcccgggaatggatttcccagacccccaaggtcctagcttgccaggcctggacttcgccgacccgcaaggatcgaccatcttccagatcgcccgcctcatctcacacggaccaatgccgcaaaacaagcaatcccctctgtacccaggaatgctgtacgtgccgttcggagccaaccagctcaacgccccagcacggctgggaatcatgtcgagcgaggaagtggcgggcggacgcgaggaccctatggcttacggggccatgttcccgggattcggaggaatgcgccctggattcgaaggcatgccgcacaacccggccatgggtggagacttcaccctcgaatttgactctccggttgccgcgactaagggaccggaaaacgaagaaggaggagcccaaggaagcccaatgcccgaggccaaccccgacaatctggaaaacccggcgttcctcaccgaacttgagccagcaccgcatgcgggcctgctggccctgccgaaggatgacatcccaggtctgccccgcagcccgagcgggaaaatgaagggactgccgtccgtgaccccagccgccgcagatccattgatgaccccggagctcgcagacgtctaccggacttacgatgctgatatgaccacctccgtggacttccaggaggaggcaactatggataccactatggctccgaactccctgcaaacttcgatgccaggaaacaaggcacaggaaccagagatgatgcacgacgcttggcacttccaggagccg

SEQ ID NO: 191618 - DNA, 1341 bp, Artificial Sequence
  derived and/or modified sequence
atgtcggcctcgaaaatcccgcttttcaaaatgaaggatctcatcctcatcctgtgcctgctggaaatgtccttcgcggtgcccttttttcctcaacagtcgggaactccgggcatggcttccctttcgctcgaaactatgcggcagctcggctcacttcaaagattgaacactctgagccaatactcccgctacggctttggcaagagctttaattctttgtggatgcacggactgctcccgcctcactccagcctgccgtggatgcgcccgcgagaacacgaaacccagcagtacgaatacagtctgccggtccaccctccgcccctgccgtcgcagccatccctgaagcctcagcagccgggactgaagccattcctgcaatccgccgcggcaaccacgaaccaagccactgcgctgaaggaagctctccaaccgccaatccatttggggcatctgccactccaagaaggtgaactcccactggtccagcagcaggtggcgccctcagacaaaccaccaaaaccggaactcccgggcgtcgatttcgccgatccacaaggaccgtcattgccggggatggacttccccgaccctcagggacctagcctcccaggactcgacttcgcggaccctcaagggtcgaccatcttccaaatcgcacgcctgatctcgcacggcccgatgccgcaaaacaagcagtccccgctgtaccctggaatgctctacgtgccgttcggtgccaaccagctgaacgcaccggcccgcctgggaattatgtcctcagaagaggttgccgggggaagagaggacccaatggcatatggagcgatgtttccgggattcggaggcatgcggcccggattcgagggtatgccgcataatccggcaatggggggagactttactctggaattcgactcgcctgtggcggcgaccaaaggacccgagaatgaggagggtggggcgcagggatcacctatgccggaagccaatccagacaacctggagaatccggctttcctgaccgagcttgagccagccccgcatgccggattgctggccctgccaaaggatgacattccaggactgccaaggtcccccagcggtaagatgaagggcctgccctcggtgacccctgccgcagccgaccccctcatgaccccggagcttgctgatgtgtaccggacctacgatgcagacatgactaccagcgtggatttccaggaggaagctactatggatactacgatggccccaaacagcctccagacctcaatgcctggcaacaaggctcaggagccagaaatgatgcacgacgcctggcacttccaggaaccg

SEQ ID NO: 191619 - DNA, 1341 bp, Artificial Sequence
  derived and/or modified sequence
atgtctgctagcaagattcctctgttcaagatgaaggatcttattctcatcttgtgcctcctagaaatgtctttcgccgtgcctttcttcccacaacaatcaggtactcctggaatggccagtctttcactggaaacgatgcgccaattgggttcgcttcagcggttaaatacactctcacaatattctagatacggatttggaaaatctttcaactccctgtggatgcatgggttacttcctcctcacagttctctgccttggatgaggcctagagaacatgaaacccaacagtatgagtactcattaccagtccaccctcctccactcccttctcaaccgtcgctaaagcctcagcagcctggactcaaacccttcttgcagtcagcagcagctaccaccaaccaagctaccgcgcttaaagaagcattgcagccacctattcatctcggacacctcccattgcaagaaggagagcttcctttggtccaacaacaagttgcaccttccgataagccacccaagccggagcttccaggcgtcgattttgctgacccacagggtccttcactacccgggatggatttccccgatcctcaaggtccaagtcttccgggtcttgattttgcagatcctcaaggatcgacaattttccaaatagctcgtctgatatcgcacggcccaatgccccaaaacaaacaaagtccactatatcctggtatgctctacgtgccattcggagctaatcaattgaacgcacctgcgcgtcttggtattatgagtagcgaagaggtggcaggaggtcgtgaggacccaatggcgtacggggcgatgtttcctggatttggtggtatgaggcctggctttgaggggatgccacataatccagctatgggtggagatttcactttggagtttgatagcccagttgcagccacaaaaggtcctgagaatgaagaggggggcgcacaaggctcaccaatgcccgaggcaaacccggataaccttgaaaacccagcattcctcacagagttggagccagctccacatgcaggacttttggctttgccaaaggatgatattcctggcctacctcggtctcccagcggtaagatgaaaggtttacctagtgtgaccccagcagccgctgatccactaatgacaccggaacttgcagatgtctatcgtacatacgatgctgatatgaccacatcagtcgatttccaagaggaagccacaatggatactacaatggctccgaactctttgcaaacctccatgcctggaaacaaagctcaagagccagagatgatgcacgatgcttggcatttccaggaaccc

SEQ ID NO: 191620 - DNA, 1341 bp, Artificial Sequence
  derived and/or modified sequence
atgagcgctagcaagattcctttattcaagatgaaggatcttatactcattctatgtctcttggaaatgagctttgcagtccccttcttcccccagcagtccggtacgccggggatggcgtctctctctttagaaacaatgcgtcagctaggaagccttcaaagactgaatacattatcccagtattctcgttacggtttcggcaagagcttcaatagcctgtggatgcatggactgctcccgccgcattcctcactgccatggatgagaccacgtgagcatgagacccagcaatatgagtactccctccccgtgcatccaccccctctgccgtcccaacccagtctgaagcctcagcagcctggtctaaagccgttcctgcaatctgcggccgcaactacaaaccaggctaccgcactgaaggaggcactccaacctccaatccatctagggcatcttccactgcaggagggagagctgcccttggtccaacagcaggtggccccgagcgataaaccgcctaagccggagctcccgggagttgacttcgctgatcctcagggcccctcgctacctggtatggattttcctgatccccaaggaccaagcttgcctggattggatttcgccgacccgcaaggatccacaatattccaaattgcacgtctaattagtcacgggccgatgccacaaaataagcaatcacctttgtacccaggcatgctatacgttcccttcggtgcgaaccaattgaacgctccagctaggcttggcatcatgtcttccgaagaagtcgcaggaggcagagaggatcctatggcctacggtgccatgtttcccggtttcggtggcatgcgcccaggttttgagggcatgccacacaacccggctatgggtggggacttcacactcgaatttgatagccccgtggccgcaacaaagggtccagagaacgaggagggcggagcacagggatcgcccatgccagaggccaaccccgataacctggagaacccggcgttcctcactgaactcgaacctgcgccacatgcaggtcttctcgccctacctaaagatgacatccctggtttgcctagatcccctagtggtaagatgaaggggctgcctagcgtcacaccggctgcggccgatccgcttatgacacccgaactcgctgatgtgtaccggacatacgatgcagacatgacaacgagtgtggactttcaggaagaagctactatggacacaacaatggcgcccaactcgcttcaaacatctatgcccgggaacaaagcacaggaacccgagatgatgcacgatgcgtggcatttccaggaaccg

SEQ ID NO: 191621 - DNA, 1341 bp, Artificial Sequence
  derived and/or modified sequence
atgagcgcctcaaaaatccccctgttcaagatgaaggacttgatattgattctgtgcctgttggagatgtcttttgccgtgcctttctttccacaacaatccgggacgcctgggatggccagccttagtctagagaccatgagacagctgggaagcctccagcgactgaacaccctgagccagtacagtaggtacggatttggtaaatcttttaactctctgtggatgcacggccttctgcctccccatagcagtttaccttggatgaggccacgagaacacgaaacgcaacaatacgagtactctcttccagtgcacccccccccgctgccttcccagccttctttgaaacctcagcagccaggactcaaaccatttttacaatcagccgctgccacgaccaatcaggcgacggccctgaaggaggctctgcagcctcctattcacctcgggcacctcccactgcaggaaggggaactccctctggtgcaacagcaggtcgccccatctgacaaaccgcccaagcctgaacttcccggagtggactttgccgatccccaaggccccagtctcccaggtatggatttccctgacccacaagggcccagtctcccgggcctcgattttgcagatccacaagggtcaacaattttccaaatcgccaggctgatatcacacggacccatgcctcaaaataaacagtcaccattgtatcctgggatgctgtatgtgcctttcggcgccaaccagctgaatgcacccgctcgcctaggaatcatgagctcggaggaagtcgctggcggacgcgaggaccccatggcatatggagccatgttcccgggtttcggaggtatgagacctggtttcgagggaatgcctcacaaccctgccatgggcggggacttcaccctagagtttgattctcccgtggccgcaactaagggcccagaaaacgaagaggggggagctcaggggtctccgatgccagaggccaatccggacaatttagaaaaccccgccttcctaactgagctagaaccagctcctcacgccggtctactggccctgcctaaagacgacatcccgggccttcctcgctctccgtccggcaagatgaaggggctgccaagcgtcaccccagctgctgcggacccgctgatgaccccggagttggctgacgtctatagaacctacgatgctgatatgacaacctccgttgattttcaagaagaagcgacaatggataccaccatggcccctaattctcttcagacgagcatgcccggcaataaagcccaggagcctgagatgatgcacgacgcatggcactttcaggagccc

SEQ ID NO: 191622 - DNA, 1341 bp, Artificial Sequence
  derived and/or modified sequence
atgtctgcttctaagataccactttttaaaatgaaagatcttatccttatcctatgtcttttagaaatgtcatttgcagttccattttttccacaacaatctggaacacctggaatggcatcattaagtttagaaactatgagacaactcggaagtctacaaagacttaatacattatcacaatattcaagatatggattcgggaagtctttcaattctttatggatgcatggattattaccacctcatagtagtttaccatggatgagacctcgtgaacatgaaacccaacaatatgaatattcacttccagtacatcctccaccattaccatctcaaccttcattaaaaccacaacaaccaggattaaaaccattcttacaatctgcagcagccactacaaaccaagcaactgcacttaaggaagctttacagccaccaattcatttaggacatcttccattacaagaaggagaacttcctttggttcaacaacaagtagctccatcagataaaccaccaaaaccagaattaccaggagttgattttgcagatccacaaggtccttcccttccaggtatggattttccagatccacagggtccatctttaccaggattagatttcgcagaccctcaaggttcaacaatctttcaaattgctagattaatttctcatggacctatgccacaaaataaacaaagtccactttatcctggaatgttatatgttccatttggtgccaatcaactaaatgctcctgcaagattaggaattatgtcatctgaagaagtagctggaggaagagaagatccaatggcatatggagctatgttcccaggatttggaggtatgagaccaggttttgaaggaatgcctcataatccagctatgggtggagattttacgcttgaatttgattcaccagttgctgcaactaaaggacctgaaaacgaagaaggtggagctcaaggttcaccaatgccagaagcaaatccagataatcttgaaaaccctgcatttttaactgaattagaaccagctccacatgctggtttacttgcattacctaaagatgatatacctggtttaccaaggtctccatctggaaagatgaaaggattaccttcagttacaccagctgctgctgacccattaatgactcctgaacttgctgacgtatatagaacgtacgatgctgatatgacaactagtgtagatttccaagaagaagctactatggatactacaatggctccaaattctttgcaaacatctatgccaggaaataaggcacaagaaccagaaatgatgcatgatgcttggcattttcaagaacca

SEQ ID NO: 191623 - DNA, 1341 bp, Artificial Sequence
  derived and/or modified sequence
atgagcgcctccaagatacctctgttcaaaatgaaggatctgattttaatcttgtgcctacttgagatgtctttcgctgttccattcttcccacagcaatcgggaacacctggtatggcctcgctgtcgctagaaactatgcgccagctcggatctctgcaaaggctgaataccctgtcgcagtactcccgatacgggtttggaaagtcttttaactctctgtggatgcatggcctccttccacctcacagctcgttgccatggatgaggcccagagagcacgagacacagcagtacgaatactctcttccggtgcaccctccccccctgcctagccagccaagcctgaagccacagcagccaggtctaaagccctttctgcaatctgccgcggccacaactaaccaggcaactgcactgaaggaggctctacagcccccgattcacctgggacacttaccactgcaggagggcgaactcccactggtgcagcaacaagtcgccccaagcgataagccccctaagcctgaattacccggtgttgacttcgccgacccacagggtccttcactgcctgggatggattttccagatccacagggcccgagtctacccggcctggattttgcagaccctcagggctcaaccattttccagattgcccggctgatcagtcacggaccaatgcctcagaacaaacagtcgccgctttacccaggcatgttatatgtgccttttggcgctaatcaactgaatgcaccagcccggcttggaatcatgtcaagtgaagaggtagccggcggtcgtgaggaccccatggcttatggcgctatgtttcccgggttcggagggatgcgcccgggattcgaagggatgccccataacccggcaatggggggagacttcaccttggagttcgattctccagtggctgccacaaagggaccagaaaatgaggagggcggcgctcaaggcagccctatgcccgaagctaacccagacaatctcgaaaatcccgcttttctgaccgagctggagccagccccgcacgccggactcctagctctgcccaaggacgatattcccgggctgcccaggagcccatctggaaagatgaaagggctcccctcggtgactcctgccgccgccgacccgctcatgacaccagaactcgccgatgtgtaccggacctacgatgctgatatgacaacaagtgtggatttccaggaggaggccaccatggataccacaatggcacctaactcacttcagacatccatgcctggcaacaaggctcaggaacccgaaatgatgcacgacgcctggcactttcaagagcct

SEQ ID NO: 191624 - DNA, 1341 bp, Artificial Sequence
  derived and/or modified sequence
atgtcagcttccaaaatccccctgtttaaaatgaaagacttaatcctgattttgtgtctgctagagatgtcattcgctgtgcccttctttcctcagcagtctgggacccctggaatggcctccctgtctttggagaccatgaggcagctgggttctctgcagcgtttgaatacgttatctcagtactcaagatacggattcggcaagtccttcaactccctctggatgcacggcttattgcccccgcacagctccctgccttggatgagaccccgcgagcatgagactcaacaatacgaatactcgctgcccgtccatccaccgccactcccctctcagcccagcctgaagccacaacaacctgggctgaaacctttcctccagtccgccgcagcgaccacaaaccaggcgaccgcactcaaagaggccctgcagccacctatccatctagggcacctccccttgcaggagggagagctaccactggtacagcaacaggtcgcaccctccgacaagccccccaagcctgaactcccgggagtagactttgcagacccacagggcccatcccttcctggaatggacttccccgatccccagggtccctctctgcctggtctagactttgcagatccacaaggctccactatttttcagatcgctagactgatatcacatgggcctatgccgcagaacaagcaatctccactgtatcccggtatgctttacgtgcctttcggcgcaaatcagctgaatgcacccgcacgactgggcattatgagctcggaagaggtagcaggcggcagagaggacccaatggcctacggggctatgttccccggttttggaggcatgaggcccggcttcgagggaatgccccataatccggccatgggtggcgacttcaccctcgaatttgattctccagtcgccgcaactaaggggccggagaacgaggagggaggggcgcaaggcagccctatgcctgaagctaaccccgataacttagagaacccagcctttctgacagaactggaaccagcaccacacgctgggctgttagccctccccaaggacgatatccccggcctgccacgcagcccaagtggcaaaatgaaagggttacctagcgtcacacctgccgccgccgatccgctcatgacacccgagctcgctgatgtatacagaacatatgatgcagacatgaccacctctgtagattttcaggaggaagctacgatggatacaaccatggcccctaatagcctacagacttccatgccgggaaacaaggcccaggagccagaaatgatgcatgacgcctggcacttccaagaacct

SEQ ID NO: 191625 - DNA, 1341 bp, Artificial Sequence
  derived and/or modified sequence
atgagcgcatccaagatcccgttgttcaagatgaaggatctgatcctcatcctgtgcttgcttgagatgagcttcgctgtccccttttttccccaacagtcgggtacacccgggatggccagcctgtcgctggagactatgcgccaactaggatctctccagcgcctgaataccttaagtcagtactcgagatacgggttcggcaaatcattcaactctctctggatgcatggccttctgcccccgcattctagcctaccctggatgcgacctagagagcatgagacgcagcagtacgagtatagcttgccagtgcaccctcctcctctgccaagtcagccctctcttaagccccagcagcccggtttgaagccattcctacaaagtgccgctgccacaacgaaccaggctacagccttgaaggaggcgttgcaaccgccgatccatctcggccatctacctctccaggagggggaattgccactcgtgcagcagcaggtggccccctcggataaaccgcccaaaccagagctacccggtgttgattttgccgacccgcaaggacccagcttgcccggtatggacttcccagacccccaaggcccgagcctgcctggtctggacttcgctgacccacagggcagtacgatcttccaaattgcccgtctgatatcccatggcccaatgccacaaaacaaacagagccccctgtaccccggaatgctgtacgtgcccttcggtgctaaccagctcaatgcgccagcgcggttaggtattatgtcttctgaggaagtggctggcggccgtgaggatccaatggcctacggagcgatgttcccgggattcggcggaatgcggccgggtttcgaaggcatgccacacaatccggccatggggggagacttcaccctggagttcgattctccggttgctgctactaaaggcccagagaacgaagagggaggcgctcaaggctcgcccatgccggaggccaaccccgataatctagaaaacccagcattcttgacagagctcgagcctgctccccatgctggcctgcttgcgttgcccaaagacgacataccgggattgccgcgctccccaagcggtaagatgaagggactgccctccgttacccccgcggcagccgatccactgatgacccccgagctggcagatgtctacagaacatacgacgccgatatgacgacctcggtagattttcaggaggaggccacgatggatacaaccatggccccgaatagtctacaaacatcgatgccgggcaataaggcccaggagcccgaaatgatgcacgacgcctggcatttccaggagcct

SEQ ID NO: 191626 - DNA, 1341 bp, Artificial Sequence
  derived and/or modified sequence
atgagcgcgtcaaagattccccttttcaaaatgaaggatctcattcttatactttgtctgttggaaatgtcgtttgcagttcccttttttccccaacaatcaggaactccagggatggcttcactgtcactggaaaccatgagacagttggggtcgcttcagcgcctgaacacgctgtcacaatacagcagatatggatttggaaagtcctttaactccctgtggatgcacggactgctcccaccgcatagctcactcccatggatgcggccgagagaacatgaaacccaacaatacgaatactcccttcctgtccatcctccgcctctgccttctcagccaagcctcaagcctcagcaacctggactgaagccatttctgcaatccgccgcagcaactaccaatcaggctacggcgcttaaggaggcacttcaacccccaatccacctcggacacctgcccctgcaggagggcgaattgccgctggtccagcagcaagtggctccctcggataagccccctaagccagagcttcctggcgttgactttgcggacccacagggtcccagccttcccggaatggattttccggatcctcagggaccatcccttcccgggctggacttcgccgatccccaagggagcactattttccaaatagcacgcctgatttcacatggtcctatgccccaaaacaaacaatcccctctttacccaggcatgctttacgtcccctttggtgcaaaccaactgaacgcacctgcgcgtctgggcattatgtcgtcggaggaagtggcaggtgggcgggaagatcctatggcgtacggagcaatgttcccgggatttgggggaatgcgaccgggttttgaaggtatgcctcacaatcccgcaatgggaggcgacttcaccctggaatttgattcaccagtggccgcaactaagggaccagagaatgaagaagggggtgcacaaggctccccaatgcccgaggcaaatcctgacaaccttgaaaacccagcatttcttactgaactcgagcccgccccgcatgctggtctgttggccctcccgaaggacgacatccccggacttccgagaagcccttcggggaaaatgaagggactgccatcggtgactccagcagccgcagatccactgatgacccctgaacttgccgacgtgtacagaacctacgacgctgatatgactacgagcgtggactttcaagaagaagcgacgatggatacgaccatggcgccgaactcactgcaaacgtcaatgccaggtaacaaggcccaagagccagaaatgatgcacgatgcatggcattttcaggaacct

SEQ ID NO: 191627 - DNA, 1341 bp, Artificial Sequence
  derived and/or modified sequence
atgtccgcgtccaagatccctctcttcaagatgaaggacttgatcctgattctctgcctcctggagatgtcattcgcagtcccgttcttccctcagcagagcggaactccgggcatggcgagcctcagcctcgaaactatgcgccaactgggttccctccaaagactcaataccctgagccagtactcccggtacggtttcggcaagtcgttcaacagcctgtggatgcacggccttctgcctccccactcctccctgccatggatgcgtccaagggagcatgagactcaacagtatgaatactcactcccggtgcatccgcccccactcccatcgcagccgagccttaagccacaacaaccagggcttaagccgttcctccaatccgcggccgccaccactaaccaagctaccgccctcaaggaagctctccaaccgcccatacatctgggacacctcccgcttcaggagggagagctccccttggtgcaacaacaagtcgctccgtccgacaaacctccgaagcctgagctgccgggggtggactttgccgaccctcagggaccatcgctcccaggtatggacttcccagacccacagggaccgtcgttgcctggcctggatttcgcagacccgcagggatcaaccatctttcagatcgcgcggctcatttcccacggtcccatgccgcagaacaagcaaagccccctctacccgggaatgctctacgtgccatttggagccaaccagctgaatgccccagcgcgcctcggcattatgtcatcagaagaggtggcaggaggacgggaagatccaatggcatacggagcgatgtttcccggattcggcggaatgcgccctgggttcgagggcatgccgcacaatcccgcaatgggcggagatttcaccctcgaatttgatagtcctgtcgccgcaactaaaggtccagaaaacgaagaaggaggcgcccaggggtccccgatgccggaggccaatcctgacaacttggagaacccggccttcctgactgagctcgagcccgccccacatgcagggcttctcgcgctgccgaaagacgacatcccaggactgccacgcagtccgtcgggcaaaatgaagggactgccttccgtgacccctgcagccgcagatcctttgatgaccccggaactggccgacgtgtaccggacttacgacgcagacatgactacctccgtcgacttccaggaagaagccaccatggacacgactatggcgccgaactcgctgcagacctctatgcccggcaacaaggcgcaggagccggagatgatgcacgacgcgtggcatttccaggaaccg

SEQ ID NO: 191628 - DNA, 1341 bp, Artificial Sequence
  derived and/or modified sequence
atgtcagcctcgaagataccgttgttcaagatgaaggacctgatcctcattctttgtctgcttgaaatgtcgtttgctgtgccattctttccacagcagtccggaactcctggaatggcatcactgtcacttgaaaccatgcgccagcttggatctcttcaacggttgaataccttgagccaatacagcagatacggcttcgggaagtcattcaatagcctgtggatgcacggactgctcccgccgcactcgtcgctcccctggatgaggccaagagagcacgagactcagcagtacgagtactccctgccagtgcatcctccgcctctgccctcacagccatctctgaagccacaacaaccggggctgaaaccgttcctccagtcagcagcggctaccaccaatcaggctaccgcgttgaaagaggcccttcaaccgccgatccacctcgggcatctccccctccaggagggtgaactgcctcttgtccagcaacaagtcgctccgtcggacaagccgccgaaaccggagttgcctggagtcgactttgcagacccacaaggcccctcgctgccggggatggatttccctgacccccagggaccatccctgcccggccttgacttcgccgatccgcagggatcgaccatcttccagatcgcgcgcctgatctcccatggcccgatgccacagaataagcagtccccgctgtatccgggaatgctctacgtgccattcggagcaaaccagctgaacgcccccgcaaggttgggcattatgtcgagcgaagaagtggcaggaggccgggaggatccgatggcctacggcgccatgttccctggtttcggtggaatgcggccgggcttcgaaggtatgccacataacccggccatgggtggggattttacgctggaattcgacagccccgtggccgcgacgaagggaccagaaaacgaggaaggcggggcccagggaagtccaatgccggaagcgaatccggataacctggaaaatcccgcgtttctcaccgagctggagccagcccctcacgctggactgctggcgctgccgaaagacgatattcccggactgccacgttcccctagcggaaagatgaaaggattgccttcagtcactccggcggcagctgacccgttgatgaccccagagttggcagatgtataccggacttacgatgccgacatgactacctcggtggactttcaagaagaggcaactatggacaccacgatggcccctaacagcctccagactagcatgcctgggaacaaggcacaggaaccagaaatgatgcacgacgcatggcacttccaagagcct

SEQ ID NO: 191629 - DNA, 1341 bp, Artificial Sequence
  derived and/or modified sequence
atgagcgcatcgaagattcctctctttaagatgaaagatctgattctgatcctgtgtctgctcgaaatgagctttgcagtcccttttttcccccaacaaagcggtactcctggaatggccagcctgtcgttggaaactatgagacagcttggtagccttcagagacttaatactctttcacaatacagccggtacggatttgggaagagctttaactcgctctggatgcacggacttctcccaccacattcatcccttccttggatgcgccctcgagagcacgaaactcagcaatacgaatactcgttgcctgtgcatcctccacctcttccatcccaacctagccttaagccgcagcaaccgggtctgaagcctttcctgcagtccgcagcggcaactacgaaccaggccaccgctctgaaggaagcactccaacctcccatacatctgggtcaccttcctctgcaagagggcgaactgccgcttgtgcaacagcaagtggctccatcagataagcctcctaaacccgaacttccaggggtggatttcgcagatccacagggaccctcgctgccggggatggattttcctgatccccaaggaccttcactgccaggcctcgactttgcagatccccagggaagcaccatctttcagattgcaagactgatctcacacggaccaatgccacaaaacaaacaaagccccctctaccccggcatgctgtatgtgccctttggagccaaccagctgaacgcacctgcgagacttggtattatgtctagcgaggaggtggcaggtggtagagaggacccaatggcctacggcgcaatgtttcctggattcggaggcatgcggcctggcttcgagggtatgccacataatccagcaatgggcggggatttcaccctggaatttgacagccctgtggccgctaccaaggggccagaaaatgaggaaggaggggcacagggttccccaatgcccgaagccaatcctgacaacctcgaaaatccggcgtttctcacggagcttgagccagctccacatgcagggctgttggccctccctaaagatgatataccaggcctgcctcgctcgcctagcggaaaaatgaaaggactcccatctgtgactcctgcagctgccgatccgcttatgactcctgaacttgcagatgtctacagaacttacgacgcagatatgaccacctcagtggattttcaagaggaagccaccatggatactaccatggcacctaattctctccagacttcaatgccgggcaataaggcacaagagcctgaaatgatgcatgatgcttggcattttcaagaacct

SEQ ID NO: 191630 - DNA, 1341 bp, Artificial Sequence
  derived and/or modified sequence
atgtccgcgtctaaaattcccctcttcaaaatgaaggatctgatcttgatcctctgtctgctggaaatgtccttcgccgtgccattctttccacagcagagtggaacccctggtatggctagtttgtcccttgagacgatgcgccagctgggcagtcttcagcgtctgaataccctgtcccagtactcccgctatggattcgggaaaagttttaattcactttggatgcatgggttgctccccccgcattccagcttgccatggatgagaccgcgtgagcatgaaactcagcagtatgagtactcccttcctgttcatcctcctccactgccttcccaaccttccctgaaaccgcagcagcctggcctgaagcctttcttgcagagtgccgccgccacgacaaatcaggctactgctctcaaagaggccctccagccccctattcacctaggtcacctgccactgcaggagggagaactccctctggtccagcaacaggttgccccttctgataaaccacctaaaccggagctgccaggtgtggacttcgccgatccccaagggccgagcctgcctgggatggacttccccgaccctcagggaccatcgcttcccgggctcgatttcgccgatccacagggctctacgatctttcagattgcacgcctgatctcccacggaccaatgccccagaacaagcagagtccactgtacccagggatgttgtacgttccttttggggcaaaccagctcaatgctcccgccagactgggaattatgagtagtgaagaagttgcgggcgggagagaagaccctatggcatacggcgccatgttccctggctttgggggtatgcgaccggggtttgaaggcatgccccacaatccagctatggggggagactttaccttagagttcgactcacccgtcgcggcgactaagggaccggagaatgaggagggcggagctcagggcagtcccatgcccgaagccaaccctgacaacctggaaaatccagcattccttacagagctcgagcccgcgccacacgctggcctgctggctctgccaaaagacgatattcccggacttccccggtccccctccggcaagatgaaaggcctccctagcgtaacacccgccgctgcagatccgcttatgacgcccgagctcgccgacgtttaccgcacctacgatgctgacatgacgacatccgtcgatttccaggaggaagcgaccatggataccacgatggcgccaaactcactccagacatctatgcccggaaataaagctcaagagccggagatgatgcacgatgcatggcattttcaagaaccc

SEQ ID NO: 191631 - DNA, 1341 bp, Artificial Sequence
  derived and/or modified sequence
atgtccgccagcaaaattcctctgttcaagatgaaagatctcatcttgatcctttgtttgttagaaatgtcgtttgcagttccgttttttcctcaacagtcaggtacccccgggatggcatctctgtccctcgagacgatgagacagctgggaagtctgcagaggttaaatacactgtcacaatactctaggtacggctttggtaagagctttaacagcttgtggatgcacggtctgctccccccccactcctctcttccatggatgagaccgagggaacatgaaacccagcagtatgagtactcacttccagttcacccgccacctctgccgtcccagcctagcctgaaaccccagcagcctggactgaagcccttcttgcagtccgctgccgccaccactaatcaggccacggccctgaaagaagcactgcaacctcctatccaccttggccacctccctctacaggagggcgagctgccgttggtgcagcagcaagtcgccccaagcgacaagcccccgaaacctgagctcccaggagtagattttgcagatccacagggaccaagcctccctggcatggacttccccgaccctcagggaccatcccttcccggacttgactttgcagacccacagggatcaaccatattccagattgcccggctgatctctcatgggcccatgccccaaaacaaacagagtccactgtaccccgggatgttgtacgttccatttggggcgaaccagttaaatgccccagcacgtttaggcataatgtcttccgaggaggtcgccggcgggcgtgaagatcccatggcttatggcgccatgtttcccggctttggtggtatgaggcccggcttcgagggaatgccccacaaccccgcaatgggcggagactttaccttggagttcgattccccagtggctgctacaaagggccccgagaacgaagaagggggcgcgcaaggctcccccatgcccgaggcgaatccagacaacctggagaatccggccttcttgacggaactagaacctgcccctcatgccgggctgttggcacttccaaaagacgatattcccgggttaccccggtcccctagcgggaagatgaagggcctcccatcagtcaccccggcagcagctgacccactgatgaccccagaactcgctgacgtgtatcggacttacgatgcagatatgactacctctgtggactttcaggaggaagcaaccatggataccacaatggcacccaattcactccagacaagcatgcccgggaataaggcccaggagcccgagatgatgcacgacgcttggcactttcaggagccc

SEQ ID NO: 191632 - DNA, 1341 bp, Artificial Sequence
  derived and/or modified sequence
atgtcagcgagcaagatccccctcttcaaaatgaaagacttgattctgattctatgtctccttgagatgagcttcgcagttcccttctttccacaacaatctggtacccctggtatggcctcactttctctggagacaatgaggcagctgggctctttacagcggttgaatactctgagtcagtatagtcgttacggcttcggcaaaagcttcaattcactctggatgcacgggctcttgcctccgcatagcagtttaccctggatgcgccccagggagcatgagacccaacaatacgagtatagtctcccagtgcaccctccacccctgccctcacagcccagcctaaaaccacaacaaccagggctaaagccgtttttgcagagcgccgccgccaccactaaccaggccaccgccctgaaggaggcactgcagcctcccatccatctgggccacctgcccctccaggagggcgaactgcccttggttcagcagcaagtagccccgtcagacaagccacctaagccggagctgccaggggtcgactttgctgatccccaggggccgtccttaccggggatggacttcccggaccctcaaggacccagtttgcccggtctcgactttgccgacccgcagggctcgacgatttttcagattgctagactaatctctcatggaccaatgccacagaataagcagagtcctctataccccggaatgctgtatgtgcccttcggcgccaatcagctcaatgcacccgcgcgtctcggaattatgtcctccgaagaagtggctggaggtagggaggatcccatggcctatggggccatgttccccggcttcgggggcatgcgtcccgggttcgaaggcatgccacataacccagcgatgggcggggactttaccctcgagttcgatagtcctgtggcagccaccaaaggccctgaaaacgaagagggaggggcccagggcagccccatgccagaagccaatccagacaatctggaaaaccccgcgtttctaactgaactggagcctgccccacacgccggacttctcgctcttcccaaggacgacattccagggctgccccggtctccgtcagggaagatgaagggtctcccatcagtgacacctgcagctgcggaccctctcatgactcctgaactggctgacgtgtatcggacgtatgacgcggacatgactacttctgtggacttccaggaggaggctaccatggataccaccatggctccaaacagcctgcagacaagcatgcccggcaataaggcacaggagcccgagatgatgcatgacgcctggcacttccaagagccc

SEQ ID NO: 191633 - DNA, 1341 bp, Artificial Sequence
  derived and/or modified sequence
atgtccgcgagcaaaataccactctttaagatgaaagacctgattttgatactgtgtttgcttgaaatgagctttgcagtgcctttcttccctcaacagtcaggaactccaggcatggcaagcctttcgcttgaaaccatgcgtcagctgggatcactccaacggcttaacacgctctctcaatacagcagatacggatttggaaaatcgtttaactcgttgtggatgcatggacttttgcctccacatagttcgcttccctggatgcgcccaagagagcatgaaacgcaacagtacgaatactccctcccagtgcacccaccaccactcccttcgcagccatcgctcaagcctcaacaacccggattgaaaccctttcttcagtccgcagcagcaacgactaatcaggcaactgcccttaaggaagcactgcagccacctatccacctgggacatcttccactccaagagggtgaactgcccctcgtgcaacagcaagttgcaccctcagataagccaccaaagccggagctgccaggggtggactttgcagatcctcagggaccatcacttcccggcatggactttccagatccacaggggccttccctgcctgggctcgatttcgcagacccccaggggtcaactattttccagatcgcgaggctgattagccacggtcccatgccacaaaacaagcagtcacctctctacccggggatgctctacgttcctttcggtgcaaaccaattgaacgcaccggcacgtctgggtattatgtcatccgaagaggtggctggtggaagagaggaccctatggcatacggcgcaatgtttcctgggtttggtggaatgcgccctggctttgagggcatgcctcacaaccctgcaatgggaggagattttaccctggaattcgactcgccagtggcggcaaccaaggggccggagaatgaagagggaggcgcacaagggtcccctatgcctgaagcgaacccagataacttggagaatcccgcatttctgactgaactggagccagcaccccacgccggactgcttgccctgccaaaggatgacattccgggactgccccgctccccatccggtaagatgaaaggacttccttccgtgactcctgcagcagccgacccccttatgactcctgaactggcagatgtttaccggacctatgatgccgacatgactacctcagtggatttccaggaagaagcgaccatggacacgaccatggcccctaactccctgcaaaccagcatgccaggtaacaaagcacaagaacccgagatgatgcacgacgcatggcatttccaagagccc

SEQ ID NO: 191634 - DNA, 1341 bp, Artificial Sequence
  derived and/or modified sequence
atgagcgccagtaagatcccccttttcaagatgaaggacttgatcctcatcctgtgtcttctagagatgtcattcgccgtaccattcttcccacagcagtctggaactcctggtatggcgagtctgtctcttgaaacgatgagacagctgggaagcctgcagagactgaatacgctgagccagtactcaagatacggctttggaaagagtttcaatagtctgtggatgcatggtctcctacccccccattctagcctgccttggatgcgcccaagagaacacgaaacccagcagtacgagtactctctccctgttcaccccccaccactgccttcacaaccgagtctcaagcctcagcagcccggactgaagcctttcctgcagtctgccgccgcgactaccaaccaagccaccgctcttaaggaggcattacaaccccccatccacctaggtcacttgcctctgcaggagggtgagcttccactcgtgcagcagcaggtcgctccctcggacaaaccgcctaagcccgaattacctggggtggactttgctgatccacagggtccatcactgcccggcatggacttccctgacccccagggtccgtctctgccaggcctggatttcgctgacccacaggggtctactatctttcagatcgcccggctgatctcacacggtcccatgcctcagaacaagcaaagcccattgtaccccggcatgttgtatgttccctttggggcgaaccaacttaacgccccagcacggttgggaattatgtcaagcgaagaggtagccggtgggagagaagatcctatggcttacggtgcaatgttccctggtttcggtggtatgcggccaggcttcgaaggaatgccgcacaacccagctatgggcggcgatttcacactcgagtttgatagcccggtggccgctaccaagggtccagagaacgaagagggaggagctcaggggtccccaatgccagaagcgaacccagataatctggaaaaccctgcattcctgactgagctggaacccgccccccacgccgggctactcgccctgccgaaagatgatatccccgggctgccacgctctccatccggcaagatgaagggactgccctctgtgaccccagcagcggcagatcccctgatgacaccagagctggcagacgtctatagaacatatgacgccgatatgacaactagcgtcgatttccaagaggaagctaccatggacacaaccatggcccccaactccttgcagacgagcatgcccggaaacaaggcacaggagcctgagatgatgcatgatgcttggcattttcaggaaccc

SEQ ID NO: 191635 - DNA, 1341 bp, Artificial Sequence
  derived and/or modified sequence
atgagcgcatcgaaaatcccgcttttcaagatgaaggatctgatcctgatcctctgtctgctcgaaatgagcttcgctgttccgttcttcccgcaacaatctggaactccaggaatggcgtcactcagcctggagacgatgcgccaactcggctcccttcaaagactcaacactctgagccagtactcccggtacgggttcggaaagagcttcaactcgctgtggatgcacgggctcctgccaccgcactccagcctgccttggatgcggccgcgggagcatgaaacccaacagtacgaatattccctgccagttcacccgccacccctcccatcgcaaccatcattgaagccgcagcagccaggtctgaagccattcctgcagagtgctgccgcaactactaaccaagccactgcgcttaaagaagcactgcagccgcccatccatttgggccacctccctttgcaggaaggagaactcccgctggtccagcagcaggtcgcaccttcagacaagccgcctaaaccggaactgccgggggtcgattttgcggacccgcaaggcccctcgctgccgggcatggactttccagatccgcaggggccgtcgttgccgggactcgacttcgccgatccgcaaggatccaccatctttcaaatcgcacgccttatctcgcatggccctatgccgcagaataaacagagcccgctgtaccccggaatgctctacgtcccgttcggagcaaaccaacttaatgccccagcaagactcgggattatgtccagcgaagaggtggctggtggaagagaggaccccatggcgtacggagctatgttccctgggttcggcggcatgcgcccgggattcgaaggaatgccgcataacccggcaatgggaggcgactttactttggaattcgacagcccggtggcagcgactaaggggcctgaaaacgaggaaggcggtgcccagggctcgccgatgccggaggcgaaccctgacaatctggagaacccggcctttctgactgaactggaaccggctccccatgccggattgctggcactgccaaaggacgatatcccaggacttccgagatcaccttcgggtaagatgaaaggactcccgtcagtgaccccggccgcagccgacccgctgatgacgccggagctcgctgatgtctaccggacctacgacgctgacatgaccacgtcggtggatttccaggaggaagcaaccatggacaccactatggcgccgaattccctgcaaactagtatgccgggtaataaggcgcaagagcccgagatgatgcatgatgcctggcatttccaagagccg

SEQ ID NO: 191636 - DNA, 1341 bp, Artificial Sequence
  derived and/or modified sequence
atgtccgctagtaagatccctctgtttaagatgaaggatcttattctgatactgtgcctccttgagatgtcattcgctgtccctttcttccctcaacaatcagggacacctgggatggcaagcctaagtctagaaacgatgaggcagctggggagcctacagcgacttaatacattatcacagtactcccgttacggatttggaaagagcttcaatagtctctggatgcacgggttgttgccaccccatagctctctgccctggatgcgtccccgtgagcatgagacccagcagtacgaatactctcttcccgtacacccgccccctcttccaagccagccctccctgaagccccagcagccagggttgaagccctttctgcagtctgcagccgctaccacaaatcaggccaccgccctgaaggaggccctgcagccacccatccacctaggacacctgccactgcaggagggggagctgccacttgtccagcagcaagtcgcgccctctgacaagccacccaagccagagctccctggagtggacttcgccgaccctcagggtccaagtctcccaggcatggactttcctgatcctcaggggcctagtcttccaggccttgatttcgctgacccacaggggtctaccatcttccagatcgcccgcctgataagtcacggccctatgccacaaaacaagcaatcccctctgtatccagggatgctatatgtcccgttcggcgctaatcagctcaacgcgcccgctaggctaggtataatgtccagtgaggaagttgccggggggcgggaggacccaatggcctatggagccatgttccccggattcggcggaatgagacccgggttcgagggcatgccacacaacccagccatggggggggattttacactggaattcgattcaccagtggccgccactaagggccctgagaatgaagaaggcggcgcccagggctcccctatgccagaggccaacccggataatctggagaatccagccttcttgacagagctggaacctgcacctcacgcgggactgttggcactgcctaaggacgatattcccggccttccacggtctccctcgggcaagatgaagggactgccctccgttacccccgcagcagctgatccactcatgactccagagctggccgacgtatacaggacttacgacgcggacatgactacgagcgtcgactttcaagaggaggcaaccatggacactacaatggccccaaatagcttacagacctccatgccaggcaacaaagctcaggagcctgaaatgatgcatgacgcctggcactttcaagagccg

SEQ ID NO: 191637 - DNA, 1341 bp, Artificial Sequence
  derived and/or modified sequence
atgagcgcaagcaagattcctctgtttaagatgaaggacctcattctcattctttgcctgctcgagatgtcttttgccgtccctttctttccgcagcagtccgggacccccgggatggcgtcgctctctttggaaaccatgcgccagctcgggtcgcttcagaggcttaataccctgtcgcaatactcccggtacggctttggaaagtcctttaactccctttggatgcacgggcttctccctcctcactcgagccttccatggatgcggcctagagagcatgaaacccagcaatacgaatactcgctgcctgtgcatcctccccctcttccgagccaaccttccctcaaaccacaacagcccggcctcaaaccgtttctccaaagcgcagctgctactaccaaccaggcgacggctctgaaggaagcgctccagcctcccattcacctgggacatttgccacttcaagagggtgaacttcccctggtgcaacaacaagtggcacccagcgataagcctccgaagcctgaattgcccggagtggacttcgcagatccccaaggaccgtcacttccaggaatggatttccctgatccacagggacctagcctccctggccttgatttcgcagaccctcaaggctccacgatcttccaaattgctagactgatttcccatggtccaatgcctcagaataagcagtccccactgtaccctggaatgctttatgtgccctttggagcaaatcagcttaacgcacctgcgcgcctcggaataatgtcgtcagaagaagtggcaggagggagagaggacccgatggcatatggagcgatgtttccaggttttggtggcatgcgaccggggttcgaaggcatgcctcacaaccctgcaatgggcggcgattttaccctcgaatttgattcgcccgttgcagcaactaagggacctgaaaacgaggaaggcggggctcaaggaagcccaatgcctgaagcaaacccggacaacctcgaaaacccagcatttcttaccgaacttgagcctgcaccccatgctggactgcttgctctgcctaaggatgacatccctggccttccccgcagcccatcaggaaagatgaagggtctgcctagcgtgactcctgctgccgcagacccacttatgaccccggagcttgcagatgtctaccggacctacgacgcggacatgacgacttcggtcgattttcaagaggaagccactatggataccaccatggcgcctaattcacttcaaacttcaatgccaggcaataaggcacaagaaccggagatgatgcatgatgcctggcatttccaagaacca

SEQ ID NO: 191638 - DNA, 1341 bp, Artificial Sequence
  derived and/or modified sequence
atgagtgcttcgaagattcccctgtttaagatgaaagatctgattctaattctctgtctgcttgagatgtctttcgccgtgcctttcttccctcagcagtcagggacccccggcatggcgtctttgtctttggagacaatgaggcagctgggcagcctccagagactcaacaccctcagtcagtattctcggtacggtttcggcaagagcttcaattcattgtggatgcacggtctgctgcccccccactcatccttgccgtggatgcggccacgagaacatgagactcagcagtacgaatactcactgcccgtccacccccctcccctgccctcgcagccctccctcaagcctcaacaacccggcctgaagccatttctccagagtgcggctgccactaccaatcaggctaccgccctcaaagaggcactgcagccacccattcatctgggacatctgcctctccaagaaggggagctacccttggtgcagcagcaagttgccccatctgacaagccgccaaagcccgaactgcctggcgtggacttcgccgatccccaaggtccctccctgccaggaatggattttccagaccctcagggcccttcattgcccggcttagacttcgccgatcctcagggcagcaccatctttcaaattgccaggctcatctcacatggccccatgccacaaaacaagcagtccccactttatcccggcatgctttatgtcccttttggcgcgaatcaacttaacgccccggcccgtctggggattatgtctagtgaagaagtggcgggcgggcgcgaggatccgatggcttatggtgctatgtttccaggcttcgggggaatgcggccggggttcgagggcatgccccataacccagccatgggcggcgacttcacactggagttcgactctcccgttgctgccacaaaagggcctgagaacgaagaaggcggcgcgcaaggaagtcccatgcccgaagcgaatccagacaatttagagaatcctgcttttctgacagaactggagccggcacctcatgctggactgttagctctgcctaaagatgatatccctggcctgcccaggagccctagcgggaaaatgaagggcctgccctctgtcacccccgccgcggcagacccgttgatgacgccagaactggccgatgtgtacaggacatacgacgccgatatgacaacaagcgtagatttccaagaagaagccacaatggataccactatggcgcctaatagccttcaaacctctatgcccggtaacaaagctcaggagcctgaaatgatgcatgacgcctggcactttcaggaacca

SEQ ID NO: 191639 - DNA, 1341 bp, Artificial Sequence
  derived and/or modified sequence
atgagcgcttcaaagattcccttgttcaaaatgaaggatctcattctgatcctgtgcctcctggaaatgtcttttgctgtgccttttttcccacagcagagtggaactccagggatggcttcgctctctctggagacaatgaggcagctcggcagcctccagcggctgaatacccttagtcagtacagcagatatggttttgggaagagttttaactcattatggatgcatggtttgctgcctcctcactcaagtctcccttggatgagaccaagagaacacgagacacagcagtatgagtattctttgcctgtacacccaccccctcttccatcccagccatctctcaaaccacaacagcccggactcaaacccttccttcagtcggcagctgcaaccaccaaccaagctaccgcccttaaggaggccctgcaacccccaatccacctcggccacctgccgctgcaagagggggaacttcccctggtgcagcagcaggtggccccaagcgataaacccccaaagccagaactgccgggagtcgactttgccgacccccagggtccatcccttcccggtatggacttccccgacccacaagggccctccctccctggactggatttcgctgatccacaagggtccacaatcttccagatcgctagactcatatcccatggtccaatgcctcagaacaagcagtcccctctttaccccggcatgttgtacgtgcctttcggagcaaaccaactgaacgcccccgcaaggctcgggatcatgagctcggaggaagttgccggggggcgggaggacccaatggcgtacggggcaatgttccccggttttggaggcatgagacccggctttgagggaatgccacataaccccgccatggggggagactttacactcgaattcgattcacccgtagctgccacaaagggcccagagaacgaggaaggaggtgctcagggaagtcccatgcccgaagcgaacccagacaatctggagaaccccgcattcctgaccgaactcgagcctgctcctcacgctggcctgcttgctctgcccaaagacgatattcctggacttccccgatccccaagtggcaagatgaaggggttgccttcagtgactcctgccgccgcagatcccttaatgactcctgagcttgcagacgtctatagaacctacgatgccgacatgacaacatccgtcgatttccaagaagaggctacgatggacaccaccatggctcccaattcattgcagacaagtatgccaggcaacaaagcccaggagcccgagatgatgcatgacgcctggcattttcaagaacct

SEQ ID NO: 191640 - DNA, 1341 bp, Artificial Sequence
  derived and/or modified sequence
atgtccgcaagcaagatcccactcttcaagatgaaggatcttatcctgatactgtgccttctggagatgtcgtttgcagtgcctttctttcctcaacagtcaggcacgccaggaatggcaagccttagcctggaaaccatgcgacaacttggctcgcttcaaagactgaacactctttcccaatactcgcggtatggattcgggaagtcctttaactcgctttggatgcatggtttgcttccacctcattcatcgctgccttggatgcgccctcgggagcatgaaactcagcagtacgagtactcgctgcctgtgcatccgccgcctctgccctcgcaaccctccctgaagccgcaacagcctggtttgaagcctttcttgcaatccgcagccgctactaccaatcaggcaaccgcccttaaggaggcactgcaaccccctatccatctcggacatctccccctccaagaaggagagctccctctcgtgcagcagcaagtggccccatcggataagccccctaaacccgagctccccggtgtggattttgcagatcctcaaggtccgagcctcccaggtatggatttcccggaccctcaggggccatcgcttcctggacttgacttcgcagatccccagggctcgaccattttccagattgcgcgtcttatttcgcacggtccaatgccacagaacaaacagtcacccctttacccagggatgctgtacgtgcctttcggcgcaaaccagctcaacgcaccagcacggctcggtatcatgagctccgaggaggtggccggtggaagagaagatccaatggcgtacggtgccatgtttcctggatttggaggcatgcgccctggatttgaaggtatgcctcataaccctgccatgggaggagattttaccctggaatttgacagccctgtcgccgcgaccaaagggcctgaaaatgaggaaggtggagcgcagggttcaccaatgcccgaagcaaatcctgataatcttgagaatccagccttccttactgaacttgaaccagcaccacatgctggactgctcgcacttcccaaggacgatataccaggactgccccgcagcccttcgggtaagatgaagggactgccttcggtcaccccagccgcagctgatccactgatgacccctgagcttgcagatgtctacagaacttacgatgcggatatgaccaccagcgttgactttcaggaagaagccactatggacactactatggcgccgaactccttgcagacttcaatgccaggcaataaagcccaggaaccggaaatgatgcacgatgcgtggcatttccaagagcca

SEQ ID NO: 191641 - DNA, 1341 bp, Artificial Sequence
  derived and/or modified sequence
atgagcgcttccaaaatacccctgttcaaaatgaaagacctcattctgatcttgtgcctcctggagatgtcattcgccgtaccatttttcccccagcagagtggaacccctggcatggcttccctgtctctggaaacaatgcgccagttaggatcacttcaaaggctcaatacactcagccagtattcccggtacggtttcggaaagtcattcaattctctttggatgcatggactgcttcccccgcacagttccctgccatggatgagaccaagagagcacgaaactcagcagtacgagtattccctaccagtacatccccctccgttgccgtcccagccgtccctcaaaccacagcagcctgggcttaaacctttcctgcaaagtgccgccgccacaaccaatcaggctaccgctctgaaggaggccttacagcctcccattcacctggggcaccttcctctgcaggaaggagagctgcctctggtacagcaacaagttgcgccgagtgataagccgcccaaaccagagctgcctggcgtcgatttcgccgacccgcagggacccagtctgccaggtatggatttccccgatccccagggcccgtccctgccaggactagactttgctgacccacaggggagcaccatcttccaaattgcaaggctgattagccacgggccgatgccgcagaataagcaaagcccgctgtatccaggaatgctttacgttccgtttggtgctaatcagcttaacgcccccgcccgactgggaatcatgtccagcgaagaggtcgccggagggcgtgaggatcccatggcatacggggcaatgttcccgggttttggggggatgaggccaggattcgagggaatgccgcacaaccccgcaatgggcggagacttcactctggagttcgattcccccgtggccgccaccaagggtccagagaacgaggaaggcggagcccagggttcgccgatgccagaagctaatcccgataatctcgagaaccccgctttcttgaccgagcttgaaccagctccacacgctgggctgcttgccttacctaaagacgacatccctggcctgccaagaagtccatccgggaaaatgaagggactgccatctgtgacccctgctgccgccgaccctctaatgactccagagttagccgatgtctaccgtacatacgatgccgatatgaccacctccgtggattttcaggaggaagccacaatggatactactatggctcccaatagcctccagacatctatgcccggcaataaggcacaggagccggagatgatgcatgatgcttggcacttccaggaaccg

SEQ ID NO: 191642 - DNA, 1341 bp, Artificial Sequence
  derived and/or modified sequence
atgtcggcatcaaagatcccactttttaagatgaaagatctgatcctcatactgtgcctcctcgaaatgagcttcgcagtgcctttcttcccgcagcagtccggtactcccggaatggcttcactgagccttgaaactatgcgccagctgggatctctccagcggctcaatactttgtcccaatactcccgttatggattcggcaagagcttcaattccctgtggatgcatgggctgctcccgccacatagctcactcccatggatgcgcccacgcgaacacgaaactcagcagtacgaatactcactgccagtgcatccgccgccgcttccaagccaaccgtccttgaagcctcagcaaccgggcctgaagccgttcctccagagcgcggccgctactaccaatcaggctactgcactgaaagaggcacttcaacctcccatccacctgggacacttgccactgcaggagggagagctgccgctggtccagcagcaagtggccccgtcggacaagccgccgaagccggaactgccaggagtggactttgcagacccccaaggaccatccctcccgggaatggacttcccggatccgcagggaccgtcacttccaggacttgactttgctgatccacagggatcaactatcttccagatcgcccgcctgatttcgcacgggcctatgccccagaataagcagtcccccctttacccgggcatgctctacgtcccgttcggggcgaaccagctcaacgcgccggccagactgggaatcatgtcctcggaggaggtggcaggcggaagagaagacccgatggcgtacggggcaatgttcccgggattcggcgggatgcggccgggtttcgagggcatgcctcataacccggcaatgggaggcgacttcaccctggaattcgatagcccggtggcggctaccaagggaccggagaacgaagagggaggagcccagggttcgccaatgccagaggctaatcctgataacctggagaaccctgcattcctgactgaactggaaccggcgccgcatgccggcttgctggcactgccgaaggacgatatccccggactgccgcggtcgccatcaggaaaaatgaagggcctcccgtcggtgactcctgctgcagccgatcctctgatgactcctgagttggccgacgtgtacagaacttacgatgccgacatgactaccagcgtggatttccaggaagaggcaaccatggacacgacgatggcacccaatagcctgcaaacttcgatgccggggaataaggcccaagaacctgagatgatgcacgatgcatggcacttccaagaacct

SEQ ID NO: 191643 - DNA, 1341 bp, Artificial Sequence
  derived and/or modified sequence
atgtccgcctcgaagatccctctcttcaaaatgaaggacctgatcctgatcctctgcctgttggagatgtcgtttgccgttccctttttccctcagcagtcaggaaccccggggatggcgagcctgtccctcgaaaccatgagacagcttggaagcctgcaacggctgaataccctgtcccagtactctcggtacggattcggaaagagctttaactcactgtggatgcacggtttgctccctcctcattcctccctgccatggatgaggccacgagagcacgaaacccaacaatatgagtactccctgccggtgcacccgccgccgcttccgtcgcagccgagcctgaagccacaacagccgggactgaagcctttcctgcagtccgccgccgctaccactaaccaggccactgctctgaaggaggctttgcaaccgcccatccacctgggccatctgccgctgcaggaaggagaactgcctctcgtccaacagcaggtcgccccgagcgataagccgccaaagcctgaactgcctggagtggacttcgcagatcctcagggaccttcactgccgggtatggatttcccggatccgcaggggccgagcctcccgggcctggattttgcggacccacagggtagcaccatcttccaaatcgctagacttatctcgcacgggccgatgccgcaaaacaaacagtcgccgctgtaccctgggatgctttacgtgccgtttggagcgaatcagctcaacgccccggctcgccttggcatcatgtccagcgaggaggtggctggcggccgcgaggacccgatggcatacggggctatgttcccgggcttcggcgggatgcggccagggttcgagggaatgccgcacaatccagccatggggggagacttcacgctcgaattcgattcgccggtcgcagcaacgaagggccctgagaatgaagagggcggagctcagggcagccctatgccggaggcgaaccccgacaatctggagaacccagcttttctcactgaactcgaacctgcacctcacgcgggactcctggcgcttccgaaggacgatatcccgggcctgccgcggtcgccgtcgggcaagatgaagggcctcccgtcggtgaccccggccgcggcggacccgcttatgactccggaactggcagacgtgtataggacctacgatgcagacatgacgacctcggtggacttccaggaagaagccactatggacaccactatggccccaaactccctccaaacttcgatgccgggaaacaaggcgcaagaaccggagatgatgcacgatgcatggcacttccaagaaccg

SEQ ID NO: 191644 - DNA, 1341 bp, Artificial Sequence
  derived and/or modified sequence
atgtctgcctctaagatccccctgttcaagatgaaggatctcatcctgatcttgtgccttcttgaaatgagcttcgcagtaccttttttcccccagcagtcgggtacacctggtatggcctcgctctcgctggaaactatgagacaactgggtagcctgcagcgcttgaatactctatcgcagtactcacgctacggtttcggtaagtcatttaactcgctctggatgcacggcctacttcccccccactccagcctcccgtggatgcgacctcgcgaacacgaaacccagcagtatgagtacagcttgcctgtccaccctcctcccttgccctctcaaccctctcttaagccccaacagcctggtttgaagccatttttgcaatccgccgcggccaccactaatcaggccactgcgctcaaggaggccctccagcctccaatccaccttggtcatctgcccttgcaggaaggtgaattgcccctcgtccagcaacaagtcgccccttccgataaaccccctaagccagagttgcccggcgtcgacttcgcggatccccagggaccgtccctgccaggtatggacttcccggaccctcaaggcccgagtctccccgggttggatttcgctgacccgcagggctctaccatcttccagattgcacgcctgatttcccacggaccaatgccgcaaaacaagcaatcccctctataccccggtatgctttacgttccattcggagcgaaccagctcaacgcccctgcccgcttggggatcatgtcgtctgaggaggttgctggcggtcgagaggatcccatggcttacggcgctatgtttcccggttttgggggaatgcgcccgggctttgagggtatgccacacaaccctgccatgggcggagatttcactttggaatttgactctccggtggccgctaccaagggccctgagaatgaggaaggcggtgcacagggctctcctatgcccgaggcgaaccccgataacttggagaacccagccttccttacggaactcgaacccgctccccacgctggactcctcgccctccccaaggatgacatcccggggcttccccgcagccctagcggtaagatgaagggattgcctagcgttacgcctgccgcggccgatcctctgatgacaccagagctggcggacgtataccggacgtacgatgccgacatgacgacgagtgtcgacttccaggaggaggcgacgatggacaccactatggctccgaacagtctccagacgtccatgcccggcaacaaggctcaggagcctgagatgatgcacgacgcctggcacttccaggagccc

SEQ ID NO: 191645 - DNA, 1341 bp, Artificial Sequence
  derived and/or modified sequence
atgagcgcctccaaaatcccactatttaaaatgaaagatctgattctgatcttgtgtctcttggagatgtcttttgccgttcccttctttccccaacagagcggaaccccgggtatggcctcactgagtcttgaaactatgagacagctgggctctcttcaacgtctcaacactctgagccagtactctcgctacgggtttggcaaatcctttaatagcctctggatgcacggactgctgcccccacatagctctctgccatggatgagacctagagagcacgaaacgcagcaatacgaatatagtttgccagtccacccacccccactcccctctcagccttccctaaagccccaacaacccggcttgaagccattcctccagtctgcggccgctacgactaaccaagctaccgcgttaaaagaagcactgcagccgccgatccacctaggtcatctccccctgcaagaaggggagctgcctctggtgcagcagcaggtcgcccccagcgacaagccacctaaacccgaactccccggggtcgatttcgcagaccctcagggtccctcactccccggtatggattttcctgatccacagggtccatcactgccaggactcgactttgctgaccctcaaggatctactatcttccagatcgcacggttgatttctcatggccccatgccccagaataaacagtcacctctgtaccccggtatgctctatgtgccatttggtgcaaaccagctcaacgctcccgcccgtttaggcataatgtccagcgaggaggtcgccggaggcagggaagacccgatggcctacggggcgatgtttccaggatttggtggcatgcggcctgggtttgagggaatgccccataaccccgctatggggggcgacttcacactcgaattcgactcccctgtagcagctacaaaagggccagagaatgaggaggggggcgcccaaggtagccccatgcctgaggcaaatcccgataatttggaaaatcctgcctttcttactgaacttgaaccagccccccatgctggcttgctggctcttcccaaagacgacatccctggcttgcctagaagcccttcgggaaagatgaaaggattaccaagcgtgacacctgcagctgcagaccccctgatgactcccgaactcgcagacgtgtatcggacgtacgacgcggacatgactacttctgtggacttccaggaggaggctacaatggacactacaatggcccctaactccctgcaaactagcatgcctggcaacaaagctcaggagcccgagatgatgcacgatgcatggcactttcaggaaccc

SEQ ID NO: 191646 - DNA, 1341 bp, Artificial Sequence
  derived and/or modified sequence
atgtctgcatcaaaaatacctctctttaagatgaaagatttgattctgatcctgtgcctgctcgaaatgtcattcgcagtgcctttcttcccccagcaatcagggacaccaggaatggccagtctttctctagaaactatgcgacagctcggatctttacagcgactgaacacactatcacagtatagtagatatggatttggaaaaagtttcaactccctctggatgcatggactgctgcctcctcattctagtttgccttggatgagacctagggagcacgagacacagcagtatgaatattcactccccgtgcatcctccacccttaccttcgcagccatctctcaaaccacagcagcctgggctaaaaccatttcttcagtcagcagccgcgacaactaaccaggcaacagcacttaaagaggctctccagcctcctattcatctcgggcacctgcccttgcaggaaggggaacttcctctcgtccagcagcaggtggccccttctgataaaccccccaaacccgaactccccggggtagatttcgctgatccacaaggacccagtctcccaggaatggacttccccgatccacaggggccttcactgcccggacttgatttcgccgatccacaggggtcaacaattttccaaatagcacgccttatcagtcacggacctatgcctcagaacaaacagtccccactttatcctggaatgctatatgtgccattcggagcaaatcagctgaacgctcccgctcgactcgggatcatgtcttctgaggaagtggccgggggaagggaagatccaatggcatatggggctatgtttcctggatttggaggaatgcgccctggatttgaagggatgccccataacccagctatgggaggggattttacactcgaatttgatagtccagtcgctgccactaaaggaccagaaaatgaagaaggaggagcccagggatcccctatgcctgaggccaaccctgataatctagaaaatcccgccttcctgacagaattagaacctgccccccatgcggggttgctggcccttcctaaagatgatatccctgggctcccccggagtcccagtggaaagatgaaaggactccccagtgttactcctgctgctgcagatcctcttatgactcccgaactcgccgacgtatacagaacttacgacgcagacatgactacatctgtggatttccaggaagaagccacaatggatacaacaatggcccccaactccctacagacttcaatgcccgggaataaggcacaggaacctgaaatgatgcacgatgcctggcattttcaggagcca

SEQ ID NO: 191647 - DNA, 1341 bp, Artificial Sequence
  derived and/or modified sequence
atgagtgcaagtaagattcctttattcaaaatgaaagatctaatcctgattctctgtttgctcgagatgtctttcgccgtacccttctttccccaacagtctggcacgcctggtatggctagcctgtctctcgagacaatgcggcagcttggctctttgcagcgactgaataccctctctcagtatagtcgatacggcttcggtaagagttttaacagcttgtggatgcacggcctgctcccgccccatagtagcctgccctggatgaggcccagagagcacgagacgcaacagtacgaatattccttacccgtccatccccctccccttccctctcaaccgagcctgaagcctcagcaaccaggattgaaacctttccttcagtcagccgcggccaccaccaatcaggctacagcacttaaggaggctcttcagcctcccattcatctggggcatctgcccctacaagaaggagagcttccattggtgcaacagcaagtggctccatctgataagcctcctaagccagaactccctggagtcgacttcgctgacccccagggaccttctctgcctgggatggatttccctgacccccagggaccgtccctgcccgggctagactttgcggacccccagggctcaactatattccagatcgcccggcttataagtcacggccccatgccccagaataagcagagccctctttacccaggaatgctgtacgttcccttcggagccaaccagcttaatgcacctgcgaggctgggtatcatgtccagcgaagaggtcgcggggggacgggaggacccaatggcatatggcgccatgttcccagggttcggcggcatgcgcccaggtttcgaggggatgcctcataatccggcaatgggcggtgattttaccctggaattcgattctccagtcgcagctaccaagggaccagagaatgaggaggggggagcacaagggagcccgatgcccgaagccaatcctgataatttagagaacccagcgttcttgactgaactggagcctgccccacacgcaggactactagcgttgccgaaagatgatatccctggactccctagatccccttctggcaaaatgaagggactgccaagcgtgactcccgcagcggctgacccgctgatgacaccagagctagccgacgtgtaccgaacctacgatgctgatatgacgacgtccgtcgatttccaggaggaagccacaatggacactacaatggctcccaactcgcttcagacctctatgccgggcaataaagcgcaggagcccgagatgatgcacgatgcatggcactttcaggagccc

SEQ ID NO: 191648 - DNA, 1341 bp, Artificial Sequence
  derived and/or modified sequence
atgtccgctagtaagattcctctgttcaaaatgaaagatctgatcctgatcctctgtctgctcgaaatgtcctttgctgtgcctttctttcctcagcagtcgggaactcctggaatggcttcgttgtcgctcgaaaccatgagacaattggggagcttgcagaggctgaacaccctctcacagtacagccgatacggatttggtaagagctttaacagcctttggatgcatggtctgttgcctcctcacagctccctcccttggatgaggccacgagagcacgaaacccaacaatacgaatacagccttcctgtgcatccccctcctctgccaagccaaccttcgctgaagcctcaacagccagggctcaagcccttcctccaatcggcagccgcaaccactaatcaggccactgcactgaaggaggctctgcaaccgccaatccacctcggacatctcccactgcaagaaggtgagctgccacttgtgcaacagcaggtcgccccttccgataagcctcccaagcctgaacttcccggtgtggactttgccgatccgcagggtccttccctgcccggcatggattttcctgaccctcaagggccttccctccccggtttggattttgccgatccccaaggatcaaccatcttccagatagcgaggctcattagccacggcccaatgcctcagaataagcaatcccccctctacccaggaatgttgtacgtgccattcggagcaaaccaactgaacgcaccggctcgacttggaattatgtcctcagaggaagtggctgggggcagagaggaccctatggcatacggtgcaatgttccccgggttcggtggaatgcgccccgggttcgaaggcatgccccataaccctgccatgggaggtgatttcaccctcgaatttgattccccggtggcagccactaagggaccagagaacgaggagggtggagcccaaggatcacccatgccagaggcaaacccagataatctggaaaacccagccttccttaccgagcttgaacccgcccctcatgccggactcctggcgcttccaaaagacgacatccctggattgccacgttcgccctccgggaagatgaagggactgccgtcagtcacccccgcggccgctgatccgcttatgactcctgaactggctgatgtctaccggacttatgacgcagacatgaccactagcgtggactttcaggaggaagcaaccatggataccacgatggctccaaactcgctgcaaacttcaatgccaggcaataaggcacaagaaccagagatgatgcatgatgcgtggcattttcaagaaccc

SEQ ID NO: 191649 - DNA, 1341 bp, Artificial Sequence
  derived and/or modified sequence
atgtccgcctctaagatcccactgttcaaaatgaaagatctgatcttaatcctctgccttttggagatgtccttcgctgtaccattcttcccccaacagtcgggaaccccaggcatggcctccctttctcttgagaccatgaggcagcttggcagtctgcagcggctgaataccttgagccagtactctagatatggcttcggaaagtcgtttaattcactgtggatgcacggactcctccccccccatagctcgctgccctggatgcgaccacgggagcatgaaactcaacaatatgagtattccctcccagtacaccctccaccactgcccagccagccaagtctgaagccacagcaacctggcctaaagcctttcttgcagagcgccgcagccacaaccaaccaggctaccgcgctgaaagaagcccttcagcctcctatccacttaggtcacctccccctgcaggaaggggaactgcctctggtccagcagcaggtggccccttctgataagccgccaaagcccgagctgccaggagtggattttgcggacccacagggccctagtctcccgggcatggatttccccgacccccagggcccttcgttgccaggtttggatttcgccgatcctcagggctccactatctttcagatcgcacggctgatttcgcacggaccaatgccccagaacaaacaaagcccattgtacccggggatgctgtatgtgcctttcggcgcgaaccaactgaatgcaccagcgcggctgggcattatgagctcagaagaagtggcagggggtcgcgaagatcctatggcgtacggggccatgtttcctggattcggcggcatgagacccggattcgagggaatgccacataacccagccatgggcggcgatttcacactggagttcgattcccctgtggccgcgacgaaaggtccagagaacgaggagggaggagcccaggggagccctatgccagaagcaaacccggataatctggagaaccctgcgttcctgactgaactggagccggctccacatgccgggctcttggctcttccgaaagacgacataccgggcctgccgagatctccttctggtaaaatgaagggactgccttccgtcactcctgcagccgccgatccactaatgactccagagctagccgacgtgtatcggacttatgatgccgatatgaccaccagcgtagactttcaggaggaggccaccatggacaccacaatggccccaaacagcctgcagacaagtatgcccgggaataaggcccaggaaccagaaatgatgcacgacgcatggcacttccaggagccc

SEQ ID NO: 191650 - DNA, 1341 bp, Artificial Sequence
  derived and/or modified sequence
atgtccgcctcaaagatccctctatttaaaatgaaagatcttattctgatattgtgtctcctggaaatgagcttcgcagtgccattcttcccccagcagagtggtacccctggtatggcgtccctaagcttagagactatgcgccagttagggagcctccaaaggttgaacacactttcgcagtactcccgatatggtttcggcaaaagcttcaatagtctctggatgcatggacttctgccccctcactcgtcactcccctggatgagaccccgagaacacgagacgcagcaatatgaatactcattgccagtgcaccctcctcccctaccgtctcagccctcactaaagccacagcagcctgggcttaagccgtttttgcagagtgccgcagccactaccaaccaggccactgcactaaaagaggccctacaacctcctatacacctcggccaccttcccctccaggaaggcgagctcccactcgtccagcagcaagttgcaccttccgacaagcccccgaagcccgagctgcccggcgtggactttgccgacccgcaggggccctccctacctggcatggacttcccagatcctcaaggaccttccttgcccggactggactttgcggaccctcaggggagtacgatcttccagattgctagactcatttcccacgggcctatgccccagaataagcagtcgcccctgtatcccggcatgctctatgttccctttggcgctaatcagctgaacgcccccgcacgcctgggcatcatgagcagcgaagaagtggcaggagggcgcgaagatccaatggcatatggggcaatgttccctggtttcggtggtatgagaccgggtttcgagggcatgccacataacccagcaatgggtggggactttaccctggagttcgattcaccagtggcagcaacaaaaggacccgaaaatgaggagggaggcgcacagggatctccaatgccggaggccaatcctgataacttagagaatcctgctttcctgaccgaacttgagcctgctccacacgccgggctgctggctttgccaaaagacgacatccccgggcttcctagatcaccatctgggaaaatgaaaggccttcctagtgtgactcccgcagccgctgatcctttgatgactcctgaactggctgacgtctaccgtacctatgacgctgatatgacgacatccgtggatttccaggaggaggccaccatggacaccactatggccccaaactccctgcagacttcgatgcctggtaataaggctcaggagccagaaatgatgcatgacgcgtggcatttccaggagccg

SEQ ID NO: 191651 - DNA, 1341 bp, Artificial Sequence
  derived and/or modified sequence
atgagcgcaagcaagattcccctgttcaagatgaaagaccttattctgatcttgtgcttgcttgaaatgtctttcgccgtgcccttcttcccccagcagagtggcacccccggcatggcatctctgtccctggagactatgaggcaactcgggtccctccagcggcttaatacactttcccagtatagtcggtacggtttcggtaaaagcttcaatagtctgtggatgcatggactgttgccaccccactcctctctcccatggatgcgcccgagagagcacgaaacccaacagtacgagtattccctgcctgtacaccccccacccttgccaagccaaccgtctctgaagccgcaacagcccggattgaagccattcctccagagcgctgccgccaccaccaaccaggcgaccgcgctgaaggaagcacttcagccacccatccacttgggacatctgccactgcaggaaggggaactgcccctggtgcagcagcaggtggccccttcagacaaaccacccaaaccggagctccccggcgtggactttgcagatcctcaaggaccttctctgccaggcatggactttccagacccacagggcccctccttgccagggctggactttgccgacccgcagggctccacgatctttcagatagcgagacttattagccatggtcctatgccacagaacaagcagagccctctgtaccctggtatgttgtatgtcccctttggcgccaatcagctcaatgctccagccaggctgggtataatgtctagtgaagaagtcgccggcggtcgggaagatcctatggcgtatggcgcaatgtttcctgggtttggcggtatgagacctggatttgagggcatgccacacaaccccgccatgggtggggatttcactctggagttcgatagccctgtcgcagcaacgaagggccccgagaatgaagaaggtggcgctcagggcagccctatgccagaggccaatcctgataatctcgaaaatccagcatttcttacggaactggagcctgccccacacgctgggctgctggcattgccaaaggatgacattcccggtctccctcgatctccctccggcaagatgaaaggtctccctagtgtgacccccgccgccgctgaccctcttatgacacctgaattggccgacgtctacagaacctacgacgcggacatgacaacgagcgtggatttccaagaagaagctaccatggacacgacaatggcacccaacagcttgcagacatccatgcccggcaataaggcccaagagcctgagatgatgcacgatgcctggcatttccaggagccc

SEQ ID NO: 191652 - DNA, 1341 bp, Artificial Sequence
  derived and/or modified sequence
atgtcggcctccaagatccccctgttcaagatgaaggacctgatccttatcctctgcctgctggaaatgtcatttgcagtgccgttcttcccgcaacagtccgggactccagggatggcgtccctttccctggaaaccatgcgccagctcggatcgctgcagaggctgaacacgctgtcacagtactcgcggtacggtttcggtaaatccttcaatagcctttggatgcacggtctgctgcctcctcactcaagcctgccgtggatgcggccgcgggaacacgaaacccagcagtacgagtacagcttgccagtccatccaccgcctctgccatcgcagccatctctgaagccgcaacagccgggattgaaaccgtttctgcagagcgccgctgccaccactaatcaagcaactgccttgaaggaggcgctgcagccgccaatccaccttggacacctgccgttgcaagagggcgagctcccgctggttcagcagcaagtggccccgtctgataagccaccgaagccagaactcccaggggtggacttcgcggatccccagggccccagcctgcccgggatggacttccctgatccgcaggggcccagcctgcctggcctcgacttcgcagacccacaggggtcgactatcttccaaatcgcccgcctgatttcccatggcccaatgcctcagaacaagcagtcgccgttgtaccctgggatgctttacgtgcccttcggagcgaaccagctgaacgcgccggccagattgggaatcatgtctagcgaagaagttgcaggagggagggaagatccgatggcttacggagcaatgttcccaggattcggaggaatgaggccgggatttgaagggatgccgcataacccagcaatgggaggagatttcacgcttgagttcgattcgccggtcgccgcgaccaagggccccgagaatgaagaagggggcgcccaaggatccccaatgcctgaggccaacccagataatctggagaatccagcgttcctcaccgaactcgaaccggccccgcatgccggtctgctcgccctgcctaaggacgacatcccaggtttgcctcggtccccgtccgggaaaatgaaggggctgccgtcagtgaccccggcggccgcggacccactgatgactccagagctggcggatgtgtacagaacgtacgacgctgatatgaccacctcagtggactttcaagaggaggccaccatggataccaccatggccccgaacagcctgcagacgagcatgccaggaaacaaagcccaggagccggaaatgatgcacgatgcttggcacttccaggaaccg

SEQ ID NO: 191653 - DNA, 1341 bp, Artificial Sequence
  derived and/or modified sequence
atgtccgcctctaaaatccccttgttcaagatgaaggacttaattctgatcctgtgccttctggaaatgtccttcgccgtcccattcttcccacagcagtcggggacccccggcatggcttctctgagcttggagactatgcgacagctgggcagcttgcagagactgaacacactgtcacagtatagccgttacgggtttggaaagtcgttcaactcgttatggatgcatggtctgctgcctccgcattcaagcctgccatggatgaggccccgagagcacgagacccagcaatacgaatacagcctgccggtccatccccccccactcccatctcaacctagtctgaagccacagcagcccggacttaagcccttcctgcagtccgccgcagctactacaaaccaagcaactgccctgaaagaggccctgcaaccccctatccacctggggcatctccctctacaggaaggggagctccctctcgtgcagcagcaggtagctcctagcgacaagccgccaaaacccgagcttcctggcgtggacttcgcagaccctcaaggtccaagtctgcctgggatggacttcccggatccccaagggcccagtttacccgggctagatttcgcggatccccaggggtcaacaatcttccaaatcgctaggctgatcagtcacggacccatgccccagaacaaacaatctcctctgtatcctggcatgttgtacgttccattcggtgccaaccagcttaatgctccagctagactgggaatcatgagctcagaagaggttgccggtggtagagaggacccaatggcatatggtgcaatgttccctgggtttggtggaatgcgacccggtttcgagggtatgccccataatcctgccatgggcggcgatttcaccctggaattcgactcccccgttgccgctaccaagggccctgaaaacgaggaagggggagctcaaggctctcccatgcctgaagcaaacccagataacctcgagaacccagctttcctgaccgagctggaaccagcaccacacgcagggctgttagctttgcctaaggacgatatccctggcctcccccgaagcccaagcgggaagatgaaaggattgcccagtgttacaccggctgcagccgatccattgatgactcccgaattggcggatgtgtacagaacatacgacgccgatatgaccacaagtgtggattttcaagaggaggctacaatggacactacgatggccccgaactctctgcaaaccagcatgccggggaataaagcacaggagccggaaatgatgcacgatgcctggcatttccaagaacca

SEQ ID NO: 191654 - DNA, 1341 bp, Artificial Sequence
  derived and/or modified sequence
atgtcggcgtcgaaaataccgctatttaaaatgaaagatctaatattaatactatgtttactagaaatgtcgtttgcggtaccgttttttccgcaacaatcgggtacgccgggtatggcgtcgctatcgttagaaacgatgcgtcaattaggttcgctacaacgtctaaatacgttatcgcaatattcgcgatatggttttggtaaatcgtttaattcgctatggatgcatggtttattaccgccgcattcgtcgctaccgtggatgcgtccgcgagaacatgaaacgcaacaatatgaatattcgctaccggtacatccgccgccgttaccgtcgcaaccgtcgttaaaaccgcaacaaccgggtctaaaaccgtttctacaatcggcggcggcgacgacgaatcaagcgacggcgttaaaagaagcgctacaaccgccgatacatttaggtcatttaccgttacaagaaggtgaattaccgttagtacaacaacaagtagcgccgtcggataaaccgccgaaaccggaactaccgggtgtagattttgcggatccgcaaggtccgtcgttaccgggtatggattttccggatccgcaaggtccgtcgttaccgggtttagattttgcggatccgcaaggttcgacgatatttcaaatagcgcgtttaatatcgcatggtccgatgccgcaaaataaacaatcgccgctatatccgggtatgctatatgttccgtttggtgcgaatcaattaaatgcgccggcgcgtttaggtataatgtcgtcggaagaagttgcgggtggtcgtgaagatccgatggcgtatggtgcgatgtttccgggttttggtggtatgcgtccgggttttgaaggtatgccgcataatccggcgatgggtggtgattttacgctagaatttgattcgccggttgcggcgacgaaaggtccggaaaatgaagaaggtggtgcgcaaggttcgccgatgccggaagcgaatccggataatttagaaaatccggcgtttctaacggaattagaaccggcgccgcatgcgggtctattagcgttaccgaaagatgatataccgggtttaccgcgttcgccgtcgggtaaaatgaaaggtttaccgtcggttacgccggcggcggcggatccgttaatgacgccggaactagcggatgtttatcgtacgtatgatgcggatatgacgacgtcggttgattttcaagaagaagcgacgatggatacgacgatggcgccgaattcgctacaaacgtcgatgccgggtaataaagcgcaagaaccggaaatgatgcatgatgcgtggcattttcaagaaccg

SEQ ID NO: 191655 - DNA, 1341 bp, Artificial Sequence
  derived and/or modified sequence
atgtccgcatcaaaaattccgctgtttaagatgaaggacctcattttgattctgtgtctcctcgagatgtcttttgccgttcccttctttccacagcagagtggaacccccggcatggcatccctttcactggagacaatgaggcagctgggctccctgcagaggctgaacacattgagtcagtacagccgctacgggtttgggaagtcctttaactctctttggatgcacggcctacttccaccccacagttcccttccctggatgcgccccagggaacacgagacccagcaatacgagtatagcctgcctgtccaccctcctccactcccttcccaaccgtccctgaaaccacagcagccagggctcaagccgttcctccagagtgccgccgccaccacaaaccaggcgacggccttgaaggaagcgctccagccaccaatacatctgggacacctgcctttgcaggagggcgagttaccactcgtgcagcagcaagtggcgccgtctgacaagcctccaaaaccagaactcccaggcgtggatttcgccgatcctcagggaccaagccttcccggaatggactttcccgaccctcagggtccctcactccctggccttgactttgcggaccctcagggatctacgatattccagatagcccggctcatcagtcacggaccaatgcctcagaacaagcagtcacccctctaccctggaatgctatacgtgccctttggcgctaatcagctaaacgccccagctagactcggcataatgtcaagtgaggaggtggccggggggcgggaggatccaatggcgtacggggctatgttccccggttttggagggatgcgacctggttttgaagggatgcctcataaccccgccatgggcggcgattttactcttgaattcgattcccccgtagcagctaccaaggggccagagaatgaagagggcggagcccagggatccccaatgcccgaagccaatccagataacttggagaatccagcattcctgacagagctggaacctgccccgcacgccggtcttttagctcttccgaaggacgacatcccaggcctgccaagaagcccatccgggaagatgaaagggctccccagcgttaccccagctgcagccgatcctcttatgactcctgaacttgcagatgtgtaccgaacatacgacgctgacatgaccactagcgtcgattttcaagaggaagccaccatggatacaactatggccccaaatagcttacagacaagtatgcctgggaataaagcacaggagcctgaaatgatgcatgacgcctggcattttcaggaaccc

SEQ ID NO: 191656 - DNA, 1341 bp, Artificial Sequence
  derived and/or modified sequence
atgtccgcctccaaaatcccgctgttcaagatgaaggatctgatcttgatcctgtgcctgctggagatgtccttcgcggtgccgttcttcccgcaacaaagcggtaccccgggaatggcgtcgctttccctcgagactatgcggcaactgggctcgctccagcgcctcaacacgctgtcgcagtacagcagatacgggttcgggaagtctttcaactcgctgtggatgcacggactgctgccaccacactcgtcactcccctggatgcggccgcgcgaacacgaaacccagcagtacgaatactccctgccagtccatcccccacctcttccttcccaaccgagcctcaaacctcagcaacctggcctgaagccctttctgcagtcggcagctgcgaccaccaaccaggcaactgcactgaaggaggcactccagccccctatccacctgggacacctcccgctgcaggaaggcgagctccccctggtccagcagcaggtcgcgccaagcgacaagcctccaaaacctgaactgccgggcgtggacttcgccgacccgcaaggtccgtccctccctggaatggactttcctgatccgcaagggccgtcgctgcctggactcgactttgcagatccgcaaggctcaactatcttccagatcgctagacttatttcgcacggccctatgccacagaataagcagagcccgctgtacccgggaatgctgtacgttccttttggtgccaatcagcttaacgctcccgcccgactggggattatgtcctccgaagaggtggccgggggacgggaagatccaatggcatatggagcgatgttccctgggtttggagggatgcgtccgggcttcgagggaatgccacataaccccgctatgggaggagatttcaccctcgagttcgacagccccgtggcggccaccaaaggcccagaaaacgaggagggaggagcccagggatccccgatgccggaggcgaacccggacaacttggaaaacccagctttccttacggaactggaacccgcgccgcatgcaggactgctggccctgccgaaggacgatatcccagggctgccccggtcgccatcgggaaagatgaaaggactgccttcggtgactccagcggccgcagatccgctgatgactccggaactcgccgacgtgtaccggacctacgacgccgacatgacgacttcagtcgacttccaagaagaagccactatggacaccacgatggctccaaactcgttgcaaacctcaatgccaggcaataaggcacaagagcccgaaatgatgcatgatgcctggcactttcaagaacca

SEQ ID NO: 191657 - DNA, 1341 bp, Artificial Sequence
  derived and/or modified sequence
atgtccgccagtaaaatccccctgtttaagatgaaggatttaattcttatcctctgccttctggagatgtccttcgctgtacctttcttccctcagcagtccggcactcccgggatggcatctctctctctggagacaatgcggcagctgggctcactccagagactgaataccctgtcccaatatagcaggtacggttttgggaaatcctttaattctttgtggatgcacggcctgctgccaccccactcatccctcccgtggatgaggcccagggaacacgagacccagcagtatgaatacagcctgcccgtgcacccaccgcccctgccgtcccaaccttcacttaagccgcagcagcccgggctcaaacctttcttacagtcagcagccgctactaccaatcaagccacagctctaaaagaggccttgcagcctccaattcacctggggcatctccctttgcaggagggcgagcttccacttgtgcagcaacaggttgcgcctagtgacaagccccctaaacctgaattgcctggcgtcgactttgccgatcctcaaggcccgtccttacctggaatggacttccccgacccacagggcccctcactacccggcttggacttcgctgatccacaggggagcacaatatttcaaattgcccggctgatttcccacggcccaatgccacagaacaagcagtcccccctgtatccagggatgctgtacgtgccgttcggggccaatcaactgaacgcccccgcccggctcggaattatgtccagcgaggaagtggccggaggacgcgaggatcctatggcttacggcgcaatgttccctggcttcggggggatgcggcctggattcgagggcatgccccacaatcctgcaatgggcggggatttcaccttggagttcgattctcctgttgccgcaactaaggggcctgagaatgaggagggaggcgctcaaggttcccccatgcccgaagccaatcctgataatctggagaacccggcctttctcacagagctcgagcccgccccccacgctgggcttctagcattgcccaaggacgatatccccggtcttcctaggagcccaagcggcaaaatgaagggcctcccgagcgtcacacctgccgcggccgaccccctaatgactcccgagctggcagacgtataccgaacatatgatgctgacatgaccaccagcgtagactttcaggaggaagcaacgatggacaccacgatggccccaaacagtctgcaaacaagtatgcccggcaacaaggctcaggagccagaaatgatgcacgatgcttggcattttcaagagccc

SEQ ID NO: 191658 - DNA, 1341 bp, Artificial Sequence
  derived and/or modified sequence
atgtccgcaagtaagatcccgctgttcaaaatgaaagaccttattcttatcctgtgtctgctcgagatgtccttcgcagtgcctttctttcctcagcaatcgggaactcccggcatggcatcattgtcgcttgaaacgatgcggcaactgggttcccttcagcgccttaatactttgagccagtactcgaggtacggatttgggaaatcgttcaattctctctggatgcacggccttttgcctccccattcctccctgccttggatgaggccgagagagcacgaaactcaacaatacgagtactctttgcccgtccatccaccgccgctgccatcacaaccgtcgctgaaaccacaacaaccaggactgaagccctttcttcagagtgcagcagctaccaccaaccaagcaaccgcactgaaggaagcactccaaccacctattcacctgggacatctcccgctgcaggaaggcgagctcccactggtgcaacaacaggtcgccccatccgacaagccccctaaaccggaattgcctggagtggacttcgctgatccacaggggccatccttgcctggtatggacttcccggatccacagggtccttcgcttcctggactcgatttcgcagacccacagggatccactatctttcaaattgcacggctcatttcccacggaccaatgcctcagaataagcagtccccgctctatccagggatgctctacgtgccttttggcgcaaaccaactgaacgcacctgcacgccttggcataatgtccagcgaggaagtggcaggaggcagagaagatccaatggcttacggtgcaatgtttccgggattcggtggtatgcgcccaggatttgaaggaatgccacataaccctgcaatgggcggagattttaccttggaattcgatagccctgtcgcggcaaccaagggacctgagaatgaggagggtggcgcccaaggctccccgatgcctgaggcgaacccagataaccttgagaatcctgcgtttctgaccgaactggaaccagctccccatgctgggctcctggcacttcccaaggacgatattccgggactgccacgctcgccatcaggcaagatgaaggggctgccctcggtgactcctgcggcagccgaccccctcatgacgcccgaacttgcggatgtttaccgtacttacgatgccgacatgaccacttccgtggacttccaggaagaagcaactatggatactaccatggcaccaaacagccttcagactagcatgccaggaaacaaggcccaagaaccagagatgatgcatgatgcttggcatttccaagagcct

SEQ ID NO: 191659 - DNA, 1341 bp, Artificial Sequence
  derived and/or modified sequence
atgtcggcgtcgaagattcctctgtttaagatgaaggacctgatcctgatactttgtctgctggaaatgtcgtttgcagtgcctttctttcctcaacagtccgggacccccgggatggcaagccttagcctggaaaccatgagacaactgggaagtctgcagcgcctcaacaccctttcacagtactcgagatacggatttgggaagtcgttcaactcgctgtggatgcacggacttcttcctcctcattcatccctgccttggatgaggccacgggaacatgaaacccagcagtacgaatactcacttcccgtccatcctcctccacttccttcccaaccatcgcttaagccacaacagcccggcctcaagccgtttcttcaatcggccgcagcaactacgaaccaagccactgccctcaaagaggctctccaacctcctattcatcttggtcatctgccactgcaagagggagaactcccattggtgcagcagcaggtggcaccctcggataaaccaccaaagcctgaactcccaggtgtcgatttcgccgatccccaaggcccgtcacttccaggaatggacttccctgatccacaggggccttcccttcctggactggatttcgctgacccacaagggtcgactatattccaaatcgcgcgactcattagccacggtcccatgccgcaaaacaagcagagccccctttaccccggtatgctgtacgtgcctttcggagcgaatcagcttaatgcaccagctcgccttggaattatgagctcggaagaggtggcgggcggcagggaggatcccatggcatacggcgcgatgtttccaggttttggggggatgcggcccggatttgagggaatgccgcataatccagccatgggaggtgactttacccttgagtttgactcgccagtggccgcaaccaagggacccgaaaatgaagaaggtggcgcacagggaagtcctatgcctgaagcgaatcctgataacctcgagaaccctgcatttcttaccgaactggaacctgcaccacatgctgggctgcttgcccttcctaaagacgatataccaggtctgccccgctccccatcaggcaaaatgaaaggtctgccgtcagtgacccccgcagcagcagatcctttgatgactcctgagttggcagatgtttaccggacctacgatgctgatatgactacttcagtggacttccaggaagaagccactatggataccaccatggcaccgaattcgttgcagacttccatgcctggtaacaaggcgcaagaaccagagatgatgcatgatgcatggcattttcaggaacct

SEQ ID NO: 191660 - DNA, 1341 bp, Artificial Sequence
  derived and/or modified sequence
atgtccgcgtcaaagatcccactcttcaaaatgaaggacctgatactgattctttgccttctcgaaatgtcgtttgccgtgcccttcttcccacagcagtcggggactcccggaatggcatccctctccctggagactatgcgccaactgggaagccttcaacgccttaacactctgtcacagtactcaagatatggatttggtaagtcgttcaactcgctgtggatgcatggacttctccctccacattcgtcgctgccatggatgcgtcccagagaacacgaaacccagcaatatgagtactcgctccccgtccatcctccaccgcttccttcgcagccttcgctcaaacctcaacaacctggacttaaaccattccttcaatcggccgccgctactaccaatcaggcaactgcgctcaaagaggcacttcagccaccaattcacctcggccacctccctttgcaggaaggcgagttgccgcttgtgcaacaacaggtggcaccatccgacaagcctcccaagcctgaacttcctggagtggacttcgccgacccgcagggcccgtcactgccagggatggactttccagatcctcaaggtccttcccttcccggacttgactttgccgatccacaaggatctacgatcttccagattgcacgcttgatatcgcatggaccaatgccccaaaacaaacagtcacctttgtaccccggcatgctctacgttccttttggagcaaaccagctgaatgccccagcgagactggggattatgtcctccgaagaagtcgcaggagggagagaggacccgatggcctacggcgcaatgtttccaggatttggtggtatgaggcccggatttgagggcatgcctcacaatcctgcaatgggaggggattttactcttgagttcgatagccccgtcgcagcaaccaagggaccagaaaatgaagagggcggcgcacagggcagccctatgcccgaagccaacccagataatctggaaaatcctgcatttctgaccgagctggaacctgccccacatgccggactccttgcactcccaaaggacgacatcccaggactccctcggtcaccatcgggaaagatgaaggggcttcctagcgtcactccagcagcagcagatccactcatgacccccgagttggctgatgtgtacagaacctacgacgcagatatgactacgtcggtcgatttccaagaggaggcaaccatggataccactatggcacccaactcccttcaaacctcgatgcctggaaataaggcacaggaacctgaaatgatgcatgacgcgtggcattttcaggagcct

SEQ ID NO: 191661 - DNA, 1341 bp, Artificial Sequence
  derived and/or modified sequence
atgtctgccagtaaaattccgctgttcaagatgaaggatctcatcctgatcctttgcctgctggagatgagctttgccgtgccattctttccccagcagtcaggcactcctggaatggcctctctctccttggaaacaatgcggcaactgggatctctgcagcggctgaacacactctctcagtattccaggtacggcttcgggaagtcatttaatagtctttggatgcatggcctcttacccccacatagctcactgccctggatgcgccccagggaacatgagacccagcagtatgaatattccctccctgtccaccctcctcccctgccatcccaaccatctttaaaaccacagcaaccgggcttaaagccttttcttcagtccgctgccgcaaccactaaccaggctactgcgcttaaagaggctctgcagccgcctatccatttaggccacctcccacttcaggaaggagagctgcccctcgtgcagcaacaggttgcacctagtgataagccccccaaacctgaactccctggggtcgattttgctgaccctcagggccctagcctgccggggatggattttcctgatccacagggccccagtctgcccggccttgacttcgcagacccacaaggctccaccatctttcagatcgcacggttgatcagccacggtccaatgccccaaaacaagcaatcgccactgtatcctggaatgctctacgtgccgtttggcgcaaatcaacttaatgctcctgcgcgtcttgggatcatgtcttctgaggaggtcgcaggaggacgcgaggatccaatggcttacggagccatgtttcctggctttggaggaatgagacctggcttcgagggaatgccgcacaacccagcaatgggaggggattttactctggaatttgatagtccagtcgccgcaacaaagggtccagaaaatgaggagggcggagcccaggggagccccatgcctgaagcgaaccctgacaacctcgaaaacccagcctttcttaccgaacttgagcccgcacctcatgccggcctgttggctttgccgaaggatgacatacctggactccccaggagtccaagcggcaaaatgaagggcttgccctctgtgacccctgccgctgctgacccgctgatgacccctgaactggcagacgtgtacaggacttacgatgcagatatgactaccagcgtcgactttcaggaggaggcaaccatggatactacaatggctcctaacagcttgcagacatctatgcctggaaacaaggcacaggaaccagagatgatgcatgacgcttggcacttccaggagcct

SEQ ID NO: 191662 - DNA, 1341 bp, Artificial Sequence
  derived and/or modified sequence
atgtccgcgtcaaagatccccctgtttaagatgaaagatctcatcctcatcttgtgtctgctggaaatgtctttcgcagtgccgttttttcctcagcagagcggcacgccgggaatggcctccctgtcactggagactatgaggcagctcggatccctccaacgcctgaacaccctgtcgcagtactcccgctacggattcggaaagtcgtttaacagcttgtggatgcatggactgcttccgccgcactcatccctcccgtggatgcgcccccgcgagcacgagactcagcaatacgaatactctctgccagtgcatccacctcctctgccttcccagccgagcctcaaacctcaacagccgggactgaagcccttcctgcagtcagcagccgctaccaccaatcaggccaccgccctcaaggaggcgctgcagccgcctatccatcttggtcacctgcccctccaagagggcgaactgccgctggttcaacagcaagtggcgccatcggacaaaccaccgaaacctgaattgcctggggtggattttgcagatcctcagggcccgtcactgccgggaatggatttccctgacccacaaggcccttcactgccagggctggacttcgcagacccgcagggctccaccatttttcagatcgccagattgatctcgcacggtccgatgccgcagaacaagcaatccccgctctacccgggtatgctgtatgtcccgttcggagccaaccagctgaacgccccggccagactcggaattatgtcgagcgaggaagtcgccggaggacgggaggacccgatggcatacggagccatgttcccgggtttcggaggaatgcggccgggattcgagggtatgccgcacaatccggcaatgggaggagacttcaccttggaattcgactcaccggtggcagctacgaagggcccagagaacgaagagggaggtgcccaggggagcccgatgccggaggccaatccagacaatctggaaaacccagcctttctgaccgaactggagccagcccctcacgctgggctgctggccctccccaaggacgacatcccgggcctgccaagatcgccgtctggaaagatgaaaggcctgccgtcggttactcccgctgctgcagacccgctgatgactccggaacttgcggatgtctaccggacttacgatgcagatatgacgacttcggttgactttcaagaagaagccactatggataccaccatggcaccgaactccttgcagaccagcatgccaggaaacaaggcccaagaacccgagatgatgcacgacgcgtggcatttccaagagccg

SEQ ID NO: 191663 - DNA, 1341 bp, Artificial Sequence
  derived and/or modified sequence
atgagcgcctctaagattcccctctttaaaatgaaagacctgattctgatcctatgtttgcttgaaatgtccttcgcagtccccttctttccgcagcagtcaggcacgcccgggatggcaagtctgtccctggagaccatgaggcagctcggatccctgcaacgcttgaatacactcagtcagtactccaggtatggctttggcaagagcttcaatagtctgtggatgcatggtttacttcccccacactcttctttgccctggatgcggccgcgggagcatgagacacagcaatatgagtactctttaccagtgcatccccctccgctgccttctcagccatccctcaagccccaacagcccggtctcaagccattcctccagtccgccgctgctacaacaaaccaggccaccgcactcaaggaggcactgcagccccccatccatctgggccatcttccgctgcaggaaggtgagctgccgctggttcagcagcaggtagcgccatcagacaagccccctaagcctgagctgcccggcgtggacttcgccgatccccaggggccgagcttgccgggcatggatttcccagatcctcaaggtccttcactccctgggctcgacttcgccgatccccagggttcaacaatatttcagatcgcgaggctgatctcgcatgggcctatgccacagaacaagcagagccccttgtaccccggaatgctgtacgtgccctttggcgccaaccaactcaatgcccccgcgaggcttggtattatgtccagcgaggaggtggctgggggtcgagaagaccccatggcatacggcgctatgttcccaggcttcggaggcatgcgtcctggattcgagggcatgccccacaatccagctatgggcggtgattttacattagagttcgattcacctgtggcggccactaaagggccggagaacgaggagggcggcgcacagggctctcccatgcccgaagccaatccagacaatcttgagaacccagcattcctgactgagttggagcccgctccccatgccggtctgctggcacttccaaaggatgatatcccaggactgccccgctctccaagtggtaagatgaaagggctgcccagcgtgacaccggcggctgctgatccactcatgactcccgagcttgccgacgtgtaccggacttatgacgcagatatgacgacaagcgtcgactttcaagaggaggccacaatggacaccactatggctccaaacagcctgcagacatcaatgcccggcaacaaagcacaggagccagagatgatgcatgatgcctggcactttcaggaaccc

SEQ ID NO: 191664 - DNA, 1341 bp, Artificial Sequence
  derived and/or modified sequence
atgtccgcgtccaagatccctttattcaaaatgaaggacctcatcctcatcctttgtctcctggaaatgtcattcgcagtaccgttctttccgcaacagtcaggcaccccgggcatggcatccctcagccttgagacaatgcgtcaactggggtctctccaaagactcaacacccttagtcaatattctaggtacggcttcggcaagtctttcaatagtctgtggatgcacggcttgctccctcctcacagtagcctgccctggatgagaccaagggagcacgaaacacagcagtatgagtatagcctcccagttcaccccccacctctcccctcccagccctcactaaaaccccagcagcctgggctcaagccattcctacagagcgctgctgccacaaccaaccaagctacagcactgaaggaggccttgcagccgcccatccatttggggcatctgccactccaggagggtgagctgcccctagttcagcaacaggtggcgccttctgacaaaccacccaaacccgagctacctggcgtggacttcgcagatcctcaggggccatccctccctggaatggacttccccgacccccagggtccgtcactgcccggacttgatttcgccgacccccagggttctactatctttcagatcgcaaggcttatctctcacgggcccatgccccaaaacaaacagtccccactgtatcctggtatgctgtacgtgccgtttggagcaaaccagctaaatgctcctgccaggctaggtatcatgagcagcgaggaagtcgccggcggccgcgaggaccccatggcctacggtgccatgttcccagggtttggcggcatgcgtccaggattcgagggaatgccacacaatccagccatggggggtgacttcaccttagaatttgactctccagttgcagctactaagggaccagagaacgaagaaggaggtgcccagggctcacccatgcctgaagcaaaccctgataacttggaaaatcccgccttcctcaccgagctagagccagctccgcatgcaggtctcctggcacttcccaaagacgacatccccgggttaccacgatctccctctggtaagatgaagggtttgccttccgtgacacctgccgccgcagacccccttatgacccccgagttggcggatgtgtatagaacatacgatgcagacatgactaccagcgtggacttccaggaagaagctacaatggacaccaccatggcccccaactcactgcagacttctatgcctggaaacaaggcacaggagcctgaaatgatgcacgacgcttggcactttcaggagcct

SEQ ID NO: 191665 - DNA, 1341 bp, Artificial Sequence
  derived and/or modified sequence
atgtcagcaagtaagatcccgttatttaaaatgaaagacctgattctcatcctctgcctactcgagatgagctttgcagtgcccttctttccccagcaatccggcacccctggcatggcgtcgctcagccttgaaacaatgcgccaattggggtcattgcagcggctgaatactctgtcacagtactcccggtacggctttggaaagagcttcaatagcctatggatgcatggactattacccccccactcgtcactcccctggatgaggccaagagagcatgagacacagcagtatgaatactctttgccagttcatccaccgcctcttccgtctcagccatctctgaaaccgcagcagccaggcttgaaaccttttctccagtccgcagctgccacaaccaaccaagccaccgccttaaaagaagctttgcaaccccctatccatctgggtcatttacccctgcaagagggcgagctgcccttggtccagcagcaggttgccccctctgacaagccccccaaacccgagctgcctggggtggacttcgcagatcctcaagggccatcactgcccggaatggatttccctgaccctcagggtccgtccctcccaggccttgacttcgccgatccccagggcagcacgatttttcagatcgctcggcttatcagccatggtcctatgcctcagaacaaacagtcccccctatacccgggcatgctgtacgtgccctttggcgcgaatcagttgaacgcgccagccaggcttgggattatgagtagtgaggaagtggccggtggtcgagaagaccctatggcttacggggccatgttccccggctttggcggaatgagacccggcttcgagggaatgccacataacccagccatgggaggggatttcaccctcgagtttgattcaccagtcgcagctaccaagggtccggagaatgaagagggaggtgctcaagggagtcctatgcctgaggccaatcctgacaatctcgagaaccccgcctttctgaccgagctggaacctgcgcctcacgctgggctgctcgctctacctaaagatgatattccgggactaccaagaagcccctcaggcaagatgaagggcctcccgagcgtgaccccagctgccgctgacccccttatgacacctgagttggcggatgtctatcgcacatacgatgctgacatgaccacgtccgtggacttccaagaggaggcaactatggacactactatggctcctaatagtcttcaaacgtctatgccaggtaataaggcgcaagagccagagatgatgcatgatgcctggcattttcaggagccg

SEQ ID NO: 191666 - DNA, 1341 bp, Artificial Sequence
  derived and/or modified sequence
atgtcagcctcgaaaatcccccttttcaagatgaaagatttgatcctaatcttatgtctactcgagatgtcattcgctgttcccttcttccctcagcagtctggaacacctggcatggccagcctgtcactggaaaccatgagacagttgggttctctacagagattgaataccttgtctcagtacagcagatacggattcggaaagtcttttaacagcctttggatgcacggactgctgcctcctcattcttcgctaccttggatgagaccaagggaacatgaaactcagcagtatgaatattctctccccgtgcatccaccaccccttcccagtcagccaagtctcaaaccgcagcagcccggccttaagccttttttgcagagtgccgcagccacaactaatcaggccacggcactcaaggaggctctccagcccccgattcacctgggtcatctgccactgcaggagggagagcttccgttggtccagcaacaggtcgcaccctcagacaagccgcctaaacccgaactgccaggtgtggattttgcagatccccagggaccatcgttacctggaatggattttcccgacccgcaggggccaagtctgccaggcctggacttcgcagaccctcaaggcagcaccatcttccagatagcacggctgatcagccacggccccatgccccaaaataaacaatcccctctctatccaggcatgctctatgttccatttggggccaatcagcttaatgcccccgctcggttgggaatcatgtcgtctgaggaggtggccggtggaagagaagacccaatggcttacggggccatgtttccaggattcggcggtatgcggcccgggttcgaaggaatgccccacaaccccgcgatggggggagacttcaccctcgaattcgactcccccgtcgccgctaccaagggcccagagaacgaggagggcggggctcagggctcgccgatgcctgaggctaaccctgacaacctggagaacccagcttttctcactgaactcgagcccgccccccacgccggcctcctggctcttccaaaggacgatattcccgggctgccccgatctccttcagggaaaatgaaagggcttcccagcgtgacccccgccgccgcagaccctttaatgactcccgagctagcagatgtttatcgcacatatgatgctgacatgactacatctgtggattttcaagaagaggctactatggatactaccatggcccccaactccctccagacctccatgcccggaaacaaagctcaagagcctgagatgatgcacgacgcctggcactttcaggagcct

SEQ ID NO: 191667 - DNA, 1341 bp, Artificial Sequence
  derived and/or modified sequence
atgagcgcgtcgaaaattccgctgtttaagatgaaggacctcatcttgatcctgtgtctgctcgaaatgtcgttcgccgtcccgttcttcccgcagcagtcaggaacccctggaatggcctcactgtccctcgaaaccatgcgacagctgggaagcctgcaacgcctgaacactctgtcccagtactcccgctacggtttcggcaagtccttcaatagcttgtggatgcacggactgctcccgccccactcatcccttccgtggatgcggcccagagaacacgaaactcagcagtacgaatacagcctcccggtgcacccgcctccgctgccgtcgcagccttcactgaagccccaacaaccgggactgaagccgttcctccagtcggctgctgctactaccaatcaagccaccgccctcaaagaagctctgcaaccgccgatccatctcggacatctgccgctgcaagagggcgaattgccgctggtccagcagcaagtggctccatccgataagccaccaaaaccggagctgccaggagtggactttgcggacccgcaaggcccttcactgccaggaatggacttcccagacccgcagggaccatcgctgccgggattggatttcgccgatccacaaggaagcactatcttccagatcgcccggctgatatcccatgggcctatgccacagaataagcagtcaccgctgtaccccgggatgctgtacgtgccgttcggcgccaaccaactgaacgccccggcgcggctggggatcatgtcatcggaggaggtggcaggcggcagggaggacccgatggcctacggagccatgttcccaggattcgggggcatgcggccgggatttgagggtatgccgcacaacccggccatgggtggagattttactctcgaattcgactcaccagtggccgcgacgaaaggccctgagaatgaggagggcggcgcacagggcagccctatgccggaagcaaacccagacaacctcgagaacccagccttcctcacggaactggagcctgcacctcatgccggactgcttgccctgccaaaagatgatatccctggcctcccccggtccccatctggaaagatgaagggcctcccttccgttactcccgccgcagcggatcctctgatgacccctgagctcgctgatgtatacagaacctacgacgctgacatgaccacttccgtggattttcaggaggaggccaccatggacactaccatggccccgaactctctccagacctccatgcctggaaacaaggcccaagagccggaaatgatgcacgatgcctggcatttccaggagccg

SEQ ID NO: 191668 - DNA, 1341 bp, Artificial Sequence
  derived and/or modified sequence
atgagcgcctccaaaatccctcttttcaagatgaaagatctgattctcattctgtgtctgctggaaatgtcttttgccgtgcccttttttccgcaacagtcgggaacccctggcatggcaagcctctcccttgaaaccatgcgccaactcggttctctgcaacgtctgaacaccctctcacaatactccaggtacgggtttggaaagagctttaactcgctttggatgcatggccttcttcctcctcattcatcccttccttggatgaggccgagagagcacgaaacgcaacaatacgaatactcgcttcccgtgcatcctccgcctcttccctcgcaaccaagcctcaaaccccaacagccagggctgaagccgtttctgcaatcggcagcagcaactaccaaccaggcgacggctcttaaggaggcactgcaacctccgatccatctgggacatctccctctgcaggaaggcgaattgcccctggtgcaacaacaagtcgcaccgtcggacaaacctcctaagcccgaactccctggagtggattttgcggacccacagggaccatcacttcccggaatggatttccccgatccgcagggcccttcacttcctggtcttgattttgcagatcctcagggaagcactatctttcaaattgcaagacttattagccatgggcctatgccacagaataaacaatcacctctgtacccgggcatgctctacgtgccctttggcgctaatcagcttaacgccccagcaagactgggaatcatgtcgtcggaagaagtcgcaggtggccgcgaagatccaatggcgtacggagctatgtttcctggctttggcggaatgcgaccaggattcgagggtatgccgcacaatccggccatgggaggagatttcacccttgaatttgattcgccagtcgcagcaactaagggtcctgagaacgaagaaggaggggcacagggaagccccatgccagaggcaaacccagataatcttgaaaacccagcgttcctgaccgaactcgaacctgcaccacacgcagggctgcttgctctgccaaaggatgacattcccggtttgcccagatccccctctggcaagatgaaaggacttccttcagtgacccctgcagcagcggatccacttatgactccagagctcgcagatgtgtaccggacttacgacgcagatatgaccacctccgtggattttcaggaggaggccaccatggataccacgatggcacctaattcgcttcaaacgtcgatgccagggaacaaagcacaagagcctgaaatgatgcatgatgcatggcactttcaagagccg

SEQ ID NO: 191669 - DNA, 1341 bp, Artificial Sequence
  derived and/or modified sequence
atgtccgcatccaaaattccactgttcaagatgaaggatctgatactcattttatgcttgctagagatgtcctttgctgtgccctttttcccacagcagagcggcactcctggcatggcaagccttagcctggaaaccatgagacagctgggctctctgcagcggctgaacaccttgtcacaatacagcagatatggctttggtaagagcttcaactcactgtggatgcatggcctgctgccaccacacagcagtctgccctggatgaggccgcgcgagcatgagactcagcaatatgaatactccttgccagtgcacccgcctccgctgccgagccaaccaagccttaagcctcaacagccgggcctcaaaccttttttgcagtccgcagcggccactacgaaccaagcgactgcgctgaaggaggcccttcagccgcctatccacctcggtcacctgccgctccaggaaggcgaattgccccttgttcaacaacaggtggcaccaagcgacaaaccgcctaaaccagagctgccgggtgtggacttcgcggatccacagggcccaagcctcccaggtatggactttcctgatccgcaggggccttcgttgccggggctggattttgcagatccacagggttccaccatctttcaaatagccaggctgatttctcacggcccgatgccacagaataaacaaagcccactctaccccggtatgctttatgttccttttggtgcaaatcagctcaacgcaccagctcgtctggggattatgagtagcgaggaggtagcggggggtcgggaagacccaatggcatatggcgcgatgttcccgggatttggtgggatgagacctggtttcgaaggtatgcctcacaatcctgcaatgggtggcgattttaccctggaatttgactccccggtagctgcaaccaaaggtccagagaacgaggagggtggggcacagggcagcccgatgccagaggctaaccctgataacctagaaaatcctgcattcttgaccgagctagagccggcgccacatgcgggccttctggcactgccaaaggacgacatccctggactgccccgctcgccatcgggtaaaatgaagggcctgccttccgtaaccccggccgcggccgaccctctgatgaccccggagttggcagacgtttatcgaacctacgatgcggacatgaccaccagcgttgattttcaggaggaagctaccatggatacaactatggcaccaaacagcctgcagaccagcatgcctggcaacaaggcccaggaaccggagatgatgcacgacgcctggcactttcaggagcca

SEQ ID NO: 191670 - DNA, 1341 bp, Artificial Sequence
  derived and/or modified sequence
atgtccgcttccaagatcccgctgttcaagatgaaggatctgattctgattctgtgtctcttggagatgtccttcgcagtccccttcttccctcagcaaagcggcacccctggcatggcgagcctctcgctcgagactatgcgccagcttgggagcttgcaaagacttaatactctctcgcagtattcacgttacggatttggaaagtcgtttaacagcctgtggatgcacgggctgctgccaccgcattcatcattgccctggatgaggccaagagaacacgaaacgcaacagtacgaatactcactgccagtgcatcctccgccgctcccttcgcagccatcgctgaaaccgcagcaacctggtctgaaaccgttcctccagtcagctgcagcgactactaaccaggcaaccgcgctcaaagaggctttgcagcccccaatccatcttggacacctgccgttgcaggaaggagagctgcctctggtgcagcagcaggtggccccctcggacaagccgcctaagccagagttgcctggagtggatttcgcagacccacagggaccaagcctgcccggtatggattttcctgacccccagggcccgtcgttgccgggcctggacttcgctgacccgcagggttcaaccatcttccagatcgctaggttgatttcgcatggaccaatgcctcagaataaacagagcccactgtacccgggaatgctgtacgtgccatttggcgcaaatcaactgaatgccccggcacgcctgggcatcatgtcctcggaggaggtggccggaggaagagaggacccaatggcctacggggccatgttcccgggtttcggcggcatgcggccaggattcgagggtatgccccataaccctgcgatgggcggcgactttactctggagttcgattccccggtcgctgccaccaagggaccggaaaatgaagaaggaggcgctcaaggatcgccaatgccggaagccaacccagacaaccttgagaacccggcctttctgaccgagctggagccggcaccgcacgctgggttgctggcgctgccaaaagacgatatcccaggtctgccccgctctccctcagggaagatgaaaggacttccgtccgtcactccggccgccgccgaccctctcatgactcctgagctcgctgacgtgtaccgcacttacgacgccgacatgacgacctcagtggatttccaggaagaggcgaccatggacactactatggctcccaattcgcttcagacctcgatgccgggaaacaaagcccaggagccggagatgatgcacgacgcctggcacttccaagagcca

SEQ ID NO: 191671 - DNA, 1341 bp, Artificial Sequence
  derived and/or modified sequence
atgagcgctagtaagattcctctgttcaagatgaaagaccttatccttattctttgcctgctggagatgtcttttgctgtgccgttcttcccgcagcagtctggaacacctgggatggctagtctgtccctcgagaccatgcggcagctgggaagcttgcagagacttaataccctgtcccaatactctaggtacgggttcgggaagtctttcaattccttgtggatgcacggattgctgccccctcactcaagccttccttggatgaggcccagggagcacgagacgcagcagtacgagtactctctcccagtccacccaccacccctcccaagtcaaccctccctgaagcctcaacaaccaggactgaagccttttctgcaaagtgcagcggcgaccaccaatcaagctacagctctgaaggaggccctgcagccccctattcacttggggcacctgcctctgcaagagggcgagctgccactggtgcagcaacaagtcgctccctctgacaagccgcctaaaccagagttgccaggagtggacttcgctgacccccagggaccctcccttcccggtatggacttcccggacccccaggggcctagcctgccagggttggactttgcagatccacaaggttcaacgattttccaaatcgctaggttgatctctcatggacccatgccccaaaataagcagtcccctctctatccagggatgctgtacgtgccatttggagcaaaccaattgaacgcccccgcccggctgggaattatgtctagtgaggaagtggccgggggccgggaagatccaatggcctacggcgccatgtttcccggattcggtgggatgagaccagggttcgagggcatgcctcataacccagctatgggtggtgacttcaccctggagttcgactcccccgtggctgcaacgaagggtcctgagaacgaggaggggggcgctcagggatcaccaatgcctgaagcaaaccccgacaatctggagaatcctgcatttttgactgagcttgagcctgccccccatgcgggcttgctcgctctgcctaaagacgatataccaggtttgcctcgctcaccctctggcaagatgaaggggctgcccagtgtgacccccgcggctgcagacccactgatgaccccggaactggctgacgtttaccgcacatacgacgccgacatgacaacgtcagtagatttccaggaggaggcaacaatggacaccacaatggctcccaactcacttcagacaagtatgccagggaataaagcacaggaacccgagatgatgcacgacgcgtggcacttccaggaaccc

SEQ ID NO: 191672 - DNA, 1341 bp, Artificial Sequence
  derived and/or modified sequence
atgtcagccagcaagatcccgctgttcaagatgaaggatctcatccttatcctgtgcctgctggagatgtcgttcgcagtgccgttcttccctcaacagtcgggaactccgggaatggcttcactgtcccttgaaacgatgcggcaactcggttccttgcaacggctgaataccttgtcgcagtacagccggtacggattcggaaaatccttcaattcactgtggatgcatggactcctgccgccgcactcttcactgccctggatgcgcccgagagaacacgaaacccaacagtacgagtattcgctgccggtccatccaccgccgctgccatcccaaccgtcccttaagccgcagcaaccggggctgaagccgtttctgcagtctgcggccgcgactaccaaccaggcgacggcactgaaggaggctctccagcccccaattcacctgggccatttgccgctgcaggagggagagcttcctcttgttcagcagcaggtggcgccgtcggacaaaccaccgaaacccgagctccctggcgtcgatttcgctgatccacaaggccctagcctgccaggcatggacttccctgatcctcaagggccgtctctgccgggattggactttgcggacccccaaggcagcaccattttccagattgcaaggctgatctcgcatggcccgatgcctcagaacaagcaatccccactgtacccagggatgctgtacgtccctttcggggcgaaccaattgaatgcccccgcccggctcggaattatgtcctcagaagaggtggccggaggaagagaggacccgatggcgtacggagccatgtttcctggcttcggaggaatgcggcctggatttgaaggcatgcctcacaaccctgcgatgggaggtgatttcactctggaattcgattccccggtcgccgctaccaaaggtccggaaaacgaggaaggaggagcccagggttcaccgatgccggaggctaaccccgataacttggagaacccggcttttctgaccgagcttgaaccagcccctcacgccggactcctggcccttcctaaggacgacatcccgggactcccgagatcgccctcgggaaagatgaagggattgccatccgtgaccccagccgcggcggatcctctgatgaccccggagctcgctgacgtgtaccgcacctacgacgcggacatgactacttccgtggacttccaagaagaagcaacgatggataccactatggcccccaactcccttcagacttcgatgccaggtaataaggcgcaggaacccgaaatgatgcacgacgcgtggcactttcaagaacct

SEQ ID NO: 191673 - DNA, 1341 bp, Artificial Sequence
  derived and/or modified sequence
atgtcagcatcgaagatccccctgttcaaaatgaaggacctgattctcatcttatgcctcctggaaatgtcttttgcggtcccattcttccctcaacaatctggtacaccggggatggcttcactgtcccttgaaacaatgcggcaactagggtctttgcagcgcttgaacactctaagccagtacagccgttatggctttggcaaatcttttaattccttgtggatgcatggattactgccccctcattcgtcattaccatggatgaggccaagagagcatgaaacacagcaatatgaatattcccttccggtccatccgccgccgttgccgtcccaaccaagccttaagcctcaacagccagggctcaaaccgtttctgcagagcgcggccgcaactacgaatcaggccaccgcacttaaagaagcacttcaacctcctattcatctaggtcatttacctttacaggaaggtgaacttccgttggtccagcaacaggtggcgccgagcgataagccgccgaaaccagagttgccgggcgtcgatttcgcagatccgcaagggccaagtctgccgggcatggattttccggatccgcaaggcccatctttgccgggtctggactttgctgaccctcagggaagcacaatttttcaaattgcgcgtctgatttcacatggaccgatgccgcagaacaaacaatcaccgctgtatcctggcatgctatatgtcccgtttggcgcaaatcagttgaacgccccggccagactgggcatcatgagctcagaagaagttgccgggggccgggaagacccgatggcatatggcgctatgtttccgggtttcggggggatgaggcccggttttgaaggcatgccgcataatccagcgatgggcggagatttcacgttggaatttgattctcctgttgcggctacaaaaggaccggagaatgaggagggcggtgcacaaggtagccctatgccggaagcaaacccggataaccttgaaaatccggcttttcttacggaacttgaacccgcaccgcatgcaggcttgcttgctttgccaaaagatgatatcccagggttacctcggtccccgtcaggaaaaatgaaggggcttccgagcgtaactcctgcggcggcggatcctcttatgaccccagagcttgcggatgtctaccgaacatatgacgctgatatgacaacgtcagttgattttcaggaggaagcaacaatggataccaccatggcgccgaattcacttcagacatctatgccaggaaataaggcacaagagccggaaatgatgcacgatgcttggcactttcaggaacct

SEQ ID NO: 191674 - DNA, 1341 bp, Artificial Sequence
  derived and/or modified sequence
atgagcgcatccaagatccccttgttcaagatgaaagacctgatcttgattctatgcctcctggagatgagttttgccgttccattctttccccagcagagtggcactccaggaatggctagcctgagtctggaaacaatgagacagttgggatcgcttcaaagactgaatacactgagtcaatacagtcgatacggctttgggaaatctttcaattcactgtggatgcatgggctcctgcctccacatagctctctgccatggatgaggccgcgagagcatgaaacacagcagtatgaatattctcttcccgtccatcctccccctttaccgagtcagccatcccttaagcctcagcagcctggcctgaagcctttcctgcagtcagccgccgcaacaacgaatcaagcgaccgccctgaaggaagccctgcagcctcctatacacttgggacacttgccactgcaggagggagagctacccctggtacagcagcaggtggcaccaagcgacaagccacccaagcctgagttgccgggcgtagatttcgccgacccgcaaggaccttctttgccaggtatggatttccccgatccgcaggggccatcgctgcccggtcttgatttcgctgatcctcaggggtctaccatcttccagattgctcgtcttatttcccacggcccgatgccccagaacaagcaatctcccctgtatcctgggatgctttacgtgcccttcggcgccaatcagcttaatgcgcctgcccggttagggatcatgtcttctgaagaagtcgccggggggagggaagatccaatggcctacggcgcaatgttccccggattcggagggatgcggcctggtttcgaaggtatgcctcacaatccagcaatggggggggacttcaccctggagttcgactcaccagtggcagctacaaagggccctgagaatgaagagggtggagcccaagggagccctatgcccgaggccaatcctgataatttggaaaaccctgcattcctgacggaactagaaccagccccacacgccgggctccttgccttgcctaaggacgatataccaggcttgcctcgaagcccaagcggaaagatgaaaggactgccttcggtcacaccagccgcagcggacccgcttatgacccccgagttggcagatgtgtataggacgtacgacgccgatatgacgacctccgtcgatttccaggaagaggccaccatggacacgacaatggctcctaattccctgcagacctccatgcccggaaacaaagcgcaagagccagagatgatgcacgacgcatggcactttcaggaaccc

SEQ ID NO: 191675 - DNA, 1341 bp, Artificial Sequence
  derived and/or modified sequence
atgtcagcatccaagataccgttattcaaaatgaaagatttaattcttattctctgtcttctggaaatgagctttgccgtgccgttttttccacagcaaagtggcactcctggtatggcatcgctttcgcttgagacaatgcgtcaattaggatccctccagcgccttaacactttgagtcaatactcgcgttacggatttggaaaaagctttaactctttatggatgcatggtttgcttcctccacattcttccctcccatggatgcgcccaagagagcacgaaacacagcagtatgagtatagcttgccagtgcatccacccccattgccgtcgcagccctcactgaagccacaacaaccaggattaaaaccttttctgcagtcggcagcagcgacgactaatcaagcgacggcgctgaaagaggcccttcagcccccaattcacctaggacacttgccgctccaagaaggagagctaccacttgttcaacaacaagttgccccatctgataaaccaccaaagccagagctcccaggcgttgatttcgctgacccacagggtccatcgctaccaggcatggatttcccagacccgcagggaccttctctacctggccttgatttcgcagatcctcaagggtctacaatatttcagattgccagactgatatcccatggaccaatgccacagaacaagcaaagtccattatacccgggaatgttgtatgtaccgtttggggcaaatcaattgaacgctcctgcccgtctcggaattatgagctcagaagaagttgcgggaggtcgtgaggatccaatggcatacggagcaatgtttccgggattcggaggaatgcgacctggctttgaaggtatgccacataatccagcaatgggaggcgattttactcttgaattcgattcaccagtagcagcaactaaaggaccagagaacgaagagggcggtgcacaaggatccccgatgccggaagcaaacccagacaacctagaaaacccagctttcctgacagagctggagccggcgcctcatgccggacttctggccttgccaaaagacgatataccgggactgccccgttccccgtcgggaaagatgaaaggactaccttcagttactcctgctgcagctgatccattgatgacccccgagcttgcagatgtttatagaacttatgatgcagacatgaccacgtctgttgatttccaggaagaagctaccatggatactacaatggctccaaacagtcttcaaacttcaatgccaggcaacaaggcacaagaaccggaaatgatgcacgatgcatggcatttccaagagcca

SEQ ID NO: 191676 - DNA, 1341 bp, Artificial Sequence
  derived and/or modified sequence
atgtcagcttccaagatacctctttttaaaatgaaagacctgatccttattctatgcttgctcgaaatgtcctttgcggtccccttttttccccaacagtccgggacgccaggaatggcctccctctccctggagacaatgaggcagctcgggtctcttcagcggctgaacactctgtcccagtattccagatatggcttcggaaaaagctttaatagcctttggatgcatggactcttgcccccgcactcaagtctcccctggatgcgaccgagagagcacgagacacagcaatacgaatactccctgcccgtgcacccacctccactaccatcccagcctagtctcaagcctcagcagccggggctgaagccatttctgcagagtgccgctgcgactactaatcaagctaccgccctcaaggaagcactgcagccgccaatccacctcgggcatctgccactgcaggagggagagttacctttggtgcagcaacaggtcgcacccagtgacaagccccccaaacctgaactgcccggggtggacttcgccgacccccaggggcccagcctgccagggatggatttccctgatccccagggtccgtcactcccaggcctcgatttcgccgatccacagggttctacaatcttccagatcgctcggctgatctctcatgggcctatgccacagaacaaacagtctcccctgtacccgggtatgctttatgtgcctttcggcgccaatcagcttaacgctcccgccagactcggtattatgagcagcgaggaggtcgctgggggccgagaagatcccatggcctacggcgccatgtttccgggatttggagggatgaggcctggctttgagggcatgccccacaaccccgccatgggcggggatttcacactcgaatttgattcaccggtcgctgccaccaaggggccagagaacgaggaggggggagcccagggttccccaatgccggaagccaacccagacaacttagagaatcctgcctttctaacggaactagagcccgccccgcacgcgggactgctcgccctgcctaaagacgacattccaggcctgcctcggagcccatctgggaagatgaagggcctgccatcggtgacaccagccgcagccgatcccctgatgactccagaacttgccgacgtgtaccgcacatacgacgcagatatgacaaccagcgtggacttccaagaagaagccacaatggatacaaccatggcccccaactccttgcagaccagtatgcccggaaataaagcgcaggagcctgaaatgatgcacgatgcctggcacttccaggaacct

SEQ ID NO: 191677 - DNA, 1341 bp, Artificial Sequence
  derived and/or modified sequence
atgagtgcctctaaaatacctctcttcaaaatgaaagacctgatcctcatcctctgtctactcgaaatgtcttttgccgttccttttttcccccagcagtcggggactccagggatggctagtcttagtctcgaaacaatgcgccagctagggtctcttcagaggttgaacactctatcccagtattctcggtatgggttcggaaaaagttttaacagtctgtggatgcatgggttgttaccgccacattcttcactcccctggatgaggcctagggaacatgaaacacagcagtatgaatatagtctgccagtccacccccccccactcccctctcagccttctctaaagccccagcagcctgggttgaaacccttcctccagtccgccgctgccactacaaatcaggccactgccctaaaagaagctctccagccccccattcacttagggcatctgcccttgcaggaaggagaactgcccctggtgcagcagcaggtggctccttctgataagccacctaaacctgaactccctggagttgatttcgcggatccccagggaccatcactcccagggatggatttccccgatccacaggggccctctcttcccggacttgacttcgcagatccccaggggtcaacaatttttcagatagcaagactcatatcacatgggccaatgccacagaataagcagtcgccactttatcccgggatgctttacgtaccattcggagccaaccaactgaacgctcctgctcggctggggattatgtcctccgaagaagttgctgggggacgggaagatccaatggcatatggagctatgttcccaggatttggagggatgagaccagggttcgaaggaatgccccataatccagcaatggggggggatttcactctggaatttgattctcccgtggcagccactaaagggccagaaaacgaagaagggggggctcaaggatccccaatgcctgaagctaaccccgataacctggagaatcctgcatttctgactgaactggagcctgctcctcatgcaggactcctagctcttcccaaagacgatatcccaggactccccaggtctcccagtggaaaaatgaaggggcttccgtccgtgacaccagcggcagctgacccattgatgacacctgagcttgcagacgtctataggacttacgatgccgatatgactacttctgtagatttccaggaagaggctactatggatacgactatggcccccaattctcttcagacatccatgcccggaaacaaagcccaggaaccagaaatgatgcacgacgcgtggcattttcaggaaccc

SEQ ID NO: 191678 - DNA, 1341 bp, Artificial Sequence
  derived and/or modified sequence
atgtcggctagcaagatcccattattcaagatgaaggacctgattctcatcctctgcctgttggagatgtccttcgctgtcccattttttccacagcaaagcgggacaccaggaatggcatcactctccctggaaaccatgaggcagctggggtctctgcagcgacttaacactctaagtcagtactccaggtatggctttggaaagagcttcaacagcctgtggatgcatgggctacttccccctcatagctccctcccttggatgagaccaagagagcacgagacacagcaatacgagtactctctaccagtgcatccacccccactcccatctcagccaagccttaagccgcaacagccgggtctgaaacccttcctgcagagcgctgccgccaccacgaaccaggcaaccgcgctcaaggaggccttacagcccccaattcacctggggcacctgcctctccaggaaggcgagttaccccttgttcagcagcaagtggctccttctgacaagccgccaaagcctgagctgcctggcgtcgactttgcagacccgcagggtccctccttgccaggcatggacttccctgatcctcagggtcctagcctgccgggtctggactttgccgacccccagggaagcacaatcttccagattgccaggctgatcagccacggacccatgcctcagaacaaacagtcacccttatacccaggcatgttgtacgtgccatttggtgccaatcagctgaatgctccggcccgcctggggataatgagttccgaggaagtggcggggggacgggaggaccccatggcgtacggagccatgtttccaggattcggaggcatgcgccctgggttcgagggtatgccccacaatccagccatggggggcgactttaccctggaattcgatagccctgtggccgcgaccaagggcccggagaacgaggaggggggcgcacagggctcgccaatgcctgaggccaatccggacaacctggagaatccagctttcctgaccgagcttgaaccagccccgcacgccggactgttagcgctgcctaaggacgacattcccggcttacctcgatcaccctcaggaaagatgaaaggtctgccctctgttacgcccgcagcggcagatccactcatgacacccgaactggcggacgtttaccgcacctacgacgctgacatgactacctctgtggatttccaggaagaggccactatggacacgaccatggcccctaattccctgcaaacctctatgccaggtaacaaggcccaggaaccagagatgatgcacgacgcttggcattttcaggaacca

SEQ ID NO: 191679 - DNA, 1341 bp, Artificial Sequence
  derived and/or modified sequence
atgtctgcctccaaaattcctctgtttaagatgaaagacctcatcctgattctgtgcctcctcgagatgagctttgcggttccattcttccctcagcagagtgggactccgggcatggcctcgctgtcgctcgaaacgatgcggcagctgggatctctgcagaggcttaacaccttaagccagtactcccggtatggcttcgggaaaagttttaattccctgtggatgcacggtcttctaccaccacacagcagcctcccctggatgagaccgagggagcatgagacccaacaatatgagtattccctccctgtgcatccaccccctctaccctcacagccctcactgaagccccagcagcccggattgaagcccttcctgcagagcgctgctgctacgaccaaccaagcaactgcactgaaagaagccctgcagcccccaattcatctcggtcacttgcccctgcaggaaggtgagctccctcttgttcagcagcaagtggctccatcagacaaaccaccaaagcccgaacttcctggcgtggattttgccgatccccagggtccttcgttacccggcatggacttcccagatccacagggccctagcttgccgggtctcgattttgctgatcctcaggggtctaccatttttcagattgccaggctgatatcccacggaccaatgcctcaaaacaaacaatctccattataccctggaatgctgtatgtgcccttcggagcgaaccaactgaatgcccccgcgcgcctgggcatcatgtcatctgaggaagtggccggcggcagggaggacccgatggcctacggcgcgatgttcccaggttttggcggaatgcgtcctgggttcgaaggcatgccacacaatccagctatggggggcgactttactctcgagttcgacagcccagtcgcagctactaagggccccgagaacgaagaagggggtgcacaggggagccctatgcccgaggctaatccagacaatcttgagaacccggcctttctgacggagttggaaccagcccctcacgccggcctactcgcgctgccaaaggatgacatacccgggctgccgaggtctccaagcggcaaaatgaaaggactgccatctgtcaccccggccgcagcggaccccctgatgactcccgaattggcagacgtgtacagaacatatgacgctgatatgaccacatcggttgacttccaggaggaagccacaatggacaccacaatggccccgaacagtctccagacgtccatgccgggtaacaaggcacaggagcccgagatgatgcatgacgcctggcactttcaggagcct

SEQ ID NO: 191680 - DNA, 1341 bp, Artificial Sequence
  derived and/or modified sequence
atgtcggcttcgaaaattccgttgttcaagatgaaggatctgatcctgattctgtgtctgcttgaaatgtcgtttgctgtcccatttttcccacagcagagcggaacgcctggaatggcctcattgtcactcgaaactatgagacaacttggatcacttcagcggctcaacaccttgagccagtattctcgctacggttttggaaagtcattcaactccctctggatgcacggcctccttcctccacactcctcccttccgtggatgcgcccccgcgagcatgaaacgcaacagtacgaatactctctgccagtgcatccgcccccgctgccaagccaaccctcgctgaagccccagcagcccggactcaaaccattccttcagtccgccgccgccactaccaaccaggcgaccgctttgaaggaagcgctgcagccgcccatccatctgggacacctgcccttgcaagagggagaactgccgctcgtccagcagcaagttgcaccgtccgacaagccaccgaaaccagagctgccgggcgtggactttgctgatcctcaagggccttctctcccgggcatggatttccctgacccacagggcccgtcgctgccgggtcttgacttcgcggatcctcagggatcaaccatattccagatcgcacgcctgatctctcacggacctatgccacagaacaagcagtccccactgtacccgggtatgctctacgtgccgttcggggcgaaccaattgaatgcacctgcacggcttggaatcatgtcctcggaggaggtggcgggaggacgggaggatccgatggcgtacggggccatgtttccgggcttcggagggatgcgcccgggctttgaagggatgccacacaatcccgctatgggaggcgacttcaccctcgaattcgacagtcctgttgctgccactaagggaccggagaacgaggaaggtggagcgcaagggtcaccgatgccagaggcgaatccggacaatctggaaaaccctgcgttcttgaccgagctggaacctgcacctcacgctggcctgctggcgttgccgaaggacgacattccggggctcccgcgctccccttcaggcaaaatgaagggcttgcccagcgtgactccggccgccgccgacccgctgatgacgcctgaactcgccgacgtgtaccgaacttacgacgccgacatgactacttcagtcgacttccaagaggaagccaccatggataccaccatggctccgaactccctgcaaacttcgatgcctggtaataaggctcaggaacctgaaatgatgcacgatgcatggcatttccaggaacct

SEQ ID NO: 191681 - DNA, 1341 bp, Artificial Sequence
  derived and/or modified sequence
atgtctgctagtaaaatcccactgtttaagatgaaggatctgattctgatactttgtcttttagagatgagtttcgctgttccctttttcccacagcaatcaggaactcccggcatggcttccctgtccctggaaactatgagacagctcggtagcctacagcggttgaatacacttagtcaatacagccggtatggatttggtaagagcttcaactcactctggatgcacggactgctccccccccattcctccttgccctggatgcggccccgcgaacatgagacacagcagtacgagtactcactgccagtgcatcccccccctctgcccagccagcctagtctgaagccccagcagcccgggcttaagccctttctgcagtccgccgctgcaacgacaaaccaggcaaccgctcttaaggaggccctgcagccgccaatacatctgggccatttgcctctccaggaaggggaattgcctcttgtgcagcaacaagtcgccccatccgataagccaccgaagccagaactcccaggcgttgattttgctgatccgcaaggaccatcattacccggcatggattttccagacccccaggggccttccctgccaggtctcgatttcgctgatccgcaaggcagcacaatattccagatcgccagactgatttcacacggccctatgccacagaacaaacaaagccctctctaccctggcatgctttacgtcccattcggggccaatcagcttaatgcccccgccagactcggaattatgtcttcggaggaggtggccggaggacgcgaagatccaatggcctacggcgccatgttccccggctttggcggcatgagacctgggttcgaggggatgccacataaccctgccatgggcggcgactttaccctagaatttgatagtccggtggctgcaaccaaagggccagaaaatgaagagggtggtgcgcagggttcacccatgcccgaagctaatccagacaacctcgaaaatcctgcctttctcacggagctcgagcctgctcctcatgctggtttactggcactcccaaaagacgatatcccgggtcttcctcgcagcccatcgggtaaaatgaaaggtttgccatctgtaactccagctgctgctgatcctctgatgacaccagaactagccgatgtttatcggacttatgacgcggatatgaccacgtctgttgactttcaagaggaggctacaatggatacaacaatggctccaaacagtctacagacctcaatgccggggaacaaggcccaagagccagagatgatgcatgacgcctggcactttcaggaaccc

SEQ ID NO: 191682 - DNA, 1341 bp, Artificial Sequence
  derived and/or modified sequence
atgagcgcgtccaagatccccctcttcaagatgaaagacttgatcctgatcctgtgcttgctggaaatgtccttcgccgtgcctttcttcccacagcaatcaggcaccccgggaatggcctcgctgagcctggaaaccatgcggcaactgggatccctgcagcgcctgaataccctctcgcaatacagcaggtacggattcggcaagtcgtttaactccctgtggatgcacggattgctgccgccacattcctcgctcccatggatgcgaccgagggaacacgaaacccagcagtatgagtatagcctgcccgtgcacccaccaccgttgccatcgcagccgtcactgaaaccgcaacagccggggctgaagccatttctccagtctgccgccgcgaccaccaaccaagcgacggcactgaaggaagcccttcagccgccgatccacctgggccatctcccgctgcaagaaggtgagctcccgctggtccaacagcaggtcgccccgtccgacaagccccctaagccggaacttccgggggtcgatttcgctgacccgcagggaccgagcctcccaggcatggatttcccggatccacagggcccatcgctgccaggattggattttgcagaccctcagggatcgacgattttccagatagctaggctcatttcccatgggccgatgccacaaaacaaacagtccccgctttacccgggaatgctgtacgttccgttcggagcgaaccagctgaatgctcctgccagactcggaatcatgtcgtccgaagaggtggcgggaggaagagaggacccgatggcttacggagcgatgttcccgggattcggaggcatgcggcccggattcgaaggaatgccacacaacccagccatggggggcgatttcaccctggagttcgattccccggtggcagctactaaggggcctgaaaatgaggagggaggggcccagggtagccctatgccagaggccaaccctgacaacctcgaaaacccagctttcctgaccgaactggagccggcaccacacgcggggctgctcgctctccccaaggacgatatccctggactgcccaggagcccttcgggcaaaatgaagggactgccgagcgtgactcctgcagccgctgacccactgatgaccccggaattggcagatgtctatagaacttacgatgccgacatgactacctccgtggacttccaggaagaagcaactatggataccaccatggccccaaattcgctgcagacttcgatgccaggcaataaggcacaggaaccggagatgatgcacgacgcgtggcattttcaggagcca

SEQ ID NO: 191683 - DNA, 1341 bp, Artificial Sequence
  derived and/or modified sequence
atgtccgcaagcaaaattcccctctttaagatgaaagacctgattcttattctctgtttgctggaaatgtcctttgcagtgcccttctttccacagcagtctggaaccccaggaatggccagcctttctctggaaactatgcgacaacttggatccctccaaagactgaataccctcagccagtattcgcggtacggattcggtaagagcttcaattccctctggatgcacggcctgcttccccctcattcctcactcccttggatgaggccacgtgaacacgaaactcagcaatacgagtactcgcttcctgtgcatccgccgccccttccatcacaaccatcgctcaagcctcagcaaccagggcttaaaccctttctccaatcggccgctgcaaccaccaaccaagcaaccgcgctcaaggaagcccttcagcctccgatccatctgggccaccttcctcttcaagaaggcgagctgcctctcgtgcagcaacaggtggctccatccgacaaacccccgaaaccggaactccctggtgttgattttgcggatcctcaaggtccatcacttcccggcatggatttcccggaccctcaaggcccatctctgcctggccttgatttcgccgaccctcaaggatcgacgatctttcagatagcccgtctcatttcgcatggtccgatgccgcagaacaaacagtcccctctgtacccaggaatgctttacgtccccttcggagcaaaccaactgaatgcacctgcccgcctcgggatcatgagctcagaagaagtggcggggggccgcgaggatcctatggcttacggagcgatgttccctggatttgggggaatgaggccggggtttgaaggtatgcctcataaccctgcgatgggaggtgatttcactctggaattcgactctcctgtggccgcaaccaagggtccagaaaatgaggaggggggtgcacaaggatctccaatgcccgaggccaacccggacaaccttgagaatcctgctttcctcacggaattggaacccgcccctcacgcagggctcctggctctgcccaaggacgatattcctggacttccaagaagcccctcgggcaagatgaagggtttgccttcagtgaccccagcagctgcagatccgttgatgacccccgagttggcagatgtctaccggacctacgatgcagacatgactacctccgtggactttcaagaagaagcaactatggatactacgatggcaccaaactcactgcaaacctccatgccaggaaataaggcacaggaacccgagatgatgcacgatgcatggcattttcaagagcct

SEQ ID NO: 191684 - DNA, 1341 bp, Artificial Sequence
  derived and/or modified sequence
atgagcgcttccaagatcccgctcttcaagatgaaggatctgattcttatcctgtgcttgctcgaaatgtcgttcgccgtgccatttttcccacagcagtcaggtaccccgggaatggcaagcctgtcgcttgaaaccatgcgccagcttggatcgcttcagcggcttaacaccctctctcaatacagccgctacggctttggcaagtcattcaactctctgtggatgcacggactcctgcctccacatagctccctgccttggatgcggcctcgggaacatgagactcagcaatacgagtactcgctcccagtgcaccctcctccccttccaagccaaccatcactgaagccacagcagccagggctgaagccttttttgcaatccgcggcggccaccaccaatcaagcaaccgcccttaaagaagcgcttcaacctcctattcatctcggacatcttccactgcaagaaggcgaattgcctctggtccagcaacaagttgcaccatcagataagcctcccaagccagagcttccgggggtggatttcgcagacccgcaaggtccgtcgctgccagggatggactttcctgacccccaaggccccagcctgccagggttggattttgcagacccacaaggctcaactatcttccaaattgcacgcctgatctctcacggaccaatgcctcaaaacaaacaatccccactttaccctggaatgctctacgtgccattcggcgcaaatcagctgaatgcacctgcacgcctgggtattatgtcctcggaggaggtggcaggcgggcgtgaggaccctatggcatacggtgctatgttccccggattcggagggatgaggcccggtttcgaaggtatgccccataacccggcaatgggtggagacttcaccctggaatttgactcccccgtggccgcgactaagggtccagaaaacgaagaaggaggagcccaggggtcgccaatgcctgaggcgaaccctgataatcttgagaatccggcatttcttactgagctggaacctgcgccacatgcagggctccttgcacttccgaaagatgacattcctggattgccaagaagcccctcgggaaagatgaaaggtctgccctcggtgaccccggcagcagcagatccactgatgactcctgagctcgcagatgtgtacagaacttatgatgcagatatgactacttccgtcgatttccaagaagaagcaactatggacactactatggctcctaacagcttgcagacgtcgatgccaggtaataaggcccaggagccagaaatgatgcatgacgcatggcactttcaagaaccc

SEQ ID NO: 191685 - DNA, 1341 bp, Artificial Sequence
  derived and/or modified sequence
atgtcggccagcaagattcccctgttcaagatgaaagacctgattctgattctttgtctgctggagatgtcgtttgcagttccttttttccctcaacaatcagggaccccaggaatggcaagcctgtcacttgaaaccatgcgtcaactcggttccctgcagaggctgaacaccctctcgcagtactcccgatacgggtttggtaagtcctttaacagcctgtggatgcacggacttctgcctccccactcatcattgccatggatgcggccgagagagcatgaaacccaacagtatgagtactccctgcccgtgcatccccctcctctgccttcacagccgagccttaaaccccagcagccaggccttaagccttttctccaaagcgcggcagccactaccaaccaagccacggcgctgaaggaggcactgcagccaccgattcacttgggccaccttccgctgcaagagggggagctgccactcgtgcaacaacaagtcgcgccctccgacaaacctccaaaacccgaactccccggtgtcgattttgccgatccccaagggccgtcgttgccaggcatggattttccagatccccaaggtccatcgcttccgggcctggattttgccgaccctcaagggtccacgatatttcagatcgcgagacttatttcacatggacctatgccacagaacaagcagtcgcctctttacccaggtatgctgtatgtgccatttggtgccaatcaacttaatgcacctgcacggcttggtattatgtcatcggaagaggtggccggaggaagagaggatccgatggcatacggagcgatgtttccaggatttggtggaatgcgccccggtttcgaaggaatgcctcataacccagccatgggaggtgactttactttggaatttgactcccctgtggcagcaaccaaggggcctgagaatgaagagggtggcgcacaaggcagccctatgccagaagcaaatccagataacctggaaaacccggcttttctcactgaacttgagcccgcgcctcatgcaggtctgctggccctgcctaaagatgatatcccaggccttccacgcagcccttcgggcaagatgaaagggctcccatccgtcactccagcggccgcggatccactcatgacccctgaattggcagacgtgtacagaacttatgatgcagatatgacgacctctgtcgatttccaggaagaagctacgatggacaccaccatggcacctaactctcttcagacttccatgccaggtaacaaggcccaagagcctgagatgatgcatgatgcgtggcacttccaagaacct

SEQ ID NO: 191686 - DNA, 1341 bp, Artificial Sequence
  derived and/or modified sequence
atgagcgcatccaaaatcccactctttaagatgaaggatctgatcctgatcctttgcctccttgagatgtcgtttgccgtcccgttttttccccagcagtcaggaacgccgggaatggcatccctgagcttggaaaccatgagacaactgggaagccttcagcgacttaataccctttcgcaatactcacgctacggttttggtaagtccttcaactcgctgtggatgcatgggcttcttccccctcactcgagcctgccttggatgcgtccacgtgaacacgaaacccaacaatacgaatactccctgcctgttcatcctccaccactccccagccaacccagcctgaagccccagcaaccaggactgaagcccttccttcagtccgcagcagcaactaccaatcaagcaactgcacttaaggaagcgctccagccgcccatccacctgggtcatcttccactgcaagaaggagaactccctctggtgcagcaacaggtggcccctagcgacaagcctcccaagcctgaacttcctggagtggatttcgccgacccacaaggaccctcccttccgggaatggattttcctgacccccaaggaccgagccttccgggactggattttgcggatcctcaaggttctactatctttcagatagcacgcctgatttcacacggacctatgcctcaaaacaaacaatcccccctctaccctggtatgctttacgtgcccttcggagccaaccagctcaacgcaccagcaaggctgggaattatgtccagcgaagaggtggcgggaggaagagaagatcctatggcttacggggcaatgtttcctggctttggaggtatgcggccaggctttgagggcatgcctcataacccagcaatgggtggcgattttacgctggagttcgactcccccgtggctgcaactaagggaccagaaaatgaagagggaggcgcccagggatcaccgatgcctgaggcgaatccggacaaccttgagaatcctgcttttctgacggagctcgaaccggccccacatgccggactgcttgcactgccgaaggatgatattcctggactcccacgctcaccatcaggtaagatgaaaggccttccctcggtgactccagcggcagcagacccactcatgacccccgaactggctgatgtgtacagaacgtacgacgcagatatgaccacgtcggtggattttcaggaagaggcaactatggatactaccatggctcctaattccctccagacgtcgatgcctggtaataaggcccaggagcctgagatgatgcatgatgcatggcactttcaggaaccg

SEQ ID NO: 191687 - DNA, 1341 bp, Artificial Sequence
  derived and/or modified sequence
atgagtgcctcaaaaattccgttgttcaaaatgaaggatctgattcttatattatgcctgctggagatgtccttcgctgtacctttcttcccgcagcagagtggcactccaggaatggcatccctctccctcgagactatgcgtcagctggggagtcttcaacgacttaatacactgagtcagtatagtaggtacggctttggaaagtctttcaactccctctggatgcacggtcttctgccaccgcacagttccttgccgtggatgcggcctagggagcatgaaactcagcagtacgaatattccctgccggttcatcctcctcctctcccaagccagccctcactgaaaccgcagcagccaggcctgaaaccctttctgcagtccgcggctgccacgaccaatcaggctacagccttgaaagaggccttacagccgcccatacacctgggacaccttcctctccaggagggggagctgccactggtgcagcagcaggtggcgccttcagacaaaccgccgaagccagagttgcctggtgtcgacttcgccgaccctcaggggccctctctgccgggcatggatttccccgatccgcaaggccctagcctgccgggcttggattttgccgatccccagggctccacaatattccagatcgctcggttgattagccacgggcccatgccgcaaaacaagcaaagcccactttacccgggcatgctgtacgttccattcggagccaatcaactgaatgccccagcgcgcttaggaatcatgtcgagcgaagaggtggccggaggtcgtgaggacccaatggcttacggcgctatgtttcccgggtttgggggaatgagacccgggttcgaagggatgcctcacaatcctgcaatgggtggcgactttaccctagagtttgatagcccagtggccgccaccaaggggcccgagaacgaagagggaggagctcagggctcccccatgccagaagctaatcctgacaacttggaaaaccccgcgttccttacagaactggagcctgcaccgcacgctgggttactcgctcttcccaaagacgatatcccaggcctcccccgatctccgtccggtaagatgaaagggctgcctagcgtaacacccgcagccgccgaccccctcatgacaccagaactggccgatgtgtaccgaacttatgacgcggatatgactacatctgttgactttcaggaggaggccactatggatacgaccatggcccctaacagtctacagacctctatgcctggaaacaaagctcaggagcccgagatgatgcacgacgcctggcactttcaggaacca

SEQ ID NO: 191688 - DNA, 1341 bp, Artificial Sequence
  derived and/or modified sequence
atgtccgcatcgaagattccattatttaaaatgaaagatttgattttaattctttgcctcttagagatgtccttcgctgttccattctttccccagcaaagtgggacacctgggatggcgagcctctcactggaaacgatgcggcaactgggttctctgcagcggctgaacacactgtctcagtatagtcgctatgggtttggaaaatccttcaattctctatggatgcacggtttgttgccaccccacagttcactcccttggatgcgaccacgtgagcatgaaactcagcagtacgagtactcactcccagtacaccctccaccacttcccagccaaccaagtctgaagccccaacagcctgggttgaaacccttccttcaaagtgctgctgccacaacaaaccaggccactgcactcaaggaagcccttcaaccacctatccacctgggtcatctgccgttacaggaaggcgagcttcctctggttcagcagcaggttgccccttcagataaaccgcctaagcccgagctcccaggggtcgactttgccgatcctcagggcccaagcttgccaggcatggacttcccagacccccagggaccatccctacctgggctcgattttgccgacccccaagggagcacgatattccagatcgcacggttaataagtcatgggcccatgccgcaaaataagcagtcccccttgtatccaggcatgctgtacgtgccattcggcgcaaatcagctgaacgcccccgctcgtcttggcataatgtcaagcgaagaggtggcaggggggagggaggaccccatggcctatggtgcaatgttccccgggttcgggggaatgcgtccagggtttgagggcatgccacataacccggccatgggaggtgatttcacattggagttcgactcgccggtggccgcgactaaaggccccgaaaacgaagagggaggggcccagggctccccaatgcccgaggcgaatccggataacttggaaaatcccgcctttctgacagaactagagcctgcaccgcatgcggggctgttggccctgcccaaggatgacatcccaggattgcccagatccccctctggaaagatgaaaggtctgccgtctgtaaccccagcagcagcagaccccctgatgaccccagagctggctgacgtgtaccggacttacgatgctgacatgaccacatcagtagacttccaagaggaggctacgatggacactactatggcccccaactctcttcaaacatccatgccaggcaacaaagcacaggagcctgagatgatgcacgatgcttggcattttcaggaacct

SEQ ID NO: 191689 - DNA, 1341 bp, Artificial Sequence
  derived and/or modified sequence
atgagcgcatcaaagattcctctgttcaaaatgaaagacttgatcctgattctgtgcctgttggaaatgagcttcgcggtgccattcttcccacagcagtcggggaccccggggatggcgtcgttgtcgctcgagactatgcgccaactgggctcgctccaaagactcaacactctctcacagtactcgcgctacggcttcggaaagtcatttaactccttgtggatgcacggtctgttgccacctcactcttcgctgccatggatgcgcccgcgtgaacatgagacgcaacaatacgaatactccttgccggtgcacccaccaccgctcccctcgcaaccgtccctcaagccgcagcaacccggcctcaagcctttcctgcagtcggcagcggcaactaccaatcaggccactgcgctgaaggaggcactccagcctccaatccatctcggccacctgccgctgcaggagggagaacttccgctggttcaacagcaggttgcgccttcggacaaaccccctaagccggaactgcctggcgtggatttcgctgatccccaaggtccgagcctgcccggaatggactttccggacccacagggaccatcgcttccaggactggacttcgccgacccgcagggctccactattttccagatcgcgcggctcatcagtcacggacctatgccacagaacaaacaatcgccactctaccctggaatgctgtacgtgcccttcggagctaatcaactcaacgcccctgctcgcctcggaatcatgagctcagaggaggtcgccggaggccgcgaggacccgatggcgtacggagccatgttcccgggattcgggggaatgcgacctggattcgagggaatgccgcacaaccccgcaatgggcggggatttcaccctggaattcgactccccggtcgcggcgactaagggccctgaaaacgaagaaggaggagcgcaaggaagccctatgcccgaggcgaatccagataatctcgaaaacccggccttcttgacggagctggaacctgcgccgcacgctgggctgctggcacttccgaaggacgacatcccgggcctgcctcgctccccctctggaaagatgaagggtctgccttccgtgaccccggctgctgctgacccgctgatgaccccagagctcgcagatgtgtatcgcacttacgacgcagacatgactacctcagtggactttcaggaagaagccactatggacaccaccatggcccctaactcactgcaaacctcgatgcctgggaacaaagcccaagagcctgagatgatgcatgacgcgtggcatttccaggaaccc

SEQ ID NO: 191690 - DNA, 1341 bp, Artificial Sequence
  derived and/or modified sequence
atgagcgcatccaaaatcccactgtttaagatgaaagaccttatccttattctttgtctgcttgagatgtcgttcgccgtgccttttttcccacaacaatcaggaactcctggaatggcgagcctttcacttgaaaccatgagacaactcggttcgctgcaaagactcaacactctttcccagtactctcgatacggatttgggaagagctttaactccctgtggatgcatggactgcttccaccacattcgagcttgccttggatgcgaccgagagaacatgagactcaacagtatgaatactcgcttcctgtgcacccacctcctctgcctagccaaccttcgcttaagcctcagcagcctggtctgaagccatttcttcagtccgcggcagcgacgacgaaccaagccactgcacttaaagaggctctgcaaccacctatacatcttggacatctccctttgcaagaaggagaattgccacttgtgcagcaacaggtcgcgccctcggataaacctccaaagccggagttgcccggggtggatttcgcagacccccaaggaccttcactcccaggcatggatttccccgatccacaaggaccgtcgctgcctggcctcgattttgcagaccctcagggttcgaccatattccagatcgcccgacttatcagccatggaccaatgcctcaaaacaagcagtcaccgctttaccctggtatgctgtacgtcccattcggtgcaaaccaacttaacgccccagcacgcctcggtattatgtcctccgaagaagtcgccggtggcagagaggatcctatggcctacggagcaatgttccctggattcggtggaatgaggccaggattcgaggggatgcctcataaccccgcaatgggaggcgattttactttggagtttgattcaccagttgcggcaactaagggaccagaaaatgaagaggggggtgcacagggttcgccgatgccagaagccaacccagataatcttgaaaaccccgcctttcttactgaactcgaacccgcacctcatgcaggcctgctggccctccctaaggatgacattcccggcttgccacgaagcccatcaggtaagatgaagggacttccatcggtgaccccggccgcagcagatccgttgatgacccctgagctggcggatgtctaccggacttacgatgcagacatgaccacctcggtggattttcaagaagaagcaaccatggatactaccatggcgccgaatagcctccaaacttcaatgcctggtaataaggcgcaggagcctgaaatgatgcacgacgcgtggcatttccaggagcct

SEQ ID NO: 191691 - DNA, 1341 bp, Artificial Sequence
  derived and/or modified sequence
atgtctgcatccaagattcctctcttcaagatgaaggacttgattctcatcctttgcctgctcgaaatgtctttcgcagtgcctttctttccccaacagagcggaacccctggtatggcatccctgagccttgagacaatgcgccagttgggcagtctgcaaaggctcaatacactgagtcagtactcacgctacggattcggcaagagctttaactccctgtggatgcacggtctcttgcctccacactctagtctcccttggatgagaccccgtgagcacgaaacccagcagtatgaatatagtctccccgtccacccacctcccctgccatcccaaccctcacttaagccccaacagcctggtctcaaaccattcctgcaatcagccgcagccaccactaatcaggcaaccgctttgaaggaggcactccagccaccaattcaccttggccatcttcctctccaagagggcgaactgcctcttgtccagcaacaagtcgccccatctgacaagccacccaagccagagttgcccggcgttgattttgcagatcctcagggaccctcacttcctggtatggacttccccgacccccaaggcccctctctccccggcttggatttcgcagatccacagggctctaccatctttcaaatcgctaggctcatcagccatggacctatgccccagaataagcagagccctttgtaccctggtatgctgtatgttcccttcggtgccaaccagcttaacgcccccgcaagattgggaatcatgtcatctgaggaagtcgccggaggccgcgaagaccccatggcctacggtgcaatgtttcctggtttcggtggcatgcgtccaggttttgaaggaatgccccacaatcctgcaatgggaggcgacttcacactcgaattcgactcacccgtggccgctacaaagggccctgaaaatgaggagggtggcgctcagggttcccctatgccagaagctaaccccgacaacctggaaaatcctgctttcttgacagagttggagcccgcaccacacgccggtcttctcgctcttcccaaagatgatatccccggcctccctcgctcccccagcggaaaaatgaagggtctgccatctgtaactcccgccgctgcagatcccttgatgacacccgagttggcagacgtgtaccgcacttatgacgcagacatgaccacaagtgttgattttcaggaggaggccactatggacacaaccatggcccccaacagtctgcaaacttcaatgcctggcaacaaggctcaggagcccgagatgatgcacgatgcttggcatttccaagaacca

SEQ ID NO: 191692 - DNA, 1341 bp, Artificial Sequence
  derived and/or modified sequence
atgtccgcctccaagatcccgctgttcaagatgaaggatctgatcctcatcctgtgtctgctggagatgtcattcgccgtcccattctttccacaacagtcaggcactccaggtatggctagcctgtctctcgagacgatgcgccagctgggttcgctgcaaagactcaatacgctctcccaatactcaagatacggttttggcaaaagtttcaactcgctttggatgcatggactgctgcctcctcactcgtcgctgccgtggatgcggccccgcgagcacgaaactcagcagtacgaatactccctccccgttcatcctccgccactgccgtcccagccgtcactcaaaccgcagcagccggggctgaagccctttctgcaatccgctgccgcaactaccaatcaggccaccgctctcaaagaagctctgcaaccgccgatccatctgggccacctgccactccaggagggagagctgccgctggtgcagcaacaggtcgccccgagcgataagccgccgaaaccggaactgccgggcgtcgattttgccgatccacaggggccgtccctgccaggaatggacttcccagaccctcaaggtccttcgctgccggggctcgacttcgcggaccctcagggatcaactatattccaaattgcgcggttgatttcgcacggaccgatgccgcaaaacaagcagagcccgctctacccgggaatgctgtacgtgccattcggagcaaatcagctgaacgcaccggcgcggctgggaatcatgtcctcagaggaagtcgccggaggaagagaagatccaatggcttacggagctatgttcccgggctttggaggaatgaggcccggattcgaaggcatgcctcacaacccagccatgggaggcgacttcactctggagtttgattcgccagtggcggcgaccaagggacctgaaaatgaggaaggaggtgctcagggtagcccgatgccggaggctaacccggataacctggaaaacccagcatttctgacggaactggagcccgctccccacgctggactgctggcgcttccaaaggatgacatcccaggcctgccgcgctcaccgagcggaaagatgaagggactgccgtcagtgaccccggccgcagccgacccattgatgaccccggaactcgctgacgtctatagaacctacgatgccgacatgaccacttcagtggacttccaagaggaggccactatggacactactatggcgcctaattcactgcagacctccatgccgggaaataaggcccaggagccggaaatgatgcacgatgcatggcatttccaggaacct

SEQ ID NO: 191693 - DNA, 1341 bp, Artificial Sequence
  derived and/or modified sequence
atgtcggcatcgaagataccattgttcaaaatgaaggatcttatcctgatcctgtgcctgctggaaatgtcgtttgctgtgcccttttttccgcaacagtccggcaccccaggaatggcctcgctgtcccttgaaaccatgcgccaactcggatctctgcagcggctcaatactcttagccagtattcgcgctacggattcggtaagtcgttcaactcgctgtggatgcatggactgctgccgccccattcttcgctcccgtggatgcgccctcgcgaacatgaaactcagcagtacgagtactcgcttccagtgcacccacctccactgccttcgcaacctagcctgaagccccagcaaccagggcttaaaccattcctgcaatccgcggcagctaccactaatcaagcaacggctctgaaagaagcccttcaaccgccgatccatctgggacacctgccgttgcaagagggagaactgccgctggtccagcagcaagtggccccatccgacaaaccaccgaaacctgaattgcccggcgttgacttcgcggacccacagggcccgtccctcccagggatggacttcccggatccgcaaggaccgtccctgccgggcttggatttcgctgatccgcagggatccacgatcttccagatcgcgagactcatctcacatggaccgatgccccagaataaacagagcccactctacccgggcatgctctacgtgccgtttggagcgaatcagctgaatgcacccgcgcggctgggaatcatgagctccgaggaggtggcgggcggtagggaagatccgatggcatacggagccatgttcccgggattcggaggtatgaggccgggattcgaggggatgccacacaaccctgctatgggcggggatttcaccctggaatttgatagcccagtggccgccactaagggccctgagaacgaggagggaggcgcgcaaggatcacctatgccggaggctaaccccgataacctcgagaaccctgcattcctgaccgagttggagcccgcgccccatgctgggcttcttgccctgccaaaagatgatatcccgggactgccgcgtagcccgagcgggaagatgaagggtctgccatcagtgacccccgctgccgccgaccccctgatgactcccgagctcgccgacgtctacaggacctatgacgcagacatgaccacctccgtcgatttccaggaggaggcgactatggacactaccatggctccgaactcactgcaaacctcgatgccgggaaacaaggcgcaagagccggagatgatgcatgatgcatggcactttcaggaaccg

SEQ ID NO: 191694 - DNA, 1341 bp, Artificial Sequence
  derived and/or modified sequence
atgtcggcctccaagatccccctttttaaaatgaaagatctcatccttatactgtgcttgctggagatgtctttcgctgttcctttcttcccacagcaaagcgggacccctggtatggcttctctgagtcttgagaccatgagacagctggggtctcttcaacgcttgaacacactgtcccagtacagccggtacggcttcggcaagtcattcaacagtctgtggatgcacgggttactgcctccgcattcaagtctgccttggatgcgaccaagggagcatgaaacccagcagtatgaatactccctccctgtgcaccctccccctctccccagccagcctagcctcaagccacagcagcccggcttgaagccattcctccagtccgccgctgcaaccactaatcaggccacagcccttaaagaagctttacaacctccaattcatctcggccacttgcccctacaagagggtgagctgcctttggtgcaacagcaagtggccccatccgacaagcctcccaagcctgagttgcctggtgtggattttgctgacccacaagggccttctctcccgggcatggacttccccgatccacagggtcctagcctgcctggcctggacttcgccgatcctcagggctcaactattttccagatcgcacggttgatcagccatgggcccatgcctcagaacaagcagtcccccctttacccagggatgttatacgtcccctttggcgcaaatcagcttaacgctccagcccggctgggaatcatgtccagcgaagaagttgccggcggcagggaagacccgatggcctatggagccatgtttcccggatttgggggtatgcgccctggcttcgagggtatgccccataaccccgcaatgggtggagatttcaccttggaatttgatagccctgttgcagctactaagggacccgaaaacgaagaaggcggggcccagggtagccccatgcccgaggccaacccagataacctcgaaaaccccgcgtttctcaccgagttggaaccagcaccccacgccgggctgttggcactccccaaggacgatattcctggactcccccgcagcccgagcggtaaaatgaagggtttaccctctgtgacaccggccgccgccgatccccttatgacgcctgaactggccgatgtttacagaacctacgacgcagatatgactacgagtgttgatttccaggaggaggccactatggatactaccatggctcctaacagcctccaaacgtctatgccgggaaacaaagcacaggaacctgaaatgatgcatgacgcgtggcacttccaagaacca

SEQ ID NO: 191695 - DNA, 1341 bp, Artificial Sequence
  derived and/or modified sequence
atgagcgcaagcaaaatacccctctttaagatgaaagacctcatcttgatcctttgcctcctggaaatgtccttcgcagtcccatttttcccacaacagagtgggactcccggaatggctagtttgtctcttgaaaccatgcgacaactgggttcactgcagagactcaacaccctgtcacagtatagtaggtatggtttcgggaaatcctttaacagcctctggatgcacggcctcctccccccgcacagctcactgccgtggatgagaccccgagagcatgaaacacagcagtacgagtacagcctgccagtgcacccgcctccactgcccagtcagccatccctgaaaccccagcaacctggtcttaagccgttcctgcagtcagccgccgcaacgaccaatcaggcgaccgccctgaaggaagctttgcagccaccaatccacctgggccacttgccccttcaggaaggtgaattgcctttggtgcaacagcaagtggctcctagcgataagcccccaaaacctgagttgcctggcgtcgatttcgctgacccccagggaccgtccttgccagggatggactttccagatcctcaaggaccttcactccctggacttgactttgcggaccctcagggctccacaatttttcagattgccagattgatttcacatgggcccatgccccagaataaacagagtcctctgtacccaggcatgctgtacgtaccgttcggcgcgaaccaattgaacgcacctgcccgcctgggaatcatgtcaagtgaagaagttgctggaggacgggaagacccaatggcctatggggcgatgtttccgggctttggcgggatgcggcccgggtttgaaggcatgccccataacccggcaatggggggcgactttacactggagtttgactctccggtcgccgccactaaagggcctgaaaatgaggaggggggtgcgcagggctctcccatgccagaagcgaatccggacaacctcgaaaatcccgcttttttgacagaattggagcccgcaccccatgctggactcctcgccctgcctaaggatgacatcccgggcctccctcgaagcccgtcaggcaagatgaagggactgccatctgtgacccccgcagcggccgatccgctcatgacccccgagttggccgatgtgtaccgcacttatgacgcggacatgaccacttctgtggatttccaagaggaggcgaccatggacaccaccatggcgccgaactcccttcagacttccatgcctggcaacaaagcccaagagccagaaatgatgcacgacgcctggcatttccaggaaccc

SEQ ID NO: 191696 - DNA, 1341 bp, Artificial Sequence
  derived and/or modified sequence
atgtccgcttctaagataccgcttttcaagatgaaagaccttatccttattctttgtcttttggagatgtcgttcgcagttcccttttttcctcagcaaagcggaactccgggtatggcctctctctcgctggagacgatgagacagctcggatcactgcaacggctcaataccctgagccagtactccagatacggatttggtaagtcattcaattcgctttggatgcatggactcctcccacctcactcgagccttccgtggatgcgaccaagagaacatgaaacccagcaatacgaatattcacttcccgtccatcctccaccattgccttcgcaaccatcccttaagccccaacaaccggggcttaaaccgtttcttcaatcagcagcagcaactactaatcaagcaactgccctgaaggaggccctgcaacccccaatccatctcggacatctccctctgcaagaaggcgaacttcccctcgtgcagcagcaggtggcccccagcgacaagcctcctaagccagaactgcctggcgtggacttcgcagacccccaaggtccatcacttcccggaatggatttcccggatccccagggcccatcgctccccggattggactttgcagaccctcaggggagcaccatatttcagattgcacgcctgatatcgcatggacctatgccccagaacaaacagtcacccctttacccaggcatgctgtacgtgcctttcggcgcaaatcagctcaacgcgcccgcaagactcggaattatgtcctccgaggaagtggcaggcggtcgcgaggacccaatggcatacggtgctatgtttcccggttttggcggtatgcgccccggatttgaaggtatgcctcacaaccccgccatgggaggagatttcaccctggaattcgattcgcccgtcgcggctacgaagggtcctgaaaacgaggaagggggagctcaaggttcacccatgcctgaggcaaatcctgataacttggaaaatccagcgtttctgacggaacttgaacccgccccacatgccggcctgttggcactccccaaagacgatatacctgggctcccgcggtcacctagcggcaaaatgaagggcctcccctcggttacgcccgccgccgctgatcccctgatgactccggaactggcggatgtgtaccgtacgtacgatgcggatatgaccacctcggtcgattttcaagaagaagcaacgatggatactaccatggcacctaactccctgcaaacctccatgccaggaaacaaggcacaggagccagagatgatgcacgatgcctggcacttccaagaacct

SEQ ID NO: 191697 - DNA, 1341 bp, Artificial Sequence
  derived and/or modified sequence
atgtccgccagcaaaatcccgctttttaagatgaaagatctgattctgatactttgcctgctggagatgagcttcgcagtaccattcttcccccaacagagcggcactcctggcatggcgtctctcagtctcgagaccatgaggcagctggggtcattacagcgcctgaataccctgagtcagtattccagatatggatttggcaagagcttcaatagtctctggatgcacggactgcttccaccacactcctctcttccatggatgcggccgcgggagcatgagacacaacagtatgaatattctttacctgtgcacccacctccacttcctagccaacctagcttgaagccacagcagcccgggctcaaaccattccttcagagcgcggcggccacaaccaatcaggccacagccctgaaggaggctctgcagccacccatacatttgggtcacctgccactccaagagggcgaactccctttggtccagcagcaagtggccccatctgacaagccaccgaaacctgaactgcccggcgttgactttgccgatccacaagggccctccctgcctggaatggactttccagatccgcaagggcccagtttgcccggcctggacttcgccgatccacaggggtccaccatattccaaatagccaggcttatcagtcacgggcctatgcctcagaacaagcagtcccccctgtacccaggcatgctctacgtgccattcggtgctaatcagctaaacgctccagccagactggggattatgtcctctgaagaagttgctggtgggagagaagaccctatggcctacggggccatgtttcccggctttggcggcatgcgtcctgggttcgagggcatgccacataaccctgctatgggcggcgattttaccctcgagttcgattcacctgttgccgccacgaagggcccagagaacgaggagggaggtgcccaagggtcccccatgcccgaggcaaacccggacaacctcgaaaatcccgcgttcctgaccgagctggagcccgcgcctcatgcaggcctgctggcattgcctaaggacgacatcccgggcctgcctcgctcgccatctggtaagatgaaggggctgccttccgttacccccgcagcagctgatccactgatgacacctgagctggcagacgtgtatcggacttacgacgccgacatgacaacctccgtggattttcaggaggaagccacaatggacaccacaatggctccgaattcccttcagacgtcgatgcctggcaacaaagcccaggaacccgagatgatgcatgacgcttggcattttcaggagcca

SEQ ID NO: 191698 - DNA, 1341 bp, Artificial Sequence
  derived and/or modified sequence
atgtctgctagtaagattcccctgtttaagatgaaggatctgattttaatcctctgcctgctcgaaatgtccttcgctgtgcccttcttcccacagcaatccggcactccagggatggccagcctgtcactggaaacaatgagacaactaggcagcctccagagactgaacacactgagccaatacagcaggtacgggttcgggaagagcttcaacagcctgtggatgcacggcctgctacctcctcatagttctctcccatggatgcgtcccagagaacatgagacccagcagtatgaatatagcctgccagtgcaccctcccccactgccttctcagccaagtctgaagccacagcagccagggcttaagccatttctgcagagcgccgctgccactaccaaccaagccacagcactgaaagaggctctgcagccacccattcacctgggtcatctgccacttcaggagggagagctgccactggtgcagcaacaggttgccccatctgacaagccccctaaaccagagctgccaggcgtggacttcgcagatccacagggccctagtctgcccgggatggacttccccgatccacagggacctagtctgcctgggctggatttcgccgaccctcaggggtcaaccatatttcagattgcccgtctcattagccatggacctatgccacaaaataaacaatctcccttgtatccaggaatgctatacgttccatttggtgctaatcagctgaacgccccagctcggctagggattatgtccagcgaggaggttgctgggggacgggaagaccctatggcctatggcgctatgtttcctggctttggaggtatgagaccaggatttgaaggcatgcctcacaatccagcaatgggcggagatttcacactcgagttcgactctcctgtggccgctaccaaaggccctgagaatgaagagggcggtgcccaaggctctccaatgcctgaagccaatccagacaacctggaaaaccctgctttcttaactgagctagagcccgcccctcacgcaggcttattagctctgcctaaagacgacatacctgggctacctcgcagcccaagcggcaaaatgaaggggctgccttctgtgactccggctgctgctgaccctctgatgactcctgaactggcagacgtttaccggacctacgacgcagacatgaccacatctgtggacttccaggaagaagccactatggacacaacaatggcccccaattcactgcagacatccatgccaggcaataaagcccaagagccagaaatgatgcacgatgcctggcacttccaagagcct

SEQ ID NO: 191699 - DNA, 1341 bp, Artificial Sequence
  derived and/or modified sequence
atgtccgcatccaaaatccctttgtttaagatgaaagatcttatccttatcttgtgtcttttggaaatgtcatttgcagtgccattctttcctcagcagtcgggtacgccaggtatggccagcctgtcgttggaaacgatgagacaactgggttccctgcaacgtttgaacaccctgagtcagtactcgaggtatgggtttgggaagtcgttcaatagcttgtggatgcatggtctgctgcccccacattcgtccctgccatggatgcggcccagagaacacgagactcaacaatacgagtacagcctgcccgtgcatcccccaccactgccatcccaaccaagcctgaaacctcagcagcctggcctcaagccctttcttcaatcggcagcggccactactaaccaagcaaccgctcttaaggaggcgctgcagccgccgattcatcttggacacttgcctttgcaggaaggtgaactgccccttgtccagcaacaggtcgcaccgtcagataagccccccaaacctgagctgccaggagtggacttcgcagacccccagggaccatcgctccctggtatggattttcctgaccctcaaggaccctctcttcctggactcgattttgccgatccgcaaggctcaactatattccaaattgctcgtctgatatcgcatggtccaatgccacagaacaaacaatctcctctttaccctggaatgctctacgtgccttttggtgcaaaccagctgaacgcgccagcacggctggggatcatgtcatcagaagaagtagcaggggggcgcgaagatcctatggcctatggggcaatgtttcctggctttggtgggatgcgcccggggttcgagggcatgccacataatccagccatggggggtgacttcaccttggagtttgactctcctgtggcggcaacgaagggccctgaaaatgaggaaggaggagcacagggttcaccaatgccggaagccaatccagataaccttgagaatccggcgttcttgacggagctcgaacccgcacctcacgcgggactccttgcacttcccaaggacgatattcccggactgccaaggtcgccatctggcaagatgaagggactcccttcggtgactccagccgcggcggatccacttatgacccccgagctcgcagacgtctacagaacctacgatgctgatatgaccacctcagtggactttcaagaagaagccactatggataccactatggctcccaactcccttcaaaccagcatgccagggaacaaggcacaggaacctgaaatgatgcatgacgcatggcacttccaagaacca

SEQ ID NO: 191700 - RNA, 1487 nt, Artificial Sequence
  derived and/or modified sequence
gggaaauaagagagaaaagaagaguaagaagaaauauaagagccaccauguccgcgucaaaaaucccacucuuuaagaugaaagaucucauccucauucucugccuuuuggagauguccuuugcagugccuuucuucccccagcaguccggcaccccugguauggccagccuuucgcuggaaacaaugaggcagcucggcagccuucagcgacugaacacauugucgcaguauucccgcuacgguuucgggaagucguucaauagcuuguggaugcauggguugcuucccccacacucgucacugcccuggaugaggccaagagaacacgagacacagcaauaugaguacucgcuuccagugcauccucccccucuucccagccagccuucgcucaagccacagcagccuggguugaagccuuucuugcaguccgcagccgcgacaacgaaucaggccacugcucugaaagaagccuugcagccgccuauucaccuugggcaucucccgcuccaagaaggcgagcugccacuuguacagcagcaggucgccccuucggacaagcccccaaaaccggaacuccccggugucgauuuugcugacccucaagggcccucauugccuggaauggacuuucccgauccccaaggcccgucgcuuccggguuuggauuucgcagacccgcaaggaucgacaaucuuucaaauugcgcggcuuaucucgcacgggccuaugccgcagaauaagcagucaccccuguaccccggaaugcuuuauguccccuuuggggccaaucagcucaaugccccugcccgauugggcaucaugucgucagaagagguagcaggugggcgcgaggauccgauggcguacggggccauguuccccggauucggugguaugagacccggguucgaggggaugccucacaacccggcgauggguggcgauuuuaccuuggaguuugauucgcccguggcggcgacuaaaggaccggagaacgaagaggguggugcgcagggauccccgaugccggaagccaauccggauaaccucgagaauccggcuuuccugacggagcucgagccagcgccgcaugccggguugcuggcgcucccuaaagaugacaucccuggccuuccccgguccccuagcggaaagaugaagggucugccguccgugacaccggcugccgcggacccccugaugacgccagaacucgccgacgucuaucgcaccuacgaugcagacaugacgacgucgguggacuuccaagaagaagcgacaauggacacgacaauggcgccgaacucgcugcagaccucgaugccgggaaacaaggcgcaagagcccgagaugaugcacgacgcguggcacuuucaagagccauaaugagcugccuucugcggggcuugccuucuggccaugcccuucuucucucccuugcaccuguaccucuuggucuuugaauaaagccugaguaggaag

SEQ ID NO: 191701 - RNA, 1344 nt, Artificial Sequence
  derived and/or modified sequence
augucugcuuccaagaucccucuguucaaaaugaaggaccugauccugauccucugucuuuuggaaaugaguuuugccguucccuuuuucccgcaacaguccggcacuccaggcauggcaagcuugucucuggagacaaugcggcaacucggcaguuugcaaaggcuuaauacacugucccaguauaguagguacggcuuugggaaaucauuuaacagucucuggaugcacggacuccucccaccacauuccucccuacccuggaugcggccucgcgaacaugaaacgcagcaguaugaauauucacuacccguccauccuccuccucucccuucccaacccucccugaagccacaacagcccggucuaaagccauucuugcagagugcugcggcaacaacaaaccaggccaccgcccugaaggaagcccuccagccgccaauccacuuaggacacuuaccucuucaagaaggagagcugccccugguacagcagcagguggcaccauccgacaaaccuccaaaaccugagcugccaggcguggauuucgcugauccgcagggaccuagccuaccaggcauggacuuuccggauccccagggcccaagccugccuggguuggauuuugcagacccgcagggcaguacuauuuuccagaucgcaagguuaauuucccacggcccaaugccucagaauaagcaauccccucucuacccggggaugcuguacguaccauuuggcgcuaaucaacugaaugcccccgcucggcuaggcaucaugaguucugaagaggucgcaggaggcagggaagacccaauggcuuacggcgccauguucccagguuuugggggcaugaggccgggauucgaagguaugccacacaaccccgcaaugggcggggauuuuacacuggaauuugacucaccugucgccgcaaccaaaggccccgaaaacgaggaaggaggugcacagggauccccuaugcccgaggcuaauccagauaaccuugaaaacccagcauuucugaccgaacuugaaccggccccucacgcuggccugcuggcuuugccaaaagacgacauccccggccugccaaggagucccucuggaaaaaugaaaggacugcccucagugacaccugccgcugcagauccucuaaugacaccugagcucgccgacgucuaucgcacuuacgacgcugauaugacgacaagugucgauuuucaggaagaggccacaauggauaccacaauggcgccaaauagcuuacaaacaucuaugccaggaaauaaggcgcaagaacccgaaaugaugcacgaugcauggcauuuucaagaaccuuag

SEQ ID NO: 191702 - RNA, 1299 nt, Artificial Sequence
  derived and/or modified sequence
augagcgccucuaagaucccgcuguuuaagaugaaagauuugauucugauacucugucuguuggagaugagcuuugcuguuccuuucuuuccccaacaaucagggaccccagguauggcaaguuugagccuggaaacgaugcgccagcugggaucccugcagcggcucaacacacucucacaauacucaagguauggguuugguaaaagcuucaacucucuauggaugcacggccuguuacccccacacuccucucugcccuggaugaggccacgagagcacgagacccaacagcccucuuugaaaccucaacaacccggucucaagccuuuccugcaaagcgccgcagcaaccacuaaucaagcaacagcccucaaggaagcucugcaaccacccauccaucucggucauuugccccugcaggagggcgaacuaccccuaguccagcagcagguggcgccuuccgauaagccacccaagcccgagcuucccggcguggauuucgcugacccgcaagggcccucccucccaggaauggauuucccagacccacaggguccuagccuuccuggucuggacuucgccgauccucaaggcagcaccauuuuccaaaucgcuagacucauuucucacggccccaugccucagaauaagcagucuccccuguauccgggaaugcucuaugugccauucggagcuaaucagcugaaugcuccugcgcgacugggcauaaugucuucagaagaagucgcaggggggcgcgaggauccuauggcauacggugccauguuccccggguucggcggcaugcguccuggcuuugaggggaugccccauaacccugcgauggggggcgacuuuacacucgaauuugacagcccuguggcugcuaccaaggggccagaaaaugaagaagguggagcccagggaagcccuaugccagaagccaauccagacaaucuagagaacccugcguuuuugaccgaguuggagccugcaccacacgccggacuucuggcccugccgaaggaugacauucccggacugccaagaucaccaucuggcaaaaugaagggccucccaagcguuacccccgcagccgccgacccuuugaugacgccugagcuggcagacguauaccggacauacgacgcggacaugacaaccucaguugauuuucaggaagaagccacaauggacacaaccauggccccaaauucucuucaaaccucaaugccuggcaauaaggcacaggaaccagagaugaugcacgaugccuggcacuuucaggagccuuag

SEQ ID NO: 191703 - RNA, 1341 nt, Artificial Sequence
  derived and/or modified sequence
augagcgcguccaaaauuccccuuuucaagaugaaagaccugauccugauacuuugcuugcuugaaaugagcuucgcagucccauucuucccucagcaaucuggcacacccggaauggccagucugucucucgaaacuaugcgccagcuggguucccuucagcgacucaauacucugagccaguacucccgcuauggcuuugggaagucauuuaacuccuuguggaugcauggccuacuucccccccacucuucccuccccuggaugcgaccaagagaacacgaaacacagcaguacgaauauagccugcccguucauccuccaccauuaccuucacaaccuucacugaagccucagcagccuggccuuaagccguuucuacagucugccgccgccacaacuaaccaggccacugcccuuaaggaagcccuccagccucccauucaccucgggcacuugccccuccaggaaggugaauugccucuggugcaacagcagguggcacccagcgacaaaccaccaaaacccgagcugagaguugauuuugcugauccacagggcccuuccuuacccgguauggauuuuccugauccacaaggccccuccuugccuggauuggacuuugccgauccgcagggaucaacuauuuuccaaauugcuaggcucaucagccacgggccgaugccccaaaacaaacaguccccucuguauccggguaugcucuacguucccuucggggcuaaccagcuuaaugcuccagcccgacugggaaucaugucuucagaagaggucgccggcggccgggaggacccuauggcguacggggcuauguucccagguuucggcgguaugaggccggguuuugaaggcaugccacauaacccugccauggggggagacuucacacuggaguucgacagcccuguugcugcaacaaaggggcccgaaaaugaagaaggcggcgcccaagggagccccaugccggaagccaaccccgauaaucucgaaaaccccgcuuuccuuacggagcuggaaccggcgccccacgcuggccuucuugcccugcccaaggacgauauuccggggcuaccaagaucgccaucuggaaaaaugaaaggucuaccaagcguuaccccagccgccgcggacccgcugaugacgccagagcucgccgacguguaccgaaccuacgacgccgacaugaccaccaguguagacuuccaggaggaagccacaauggacacaacaauggcucccaacuccuugcagaccuccaugccagggaauaaggcccaagagccagaaaugaugcacgaugcauggcacuuccaagagcccuag

SEQ ID NO: 191704 - RNA, 1344 nt, Artificial Sequence
  derived and/or modified sequence
auguccgccucuaaaauuccgcuguuuaagaugaaagauuuaauccugauauuaugccuuuuagagauguccuuugcugugccuuuuuucccgcaacagagcggaacacccggaauggcaucacucagcuuggaaacaaugcggcagcuugguucucuacagagacuuaacacauugucgcaauacucucguuacggauucgggaaaagcuucaauucacucuggaugcauggacuucuucccccacauagcagccugccauggaugcguccgagagaacacgaaacccagcaauaugaauacagucugcccgugcaccccccaccucucccaucucagccaagcuugaagccucaacagccaggucugaagccuuuucugcagagugcagccgccacaacuaaccaagcuacagcacugaaagaagcccuucagcccccuauucacuugggacaccugcccuugcaagagggagagcugccucugguacagcagcaggucgcaccauccgacaaacccccaaagcccgaacugcccggaguggacuucgcagauccccaaggaccaucucugcccggaauggauuucccggauccacaaggacccucguuaccaggccucgacuuugcugauccucaagggaguaccauuuuucagauugcucgucucauaagccacgguccgaugccgcagaauaaacagucaccccuguaccccgguauguuauacgugccauuuggcgcgaaccagcuaaacgcucccgccaggcucgggauuaugagcuccgaagaagucgcugggggcagagaagacccuauggcauacggugcuauguuuccuggcuuuggagguaugagacccggguuugaaggcaugccccacaaucccgcaaugggcggugauuuuacccuggaguuugauucacccgucgccgcgacaaagggacccgaaaacgaagaagguggugcacaggguuccccuaugcccgaagccaaccccgacaaccucgagaacccugcauuuuugacugaacuggaacccgccccgcacgcgggcuugcuggcccuccccaaggacgacauuccaggacucccgcgaagcccuucuggaaaaaugaaaggccucccuagcgucacuccugccgcagccgacccacuuaugacuccugagcucgccgacguuuaccgcacuuaugaugccgauaugacaacaagcguagauuuccaggaagaagcuacuauggauaccacaauggcucccaacucucuucagacgagcaugcccgguaacaaggcgcaggaaccagaaaugaugcacgacgcauggcacuuccaagaacccuag

SEQ ID NO: 191705 - RNA, 1299 nt, Artificial Sequence
  derived and/or modified sequence
augagugcaucaaagaucccacuguuuaagaugaaagauuugauuuuaauccuaugucuccuggaaaugucuuuugcagucccauuuuuuccucagcagagcggcacacccgguauggccagccuuucccucgagacaaugcgccaauuagguucucuacagcgacuuaacaccuuaucccaguauucaagauauggcuuuggcaaaaguuuuaacucacuauggaugcacgggcuucucccaccccacucaucccugccuuggaugcggccaagggaacaugaaacgcagcagccaagccuaaaaccccagcaaccagggcuuaagcccuuucuucagucagccgccgcuacaaccaaucaggccacugcccucaaagaggcccuccagcccccaauucaucucggucaccugccacugcaggagggagagcugccgcuuguucagcaacaggucgcaccaagcgauaagccaccuaaaccggaguugccagggguggacuucgcagacccacagggccccagccuucccggcauggacuucccagauccccaaggccccucauugccuggacuugauuucgccgauccucagggcucuacgaucuuccaaaucgcuagacugauaucacauggaccgaugccacaaaacaagcagucaccgcuauacccuggaaugcuguacguuccuuucggggccaaccagcucaacgcccccgcaagacugggaauuaugucuuccgaagaaguggccggcggacgagaagacccuauggccuacggugcuauguuuccuggauuuggcgguaugagaccagguuucgagggcaugccccacaaucccgcuauggggggagacuuuacucuggaguucgacucuccaguggcagccacaaaaggccccgaaaaugaagagggcggcgcccagggaucccccaugcccgaggccaacccugauaacuuagagaauccagccuuucugacagaauuagaaccugcgccccacgccggucuacuugcgcuucccaaagacgauauucccggccuaccacguucccccucagguaaaaugaaaggacucccuucugugaccccagccgccgcugacccacucaugacgccggagcuugcugauguauaccggacauacgaugccgauaugaccacaagcguggauuuucaggaagaggccacaauggacacgaccauggccccuaacucacuucagacaucaaugccggggaacaaagcacaagaaccagagaugaugcacgaugcuuggcacuuucaagaaccuuag

SEQ ID NO: 191706 - RNA, 1341 nt, Artificial Sequence
  derived and/or modified sequence
augagcgcguccaaaauuccccuuuucaagaugaaagaccugauccugauacuuugcuugcuugaaaugagcuucgcagucccauucuucccucagcaaucuggcacacccggaauggccagucugucucucgaaacuaugcgccagcuggguucccuucagcgacucaauacucugagccaguacucccgcuauggcuuugggaagucauuuaacuccuuguggaugcauggccuacuucccccccacucuucccuccccuggaugcgaccaagagaacacgaaacacagcaguacgaauacagccugccagugcaucccccccccuugcccucucagccuuccuugaagccccagcaaccaggacucaagccauuucuccagagcgcagccgccaccacaaaucaggcuacagcucuuaaagaagccuuacagcccccaauccaccugggccauuuaccacuucaggagggagaacugccacuggugcagcagcaaguggcgccaucugacaaaccccccaagccggaacuccgcguggacuucgcugauccucagggccccagucucccuggcauggauuuccccgacccucagggcccaucgcugccgggacucgauuuugccgauccucaaggcuccacaaucuuucagaucgcacgcuuaauuucucacggcccaaugccucagaacaaacagucuccccuuuaucccgguauguuguacguucccuucggugcaaaccagcugaacgcaccugcgcggcuaggaauuauguccucagaggagguggcaggaggcagggaagaucccauggcuuacggugcaauguuuccuggcuucggugggaugagaccaggauucgaagguaugccccauaaccccgcaauggggggggacuuuacauuggaguucgacucuccaguggcagcaacuaaggguccugaaaaugaagaaggcggcgcacaaggcucucccaugcccgaggcaaacccagacaaucucgagaacccagccuuuuugacagaacuggaaccugcuccccacgccggccugcuggcccucccuaaagaugacauaccuggacugcccagauccccauccggaaaaaugaaaggacuaccuaguguaacucccgcagccgcagacccacugaugacgccagaacuggcggauguguacagaacguaugaugcagacaugacuacuucaguugauuuccaggaggaagccacgauggacacaacuauggcgccgaacucucuacagacaaguaugcccgggaauaaggcacaggaaccugagaugaugcaugaugccuggcacuuccaagaacccuag

SEQ ID NO: 191707 - protein, 405 aa, Artificial Sequence
  derived and/or modified sequence
MAKYVSLTEANEELKVLMDENQTSRPVAVHTSTVNPLGKQLLPKTFGQSSVNIDQQVVIGMPQRPAASNIPVVGSPNPPSTHFASQNQHSYSSPPWAGQHNRKGEKNGMGLCRLSMKVWETVQRKGTTSCQEVVGELVAKFRAASNHASPNESAYDVKNIKRRTYDALNVLMAMNIISREKKKIKWIGLTTNSAQNCQNLRVERQKRLERIKQKQSELQQLILQQIAFKNLVLRNQYVEEQVSQRPLPNSVIHVPFIIISSSKKTVINCSISDDKSEYLFKFNSSFEIHDDTEVLMWMGMTFGLESGSCSAEDLKMARNLVPKALEPYVTEMAQGTFGGVFTTAGSRSNGTWLSASDLTNIAIGMLATSSGGSQYSGSRVETPAVEEEEEEDNNDDDLSENDEDD

SEQ ID NO: 191708 - DNA, 1680 bp, Artificial Sequence
  derived and/or modified sequence
cacggcagccctacactcggcctggaagaattgtttttcttctctggaaaggtgaacatttatagcatttatttcccaaatctgttaacatggcaaaatatgtcagtctcactgaagctaacgaagaactcaaggtcttaatggacgagaaccagaccagccgccccgtggccgttcacacctccaccgtgaacccgctcgggaagcagctcttgccgaaaacctttggacagtccagtgtcaacattgaccagcaagtggtaattggtatgcctcagagaccagcagcatcaaacatccctgtggtaggaagcccaaacccacccagcactcactttgcctctcagaaccagcattcctactcctcacctccttgggccgggcagcacaacaggaaaggagagaagaatggcatgggcctgtgccgtctttccatgaaggtctgggagacggtgcagaggaaagggaccacttcctgccaggaagtggtgggcgagctggtcgccaagttcagagctgccagcaaccacgcctcaccaaacgagtcagcttatgacgtgaaaaacataaaacggcgcacctacgatgccttaaacgtgctgatggccatgaatatcatctccagggagaaaaagaagatcaagtggattggtctgaccaccaactcggctcagaactgtcagaacttacgggtggaaagacagaagagacttgaaagaataaagcagaaacagtctgaacttcaacaacttattctacagcaaattgctttcaagaacctggtgctgagaaaccagtatgtggaggagcaggtcagccagcggccgctgcccaactcagtcatccacgtgcccttcatcatcatcagcagtagcaagaagaccgtcatcaactgcagcatctccgacgacaaatcagaatatctgtttaagtttaacagctcctttgaaatccacgatgacacagaagtgctgatgtggatgggcatgacttttgggctagagtccgggagctgctctgccgaagaccttaaaatggccagaaatttggtcccaaaggctctggagccgtacgtgacagaaatggctcagggaacttttggaggtgtgttcacgacggcaggttccaggtctaatggcacgtggctttctgccagtgacctgaccaacattgcgattgggatgctggccacaagctccggtggatctcagtacagtggctccagggtggagaccccagcagtcgaggaggaagaggaggaggacaacaacgatgacgacctcagtgagaatgacgaggatgactgacgtcctctcgccttaagattcagcttcaggaaaacatttagggaaaagaaactttttttttttttttaatgtgaggttttctgtttcttttttgcctactcccaagaagatattggtaagctatagaatttagatatgcacctctgataagcaaggattgtttcccgtatgattaagacgtgctgttgatgtgtgttttgataccagtgtgctgacacagaatctttatttactttttaggattttgtgttttcattttctatttttctttaaatgcagagttcattgttgccccttaacagtttttcctgagtttactgaagaaattgtacttcatccacatccatgaaaataaaatgctctccttttgtgc

SEQ ID NO: 191709 - DNA, 1218 bp, Artificial Sequence
  derived and/or modified sequence
atggccaagtacgtgagcctgaccgaggccaacgaggagctgaaggtgctgatggacgagaaccagaccagcagacccgtggccgtgcacaccagcaccgtgaaccccctgggcaagcagctgctgcccaagaccttcggccagagcagcgtgaacatcgaccagcaggtggtgatcggcatgccccagagacccgccgccagcaacatccccgtggtgggcagccccaacccccccagcacccacttcgccagccagaaccagcacagctacagcagccccccctgggccggccagcacaacagaaagggcgagaagaacggcatgggcctgtgcagactgagcatgaaggtgtgggagaccgtgcagagaaagggcaccaccagctgccaggaggtggtgggcgagctggtggccaagttcagagccgccagcaaccacgccagccccaacgagagcgcctacgacgtgaagaacatcaagagaagaacctacgacgccctgaacgtgctgatggccatgaacatcatcagcagagagaagaagaagatcaagtggatcggcctgaccaccaacagcgcccagaactgccagaacctgagagtggagagacagaagagactggagagaatcaagcagaagcagagcgagctgcagcagctgatcctgcagcagatcgccttcaagaacctggtgctgagaaaccagtacgtggaggagcaggtgagccagagacccctgcccaacagcgtgatccacgtgcccttcatcatcatcagcagcagcaagaagaccgtgatcaactgcagcatcagcgacgacaagagcgagtacctgttcaagttcaacagcagcttcgagatccacgacgacaccgaggtgctgatgtggatgggcatgaccttcggcctggagagcggcagctgcagcgccgaggacctgaagatggccagaaacctggtgcccaaggccctggagccctacgtgaccgagatggcccagggcaccttcggcggcgtgttcaccaccgccggcagcagaagcaacggcacctggctgagcgccagcgacctgaccaacatcgccatcggcatgctggccaccagcagcggcggcagccagtacagcggcagcagagtggagacccccgccgtggaggaggaggaggaggaggacaacaacgacgacgacctgagcgagaacgacgaggacgactag

SEQ ID NO: 191710 - DNA, 1218 bp, Artificial Sequence
  derived and/or modified sequence
atggcaaaatacgtgtcgctcaccgaggcaaatgaggaacttaaagtcctcatggatgagaatcagactagccggcccgtggctgtgcatacttctacagttaatccccttggtaagcagcttttgcccaagaccttcgggcagtcatctgtaaacatcgaccaacaggttgtaataggaatgccccaaaggccggccgctagtaatattccggtggtggggtctccaaatccacctagcactcactttgccagccagaaccaacattcttatagcagcccaccttgggctggccagcacaacaggaagggggagaagaatggcatgggtctatgtaggctgagcatgaaagtctgggagaccgtgcaaagaaaaggcactacctcatgccaggaagtggtgggggagctggtggcaaagtttcgggcagcatctaaccatgcctcccctaacgaatctgcttatgacgtcaagaacatcaaaaggcggacgtacgacgcactcaacgtgttgatggccatgaacattatctcacgcgaaaaaaaaaaaatcaagtggatcggcctaacaacaaatagtgcccaaaattgtcaaaatctgagggtcgagcggcagaaaagattagaacgcattaaacaaaagcagagcgaactgcagcaattaatcctgcagcagatcgcctttaagaatctggttttgagaaatcagtacgtcgaggagcaggtgagtcaaagaccgttgcccaactccgtcattcacgttccatttattatcatttcgtcaagtaagaagaccgttattaattgttcaatcagcgacgacaagagtgaatacctgttcaaattcaactcaagtttcgagatacacgacgacactgaagtcctaatgtggatgggtatgacatttggtcttgaatccggctcttgctcagcggaagacctgaaaatggcccgcaatctcgtgcccaaagcgctggaaccatatgtgacggagatggcccagggaaccttcggcggtgtcttcacgactgccggcagcaggtccaatggcacttggctgtcagccagcgatctgacaaacatcgccattgggatgctcgcgacatcatcgggcggcagccaatactccggttcaagagtggagacacctgctgtggaggaagaagaagaagaggacaacaacgacgacgacctcagtgagaacgacgaagatgactag

SEQ ID NO: 191711 - DNA, 1218 bp, Artificial Sequence
  derived and/or modified sequence
atggccaagtatgtgtccctgacagaggccaatgaggagctgaaggtgctgatggatgagaaccagaccagcaggcctgtggccgtgcacaccagcacagtgaaccccctgggcaagcagctgctgcccaagaccttcggccagagctctgtgaacatcgaccagcaggtggtgattggcatgccccagaggcctgctgccagcaacatccctgtggtgggcagccccaacccccccagcacccactttgccagccagaaccagcacagctacagcagccccccctgggccggccagcacaacagaaaaggagagaagaatggcatgggcctgtgccgcctgtccatgaaggtgtgggagaccgtgcagaggaagggcaccaccagctgccaggaggtggtgggggagctggtggccaagttccgggccgccagcaaccacgccagccccaatgaaagtgcctatgatgtgaagaacatcaagaggaggacctatgatgccctgaatgtgctgatggccatgaacatcatcagccgggagaagaagaagatcaagtggattggcctgaccaccaacagcgcccagaactgccagaacctgcgggtggagcggcagaagaggctggagcgcatcaagcagaagcagagcgagctgcagcagctgatcctgcagcagatcgccttcaagaacctggtgctgaggaaccagtatgtggaggagcaggtgtcccagaggcccctgcccaacagcgtcatccacgtgcccttcatcatcatcagcagcagcaagaagacagtcatcaactgcagcatcagtgatgacaagtctgagtacctgttcaagttcaacagcagctttgagatccatgatgacacagaggtgctgatgtggatgggcatgaccttcggcctggagagcggcagctgcagcgctgaggacctgaagatggccaggaacctggtgcccaaggccctggagccctacgtgacagagatggcccagggcacctttggaggagtcttcaccacagctggcagccgcagcaatggcacctggctgagcgccagtgacctgaccaacatcgccatcggcatgctggccaccagcagcggcggcagccagtacagcggcagccgggtggagaccccagctgtggaggaggaggaggaggaggacaacaatgatgatgacctgtctgaaaatgatgaagatgactag

SEQ ID NO: 191712 - DNA, 1218 bp, Artificial Sequence
  derived and/or modified sequence
atggccaagtacgtgagcctgaccgaggccaacgaggagctgaaggtactgatggacgagaaccagacctccagaccagtggcagtgcatacctcgacagttaatccactgggaaagcaactgttacccaagaccttcggtcagtccagcgtgaatattgatcagcaggtggttatcgggatgccacagcggccagctgctagcaacattcctgtggtggggtctcccaacccaccctcaactcatttcgcatcccagaatcagcactcctacagtagtcccccgtgggcaggccaacacaatcggaaaggagaaaaaaatggtatgggtctgtgccgcctctccatgaaagtttgggaaacagtccagcgaaagggaaccacgagctgtcaggaggtcgttggcgagctcgtggcaaaattccgcgcagcgagtaatcacgccagtcccaacgaatcggcttatgacgtgaagaacataaaacggcggacctacgatgctctcaatgttctgatggccatgaatattataagtagagaaaaaaagaaaatcaaatggattggactgactaccaacagcgcacagaactgtcaaaatcttcgcgttgaaagacaaaagcggctggaaaggataaaacagaagcagtccgagctgcagcagctgattttgcagcagattgctttcaaaaaccttgtcctgagaaaccagtatgtggaggagcaggtgagtcaaaggccattgcctaacagtgtaatccatgtaccatttattatcatatcctcgagcaagaaaacagtgatcaattgctccatcagtgacgacaaatctgagtacctgttcaaattcaactctagttttgaaattcatgatgatacagaggtgttgatgtggatgggaatgacatttggcctagaatcggggagctgcagtgccgaagatctgaaaatggcgcggaacttggtgcctaaggcactcgaaccatatgtgaccgagatggcccagggaaccttcggtggagtatttactaccgcaggatcaaggtcaaatggcacttggctttctgcctcagatcttacaaacatagcaataggtatgctcgcaacctcctcaggggggagccagtactctggaagtcgggtagaaacgcctgctgtggaggaggaagaggaggaagataataacgatgatgacctgagtgaaaacgatgaggacgattag

SEQ ID NO: 191713 - DNA, 1218 bp, Artificial Sequence
  derived and/or modified sequence
atggccaagtatgtcagtttgacagaggccaacgaagagttaaaggtacttatggacgagaatcagactagccgaccggtcgccgtccacactagtactgtcaaccctctggggaagcaactcctcccgaaaactttcggacagtcttccgtaaatattgatcagcaggtggtaattggtatgcctcagaggcccgctgcatctaatatccctgttgtcgggagcccaaatccccctagtactcatttcgcatcacagaaccagcatagctactcaagccccccatgggccggtcaacataataggaaaggggaaaaaaatggcatggggctgtgccggttgtccatgaaggtgtgggagacggtacagagaaaagggacaacttcatgccaggaagttgtaggggagttggtggcgaaatttagggccgctagcaatcatgcctcgcccaacgagtccgcctatgatgtcaagaacatcaagaggcgcacctatgacgcgctgaacgtgctgatggctatgaatataatctcccgtgaaaagaagaaaatcaaatggataggccttacaaccaactctgctcagaactgccaaaacctgcgagtggagcgccaaaaacggctggagcgcataaagcagaagcagtctgaactccaacagctcattcttcagcagatcgctttcaagaacctggtcctgcggaatcagtatgtcgaggagcaggtgtcacagagacctctgcccaactcagtcattcatgtaccgtttatcattatctcctcaagtaaaaagaccgtcattaattgttccatcagcgatgataaaagtgaatatctgttcaagtttaattccagctttgagatccacgatgacaccgaggtccttatgtggatgggcatgacctttggcctggagtctggttcctgcagcgctgaagatctgaaaatggcccgaaacctagtgccaaaggccctcgagccatatgttaccgaaatggcacagggaacattcgggggtgtgttcactacagcaggaagtcgatccaacggaacatggctgagtgctagtgacctgaccaacatcgcgatcgggatgctggccacctctagtggcggaagtcaatactccgggtcacgcgtggaaacaccggcagtagaggaagaagaggaagaagacaataatgacgatgatcttagcgaaaatgatgaagacgactag

SEQ ID NO: 191714 - protein, 344 aa, Artificial Sequence
  derived and/or modified sequence
MGVCGYLFLPWKCLVVVSLRLLFLVPTGVPVRSGDATFPKAMDNVTVRQGESATLRCTIDNRVTRVAWLNRSTILYAGNDKWCLDPRVVLLSNTQTQYSIEIQNVDVYDEGPYTCSVQTDNHPKTSRVHLIVQVSPKIVEISSDISINEGNNISLTCIATGRPEPTVTWRHISPKAVGFVSEDEYLEIQGITREQSGDYECSASNDVAAPVVRRVKVTVNYPPYISEAKGTGVPVGQKGTLQCEASAVPSAEFQWYKDDKRLIEGKKGVKVENRPFLSKLIFFNVSEHDYGNYTCVASNKLGHTNASIMLFGPGAVSEVSNGTSRRAGCVWLLPLLVLHLLLKF

SEQ ID NO: 191715 - DNA, 1035 bp, Artificial Sequence
  derived and/or modified sequence
atgggagtgtgcggatatctctttctgccttggaagtgcttggttgtggtctcactccgcctgctgtttctcgtcccaacaggcgtgccagtgaggtcaggggacgctacgttcccaaaagcaatggataatgtcaccgttaggcagggggagagtgccactctgcgttgcacaatcgataatcgtgttacaagagtcgcctggctgaataggtccaccattctgtacgccggaaacgacaaatggtgcttggatccccgtgtcgtattgttatctaacacacagacacagtattccatcgagatccagaatgtggatgtgtatgacgaggggccgtacacttgcagcgtgcagacagataatcatccaaagacgtctagagtgcatctaattgtccaggtgtcaccaaagattgtagagatctcgagcgacataagtataaatgaaggaaataatatctctcttacctgtatcgctaccgggagacccgagcccacagtgacttggagacatatctcacctaaggctgttgggtttgtctccgaagacgaatacctggagatacagggcattactcgcgagcagagcggtgattatgagtgttctgcaagcaacgacgtggcggccccagtggttaggagagtgaaagttaccgtgaactaccccccatatatcagcgaggctaaaggcactggggtgccagtcggtcaaaaggggactctccagtgtgaagccagtgccgttccctctgccgaatttcagtggtacaaagatgacaaacgcctgatcgagggaaaaaaaggcgtaaaagtggagaaccggccttttttgtccaaacttatattcttcaatgtctcagagcatgattatggcaactatacttgcgtcgccagcaacaaactaggccataccaatgcaagtattatgctttttgggcctggtgccgttagtgaagtctcaaatgggacctccaggcgtgctggttgcgtgtggcttctgcctctgctagtgctgcatctgctgctcaagttctag

SEQ ID NO: 191716 - DNA, 1035 bp, Artificial Sequence
  derived and/or modified sequence
atgggcgtgtgtggctacctgttcctgccctggaagtgcctggtggtggtgtccctgcggctgctcttcctggtgcccactggagtgcctgtgcgctctggagatgccaccttccccaaggccatggacaacgtgacagtgcggcagggcgagagcgccaccctgcgctgcaccatcgacaacagagtgaccagggtggcctggctgaacagaagcaccatcctgtatgctggaaatgacaagtggtgcctggacccccgggtggtgctgctgagcaacacccagacccagtacagcattgagatccagaatgtggatgtgtatgatgagggcccctacacctgcagcgtgcagacagacaaccaccccaagaccagccgggtgcacctgattgtgcaggtgagccccaagatcgtggagatcagcagtgacatcagcatcaatgaaggcaacaacatcagcctgacctgcatcgccaccggccggcctgagcccaccgtgacctggaggcacatcagccccaaggctgtgggctttgtgtctgaagatgagtacctggagatccagggcatcacccgggagcagagcggggactatgagtgcagcgccagcaatgatgtggccgcccctgtggtgagaagagtgaaggtgacagtgaactacccaccctacatcagcgaggccaagggcactggagtgcctgtgggccagaagggcaccctgcagtgtgaggccagcgctgtgcccagcgctgagttccagtggtacaaggatgacaagaggctgattgagggcaagaagggcgtgaaggtggagaaccggcccttcctgagcaagctgatcttcttcaacgtgtctgaacatgactatggcaactacacctgtgtggccagcaacaagctgggccacaccaatgccagcatcatgctgtttggacctggagctgtgtctgaggtgtccaatggcaccagcagaagagctggctgtgtgtggctgctgcccctgctggtgctgcacctgctgctgaagttctag

SEQ ID NO: 191717 - DNA, 1035 bp, Artificial Sequence
  derived and/or modified sequence
atgggcgtgtgcggctacctgttcctgccctggaagtgcctggtggttgtgtctctgagattgctattcctggtgcccactggcgttcccgttcgttcaggagacgcaacgtttcccaaagccatggacaacgtcactgtgagacagggagagagtgctacgcttcgttgcacaatcgacaatcgggtgacacgggtggcttggctgaatcgatctaccatcctctatgcagggaatgataagtggtgcctcgacccaagagtggtgctccttagcaatacacagacacagtacagcatcgaaattcagaacgtggatgtgtatgacgaagggccctatacttgttcggtgcagacggataatcatccaaagacgtcaagggttcacctgattgtgcaggtgtctcctaaaatcgttgagatctcctccgacatcagcataaacgaaggaaacaacatttccctgacatgtattgctacaggccgacccgaacccaccgtgacatggaggcacatcagtcctaaggctgtgggcttcgtttccgaggacgaatacctcgagattcagggcatcacccgagagcagtcaggcgattacgaatgtagtgcctccaatgatgtcgccgcgccagtcgtgcgccgcgtgaaggtcacagtaaactaccccccctacattagtgaagctaaaggtacgggggtgcctgttggccaaaaagggacccttcagtgtgaagcgtcggctgtacccagcgcagagtttcagtggtacaaggatgacaaacgactcatagaaggcaagaagggtgtcaaggtggagaaccggccattcctgagtaaactgatcttttttaatgttagtgagcatgactatgggaattacacatgcgttgcaagtaacaaactcggtcacacgaatgcatcaatcatgctatttggtcccggcgctgtaagcgaggttagcaatggcacatcccgaagagcgggctgcgtgtggctactgcccctattggtacttcaccttttattgaagttttag

SEQ ID NO: 191718 - DNA, 3190 bp, Artificial Sequence
  derived and/or modified sequence
aacttacaaagtgttggatgtcccccgttcgaactgagggactgcagaccgcctctgggtagctggatgaagcccaccccgtccccttctggtaccaaagtgcttactcctctccaaagtgccgtgtctgaactgccgctgggaagaagcggctcctgagacgcgcccacacctttcacctgccgcgcgcttccccctcctcggccaccttcccggcggaagcagcgaggagggagccccctttggccgtcctccgtggaaccggttttccgaggctggcaaaagccgaggctggatttgggggaggaatattagactcggaggagtctgcgcgcttttctcctccccgcgcctcccggtcgccgcgggttcaccgctcagtccccgcgctcgctccgcaccccacccacttcctgtgctcgcccggggggcgtgtgccgtgcggctgccggagttcggggaagttgtggctgtcgagaatgggggtctgtgggtacctgttcctgccctggaagtgcctcgtggtcgtgtctctcaggctgctgttccttgtacccacaggagtgcccgtgcgcagcggagatgccaccttccccaaagctatggacaacgtgacggtccggcagggggagagcgccaccctcaggtgcactattgacaaccgggtcacccgggtggcctggctaaaccgcagcaccatcctctatgctgggaatgacaagtggtgcctggatcctcgcgtggtccttctgagcaacacccaaacgcagtacagcatcgagatccagaacgtggatgtgtatgacgagggcccttacacctgctcggtgcagacagacaaccacccaaagacctctagggtccacctcattgtgcaagtatctcccaaaattgtagagatttcttcagatatctccattaatgaagggaacaatattagcctcacctgcatagcaactggtagaccagagcctacggttacttggagacacatctctcccaaagcggttggctttgtgagtgaagacgaatacttggaaattcagggcatcaccagggagcagtcaggggactacgagtgcagtgcctccaatgacgtggccgcgcccgtggtacggagagtaaaggtcaccgtgaactatccaccatacatttcagaagccaagggtacaggtgtccccgtgggacaaaaggggacactgcagtgtgaagcctcagcagtcccctcagcagaattccagtggtacaaggatgacaaaagactgattgaaggaaagaaaggggtgaaagtggaaaacagacctttcctctcaaaactcatcttcttcaatgtctctgaacatgactatgggaactacacttgcgtggcctccaacaagctgggccacaccaatgccagcatcatgctatttggtccaggcgccgtcagcgaggtgagcaacggcacgtcgaggagggcaggctgcgtctggctgctgcctcttctggtcttgcacctgcttctcaaattttgatgtgagtgccacttccccacccgggaaaggctgccgccaccaccaccaccaacacaacagcaatggcaacaccgacagcaaccaatcagatatatacaaatgaaattagaagaaacacagcctcatgggacagaaatttgagggaggggaacaaagaatactttggggggaaaaaagttttaaaaaagaaattgaaaattgccttgcagatatttaggtacaatggagttttcttttcccaaacgggaagaacacagcacacccggcttggacccactgcaagctgcatcgtgcaacctctttggtgccagtgtgggcaagggctcagcctctctgcccacagagtgcccccacgtggaacattctggagctggccatcccaaattcaatcagtccatagagacgaacagaatgagaccttccggcccaagcgtggcgctgcgggcactttggtagactgtgccaccacggcgtgtgttgtgaaacgtgaaataaaaagagcaagaaagaaaaaggaaacaaaataagaccgtctgacagcaacaacggtcccacaaacaagtcacaaaagataccgttaaacttttttttttttttatcattttactacatgaacatcatggataacaagggattctgattcattattaatttcattaattatattttctgatatgagtctagaacttactgcaaaaacaagacaaaactaaaaaaatacaactgagaagggtgaagagaagtatgtttgttaaacagtaaaaatgaatagtatacttcttaactaggtttacaactggtggaccacacaccaggcactaatcacctggtgaggatttggcatatccaccaaaaaatgcatccgatttaaccaacatctccaccagcgctacggactcctcccaattctgacatctcttgcagacaatactatgctctctacacactgtttagaaatggaaaggtgatctgcactgtatcttgggtttgttggctatgcttcctttgatgacatatattatacagtatatatatacatatattttttttgttagagttctagccattttatttctccgcagggtcctttctcagacattactgcatgctgtatatggcgttagctgtgtgttgatcttctaaaagatgatagagtttactggtaattgtgtaatcagctcctgcctttttattttcttgggttatttacatgtcagagacatttataaaaagtgaaaggataaaaaaaaaaaaaaacaactaataccgggcgcagcatctttccaggtgtggctctgcgctaggccaccccaggtggccccgctttctccattctgccctgtggcgttaacagacagcaagcagctgaacaagcagtaccgtcagtacccacttgctttagcccattatgggaatctctgatgcctttgtgaccactggagagtttaatcctcttggtttattttatttcccacctttgtgtgagtgtgtatgaaagagaagaaaatgcaatttttaggtaatcttttttttttttcccctcccctgaaagtctgggaacctgagagtcctcggggaggggtcctggatgtgatgagggaaagggggattgggggatccgggagggtggggttgtctctgacttgacattaaaaagtgttccatgtccctcttca

SEQ ID NO: 191719 - DNA, 1035 bp, Artificial Sequence
  derived and/or modified sequence
atgggagtgtgtggatatctgttcctgccatggaaatgcctggtggtcgtgtccctgaggctgctgttcctggtgccgactggagtgcccgtccgaagcggtgacgccacattcccaaaggcaatggataacgtaactgtgagacagggcgaaagcgctaccctgcggtgtaccatagacaatcgggttacacgcgtggcctggttgaatagatccaccattctctacgccggtaatgacaaatggtgtctcgatccccgtgtagtcctgttaagcaacacgcagacgcagtacagcatcgaaatacagaacgtggacgtctacgacgagggaccgtatacctgttccgttcaaacagacaatcaccctaagactagccgtgttcacctgatagtgcaagtgtcgccaaagatcgttgaaatttcgtctgacatctctattaacgagggaaacaacatatctctaacctgtattgcaactggcagacctgagccaacggtaacttggcgccacatctccccaaaagcagtcggattcgtgagtgaagacgagtacctagagattcaaggcattacccgggagcaaagcggcgattacgaatgctccgcctcaaacgacgtagccgctcctgtcgtgaggcgtgtcaaggttaccgtgaactaccctccctacatatccgaagccaagggtaccggggtgcccgtgggccagaaagggaccttacagtgcgaggctagcgcagtaccatcagcagagtttcaatggtacaaggatgacaagagattgatcgagggaaaaaagggcgtgaaagtcgagaataggccttttctgagtaaactgattttcttcaatgtctctgaacacgattatggaaattacacctgcgtcgcttctaataagctggggcataccaatgcttcgatcatgctctttggacctggcgcagtgagtgaagtgagtaacggaacgagtagacgagctggatgtgtgtggctgttaccgctcctcgtgctccacctgttgctcaagttctag

SEQ ID NO: 191720 - DNA, 1035 bp, Artificial Sequence
  derived and/or modified sequence
atgggcgtgtgcggctacctgttcctgccctggaagtgcctggtggtggtgagcctgagactgctgttcctggtgcccaccggcgtgcccgtgagaagcggcgacgccaccttccccaaggccatggacaacgtgaccgtgagacagggcgagagcgccaccctgagatgcaccatcgacaacagagtgaccagagtggcctggctgaacagaagcaccatcctgtacgccggcaacgacaagtggtgcctggaccccagagtggtgctgctgagcaacacccagacccagtacagcatcgagatccagaacgtggacgtgtacgacgagggcccctacacctgcagcgtgcagaccgacaaccaccccaagaccagcagagtgcacctgatcgtgcaggtgagccccaagatcgtggagatcagcagcgacatcagcatcaacgagggcaacaacatcagcctgacctgcatcgccaccggcagacccgagcccaccgtgacctggagacacatcagccccaaggccgtgggcttcgtgagcgaggacgagtacctggagatccagggcatcaccagagagcagagcggcgactacgagtgcagcgccagcaacgacgtggccgcccccgtggtgagaagagtgaaggtgaccgtgaactaccccccctacatcagcgaggccaagggcaccggcgtgcccgtgggccagaagggcaccctgcagtgcgaggccagcgccgtgcccagcgccgagttccagtggtacaaggacgacaagagactgatcgagggcaagaagggcgtgaaggtggagaacagacccttcctgagcaagctgatcttcttcaacgtgagcgagcacgactacggcaactacacctgcgtggccagcaacaagctgggccacaccaacgccagcatcatgctgttcggccccggcgccgtgagcgaggtgagcaacggcaccagcagaagagccggctgcgtgtggctgctgcccctgctggtgctgcacctgctgctgaagttctag

SEQ ID NO: 191721 - protein, 502 aa, Artificial Sequence
  derived and/or modified sequence
MASKKLGADFHGTFSYLDDVPFKTGDKFKTPAKVGLPIGFSLPDCLQVVREVQYDFSLEKKTIEWAEEIKKIEEAEREAECKIAEAEAKVNSKSGPEGDSKMSFSKTHSTATMPPPINPILASLQHNSILTPTRVSSSATKQKVLSPPHIKADFNLADFECEEDPFDNLELKTIDEKEELRNILVGTTGPIMAQLLDNNLPRGGSGSVLQDEEVLASLERATLDFKPLHKPNGFITLPQLGNCEKMSLSSKVSLPPIPAVSNIKSLSFPKLDSDDSNQKTAKLASTFHSTSCLRNGTFQNSLKPSTQSSASELNGHHTLGLSALNLDSGTEMPALTSSQMPSLSVLSVCTEESSPPNTGPTVTPPNFSVSQVPNMPSCPQAYSELQMLSPSERQCVETVVNMGYSYECVLRAMKKKGENIEQILDYLFAHGQLCEKGFDPLLVEEALEMHQCSEEKMMEFLQLMSKFKEMGFELKDIKEVLLLHNNDQDNALEDLMARAGAS

SEQ ID NO: 191722 - protein, 441 aa, Artificial Sequence
  derived and/or modified sequence
MASKKLGADFHGTFSYLDDVPFKTGDKFKTPAKVGLPIGFSLPDCLQVVREVQYDFSLEKKTIEWAEEIKKIEEAEREAECKIAEAEAKVNSKSGPEGDSKMSFSKTHSTATMPPPINPILASLQHNSILTPTRVSSSATKQKVLSPPHIKADFNLADFECEEDPFDNLELKTIDEKEELRNILVGTTGPIMAQLLDNNLPRGGSGSVLQDEEVLASLERATLDFKPLHKPNGFITLPQLGNCEKMSLSSKVSLPPIPAVSNIKSLSFPKLDSDDSNQKTAKLASTFHSTSCLRNGTFQNSLKPSTQSSASELNGHHTLGLSALNLDSGTEMPALTSSQMPSLSVLSVCTEESSPPNTGPTILDYLFAHGQLCEKGFDPLLVEEALEMHQCSEEKMMEFLQLMSKFKEMGFELKDIKEVLLLHNNDQDNALEDLMARAGAS

SEQ ID NO: 191723 - DNA, 1509 bp, Artificial Sequence
  derived and/or modified sequence
atggccagcaagaagctgggcgccgacttccacggcaccttcagctacctggacgacgtgcccttcaagaccggcgacaagttcaagacccccgccaaggtgggcctgcccatcggcttcagcctgcccgactgcctgcaggtggtgagagaggtgcagtacgacttcagcctggagaagaagaccatcgagtgggccgaggagatcaagaagatcgaggaggccgagagagaggccgagtgcaagatcgccgaggccgaggccaaggtgaacagcaagagcggccccgagggcgacagcaagatgagcttcagcaagacccacagcaccgccaccatgcccccccccatcaaccccatcctggccagcctgcagcacaacagcatcctgacccccaccagagtgagcagcagcgccaccaagcagaaggtgctgagccccccccacatcaaggccgacttcaacctggccgacttcgagtgcgaggaggaccccttcgacaacctggagctgaagaccatcgacgagaaggaggagctgagaaacatcctggtgggcaccaccggccccatcatggcccagctgctggacaacaacctgcccagaggcggcagcggcagcgtgctgcaggacgaggaggtgctggccagcctggagagagccaccctggacttcaagcccctgcacaagcccaacggcttcatcaccctgccccagctgggcaactgcgagaagatgagcctgagcagcaaggtgagcctgccccccatccccgccgtgagcaacatcaagagcctgagcttccccaagctggacagcgacgacagcaaccagaagaccgccaagctggccagcaccttccacagcaccagctgcctgagaaacggcaccttccagaacagcctgaagcccagcacccagagcagcgccagcgagctgaacggccaccacaccctgggcctgagcgccctgaacctggacagcggcaccgagatgcccgccctgaccagcagccagatgcccagcctgagcgtgctgagcgtgtgcaccgaggagagcagcccccccaacaccggccccaccgtgaccccccccaacttcagcgtgagccaggtgcccaacatgcccagctgcccccaggcctacagcgagctgcagatgctgagccccagcgagagacagtgcgtggagaccgtggtgaacatgggctacagctacgagtgcgtgctgagagccatgaagaagaagggcgagaacatcgagcagatcctggactacctgttcgcccacggccagctgtgcgagaagggcttcgaccccctgctggtggaggaggccctggagatgcaccagtgcagcgaggagaagatgatggagttcctgcagctgatgagcaagttcaaggagatgggcttcgagctgaaggacatcaaggaggtgctgctgctgcacaacaacgaccaggacaacgccctggaggacctgatggccagagccggcgccagctag

SEQ ID NO: 191724 - DNA, 1326 bp, Artificial Sequence
  derived and/or modified sequence
atggccagcaagaagctgggcgccgacttccacggcaccttcagctacctggacgacgtgcccttcaagaccggcgacaagttcaagacccccgccaaggtgggcctgcccatcggcttcagcctgcccgactgcctgcaggtggtgagagaggtgcagtacgacttcagcctggagaagaagaccatcgagtgggccgaggagatcaagaagatcgaggaggccgagagagaggccgagtgcaagatcgccgaggccgaggccaaggtgaacagcaagagcggccccgagggcgacagcaagatgagcttcagcaagacccacagcaccgccaccatgcccccccccatcaaccccatcctggccagcctgcagcacaacagcatcctgacccccaccagagtgagcagcagcgccaccaagcagaaggtgctgagccccccccacatcaaggccgacttcaacctggccgacttcgagtgcgaggaggaccccttcgacaacctggagctgaagaccatcgacgagaaggaggagctgagaaacatcctggtgggcaccaccggccccatcatggcccagctgctggacaacaacctgcccagaggcggcagcggcagcgtgctgcaggacgaggaggtgctggccagcctggagagagccaccctggacttcaagcccctgcacaagcccaacggcttcatcaccctgccccagctgggcaactgcgagaagatgagcctgagcagcaaggtgagcctgccccccatccccgccgtgagcaacatcaagagcctgagcttccccaagctggacagcgacgacagcaaccagaagaccgccaagctggccagcaccttccacagcaccagctgcctgagaaacggcaccttccagaacagcctgaagcccagcacccagagcagcgccagcgagctgaacggccaccacaccctgggcctgagcgccctgaacctggacagcggcaccgagatgcccgccctgaccagcagccagatgcccagcctgagcgtgctgagcgtgtgcaccgaggagagcagcccccccaacaccggccccaccatcctggactacctgttcgcccacggccagctgtgcgagaagggcttcgaccccctgctggtggaggaggccctggagatgcaccagtgcagcgaggagaagatgatggagttcctgcagctgatgagcaagttcaaggagatgggcttcgagctgaaggacatcaaggaggtgctgctgctgcacaacaacgaccaggacaacgccctggaggacctgatggccagagccggcgccagctag

SEQ ID NO: 191725 - DNA, 1509 bp, Artificial Sequence
  derived and/or modified sequence
atggcaagtaagaaactaggcgcggacttccacggaacgttcagctacctggacgatgtcccctttaagactggcgataaattcaaaacaccagcaaaggtcggcctgccaatcggattcagcctgccagactgtctgcaggtggttagggaggtgcaatacgacttcagcctcgaaaagaaaactatcgaatgggctgaggagatcaagaagatcgaagaagctgaaagagaagccgagtgcaaaattgccgaagctgaggcaaaagtgaactcaaagtctggcccggagggagacagcaagatgtctttctcgaaaacccatagcacagctacgatgcctcctccgatcaacccaattctggcaagcttgcagcataactctatcctcacccccacccgtgttagcagcagtgccaccaaacagaaggtgcttagccctccccatataaaggctgatttcaacttagccgacttcgagtgtgaagaggatcctttcgacaatcttgagctgaagaccattgatgagaaagaggagctgaggaatatcttggttggaactaccggtcccatcatggctcagctcctcgataataatcttccccggggcggatctgggtccgtgctgcaggacgaagaggtcctcgccagtttagagagggccacactcgactttaagcccctgcataaacctaacgggttcatcacgctaccgcagcttggaaactgtgaaaaaatgtccttgagttccaaagtttctctgcctcccatccccgctgtcagcaatatcaaatccctgagttttccaaagcttgacagcgatgactctaatcagaagactgccaagcttgccagtacattccattccacctcatgcctgcggaatggaacattccagaactcactgaagccctctacacaaagttcagcctctgagttgaacggacaccacactttgggcctgtcagccctgaacctcgactctggcactgaaatgccagcactcacttcatcccagatgccttcgctgtccgtgctgtcagtttgcaccgaagagtcaagccccccaaacacaggtcctacagtcaccccccccaacttttccgtctcacaggtacctaatatgcctagctgcccacaggcgtattccgaactgcagatgctgtcgccttctgaacgccaatgtgttgagaccgtcgtgaacatgggttattcctatgaatgcgtgctcagagctatgaagaaaaagggggaaaacatagaacaaatcctggactacttgtttgcccacggccaattatgtgagaaggggttcgaccccctgctggtggaagaagctttggaaatgcaccagtgctccgaagagaagatgatggagttcctgcagctgatgtccaagttcaaggaaatgggcttcgaacttaaggatatcaaggaggtgctgctgctgcataacaatgatcaagataacgccttggaagacctgatggcgcgcgccggtgcatcatag

SEQ ID NO: 191726 - DNA, 1509 bp, Artificial Sequence
  derived and/or modified sequence
atggcaagcaagaagcttggtgctgactttcacggcaccttcagctatctcgacgatgtgccctttaagacaggtgataagttcaagactccagcaaaagtcgggcttcctattggattctcactacctgattgtctgcaagttgtaagagaggtgcagtacgatttttcactcgagaagaagactatcgagtgggcggaggagattaaaaaaattgaagaggcagagcgcgaagctgaatgcaaaatcgccgaggctgaagccaaagtcaactcaaagagcggcccagagggagattccaagatgagcttcagcaagacacactcaaccgcaacgatgcccccaccaattaatcctatacttgctagcctgcagcataactccattctgacccccactagggtgtcctcatccgcaaccaagcagaaggtgctgtcccctccccacattaaggcagactttaatttggcggactttgaatgtgaggaggacccctttgataatcttgaactgaagactattgacgagaaggaggagttacggaacatcctggtgggtacaacaggtcccatcatggcccagttgcttgacaacaacctcccacgaggcgggagcggaagcgttctgcaggatgaggaagtcctggcatcattagagagagctacgttggattttaagccgctgcataagcctaacggcttcatcaccctgcctcagctcggtaactgtgaaaagatgtcactttctagcaaagtcagtttgcctccgattccggcggtgagtaatatcaaaagcctctccttcccaaagctggacagcgatgactcgaaccagaagaccgcaaaactggcctcaacttttcactccacttcctgtctccgtaatgggactttccagaacagcctgaagccatcaacgcagtcttcagctagcgagctcaatgggcaccatactctggggctgagcgcactaaaccttgacagtggaaccgagatgcccgctctcacatcttcacaaatgccttccctttccgtgttgtctgtctgcaccgaggagagctcgccccccaacactggaccgactgtaactccacctaatttctcggtatctcaggtgcctaacatgccttcctgtccccaagcctattcagagcttcagatgctctctccctccgaaaggcagtgtgtcgagacagtggtcaatatgggctacagttacgagtgcgtgttgcgagcaatgaaaaaaaaaggcgagaacatcgaacagattctcgactacctgttcgcccacggacaactgtgcgaaaagggttttgacccacttctggtggaggaggcactcgagatgcaccagtgttctgaagagaagatgatggagttcctgcagctgatgtccaagttcaaggaaatggggtttgagcttaaagacattaaagaagtcctactcctgcataacaacgatcaagacaatgccctggaagacctgatggccagggccggcgcaagctag

SEQ ID NO: 191727 - DNA, 1326 bp, Artificial Sequence
  derived and/or modified sequence
atggcttccaaaaaattgggagcggacttccacggcacgttttcatacctggatgacgtgccgtttaaaacaggagacaaatttaagactccggctaaagtgggcttacccattggattttccttgccggactgcctccaagtagtgcgggaggtgcaatatgattttagcctggagaagaagaccattgagtgggctgaggagataaaaaaaatcgaggaggccgaacgtgaagcggaatgcaagatcgccgaggctgaggccaaagtgaactctaagtcaggaccggaaggcgacagcaaaatgtcatttagcaaaacacactccaccgcaaccatgccgcctcctattaatccaatcctggcctccttgcagcataatagtatattgacccccacacgggtgagctctagtgccaccaaacagaaagtcctctctcctcctcatattaaagccgacttcaatcttgccgacttcgagtgtgaagaagacccattcgataatctcgagcttaaaacgattgatgagaaggaagaattgaggaatatcctggttggcacaaccggtcccattatggcccagttacttgacaataacctgccacgggggggatctggctcagtgcttcaggacgaagaagttttggctagtctagagcgcgctacgttggacttcaaacctttacataagcctaacggtttcatcacgctccctcaacttggcaattgtgaaaaaatgagcctgtcatctaaggtctccctgcctcccatacccgcagtgagcaacataaagtccctgtcattccccaaattggacagcgacgactccaatcagaaaaccgctaagctggcaagcacgtttcactctaccagttgtcttaggaacgggacatttcagaattccctgaagcctagcacgcagtcatcagcctccgaactgaatggacaccacactctgggcctgagcgccctaaacctggattctggaaccgagatgcccgccttgacctcctcacaaatgccatccctgtctgtactttccgtatgtactgaggaaagttcccctcctaacacaggccccaccattctcgattatctgttcgctcacggccagctgtgcgagaaaggctttgaccccctgttggttgaagaggcactggagatgcaccagtgttctgaggagaagatgatggagtttttgcagctgatgtccaaatttaaagagatgggtttcgaattgaaagacattaaagaagtcctcctgctgcacaacaatgaccaggataatgccctggaggacctgatggctcgggcgggagcttcctag

SEQ ID NO: 191728 - DNA, 1509 bp, Artificial Sequence
  derived and/or modified sequence
atggcatctaagaaattaggagccgactttcatggcaccttttcttacttagatgacgtgcctttcaagacaggggacaaatttaagacccccgccaaagtcggtctgccaatcggattttctctgcctgattgtctgcaggtcgtgagagaggtgcaatatgatttctcgctggagaagaagacaattgaatgggcggaggaaattaagaagatcgaagaagccgagcgggaagccgaatgtaagatcgcggaggctgaagctaaagtcaattccaagagtggcccagagggtgacagtaaaatgagtttttcaaagactcacagtacagctacaatgcctcctcccataaaccccatcctcgcttccttgcagcacaacagcattctgacccctactcgcgtgagtagttctgctaccaaacagaaggtgctgtcaccgccgcacataaaggccgacttcaacctggcggatttcgaatgtgaagaagacccgttcgacaatttggagctcaaaactatcgacgagaaagaggagctacggaacattttggtagggaccaccggccctataatggcccagctcctggacaacaatttaccgcgggggggatccgggagtgtgctccaggacgaggaagtgctagcctcactagaacgcgccactttagactttaaaccgcttcataagccaaacggtttcattaccctgccccagctcgggaattgtgagaagatgtccctctcttccaaggtgtctttaccgcccatccctgcagtgtccaacatcaaaagtctgtctttccctaagcttgactctgatgactcaaaccagaagaccgcgaaactggccagcactttccatagcacctcctgccttagaaacggcactttccagaacagcctgaagccatccacgcagagctcagcctcagaactcaatggtcaccacacacttggactctccgcccttaacctagattcaggtaccgagatgcctgctctgacaagtagccaaatgccttcactatcggtattgagcgtctgcactgaggaaagcagccctcctaacacgggccctaccgtaacaccaccgaatttttccgttagccaagtgcccaatatgccatcgtgccctcaagcctactctgaactacagatgctctccccaagtgaaagacagtgcgttgagacggtcgtaaatatgggctacagttacgagtgcgtgttaagagccatgaagaagaagggagagaacatagaacagattctggactatctcttcgcgcacgggcagctctgtgaaaaaggatttgatcccctgttagtggaggaagccctggagatgcatcaatgctccgaagaaaaaatgatggagttcctgcagctcatgagtaaatttaaggagatgggtttcgaactcaaagatatcaaagaggtgctgctgttacacaataatgaccaggataacgccttggaggacttgatggctagagcgggggccagctag

SEQ ID NO: 191729 - DNA, 1509 bp, Artificial Sequence
  derived and/or modified sequence
atggcctccaaaaagctgggggctgactttcatggcacattcagctacctggatgatgtgccattcaagacaggggataaatttaaaacccccgccaaggtagggctcccaattgggttttccctgcctgattgtttacaggtggtccgggaagtccaatacgacttcagtctcgaaaagaaaacaattgaatgggcggaggagatcaagaaaattgaagaagccgagcgggaggcagagtgtaagattgcggaggccgaggccaaggtcaactctaagtcaggtcctgaaggcgatagcaagatgtccttttccaagacccatagcaccgccaccatgccacctcccatcaatccaatacttgcttcactgcagcacaattccattctgactcctactcgggtgtccagctcagccacaaaacagaaggtcctctcgcctccacatattaaggccgacttcaatctggctgatttcgagtgtgaagaagaccctttcgacaaccttgagctgaagacaatcgatgagaaggaagaattacggaatattttggtaggcacaacaggacctatcatggcccagttgttagacaataacctgccccgcggcggatccggatcagttttgcaggacgaagaagtgctcgcctctctcgaaagagcaaccctggactttaaacctctccacaaaccgaatggcttcattaccctaccgcagctgggcaattgtgagaagatgtctctgtcatcgaaggtgtccttgcccccaatcccagcagtctccaatattaaatccctctcctttccaaaactcgactccgatgatagtaaccagaagaccgctaagcttgcatccactttccatagcactagctgtctgcgcaatggaacatttcaaaattcacttaagccctccactcagtcttctgctagcgagctgaacggtcaccataccctgggcctgagcgctctgaatctcgacagtggaacagagatgccagcactgaccagtagtcagatgccttccttaagtgtgctcagcgtgtgcaccgaggagtcgagcccacccaatactggccctacagttacgcctcccaattttagcgtgagtcaggtgcccaacatgccctcgtgcccacaggcttactccgagctccagatgttgtcgccctctgagagacaatgcgttgagaccgtggttaatatgggctactcttatgaatgcgtgctgagggcaatgaagaagaaaggtgaaaatattgagcagattctggactatctgttcgctcacgggcagttatgcgaaaaagggttcgatcccttgctagtggaggaggctcttgaaatgcaccagtgttctgaggagaagatgatggagttcctccagctgatgtctaagttcaaggaaatgggttttgagctcaaggacattaaggaggttttgttgctacacaacaatgaccaggacaatgccctggaagatttgatggcccgggccggcgccagttag

SEQ ID NO: 191730 - DNA, 1509 bp, Artificial Sequence
  derived and/or modified sequence
atggccagcaagaagctgggcgctgacttccacggcaccttctcctacctggatgatgtgcccttcaagacaggagacaagttcaagaccccagccaaggtgggcctgcccatcggcttcagcctgcctgactgcctgcaggtggtgcgggaggtgcagtatgacttcagcctggagaagaagaccatcgagtgggccgaggagatcaagaagattgaggaggccgagcgggaggccgagtgcaagattgctgaggccgaggccaaggtgaacagcaagagcggccctgagggggacagcaagatgtccttcagcaagacccacagcacagccaccatgcccccacccatcaaccccatcctggccagcctgcagcacaacagcatcctgacccccaccagggtgagcagcagcgccaccaagcagaaggtgctgagccccccccacatcaaggctgacttcaacctggccgactttgaatgtgaggaggacccctttgacaacctggagctgaagaccattgatgagaaggaggagctgaggaacatcctggtgggcaccaccggccccatcatggcccagctgctggacaacaacctgccccggggcggcagcggctctgtgctgcaggatgaggaggtgctggccagcctggagcgggccaccctggacttcaagcccctgcacaagcccaacggcttcatcaccctgccccagctgggcaactgtgagaagatgagcctgagcagcaaggtgtccctgccccccatcccagctgtgagcaacatcaagagcctgtccttccccaagctggacagtgatgacagcaaccagaagacagccaagctggccagcaccttccacagcaccagctgcctgagaaatggcaccttccagaacagcctgaagcccagcacccagagcagcgccagcgagctgaatggccaccacaccctgggcctgagcgccctgaacctggacagcggcacagagatgcctgccctgaccagcagccagatgcccagcctgtctgtgctgtctgtgtgcacagaggagagcagcccccccaacacaggccccaccgtgaccccacccaacttctctgtgtcccaggtgcccaacatgcccagctgcccccaggcctacagcgagctgcagatgctgagccccagcgagcggcagtgtgtggagaccgtggtgaacatgggctacagctatgaatgtgtgctgcgggccatgaagaagaagggggagaacatcgagcagatcctggactacctgtttgcccacggccagctgtgtgagaagggctttgaccccctgctggtggaggaggccctggagatgcaccagtgcagcgaggagaagatgatggagttcctgcagctgatgagcaagttcaaggagatgggctttgagctgaaggacatcaaggaggtgctgctgctgcacaacaatgaccaggacaatgccctggaggacctgatggcccgggccggggccagctag

SEQ ID NO: 191731 - DNA, 1326 bp, Artificial Sequence
  derived and/or modified sequence
atggccagcaagaagctgggcgctgacttccacggcaccttctcctacctggatgatgtgcccttcaagacaggagacaagttcaagaccccagccaaggtgggcctgcccatcggcttcagcctgcctgactgcctgcaggtggtgcgggaggtgcagtatgacttcagcctggagaagaagaccatcgagtgggccgaggagatcaagaagattgaggaggccgagcgggaggccgagtgcaagattgctgaggccgaggccaaggtgaacagcaagagcggccctgagggggacagcaagatgtccttcagcaagacccacagcacagccaccatgcccccacccatcaaccccatcctggccagcctgcagcacaacagcatcctgacccccaccagggtgagcagcagcgccaccaagcagaaggtgctgagccccccccacatcaaggctgacttcaacctggccgactttgaatgtgaggaggacccctttgacaacctggagctgaagaccattgatgagaaggaggagctgaggaacatcctggtgggcaccaccggccccatcatggcccagctgctggacaacaacctgccccggggcggcagcggctctgtgctgcaggatgaggaggtgctggccagcctggagcgggccaccctggacttcaagcccctgcacaagcccaacggcttcatcaccctgccccagctgggcaactgtgagaagatgagcctgagcagcaaggtgtccctgccccccatcccagctgtgagcaacatcaagagcctgtccttccccaagctggacagtgatgacagcaaccagaagacagccaagctggccagcaccttccacagcaccagctgcctgagaaatggcaccttccagaacagcctgaagcccagcacccagagcagcgccagcgagctgaatggccaccacaccctgggcctgagcgccctgaacctggacagcggcacagagatgcctgccctgaccagcagccagatgcccagcctgtctgtgctgtctgtgtgcacagaggagagcagcccccccaacacaggccccaccatcctggactacctgtttgcccacggccagctgtgtgagaagggctttgaccccctgctggtggaggaggccctggagatgcaccagtgcagcgaggagaagatgatggagttcctgcagctgatgagcaagttcaaggagatgggctttgagctgaaggacatcaaggaggtgctgctgctgcacaacaatgaccaggacaatgccctggaggacctgatggcccgggccggggccagctag

SEQ ID NO: 191732 - DNA, 1509 bp, Artificial Sequence
  derived and/or modified sequence
atggccagcaagaagctgggcgccgacttccacggcaccttcagctacctcgacgatgtccccttcaagaccggagacaaattcaagaccccagccaaggtcggcctgcccataggattcagtctccccgattgcttgcaggtggtccgcgaggtgcagtatgatttttctcttgaaaaaaagactattgaatgggcagaggaaattaaaaaaattgaggaagccgaaagggaggctgagtgtaaaatcgcagaagccgaagccaaagtaaactcgaagtccggccctgaaggagatagcaaaatgagcttttctaagacccacagcaccgccacaatgccacccccgattaaccctatcctagcctcactccagcataatagtattcttacacccactcgagtttccagcagcgccaccaagcaaaaggtactaagccccccccacataaaagctgactttaatttggcagactttgaatgtgaggaggaccctttcgataaccttgagctgaagactattgatgaaaaggaggagttacgtaatatcttagtcggaaccacaggacctatcatggcccagctcctggacaacaacttgcctcggggaggctccggatccgtcctccaagatgaggaagtcctggccagccttgaaagggccacactggatttcaagcccctgcacaagcccaacggttttatcacactgccccaactcggcaattgcgagaaaatgtctctctcctctaaggtgtccctcccacccatcccggcggtgtctaatatcaaatccctgtccttcccaaagttggatagcgacgacagcaaccagaaaactgccaaactggccagtacattccattcaacaagctgtctgagaaacggcactttccagaatagtctaaaacccagcacccagagttcagccagcgagctaaatgggcaccacacgttgggactgagcgccctgaatcttgactccggaacggagatgccagcgctcacatcttcgcagatgccttccctctctgttctcagcgtttgcactgaggagtcctcccctccaaataccggccccacagtcacacccccaaactttagtgtttctcaagttcccaacatgccgagctgcccacaggcctattctgagctccaaatgctgagcccgtccgagcggcaatgtgtggagacagtggttaatatgggctattcctatgaatgcgtcctgcgtgctatgaaaaaaaaaggagaaaacatcgaacagatattagattatttatttgcgcatggccagctgtgcgaaaaaggttttgacccactgttagtggaggaggcactggagatgcatcagtgttcagaggagaaaatgatggagttcttgcagctgatgagcaaatttaaagagatgggtttcgaattaaaagacattaaggaagtgttgctgcttcataataatgaccaagacaacgcgcttgaggatcttatggcccgcgccggagcatcttag

SEQ ID NO: 191733 - DNA, 1509 bp, Artificial Sequence
  derived and/or modified sequence
atggccagcaagaagctgggcgccgacttccacggcaccttcagctacctcgacgatgtcccgtttaaaactggcgataagtttaaaacgcctgcgaaggtgggcttgcctatcggtttttctcttcctgattgtttgcaggtggtcagagaggtgcagtacgacttctcgctggagaaaaaaacgattgaatgggccgaggagatcaagaaaatcgaggaggcggagagggaagccgaatgcaagattgccgaagctgaggctaaagtgaacagcaaatcaggtcccgaaggggactcgaagatgagtttcagtaaaacccatagtacggcaacaatgcccccccccataaatccgatcttagccagtctgcagcacaactcaatcctgacaccaacgagagtgagttcctccgccactaaacagaaggtgctgagccctccacacattaaggcagacttcaacctagcagatttcgagtgtgaagaggacccgtttgataatttggagctgaagacaatcgatgaaaaggaggaacttaggaacatcctcgttggaactaccggtccaattatggcgcaattactggacaacaacctcccaagaggggggagcggaagtgttctgcaagatgaagaggtgttagcatcactcgagagagccaccctggactttaagcctctgcataaacctaatgggtttataaccctgccacaactaggaaattgcgagaaaatgtccctgagctccaaggtctcgctgcctcccatacccgctgtgtccaacatcaagtccttgtccttcccgaagctggattctgatgactccaaccagaagacagctaaactggcctccacctttcacagcacaagctgcttgaggaacggcaccttccagaactcactgaagccctctacccaatcctcagcttccgagctgaacggtcatcacacactggggcttagcgccctcaatctcgatagcggcaccgagatgcctgccctgaccagcagccagatgccgtcactatcagtacttagtgtctgcaccgaagagagtagtcctcctaacacagggccaacggtaacacccccgaatttctcagtaagccaagtacctaatatgcccagctgtccgcaggcatatagcgaactccagatgttgtccccgtcggaaaggcagtgcgtggagaccgtcgtgaacatgggatacagctacgagtgtgtattacgagccatgaaaaagaaaggcgaaaacattgaacaaattttggattacctatttgcacacgggcagctctgcgagaagggattcgacccattattagtcgaagaggctctggaaatgcaccagtgcagcgaggagaagatgatggaatttttgcagctcatgtcaaaattcaaggaaatgggcttcgaactcaaagatattaaagaagtcctcctgttgcacaataatgaccaagacaatgccttggaggaccttatggctcgagctggagcctcgtag

SEQ ID NO: 191734 - DNA, 1326 bp, Artificial Sequence
  derived and/or modified sequence
atggccagcaagaagctgggcgccgacttccacggcaccttcagctacctagacgacgtgccatttaagaccggagacaaatttaaaacaccagccaaggtgggcttgcctattggcttttctctgcccgactgtctgcaggtggtacgggaagtacagtacgatttttccctcgaaaagaaaactattgaatgggcagaggagattaaaaagattgaggaagcagagcgcgaggccgagtgcaaaatcgctgaagccgaagccaaggtcaactcgaagtccggacccgagggcgattcaaagatgagcttcagcaaaacacattctaccgccaccatgccaccacctatcaatcccattcttgcctcactccagcacaattcaatactgactccaaccagagtaagcagttcagccactaagcaaaaggtcctgagcccgccccatatcaaggcagattttaacctcgccgattttgaatgtgaggaggatccatttgataatctggagttgaagactattgatgagaaggaagaactccggaacattctcgtcggcaccacgggcccaatcatggctcagctgctggacaacaaccttcctcgcggcggcagcgggagtgtactgcaggatgaggaagtgctagcttccttagagagagccactctcgacttcaagccgttgcataaacccaacggcttcatcaccctccctcagctaggtaactgtgaaaagatgtcattgtcaagcaaggttagcctgccaccaatcccagccgtttccaatattaaaagcttgtccttccccaagttagactcagacgacagcaatcaaaagactgccaagctggcgagtacattccactccactagttgcctccgcaacggcacgtttcagaatagtctcaagccatcaacccagagctcggcttccgagctcaacggtcaccatactcttgggctctctgcccttaatctcgattcagggaccgagatgcctgcgctaaccagctcacagatgccaagcttgagcgtgctgtccgtatgcactgaggaaagttcccccccaaatacggggcctactatactggactatctatttgcacacggccaactgtgtgagaagggctttgacccccttctcgttgaagaggccctcgaaatgcaccagtgtagtgaggaaaagatgatggagtttctgcagctgatgtcaaagttcaaggaaatggggtttgagctgaaagatatcaaggaggtcctgctgctccataataatgaccaggacaatgctttggaagatcttatggcaagagccggagcttcctag

SEQ ID NO: 191735 - DNA, 1509 bp, Artificial Sequence
  derived and/or modified sequence
atggccagcaagaagctgggcgccgacttccacggcaccttcagctacctggacgatgtacccttcaaaactggagataagttcaagaccccagccaaggtgggccttcctatcggattcagcctcccggactgcctgcaggtggtgagggaagttcaatacgatttctccctggagaaaaagaccatcgaatgggccgaggaaatcaagaagattgaggaagcggagcgcgaggctgagtgtaagattgccgaagcggaagcgaaggtgaatagcaaaagtggtcctgagggtgacagcaaaatgagtttcagcaaaacacactctacggccacaatgccgccccctatcaatccgattttagcttcgctgcagcataactcaatcctaactccaacacgtgtgtcttcgtccgcaaccaagcaaaaggttttatcacctcctcatattaaagcggactttaatctcgctgatttcgagtgcgaggaagacccttttgataacttggaactgaagaccatcgatgagaaggaagagctcagaaacattctagtaggaacaactggacctattatggctcaacttttggacaacaatctgccaaggggtgggtctggttcagtgctgcaggatgaagaagtacttgcaagtctcgaacgcgccacacttgattttaagccactgcacaaacccaatggattcatcaccctgccccagttagggaactgcgagaaaatgtctttaagctccaaggtctcgttacccccaatcccagctgtgtcgaacatcaagtccttatcctttccgaaactcgactcagacgacagtaaccagaagactgcaaagttagcatccacttttcattccacctcctgtctccgcaatggaacctttcaaaactctcttaagccctctacgcaaagctccgccagtgagctcaatggccaccacactctgggcttatcggctttgaacctggattctggaacggagatgcctgcactaacgtcaagccagatgccaagcttgagtgtgctttctgtgtgcactgaagagagctccccacctaacacggggccgacagtgacaccgcccaatttcagcgtcagccaggtccccaacatgccttcctgtccgcaggcttactccgagttacagatgctgagccctagcgagcgtcagtgcgtggagaccgtggtaaatatgggatatagttacgaatgcgtacttcgggccatgaagaagaaaggcgagaacatcgagcagatcttggattacctgtttgctcatggccagttgtgtgagaaaggattcgaccccctgcttgtagaggaagctctggagatgcatcagtgtagtgaagaaaagatgatggagttcctgcagctgatgtcaaagtttaaggaaatggggtttgaattgaaagatattaaagaagtgctgttgctacataacaacgaccaggataatgcactcgaagatctaatggctagagccggggcctcttag

SEQ ID NO: 191736 - DNA, 1509 bp, Artificial Sequence
  derived and/or modified sequence
atggccagcaagaagctgggcgccgacttccacggcaccttcagctacctcgacgacgtgcctttcaagaccggggacaaatttaagactccggccaaagttgggctccccattggattttctttgcctgactgcttgcaggtagtgcgtgaagtccagtatgattttagtctggagaaaaaaactatcgagtgggccgaagagattaagaagattgaggaagcagaacgcgaggcggagtgtaagattgctgaggctgaggccaaagtcaactctaagtccggcccggaaggggatagtaagatgagcttctctaagacacacagcacagctactatgcctcctcctattaatccaatcctcgcatcactgcagcataactctattcttactcctaccagagtcagctccagcgccactaagcagaaggtcctgtctccacctcacatcaaagcggatttcaacctcgctgacttcgagtgtgaggaggatcctttcgataatctggaacttaagactattgatgagaaggaggaactgagaaacatactggtggggacaaccggcccaatcatggcgcaactgctcgataataatctgcctaggggcggctccgggtctgtgcttcaagatgaagaagtcctggcctctctcgagcgggctaccctagatttcaagccactccataaacccaatgggtttattacacttcctcagctcggtaactgcgagaaaatgtcgctgtccagtaaggtgagccttcctcctattcctgcagtctcaaacattaaaagcctgtcatttcctaaactcgattccgacgatagcaatcagaagaccgctaaactcgctagcacttttcactctacaagttgccttcgtaacggtacgttccagaactccctcaagccctcgacacagtcctccgcttccgagttgaacgggcaccacacactcggccttagcgcactaaatctagactcaggcactgagatgcccgcgctgacgtcgtcccagatgcccagcctgtctgtgctctccgtttgcactgaagagtcatctccaccaaacactggacctaccgtaacacctcctaatttcagcgtgagccaagtgccaaatatgccatcctgccctcaggcctacagtgagctccagatgctgtcgcctagcgaacggcaatgtgttgagacagtcgtgaacatggggtattcctacgagtgcgttctgcgagcaatgaagaagaaaggagagaacatcgagcagattttggattacctgtttgctcacggacagctttgtgagaaaggattcgatccattgctcgtagaagaagctttggagatgcatcagtgtagcgaagaaaagatgatggagttcttgcaactgatgtccaaatttaaagagatgggctttgaactcaaggatattaaggaagttcttctgctgcataacaacgaccaggacaacgccctcgaggacctgatggctagagccggagcctcttag

SEQ ID NO: 191737 - DNA, 1509 bp, Artificial Sequence
  derived and/or modified sequence
atggctagtaaaaagcttggagccgatttccatggaaccttctcctaccttgacgatgtgcctttcaaaacaggggacaagtttaagaccccggctaaggtcggactgccgatcggcttttcacttccggattgcctgcaggttgttcgcgaggtccaatatgacttttctttggagaaaaaaacaattgaatgggccgaagaaataaagaaaattgaggaagctgagcgagaggcggagtgtaagatcgctgaggccgaggccaaagtgaacagcaagtccggcccagagggagacagcaaaatgagcttttcgaaaacacactctaccgctaccatgcccccacctatcaaccctattctggcctccttgcagcataactcgatcctcactccgacaagagtgtcttcttctgcaacaaagcaaaaagtcctcagcccccctcatattaaagccgatttcaacctggccgattttgagtgcgaagaagaccccttcgacaacctggagcttaaaaccatagacgagaaagaggagctgcggaatatactggttggcacaacaggccctattatggcccaacttttggacaacaacctgcccagaggaggcagcggaagtgtgctgcaggatgaggaagtactcgcgtcgctggagcgggctaccctcgattttaagccgctccacaagcctaatggatttattacactacctcaactagggaattgcgaaaaaatgagcttatccagcaaagtgtctctgccaccaatccccgctgtctccaacatcaagtctctatccttccccaagctggattctgacgatagtaatcagaaaacagctaagctggcgagcacctttcactcaaccagttgccttcggaatgggacgttccaaaactccctgaagcctagtacccagtcttctgcctctgagctaaacggtcatcataccctaggtctatccgccctcaatctagattccgggactgaaatgccagctctcacgtcctcccagatgcctagcctgtcagtccttagcgtatgtactgaggagagctctccacccaacacaggcccaaccgttaccccgccaaacttcagcgtttctcaagtgccaaacatgcccagctgcccacaggcctactcagaactgcagatgctcagcccgtcggaaagacaatgcgtcgaaaccgtcgtgaatatgggctactcttatgagtgtgtgctgagggccatgaagaagaagggggagaatatcgagcagattctggactacctgttcgcacacggacagttatgtgaaaagggattcgatcccctgctggtcgaagaggctctggaaatgcaccagtgctctgaagaaaagatgatggaatttctccagctgatgtctaagttcaaggaaatgggattcgagctgaaggacattaaagaggtgctactgctgcacaacaacgatcaagacaacgcgttggaagatctcatggctagggctggcgcttcctag

SEQ ID NO: 191738 - DNA, 1509 bp, Artificial Sequence
  derived and/or modified sequence
atggccagtaagaaactgggcgcagatttccatgggacatttagctacttagacgatgtccccttcaaaaccggagacaaatttaagacaccagccaaagtgggtttacccattggcttctctttaccggattgcttgcaggttgtgagagaggtgcagtacgattttagcctggagaagaagacgatcgagtgggccgaagagataaaaaagatcgaagaggccgagcgggaagccgagtgtaagattgctgaagcggaggctaaagtcaactcaaagtctggtcccgagggagattccaagatgtctttcagcaagactcactctaccgctacaatgccccctccaatcaatccgattctggcaagccttcaacacaacagcatcctgacccctacccgagtgagtagttccgcaactaaacaaaaggtgctgagcccccctcacataaaagccgattttaatctggcagatttcgaatgcgaagaggatccgtttgacaacctcgagttaaagaccatcgatgagaaagaggaactgcggaacattctcgtaggcaccaccgggccaattatggcccaactactggacaacaatctcccccgtggcggaagtgggagcgtgctacaggatgaggaagtgttggcttccctagagcgtgcgaccttagacttcaagcccttgcacaagcccaatggtttcataaccctgcctcaactggggaactgtgagaagatgtctctgtcctccaaagtaagcctgccccctattcctgccgtatcgaacattaagagtctgtcctttccgaagctcgactcggacgattcaaatcagaagaccgccaaactggcctctacttttcatagtactagctgtctgaggaatggaacgtttcagaactcattaaagcctagtacacagagttcagcaagtgagctcaatgggcaccacacacttggattgagtgcacttaacttggattcgggcacggagatgcctgcgttgacttcatcccagatgccatcactttccgtgctttccgtgtgtaccgaagaatccagtccgcctaatacaggccctactgtcacaccaccaaacttctcagtcagccaggtgcccaatatgcccagttgtccacaggcctatagtgagctccaaatgttgtctccctccgagcggcagtgtgtggagacagtcgtgaacatggggtatagctatgaatgcgtgctgcgagccatgaagaagaagggggaaaacattgaacagatactggattatttgtttgcccatggtcagctctgcgagaagggattcgacccactcctggtggaagaagccctagagatgcaccagtgttctgaagaaaagatgatggagttccttcaactgatgtcaaagttcaaggaaatgggcttcgagcttaaggatatcaaagaggtcctgcttctccataacaacgatcaggataatgccttagaagatctgatggccagggccggtgcatcatag

SEQ ID NO: 191739 - DNA, 1326 bp, Artificial Sequence
  derived and/or modified sequence
atggctagtaaaaaactgggtgctgatttccatggcactttcagctatctcgatgacgttccctttaagaccggtgacaaatttaaaacccccgctaaggtgggacttcctatcggcttttctttgcctgactgtctgcaggtagttcgagaagtgcagtatgattttagcttggagaagaagaccatcgagtgggccgaggagatcaagaagattgaggaggcagaaagagaggcagagtgcaaaattgcggaagcagaagccaaagtgaactctaaaagcggacctgagggtgactccaaaatgagtttcagtaaaacccactccaccgccaccatgccaccccctatcaatcctatattagcaagcctccagcataattctatccttactccaactagagtatcatccagcgccactaaacaaaaagtcttgtctccaccccacattaaggccgacttcaacctagcagacttcgagtgcgaggaagacccattcgataacttagagctgaaaacaattgacgaaaaggaggaattgcgaaacatcctggtcggaaccacaggacctatcatggcacaactgctggacaataatttgcccagagggggatccggctccgttctgcaggacgaagaggtgctggcatcactcgaaagagctaccttggacttcaaaccacttcataagcccaacggatttatcaccctgccacagttaggaaattgtgagaaaatgtcactgagctcaaaagtcagtctgcctcccataccagctgtgtctaatattaaatccttatcctttcctaagttagatagtgatgattctaatcaaaaaaccgctaagctagcaagcacctttcactcaacttcatgccttagaaacgggacctttcagaactctctaaaacctagcacacagagttctgcgtccgaattaaacgggcatcatacactgggtctgtccgccctcaatctggattccggtaccgagatgccagccctcacaagctctcagatgccctcactgagcgtgctgtcagtctgcacggaagagagttccccccctaacacgggtcctactatcctcgattatctcttcgctcatggacagctctgcgagaaggggtttgaccccctcttggtggaggaggctttagagatgcaccagtgctctgaagagaagatgatggaattcctgcaattaatgtccaagttcaaggagatgggatttgagctgaaggatatcaaagaagtgttactcttacacaataatgatcaagacaacgcactggaagacctcatggcccgtgcaggagcctcgtag

SEQ ID NO: 191740 - DNA, 1509 bp, Artificial Sequence
  derived and/or modified sequence
atggctagcaagaaattgggggcagactttcatgggactttttcctaccttgacgatgtccctttcaagacaggggataaattcaaaaccccagcaaaagtggggttgcctatcggattcagtctgcccgactgcttacaggtggtgagggaagtgcagtatgatttttctctcgagaaaaagaccatagagtgggccgaggagattaaaaagatcgaagaggctgagcgagaggccgaatgtaagatagcagaagctgaggcaaaggtgaactcaaagtctggacctgagggggattccaaaatgagcttctcaaaaactcatagtactgcaactatgcctccgcctatcaaccccatactggcatctctgcagcacaattcaatcctgactcctactagggtttcctcttccgccacaaagcagaaggtgctctccccaccccacattaaggctgattttaacctcgcagattttgagtgtgaagaggaccccttcgacaatctggagctgaagaccatcgatgagaaggaagagctgagaaatattctagtgggcaccaccggcccaattatggctcagctgctagacaataacctgccacggggaggatccggaagcgtattgcaggacgaggaggtgttggcatccctcgaacgcgcaaccttagacttcaagcctctccacaagcccaatggattcattaccctgccacagttaggcaattgcgaaaaaatgtcattaagtagtaaggtcagcctgccaccaatccccgcagtctcgaacatcaaatcactgagctttcccaagcttgatagcgatgacagtaaccaaaaaacagcaaagctcgcctctacctttcactcaaccagctgcttgaggaatgggaccttccaaaacagtttgaaacctagtacacagagcagcgcctctgagttgaacggacaccatacgttggggctttcagctctgaatttggacagcgggaccgaaatgcccgctcttaccagctcccagatgccgtcccttagcgttctctcagtctgtaccgaggaatctagcccaccgaataccggacccaccgttactcccccaaacttcagcgtgtcacaggttccaaatatgccaagctgtccccaggcttacagcgagttgcagatgctttcgccatcagagaggcagtgcgtagaaacagtcgtgaacatgggttactcttatgagtgcgtgttacgggcaatgaagaaaaagggagagaacatcgagcagattctggactatctgtttgcacacgggcagctgtgcgaaaagggatttgatccacttctcgtggaggaggcactggagatgcaccaatgctccgaggagaaaatgatggaattcctgcagttgatgagtaagttcaaggagatgggattcgaactgaaagacatcaaggaggtgctgcttctgcataacaatgatcaggacaacgctctggaggaccttatggccagggctggtgcatcgtag

SEQ ID NO: 191741 - DNA, 1509 bp, Artificial Sequence
  derived and/or modified sequence
atggcgagtaaaaaactaggagccgactttcatgggacgttttcatatctcgacgatgtccccttcaagactggggataagtttaagacacctgctaaggtgggcttacccatcggctttagcctgcccgactgccttcaggtcgtgagagaggtgcagtatgacttttctctcgagaagaaaaccattgagtgggccgaagaaatcaaaaagattgaagaggctgagcgcgaagcagaatgcaagatcgccgaagccgaggcaaaggttaattccaaatccgggccagagggcgattccaaaatgtctttcagtaagacacatagtaccgccacaatgccgcctcccatcaacccgattctggctagtttgcagcataactcgatcttgacacccacacgagtgagcagttccgcgaccaaacagaaggtgctctcgccaccccacattaaggccgactttaaccttgccgacttcgaatgcgaggaggaccctttcgacaatctggagttgaaaactattgatgagaaagaggagctgagaaacatcctcgtgggcaccactgggccaatcatggctcaattgctcgacaacaacctgccaaggggcggtagcggaagcgttctacaagacgaggaagtcctggcatcattggagcgcgctaccctagattttaaaccacttcacaagcccaatggcttcattaccctgcctcaacttgggaattgtgaaaaaatgagcctgtcctcgaaagtctccctgcctcctattccagcagttagcaatatcaagtccctgtcctttccaaagctagatagcgatgactcgaatcaaaagaccgcgaagctcgcaagtacctttcactcaacaagctgcctccgaaacggcacatttcagaacagtcttaagccgtccactcaatcatcagccagcgaattgaatggccaccacacactaggactcagcgcgcttaatctggatagtggcaccgagatgcctgcactgaccagttcccagatgccttcactctcggtgttgtccgtgtgcactgaggaatctagccctccaaacacgggacccaccgtaacaccccctaacttctcagtgtctcaggtcccaaatatgccttcctgtccccaggcatatagcgagttgcaaatgctcagtccttcggaaagacagtgcgtggagacagttgtgaatatgggatatagttatgaatgtgtgctgcgcgcaatgaaaaagaaaggggagaacatcgagcagatcctggactacttgtttgctcatggccaactgtgcgagaagggctttgaccctctgctcgtcgaggaggccttggagatgcaccagtgcagcgaggagaaaatgatggaatttctccagctcatgtctaaatttaaagaaatgggctttgagctgaaggacataaaagaagtactcctactgcataacaatgaccaggataacgccctggaagacctgatggccagagccggtgcttcctag

SEQ ID NO: 191742 - DNA, 2735 bp, Artificial Sequence
  derived and/or modified sequence
aaatgagtggggcggtgaggggaaggaggagggaagtaggacttcaacatggcggctgcggcactggcggtggctacggtgacggcctggcccggagcgggcagagttggaggtggtggcgttcgctctccctaggggctgtcgggagctcagcggggaccgagcctgggaggccggccggtgccagcacctttcggcttctgagacggcggcagcagcggcattcaggttctaaatggcttctaagaagttgggtgcagattttcatgggactttcagttaccttgatgatgtcccatttaagacaggagacaaattcaaaacaccagctaaagttggtctacctattggcttctccttgcctgattgtttgcaggttgtcagagaagtacagtatgacttctctttggaaaagaaaaccattgagtgggctgaagagattaagaaaatcgaagaagccgagcgggaagcagagtgcaaaattgcggaagcagaagctaaagtgaattctaagagtggcccagagggcgatagcaaaatgagcttctccaagactcacagtacagccacaatgccacctcctattaaccccatcctcgccagcttgcagcacaacagcatcctcacaccaactcgggtcagcagtagtgccacgaaacagaaagttctcagcccacctcacataaaggcggatttcaatcttgctgactttgagtgtgaagaagacccatttgataatctggagttaaaaactattgatgagaaggaagagctgagaaatattctggtaggaaccactggacccattatggctcagttattggacaataacttgcccaggggaggctctgggtctgtgttacaggatgaggaggtcctggcatccttggaacgggcaaccctagatttcaagcctcttcataaacccaatggctttataaccttaccacagttgggcaactgtgaaaagatgtcactgtcttccaaagtgtccctcccccctatacctgcagtaagcaatatcaaatccctgtctttccccaaacttgactctgatgacagcaatcagaagacagccaagctggcgagcactttccatagcacatcctgcctccgcaatggcacgttccagaattccctaaagccttccacccaaagcagtgccagtgagctcaatgggcatcacactcttgggctttcagctttgaacttggacagtggcacagagatgccagccctgacatcctcccagatgccttccctctctgttttgtctgtgtgcacagaggaatcatcacctccaaatactggtcccacggtcacccctcctaatttctcagtgtcacaagtgcccaacatgcccagctgtccccaggcctattctgaactgcagatgctgtcccccagcgagcggcagtgtgtggagacggtggtcaacatgggctactcgtacgagtgtgtcctcagagccatgaagaagaaaggagagaatattgagcagattctcgactatctctttgcacatggacagctttgtgagaagggcttcgaccctcttttagtggaagaggctctggaaatgcaccagtgttcagaagaaaagatgatggagtttcttcagttaatgagcaaatttaaggagatgggctttgagctgaaagacattaaggaagttttgctattacacaacaatgaccaggacaatgctttggaagacctcatggctcgggcaggagccagctgagaccaggccctgcctaggccctgccgcagaaccaccatccctgggaggccctgcagagcccacctgtggggaaagagaaggggcagcttccggattttcttttgggggttagaaggtcaggtgtggagactgctcgccagtctctgtgagcctaggccctgagctggggaggtggggaagattcgggcatgtgagtgcccccagaactgtcctggctccttccgtattaaacgcatttgcattttgagaagtgtccttcccacttcagccctccggagagactaccctagtctttctggggtgtttatgtcctcagctgaagcctggcctagttgctgagaggggctggggagatggggcgggagggccagactcagtgctgctgtggagctaggtgcttcccccttcccctgagactggtggactgaactccagtcaagttgagttcaagtgaaagattcttccagggttttattttttcccctcctaacaaagtctcatagtgttaacactggttctgcaatatctctgaggtgcaaagaatgcacttttccctatggggcccagagtttgccttttctgccaggcagtcaccatgcttccctaccccagcctgtttcttttggcttggtttggaccacagtcctctgctacccagggttttagagcccctgctctaggaaacagtttaagaaatcattggccccttcccagcacattgaatgggtaagcagacaggccatgatttagttggccagcactaactccacctctgttctccttgaacagcttcccctccagcccactgctttaggatgacacaatgaataacacctagtcatagaaatcagtctctctggtttgttttgtattatgttgtacatcattaaagatctaaatacaaaggatatacagtcttgaatctaaaataatttgctaactaactattttgattcttcagagagaactactaataaaaatctaaaaggta

SEQ ID NO: 191743 - DNA, 2535 bp, Artificial Sequence
  derived and/or modified sequence
ctcagcctcccaagtagctgggactacaggttctaaatggcttctaagaagttgggtgcagattttcatgggactttcagttaccttgatgatgtcccatttaagacaggagacaaattcaaaacaccagctaaagttggtctacctattggcttctccttgcctgattgtttgcaggttgtcagagaagtacagtatgacttctctttggaaaagaaaaccattgagtgggctgaagagattaagaaaatcgaagaagccgagcgggaagcagagtgcaaaattgcggaagcagaagctaaagtgaattctaagagtggcccagagggcgatagcaaaatgagcttctccaagactcacagtacagccacaatgccacctcctattaaccccatcctcgccagcttgcagcacaacagcatcctcacaccaactcgggtcagcagtagtgccacgaaacagaaagttctcagcccacctcacataaaggcggatttcaatcttgctgactttgagtgtgaagaagacccatttgataatctggagttaaaaactattgatgagaaggaagagctgagaaatattctggtaggaaccactggacccattatggctcagttattggacaataacttgcccaggggaggctctgggtctgtgttacaggatgaggaggtcctggcatccttggaacgggcaaccctagatttcaagcctcttcataaacccaatggctttataaccttaccacagttgggcaactgtgaaaagatgtcactgtcttccaaagtgtccctcccccctatacctgcagtaagcaatatcaaatccctgtctttccccaaacttgactctgatgacagcaatcagaagacagccaagctggcgagcactttccatagcacatcctgcctccgcaatggcacgttccagaattccctaaagccttccacccaaagcagtgccagtgagctcaatgggcatcacactcttgggctttcagctttgaacttggacagtggcacagagatgccagccctgacatcctcccagatgccttccctctctgttttgtctgtgtgcacagaggaatcatcacctccaaatactggtcccacggtcacccctcctaatttctcagtgtcacaagtgcccaacatgcccagctgtccccaggcctattctgaactgcagatgctgtcccccagcgagcggcagtgtgtggagacggtggtcaacatgggctactcgtacgagtgtgtcctcagagccatgaagaagaaaggagagaatattgagcagattctcgactatctctttgcacatggacagctttgtgagaagggcttcgaccctcttttagtggaagaggctctggaaatgcaccagtgttcagaagaaaagatgatggagtttcttcagttaatgagcaaatttaaggagatgggctttgagctgaaagacattaaggaagttttgctattacacaacaatgaccaggacaatgctttggaagacctcatggctcgggcaggagccagctgagaccaggccctgcctaggccctgccgcagaaccaccatccctgggaggccctgcagagcccacctgtggggaaagagaaggggcagcttccggattttcttttgggggttagaaggtcaggtgtggagactgctcgccagtctctgtgagcctaggccctgagctggggaggtggggaagattcgggcatgtgagtgcccccagaactgtcctggctccttccgtattaaacgcatttgcattttgagaagtgtccttcccacttcagccctccggagagactaccctagtctttctggggtgtttatgtcctcagctgaagcctggcctagttgctgagaggggctggggagatggggcgggagggccagactcagtgctgctgtggagctaggtgcttcccccttcccctgagactggtggactgaactccagtcaagttgagttcaagtgaaagattcttccagggttttattttttcccctcctaacaaagtctcatagtgttaacactggttctgcaatatctctgaggtgcaaagaatgcacttttccctatggggcccagagtttgccttttctgccaggcagtcaccatgcttccctaccccagcctgtttcttttggcttggtttggaccacagtcctctgctacccagggttttagagcccctgctctaggaaacagtttaagaaatcattggccccttcccagcacattgaatgggtaagcagacaggccatgatttagttggccagcactaactccacctctgttctccttgaacagcttcccctccagcccactgctttaggatgacacaatgaataacacctagtcatagaaatcagtctctctggtttgttttgtattatgttgtacatcattaaagatctaaatacaaaggatatacagtcttgaatctaaaataatttgctaactaactattttgattcttcagagagaactactaataaaaatctaaaaggt

SEQ ID NO: 191744 - DNA, 2526 bp, Artificial Sequence
  derived and/or modified sequence
gaggagggaagtaggacttcaacatggcggctgcggcactggcggtggctacggtgacggcctggcccggagcgggcagagttggaggtggtggcgttcgctctccctaggggctgtcgggagctcagcggggaccgagcctgggaggccggccggtgccagcacctttcggcttctgagacggcggcagcagcggcattcaggttctaaatggcttctaagaagttgggtgcagattttcatgggactttcagttaccttgatgatgtcccatttaagacaggagacaaattcaaaacaccagctaaagttggtctacctattggcttctccttgcctgattgtttgcaggttgtcagagaagtacagtatgacttctctttggaaaagaaaaccattgagtgggctgaagagattaagaaaatcgaagaagccgagcgggaagcagagtgcaaaattgcggaagcagaagctaaagtgaattctaagagtggcccagagggcgatagcaaaatgagcttctccaagactcacagtacagccacaatgccacctcctattaaccccatcctcgccagcttgcagcacaacagcatcctcacaccaactcgggtcagcagtagtgccacgaaacagaaagttctcagcccacctcacataaaggcggatttcaatcttgctgactttgagtgtgaagaagacccatttgataatctggagttaaaaactattgatgagaaggaagagctgagaaatattctggtaggaaccactggacccattatggctcagttattggacaataacttgcccaggggaggctctgggtctgtgttacaggatgaggaggtcctggcatccttggaacgggcaaccctagatttcaagcctcttcataaacccaatggctttataaccttaccacagttgggcaactgtgaaaagatgtcactgtcttccaaagtgtccctcccccctatacctgcagtaagcaatatcaaatccctgtctttccccaaacttgactctgatgacagcaatcagaagacagccaagctggcgagcactttccatagcacatcctgcctccgcaatggcacgttccagaattccctaaagccttccacccaaagcagtgccagtgagctcaatgggcatcacactcttgggctttcagctttgaacttggacagtggcacagagatgccagccctgacatcctcccagatgccttccctctctgttttgtctgtgtgcacagaggaatcatcacctccaaatactggtcccacgattctcgactatctctttgcacatggacagctttgtgagaagggcttcgaccctcttttagtggaagaggctctggaaatgcaccagtgttcagaagaaaagatgatggagtttcttcagttaatgagcaaatttaaggagatgggctttgagctgaaagacattaaggaagttttgctattacacaacaatgaccaggacaatgctttggaagacctcatggctcgggcaggagccagctgagaccaggccctgcctaggccctgccgcagaaccaccatccctgggaggccctgcagagcccacctgtggggaaagagaaggggcagcttccggattttcttttgggggttagaaggtcaggtgtggagactgctcgccagtctctgtgagcctaggccctgagctggggaggtggggaagattcgggcatgtgagtgcccccagaactgtcctggctccttccgtattaaacgcatttgcattttgagaagtgtccttcccacttcagccctccggagagactaccctagtctttctggggtgtttatgtcctcagctgaagcctggcctagttgctgagaggggctggggagatggggcgggagggccagactcagtgctgctgtggagctaggtgcttcccccttcccctgagactggtggactgaactccagtcaagttgagttcaagtgaaagattcttccagggttttattttttcccctcctaacaaagtctcatagtgttaacactggttctgcaatatctctgaggtgcaaagaatgcacttttccctatggggcccagagtttgccttttctgccaggcagtcaccatgcttccctaccccagcctgtttcttttggcttggtttggaccacagtcctctgctacccagggttttagagcccctgctctaggaaacagtttaagaaatcattggccccttcccagcacattgaatgggtaagcagacaggccatgatttagttggccagcactaactccacctctgttctccttgaacagcttcccctccagcccactgctttaggatgacacaatgaataacacctagtcatagaaatcagtctctctggtttgttttgtattatgttgtacatcattaaagatctaaatacaaaggatatacagtcttgaatctaaaataatttgctaactaactattttgattcttcagagagaactactaataaaaatctaaaaggt

SEQ ID NO: 191745 - DNA, 2898 bp, Artificial Sequence
  derived and/or modified sequence
agacgcccaaatgagtggggcggtgaggggaaggaggagggaagtaggacttcaacatggcggctgcggcactggcggtggctacggtgacggcctggcccggagcgggcagagttggaggtggtggcgttcgctctccctaggggctgtcgggagctcagcggggaccgagcctgggaggccggccggtgccagcacctttcggcttctgagacggcggcagcagcggcattcagtttttggtatcagtgttatgctgatctcatacgagaacttggaattcagcaacattcattcagcaggagttactgagcactactgtggccgggcactatgcttggtgtaatggtgaatgagacagaagtggtatttgtcctcgtagtgcataaaggttctaaatggcttctaagaagttgggtgcagattttcatgggactttcagttaccttgatgatgtcccatttaagacaggagacaaattcaaaacaccagctaaagttggtctacctattggcttctccttgcctgattgtttgcaggttgtcagagaagtacagtatgacttctctttggaaaagaaaaccattgagtgggctgaagagattaagaaaatcgaagaagccgagcgggaagcagagtgcaaaattgcggaagcagaagctaaagtgaattctaagagtggcccagagggcgatagcaaaatgagcttctccaagactcacagtacagccacaatgccacctcctattaaccccatcctcgccagcttgcagcacaacagcatcctcacaccaactcgggtcagcagtagtgccacgaaacagaaagttctcagcccacctcacataaaggcggatttcaatcttgctgactttgagtgtgaagaagacccatttgataatctggagttaaaaactattgatgagaaggaagagctgagaaatattctggtaggaaccactggacccattatggctcagttattggacaataacttgcccaggggaggctctgggtctgtgttacaggatgaggaggtcctggcatccttggaacgggcaaccctagatttcaagcctcttcataaacccaatggctttataaccttaccacagttgggcaactgtgaaaagatgtcactgtcttccaaagtgtccctcccccctatacctgcagtaagcaatatcaaatccctgtctttccccaaacttgactctgatgacagcaatcagaagacagccaagctggcgagcactttccatagcacatcctgcctccgcaatggcacgttccagaattccctaaagccttccacccaaagcagtgccagtgagctcaatgggcatcacactcttgggctttcagctttgaacttggacagtggcacagagatgccagccctgacatcctcccagatgccttccctctctgttttgtctgtgtgcacagaggaatcatcacctccaaatactggtcccacggtcacccctcctaatttctcagtgtcacaagtgcccaacatgcccagctgtccccaggcctattctgaactgcagatgctgtcccccagcgagcggcagtgtgtggagacggtggtcaacatgggctactcgtacgagtgtgtcctcagagccatgaagaagaaaggagagaatattgagcagattctcgactatctctttgcacatggacagctttgtgagaagggcttcgaccctcttttagtggaagaggctctggaaatgcaccagtgttcagaagaaaagatgatggagtttcttcagttaatgagcaaatttaaggagatgggctttgagctgaaagacattaaggaagttttgctattacacaacaatgaccaggacaatgctttggaagacctcatggctcgggcaggagccagctgagaccaggccctgcctaggccctgccgcagaaccaccatccctgggaggccctgcagagcccacctgtggggaaagagaaggggcagcttccggattttcttttgggggttagaaggtcaggtgtggagactgctcgccagtctctgtgagcctaggccctgagctggggaggtggggaagattcgggcatgtgagtgcccccagaactgtcctggctccttccgtattaaacgcatttgcattttgagaagtgtccttcccacttcagccctccggagagactaccctagtctttctggggtgtttatgtcctcagctgaagcctggcctagttgctgagaggggctggggagatggggcgggagggccagactcagtgctgctgtggagctaggtgcttcccccttcccctgagactggtggactgaactccagtcaagttgagttcaagtgaaagattcttccagggttttattttttcccctcctaacaaagtctcatagtgttaacactggttctgcaatatctctgaggtgcaaagaatgcacttttccctatggggcccagagtttgccttttctgccaggcagtcaccatgcttccctaccccagcctgtttcttttggcttggtttggaccacagtcctctgctacccagggttttagagcccctgctctaggaaacagtttaagaaatcattggccccttcccagcacattgaatgggtaagcagacaggccatgatttagttggccagcactaactccacctctgttctccttgaacagcttcccctccagcccactgctttaggatgacacaatgaataacacctagtcatagaaatcagtctctctggtttgttttgtattatgttgtacatcattaaagatctaaatacaaaggatatacagtcttgaatctaaaataatttgctaactaactattttgattcttcagagagaactactaataaaaatctaaaaggta

SEQ ID NO: 191746 - DNA, 2866 bp, Artificial Sequence
  derived and/or modified sequence
agacgcccaaatgagtggggcggtgaggggaaggaggagggaagtaggacttcaacatggcggctgcggcactggcggtggctacggtgacggcctggcccggagcgggcagagttggaggtggtggcgttcgctctccctaggggctgtcgggagctcagcggggaccgagcctgggaggccggccggtgccagcacctttcggcttctgagacggcggcagcagcggcattcagacggaatttcactcttattgcccaggctggagtgcaatggcgtgatctcggctcactgcaacctctgcctcctgggttcaagcgattctcctgcctcagcctcccgagtagctgggattacaggttctaaatggcttctaagaagttgggtgcagattttcatgggactttcagttaccttgatgatgtcccatttaagacaggagacaaattcaaaacaccagctaaagttggtctacctattggcttctccttgcctgattgtttgcaggttgtcagagaagtacagtatgacttctctttggaaaagaaaaccattgagtgggctgaagagattaagaaaatcgaagaagccgagcgggaagcagagtgcaaaattgcggaagcagaagctaaagtgaattctaagagtggcccagagggcgatagcaaaatgagcttctccaagactcacagtacagccacaatgccacctcctattaaccccatcctcgccagcttgcagcacaacagcatcctcacaccaactcgggtcagcagtagtgccacgaaacagaaagttctcagcccacctcacataaaggcggatttcaatcttgctgactttgagtgtgaagaagacccatttgataatctggagttaaaaactattgatgagaaggaagagctgagaaatattctggtaggaaccactggacccattatggctcagttattggacaataacttgcccaggggaggctctgggtctgtgttacaggatgaggaggtcctggcatccttggaacgggcaaccctagatttcaagcctcttcataaacccaatggctttataaccttaccacagttgggcaactgtgaaaagatgtcactgtcttccaaagtgtccctcccccctatacctgcagtaagcaatatcaaatccctgtctttccccaaacttgactctgatgacagcaatcagaagacagccaagctggcgagcactttccatagcacatcctgcctccgcaatggcacgttccagaattccctaaagccttccacccaaagcagtgccagtgagctcaatgggcatcacactcttgggctttcagctttgaacttggacagtggcacagagatgccagccctgacatcctcccagatgccttccctctctgttttgtctgtgtgcacagaggaatcatcacctccaaatactggtcccacggtcacccctcctaatttctcagtgtcacaagtgcccaacatgcccagctgtccccaggcctattctgaactgcagatgctgtcccccagcgagcggcagtgtgtggagacggtggtcaacatgggctactcgtacgagtgtgtcctcagagccatgaagaagaaaggagagaatattgagcagattctcgactatctctttgcacatggacagctttgtgagaagggcttcgaccctcttttagtggaagaggctctggaaatgcaccagtgttcagaagaaaagatgatggagtttcttcagttaatgagcaaatttaaggagatgggctttgagctgaaagacattaaggaagttttgctattacacaacaatgaccaggacaatgctttggaagacctcatggctcgggcaggagccagctgagaccaggccctgcctaggccctgccgcagaaccaccatccctgggaggccctgcagagcccacctgtggggaaagagaaggggcagcttccggattttcttttgggggttagaaggtcaggtgtggagactgctcgccagtctctgtgagcctaggccctgagctggggaggtggggaagattcgggcatgtgagtgcccccagaactgtcctggctccttccgtattaaacgcatttgcattttgagaagtgtccttcccacttcagccctccggagagactaccctagtctttctggggtgtttatgtcctcagctgaagcctggcctagttgctgagaggggctggggagatggggcgggagggccagactcagtgctgctgtggagctaggtgcttcccccttcccctgagactggtggactgaactccagtcaagttgagttcaagtgaaagattcttccagggttttattttttcccctcctaacaaagtctcatagtgttaacactggttctgcaatatctctgaggtgcaaagaatgcacttttccctatggggcccagagtttgccttttctgccaggcagtcaccatgcttccctaccccagcctgtttcttttggcttggtttggaccacagtcctctgctacccagggttttagagcccctgctctaggaaacagtttaagaaatcattggccccttcccagcacattgaatgggtaagcagacaggccatgatttagttggccagcactaactccacctctgttctccttgaacagcttcccctccagcccactgctttaggatgacacaatgaataacacctagtcatagaaatcagtctctctggtttgttttgtattatgttgtacatcattaaagatctaaatacaaaggatatacagtcttgaatctaaaataatttgctaactaactattttgattcttcagagagaactactaataaaaatctaaaaggta

SEQ ID NO: 191747 - protein, 102 aa, Artificial Sequence
  derived and/or modified sequence
MADWARAQSPGAVEEILDRENKRMADSLASKVTRLKSLALDIDRDAEDQNRYLDGMVRAHGVRVSVPCPSTTCCRACSVSFSTGAGGWSNHHFCVILLGFLP

SEQ ID NO: 191748 - DNA, 309 bp, Artificial Sequence
  derived and/or modified sequence
atggccgactgggccagagcccagagccccggcgccgtggaggagatcctggacagagagaacaagagaatggccgacagcctggccagcaaggtgaccagactgaagagcctggccctggacatcgacagagacgccgaggaccagaacagatacctggacggcatggtgagagcccacggcgtgagagtgagcgtgccctgccccagcaccacctgctgcagagcctgcagcgtgagcttcagcaccggcgccggcggctggagcaaccaccacttctgcgtgatcctgctgggcttcctgccctag

SEQ ID NO: 191749 - DNA, 309 bp, Artificial Sequence
  derived and/or modified sequence
atggcagattgggcacgggctcagagccctggtgccgttgaggagatcttggacagagagaataagcggatggccgactctctggccagtaaggtgacccgactgaagtctcttgccttggatattgacagagacgccgaagaccagaatagatacctcgacgggatggtgcgcgcccatggcgtgagagtgtcggtgccatgtccatccaccacctgctgcagagcctgctccgtgagcttttctacaggcgccggcggctggagcaaccatcacttttgtgtgattctgctgggatttctgccatag

SEQ ID NO: 191750 - DNA, 309 bp, Artificial Sequence
  derived and/or modified sequence
atggctgactgggcccgggcccagagccctggagctgtggaggagatcctggaccgggagaacaagaggatggctgacagcctggccagcaaggtgacccggctgaagagcctggccctggacatcgacagagatgctgaggaccagaaccgctacctggatggcatggtgcgggcccacggcgtgcgggtgtctgtgccctgccccagcaccacctgctgccgggcctgcagcgtgtccttcagcactggagctgggggctggagcaaccaccacttctgtgtgatcctgctgggcttcctgccctag

SEQ ID NO: 191751 - DNA, 309 bp, Artificial Sequence
  derived and/or modified sequence
atggccgactgggcccgggcccagagccccggcgccgtggaggagatcttagacagagagaataaacgcatggctgattccctggccagcaaggttaccagacttaaatccctagccttagatattgatcgtgatgccgaagaccagaaccgctatctggacggcatggtccgggcccacggagtgagagtcagtgtcccctgtcctagcaccacgtgctgtcgggcttgttccgtaagcttcagcactggagcaggcggatggtccaaccatcatttttgcgttatactactagggttcctgccttag

SEQ ID NO: 191752 - DNA, 309 bp, Artificial Sequence
  derived and/or modified sequence
atggctgactgggccagagcacagtctccaggcgctgtggaagaaatcctggaccgcgagaacaaaaggatggccgatagtctggctagcaaagtgacacgcctgaagagccttgcacttgacatcgatcgagatgctgaggatcagaacagatacctagatggaatggtgcgcgcacacggtgtgcgcgtttccgtcccatgccctagcacaacttgctgtcgggcttgcagtgtgagcttttccaccggcgctggcggatggagcaaccatcacttttgcgttatcctactcggctttttgccgtag

SEQ ID NO: 191753 - DNA, 2916 bp, Artificial Sequence
  derived and/or modified sequence
ccacgtctgaggcggctgtggccgcgtcggtgtccgcgtcgaggagccggggcagggcacgatggcggactgggctcgggctcagagcccgggcgctgtggaagagattctagaccgggagaacaagcgaatggctgacagcctggcctccaaagtcaccaggctcaaatcgctcgccctggacatcgatagggatgcagaggatcagaaccggtacctggatggcatggtaagggcccacggtgtgcgtgtatcagtgccctgccctagcactacctgctgcagagcctgcagtgtctccttcagcactggtgcgggtgggtggtcaaatcaccacttctgtgtgatcttgctgggattcctcccttaggactcggatttcacaagcatgaccagcctgcttacagggagcgtgaagcgcttttccacaatggcaaggtccggacaagacaaccggaagcttctatgtggcatggccgtgggtctaattgtggccttcttcatcctctcctacttcttgtccagggcaaggacgtgagccagtgggagctggtgtctgtgggtgccaagggcagccagggtcttccctgcctggtgttttgggctccagaggacttacctacaaaatactcctttgcaatgataattgtgggtcaggaatcttcttcctgtgtggcaggaggctgcggctgcctgtgacctgatgagctcatgttggctggtcccatgtgtgaaagggactctctcggggaaaccaaggcccagcccctcccccctcccccaggtgctagagagccaggcagagctggggccacagcgtgtctggagaagccaggtctgagcagagcagctggtgaatcccagacgtggccacctgtggcttgcagcccttctccccgcgcttgggactctgacatcttaaggctgcacggtcgtgtccttgtctgggtgaggccatgtctgtgatccaaggttcctggaactgacacaggaaggggctgtgaaccctaagtgggtgtcatctcctccgaccgaggcttctcaccctggagatggcagttactcctggccatggttgctgagcatgggcagaccagtggaggccaccctactgtgttatctgcgccttcgatgaagtgagacccttggggagaacgggctgtggatgaaggagtggactgcagccttggcctagccactgggctgggatcttctgggtcatgtgactgtgtatccaggagcagaaacttgtattctcaggattcaggatctacccagcaccaaagatgtattttcaggagaacagacctagaaatgggcctgtctggcatttcagagtcaggcaaagcaggcagggccagggagcttctgtgggtctacacaagaaggttcctgtgagggctatcagttgttgccttctagcttgctggtaactttggcgcctccgccaagccctgccagactcccctggctgtgatggcattctgtgccatcctccttgtccccagcctctgcaggatgccctccctacccacctctccctgggccttccctgtccactgggctggattcatgttcaaaccactggactggcagggcaacgacttcttcccacctcaagatgaggtcctcgcccccttgtcttggcataaaaacacctttaaagcatgagccatgtgcttctttgcccttctctgtcctgttccaatcttctgcctcccagtcactccctggggactatgggatcactgtccccccacctgtgtggccacaccatatgtcctgtcaatccagaactgcctctgagctccaggctgaccacagatcagccacagcctgatgcctgcagccccactttgctcacccttcccctcccctcctccttccttccacacagcaagcctacctttctccatccatgctcaccatagcccccttccttgtgacctggaccctccattgtacctggctgagactgtcagcctcctggaggagtggggtccaccttcttcttgccctatgcagtgcaagctcacttctcacccagcaaggttgactcatctgcctccatgtctctggggctttgctgttgccctgaaacctagctgggctggtcttgctcccagcttgcttccccctcctcggatgtccctttgcaggcccctgtcgttcctccggcaccagtgtccttggctgccatggcaagctcatcaggggcttgtaccctggtcaccaagcatggtagcagctgcctgcattgtatctccatctggtcactgcaggtgccaacccttcatcccccatgttttcctgggccatggagggctgacctccgtttctggggaatgtggctgagctgtggtaaccagctacaccccaggtgctctttccatggtggtgcctgctcatcttgctgatgcaaactaggaagttaggctgcatctcggagtggctttcgctggagaggtgctttgctgtctctcagactcagtcactgtgttccctccccgcctctcttatctccatggctgtttgcagctctcccaggtactttggggtctgagctggaattcctttgtggtttgctcttctgcttctcactcttgtattaagaaggattccacaaagggagagtggcatccctgctgctgctgtgccagaccagagtttcctgaggggccctgaccctaaccctccagctcagccctgtacacctgaccctgtaaatgagtggggtttgctgactgtaatccctgacaccagtaaaaccaaaaggactcttgggggctcagtgtgagagccagggttacctactctgccaagtgaggacaaactgctaggctgtatcccataatttcaggatgagaaacattaacaataaaaatttgtagtaaacataacctcatgaagaactaa

SEQ ID NO: 191754 - protein, 1188 aa, Artificial Sequence
  derived and/or modified sequence
MLNGAGLDKALKMSLPRRSRIRSSVGPVRSSLGYKKAEDEMSRATSVGDQLEAPARTIYLNQPHLNKFRDNQISTAKYSVLTFLPRFLYEQIRRAANAFFLFIALLQQIPDVSPTGRYTTLVPLIIILTIAGIKEIVEDFKRHKADNAVNKKKTIVLRNGMWHTIMWKEVAVGDIVKVVNGQYLPADVVLLSSSEPQAMCYVETANLDGETNLKIRQGLSHTADMQTREVLMKLSGTIECEGPNRHLYDFTGNLNLDGKSLVALGPDQILLRGTQLRNTQWVFGIVVYTGHDTKLMQNSTKAPLKRSNVEKVTNVQILVLFGILLVMALVSSAGALYWNRSHGEKNWYIKKMDTTSDNFGYNLLTFIILYNNLIPISLLVTLEVVKYTQALFINWDTDMYYIGNDTPAMARTSNLNEELGQVKYLFSDKTGTLTCNIMNFKKCSIAGVTYGHFPELAREPSSDDFCRMPPPCSDSCDFDDPRLLKNIEDRHPTAPCIQEFLTLLAVCHTVVPEKDGDNIIYQASSPDEAALVKGAKKLGFVFTARTPFSVIIEAMGQEQTFGILNVLEFSSDRKRMSVIVRTPSGRLRLYCKGADNVIFERLSKDSKYMEETLCHLEYFATEGLRTLCVAYADLSENEYEEWLKVYQEASTILKDRAQRLEECYEIIEKNLLLLGATAIEDRLQAGVPETIATLLKAEIKIWVLTGDKQETAINIGYSCRLVSQNMALILLKEDSLDATRAAITQHCTDLGNLLGKENDVALIIDGHTLKYALSFEVRRSFLDLALSCKAVICCRVSPLQKSEIVDVVKKRVKAITLAIGDGANDVGMIQTAHVGVGISGNEGMQATNNSDYAIAQFSYLEKLLLVHGAWSYNRVTKCILYCFYKNVVLYIIELWFAFVNGFSGQILFERWCIGLYNVIFTALPPFTLGIFERSCTQESMLRFPQLYKITQNGEGFNTKVFWGHCINALVHSLILFWFPMKALEHDTVLTSGHATDYLFVGNIVYTYVVVTVCLKAGLETTAWTKFSHLAVWGSMLTWLVFFGIYSTIWPTIPIAPDMRGQATMVLSSAHFWLGLFLVPTACLIEDVAWRAAKHTCKKTLLEEVQELETKSRVLGKAVLRDSNGKRLNERDRLIKRLGRKTPPTLFRGSSLQQGVPHGYAFSQEEHGAVSQEEVIRAYDTTKKKSRKK

SEQ ID NO: 191755 - protein, 968 aa, Artificial Sequence
  derived and/or modified sequence
MRCPGPRLLETSWRHPPAPFTSTNRHLYDFTGNLNLDGKSLVALGPDQILLRGTQLRNTQWVFGIVVYTGHDTKLMQNSTKAPLKRSNVEKVTNVQILVLFGILLVMALVSSAGALYWNRSHGEKNWYIKKMDTTSDNFGYNLLTFIILYNNLIPISLLVTLEVVKYTQALFINWDTDMYYIGNDTPAMARTSNLNEELGQVKYLFSDKTGTLTCNIMNFKKCSIAGVTYGHFPELAREPSSDDFCRMPPPCSDSCDFDDPRLLKNIEDRHPTAPCIQEFLTLLAVCHTVVPEKDGDNIIYQASSPDEAALVKGAKKLGFVFTARTPFSVIIEAMGQEQTFGILNVLEFSSDRKRMSVIVRTPSGRLRLYCKGADNVIFERLSKDSKYMEETLCHLEYFATEGLRTLCVAYADLSENEYEEWLKVYQEASTILKDRAQRLEECYEIIEKNLLLLGATAIEDRLQAGVPETIATLLKAEIKIWVLTGDKQETAINIGYSCRLVSQNMALILLKEDSLDATRAAITQHCTDLGNLLGKENDVALIIDGHTLKYALSFEVRRSFLDLALSCKAVICCRVSPLQKSEIVDVVKKRVKAITLAIGDGANDVGMIQTAHVGVGISGNEGMQATNNSDYAIAQFSYLEKLLLVHGAWSYNRVTKCILYCFYKNVVLYIIELWFAFVNGFSGQILFERWCIGLYNVIFTALPPFTLGIFERSCTQESMLRFPQLYKITQNGEGFNTKVFWGHCINALVHSLILFWFPMKALEHDTVLTSGHATDYLFVGNIVYTYVVVTVCLKAGLETTAWTKFSHLAVWGSMLTWLVFFGIYSTIWPTIPIAPDMRGQATMVLSSAHFWLGLFLVPTACLIEDVAWRAAKHTCKKTLLEEVQELETKSRVLGKAVLRDSNGKRLNERDRLIKRLGRKTPPTLFRGSSLQQGVPHGYAFSQEEHGAVSQEEVIRAYDTTKKKSRKK

SEQ ID NO: 191756 - DNA, 3567 bp, Artificial Sequence
  derived and/or modified sequence
atgttaaatggcgcaggcttggataaggccctcaaaatgtccctgcctcgccggagccgcatccgttcaagtgtggggcccgttagatcctctctgggttataagaaggctgaagacgagatgagccgtgctacatccgttggcgatcagttagaagccccggctaggacaatctacctgaaccagcctcacttgaataagttccgggacaaccagatttctactgctaagtactctgtgctcacatttctccctcggttcctctatgaacagatccgccgtgctgcaaacgcattttttcttttcatagcgctactgcaacagattcccgatgtgtctccaactggtcgttatacaactctcgtgccactgatcattattctgactatcgccggcattaaagagattgtcgaagacttcaagagacataaggccgataacgcagtgaataaaaagaaaactatcgtgctgcggaacggaatgtggcatacaatcatgtggaaggaggtagcagtaggagacattgttaaagtggtcaacggccaatacttgcctgccgatgtggtgctgctgtcaagcagcgaacctcaggccatgtgctacgttgaaaccgctaacttggacggcgagacaaatctcaagatcagacagggactgagccacaccgccgatatgcagacacgcgaggtactcatgaagctgagtgggaccatcgaatgtgaagggcctaatcgacacctctacgacttcaccggcaacctcaatctcgacggcaaatccttagtcgctcttggccccgatcagatccttcttcgaggcactcagctgcggaacacacagtgggtgtttggtatcgtagtatatacaggccacgacactaaacttatgcagaactcgactaaggctcctctcaaacggtcaaacgtcgaaaaggtcaccaatgtacagattcttgtgcttttcggcattctgctggtaatggcgcttgtttccagcgctggagcactgtactggaaccggagccacggcgagaagaactggtatatcaaaaaaatggacactacttctgataacttcggttacaatctcctcactttcattatcctgtacaacaacctgatcccaataagccttcttgtcacgctggaagtggtgaaatatacgcaggcgcttttcataaattgggatacagacatgtactacatcgggaacgacactcccgctatggcacgcactagcaacctgaatgaagagttgggacaggttaaatacttgttcagcgacaaaactgggacgttaacctgcaacattatgaactttaaaaagtgcagcatcgcaggggtgacctatggccacttccctgaactcgcccgtgagccttcgagtgacgacttctgtagaatgcctcccccttgctccgactcttgtgattttgacgatccacgactcctcaagaacattgaggatagacaccccactgccccctgcattcaggagtttctgaccctcctggctgtgtgtcataccgtggttccagaaaaggacggggacaacatcatttatcaggcctcctcaccagacgaagccgcgctggtgaaaggcgctaaaaaactggggttcgtgtttacggcacgtacgccgttctctgttataattgaagcaatggggcaggaacagacattcggcatcttgaacgtactggaattcagtagtgaccgaaaacgcatgtccgtgatcgtgaggacccctagcggaaggctgcgcctgtattgcaaaggggcggacaacgtgatcttcgagcgcctctccaaggacagtaagtacatggaggagacactctgtcacctggaatatttcgcaacagaaggtctgcgcacactctgcgtggcgtacgccgatctaagcgagaatgaatatgaggagtggcttaaggtgtaccaggaagcctcaaccatcctgaaagaccgggcccagcgtctcgaggaatgttatgaaatcattgagaaaaaccttctcctcttgggagcaactgcgatcgaggacagactccaggctggtgttcctgagacaatcgctacccttttaaaggccgagatcaaaatctgggtccttactggagataagcaagagaccgccattaacatcggttacagttgtcgcctggtgtcacagaatatggcactcatcttattaaaagaggactccctggacgcaacgagggccgccattacacagcactgcaccgacttaggtaacttactgggcaaggaaaatgatgtggctctcattattgatggccatacactgaagtacgccctgtccttcgaggttcggcgatccttcctcgatttggctctctcgtgcaaggccgttatttgctgtcgggtgagtccactacagaaaagcgagattgtggatgttgtcaagaaacgagtaaaggcaatcactcttgccatcggcgatggggctaatgatgtgggaatgatccagactgcacacgtgggggtaggcattagcggcaatgaaggcatgcaggccaccaataattcagattatgccattgctcagttctcttatctagagaaacttttgctggtccacggtgcttggtcatataaccgggtgaccaaatgcattctctattgcttctataaaaacgtggtcctgtacatcatagagttatggtttgcttttgtaaatgggtttagtgggcagattctgttcgaacgctggtgcattggcctgtacaatgtcatctttaccgccttgccacctttcactcttggcatcttcgaacgctcttgcacccaagagtcgatgctcagatttccccagctctataaaatcacccagaacggcgagggattcaacactaaagtgttctggggccactgcattaatgccctggtgcacagtctcatattgttctggttcccaatgaaggctttagaacatgacacagtcctcacctcagggcacgctaccgattatctgttcgtgggaaacattgtctacacgtacgtagttgtcacagtgtgtctgaaagctggcctggagacaactgcttggacaaaattcagtcatctggccgtttgggggtctatgctgacctggctcgtgttttttggcatatatagcacgatatggcctaccataccgatagcacctgatatgcgagggcaggcgaccatggtgttgtcctcagcgcatttctggttgggtttgttcttagtgccaacagcgtgtctcatagaagacgtcgcttggcgggctgccaagcatacatgtaaaaagacattgctggaggaggtccaggagctggagaccaaatcacgtgtactggggaaggcagtgctccgtgactccaacggtaaacgcctaaatgagagagaccggcttatcaaacgtttggggagaaaaacccctcccacgctgttcagggggtcatccctccaacagggtgtgccgcatggctacgcctttagccaggaagaacatggcgctgtatcacaagaagaagtcatccgcgcctacgacactacaaaaaagaaatcccgaaaaaaatag

SEQ ID NO: 191757 - DNA, 2907 bp, Artificial Sequence
  derived and/or modified sequence
atgaggtgtccaggaccacgcctccttgagaccagctggcgccacccaccagctccattcaccagcaccaataggcacctgtatgactttaccggaaacttgaacctcgatggcaagtccctggtagcacttggaccagaccagatccttctccgggggacccagctgagaaacacacagtgggtgttcggcatcgtggtgtatactggtcatgacacaaagttgatgcaaaattccactaaagccccattaaagcgcagcaacgtggagaaggtaactaatgtgcaaattctggtgttattcggcatcctattggtcatggcactggtcagcagcgcgggagccctgtactggaataggagccatggtgaaaagaactggtatataaagaaaatggacacaacctccgacaacttcggatacaacctcctgacattcatcattttgtataacaacttaatcccgatatctctgctcgttactctcgaagtggtgaaatacacacaggctctgttcatcaactgggacaccgacatgtactacatagggaacgatactcccgctatggctcggacgagtaatctgaacgaggagctgggccaggtgaagtatctgttctctgacaaaacaggcacccttacttgtaacattatgaatttcaaaaaatgttcaattgcaggtgtgacctatggccattttcccgagttggcccgggagccttccagcgacgacttctgtcgaatgcctcccccttgttccgactcctgcgattttgatgatcctcgactgctaaagaatatcgaagaccgccacccgacagctccttgcatccaggaattcctgacattgctggccgtttgccatacggttgtaccggagaaggatggggataatatcatctaccaggcaagttctcccgacgaagctgccttggtaaagggagccaaaaagctcggctttgtctttacggcaaggacacctttttcagtgatcatcgaggctatgggtcaggaacagaccttcggaattctgaatgtgcttgaattttccagcgataggaaaagaatgtccgtgatcgttcgcacaccgagcgggcgcctgaggttatattgtaagggcgctgacaatgttattttcgagcgcttgtcaaaagactccaagtacatggaggaaaccctgtgtcatctggaatacttcgccacagaaggcctgcgaaccctgtgtgtggcttatgccgatttatctgaaaatgagtacgaggagtggctgaaagtttaccaggaggcatccacaatcctcaaggatagggcacagagactggaggaatgttatgagataatagaaaaaaacctcctgctactaggagctacagccattgaggatcgtcttcaagcaggcgttcctgagacaattgccacgctgctcaaagctgagatcaaaatctgggtcctgaccggagataagcaggaaactgccataaacatcgggtacagctgtcgacttgtctcacagaatatggcactcatactgctgaaagaggatagcttggatgccacaagagcggcaatcacacaacactgcaccgacttgggaaacttactggggaaagagaacgatgtggccttgataattgacggccacaccctgaaatatgcgctcagcttcgaggtgagacgcagtttcctggatctcgctctgtcgtgtaaggcagtgatctgctgccgagtctcccccctgcagaagtcagagatcgtggatgtggtaaaaaagcgagtgaaggccataaccctggctataggggatggagctaatgatgtcggcatgattcagaccgcacatgttggggtgggaatttcgggcaatgagggtatgcaggccaccaacaacagtgactacgcaattgcgcagttcagttatctggaaaaactgctgctcgtccacggcgcctggtcctacaaccgcgtgaccaagtgcatattgtactgcttttacaaaaacgtcgtattgtacattatcgaattatggttcgcgttcgtgaatggtttcagcggccaaatcctcttcgagagatggtgcattggcttgtacaatgtcatcttcactgcccttcccccattcacactggggatatttgaacgctcctgcactcaggaatctatgctgcggttcccgcaactttataagatcacccagaacggcgaaggtttcaacacaaaggtcttctggggacactgtatcaacgccttggtgcattcactcatcctgttttggttcccaatgaaagctctggaacatgatacagtgttgacaagcggacatgctaccgattatctctttgtcgggaatattgtgtatacttacgtggtggtgaccgtgtgtctgaaggcgggattggagacgactgcatggactaagttctctcatctcgctgtttggggaagcatgctaacctggctggttttcttcgggatctatagcactatatggcctaccatcccaatcgcgccggacatgaggggacaggcaacaatggtactctcctcagctcatttctggcttggcctgttcttggtccccaccgcctgcctgatcgaagacgtcgcgtggagggctgctaaacacacttgcaaaaaaactctcctggaggaggtgcaggagctggagacaaagtcacgagtcttgggaaaagccgttctgagagattccaatgggaagcgcctgaacgaaagagatagactgattaagcgtctcgggcgaaaaactcctcccaccttattccgaggaagtagcctgcagcaaggggtgccccacggctatgccttttcccaagaagagcatggggctgtatcccaggaggaagtgataagggcctatgatacaacaaaaaagaagtcacggaaaaagtag

SEQ ID NO: 191758 - DNA, 3567 bp, Artificial Sequence
  derived and/or modified sequence
atgctgaatggagctggcctggacaaggccctgaagatgagcctgcccaggaggagccgcatccgcagctctgtgggccctgtgcgcagcagcctgggctacaagaaggccgaggatgagatgagccgggccacctctgtgggggaccagctggaggccccagcccggaccatctacctgaaccagccccacctgaacaagttccgggacaaccagatcagcacagccaagtacagcgtgctgaccttcctgccccgcttcctgtatgagcagatcagaagagctgccaatgccttcttcctgttcatcgccctgctgcagcagatcccagatgtgagccccaccggccgctacaccaccctggtgcccctcatcatcatcctgaccatcgccggcatcaaggagatcgtggaggacttcaagaggcacaaggctgacaatgctgtgaacaagaagaagaccatcgtgctgagaaatggcatgtggcacaccatcatgtggaaggaggtggccgtgggggacatcgtgaaggtggtgaatggccagtacctgcctgcagatgtggtgctgctgagcagcagcgagccccaggccatgtgctacgtggagacagccaacctggatggagagaccaacctgaagatccggcagggcctgagccacacagctgacatgcagacccgggaggtgctgatgaagctgagcggcaccattgaatgtgagggccccaacagacacctgtatgacttcaccggcaacctgaacctggatggcaagagcctggtggccctgggccctgaccagatcctgctgcggggcacccagctgaggaacacccagtgggtgtttggaattgtggtgtacacaggccatgacaccaagctgatgcagaacagcaccaaggcccccctgaagaggagcaatgtggagaaggtgaccaacgtgcagatcctggtgctgtttggcatcctgctggtgatggccctggtgagcagcgctggggccctgtactggaacagaagccacggggagaagaactggtacatcaagaagatggacaccaccagtgacaactttggctacaacctgctgaccttcatcatcctgtacaacaacctgatccccatcagcctgctggtgaccctggaggtggtgaagtacacccaggccctcttcatcaactgggacacagacatgtactacatcggaaatgacaccccagccatggcccggaccagcaacctgaatgaggagctgggccaggtgaagtacctgttcagtgacaagacaggcaccctgacctgcaacatcatgaacttcaagaagtgcagcattgctggggtgacctacggccacttccctgagctggcccgggagcccagcagtgatgacttctgcaggatgcccccaccctgcagcgacagctgtgactttgatgacccccggctgctgaagaacatcgaggacagacaccccacagccccctgcatccaggagttcctgaccctgctggccgtgtgccacacagtggtgcctgagaaggatggagacaacatcatctaccaggccagcagcccagatgaagctgccctggtgaagggggccaagaagctgggctttgtgttcaccgcccggacccccttcagcgtcatcatcgaggccatgggccaggagcagaccttcggcatcctgaatgtgctggagttcagcagtgacaggaagaggatgtctgtgattgtgaggacccccagcggccgcctgcggctgtactgcaagggagctgacaacgtcatctttgagcggctgagcaaggacagcaagtacatggaggagaccctgtgccacctggagtactttgccacagagggcctgcggaccctgtgtgtggcctatgctgacctgtctgaaaatgaatatgaggagtggctgaaggtgtaccaggaggccagcaccatcctgaaggaccgggcccagaggctggaggagtgctatgagatcatcgagaagaacctgctgctgctgggcgccacagccatcgaggaccggctgcaggccggcgtgcctgagaccatcgccaccctgctgaaggccgagatcaagatctgggtgctgactggagacaagcaggagacagccatcaacatcggctacagctgccgcctggtgtcccagaacatggccctgatcctgctgaaggaggacagcctggatgccaccagggctgccatcacccagcactgcacagacctgggcaacctgctgggcaaggaaaatgatgtggccctgatcattgatggccacaccctgaagtatgccctgagctttgaggtgcggcgctccttcctggacctggccctgagctgcaaggccgtcatctgctgccgggtgagccccctgcagaagtctgagatcgtggatgtggtgaagaagagggtgaaggccatcaccctggccatcggagatggagccaatgatgtgggcatgatccagacagcccacgtgggcgtgggcatctctggaaatgaaggcatgcaggccaccaacaacagcgactatgccatcgcccagttctcctacctggagaagctgctgctggtgcatggagcctggagctacaacagagtgaccaagtgcatcctgtactgcttctacaagaatgtggtgctgtacatcatcgagctgtggtttgcctttgtgaatggcttcagcggccagatcctgtttgagcgctggtgcatcggcctgtacaacgtcatcttcaccgccctgccccccttcaccctgggcatctttgagaggagctgcacccaggagagcatgctgcgcttcccccagctgtacaagatcacccagaatggagagggcttcaacaccaaggtgttctggggccactgcatcaatgccctggtgcacagcctcatcctcttctggttccccatgaaggccctggagcatgacacagtgctgaccagcggccacgccacagactacctgtttgtgggcaacatcgtgtacacctacgtggtggtgacagtgtgcctgaaggccggcctggagaccacagcctggaccaagttcagccacctggccgtgtggggctccatgctgacctggctggtgttcttcggcatctacagcaccatctggcccaccatccccatcgccccagacatgaggggccaggccaccatggtgctgagcagcgcccacttctggctgggcctcttcctggtgcccacagcctgcctgattgaagatgtggcctggagggctgccaagcacacctgcaagaagaccctgctggaggaggtgcaggagctggagaccaagagccgggtgctgggcaaggctgtgctgcgggacagcaatggcaagaggctgaatgaaagagacaggctcatcaagaggctgggcaggaagaccccacccaccctcttccggggcagcagcctgcagcagggcgtgccccacggctacgccttcagccaggaggagcacggggctgtgtcccaggaggaggtgatccgggcctatgacaccaccaagaagaagagcaggaagaagtag

SEQ ID NO: 191759 - DNA, 2907 bp, Artificial Sequence
  derived and/or modified sequence
atgcgctgccccggcccccggctgctggagacctcctggaggcaccccccagcccccttcaccagcaccaacagacacctgtatgacttcaccggcaacctgaacctggatggcaagagcctggtggccctgggccctgaccagatcctgctgcggggcacccagctgaggaacacccagtgggtgtttggaattgtggtgtacacaggccatgacaccaagctgatgcagaacagcaccaaggcccccctgaagaggagcaatgtggagaaggtgaccaacgtgcagatcctggtgctgtttggcatcctgctggtgatggccctggtgagcagcgctggggccctgtactggaacagaagccacggggagaagaactggtacatcaagaagatggacaccaccagtgacaactttggctacaacctgctgaccttcatcatcctgtacaacaacctgatccccatcagcctgctggtgaccctggaggtggtgaagtacacccaggccctcttcatcaactgggacacagacatgtactacatcggaaatgacaccccagccatggcccggaccagcaacctgaatgaggagctgggccaggtgaagtacctgttcagtgacaagacaggcaccctgacctgcaacatcatgaacttcaagaagtgcagcattgctggggtgacctacggccacttccctgagctggcccgggagcccagcagtgatgacttctgcaggatgcccccaccctgcagcgacagctgtgactttgatgacccccggctgctgaagaacatcgaggacagacaccccacagccccctgcatccaggagttcctgaccctgctggccgtgtgccacacagtggtgcctgagaaggatggagacaacatcatctaccaggccagcagcccagatgaagctgccctggtgaagggggccaagaagctgggctttgtgttcaccgcccggacccccttcagcgtcatcatcgaggccatgggccaggagcagaccttcggcatcctgaatgtgctggagttcagcagtgacaggaagaggatgtctgtgattgtgaggacccccagcggccgcctgcggctgtactgcaagggagctgacaacgtcatctttgagcggctgagcaaggacagcaagtacatggaggagaccctgtgccacctggagtactttgccacagagggcctgcggaccctgtgtgtggcctatgctgacctgtctgaaaatgaatatgaggagtggctgaaggtgtaccaggaggccagcaccatcctgaaggaccgggcccagaggctggaggagtgctatgagatcatcgagaagaacctgctgctgctgggcgccacagccatcgaggaccggctgcaggccggcgtgcctgagaccatcgccaccctgctgaaggccgagatcaagatctgggtgctgactggagacaagcaggagacagccatcaacatcggctacagctgccgcctggtgtcccagaacatggccctgatcctgctgaaggaggacagcctggatgccaccagggctgccatcacccagcactgcacagacctgggcaacctgctgggcaaggaaaatgatgtggccctgatcattgatggccacaccctgaagtatgccctgagctttgaggtgcggcgctccttcctggacctggccctgagctgcaaggccgtcatctgctgccgggtgagccccctgcagaagtctgagatcgtggatgtggtgaagaagagggtgaaggccatcaccctggccatcggagatggagccaatgatgtgggcatgatccagacagcccacgtgggcgtgggcatctctggaaatgaaggcatgcaggccaccaacaacagcgactatgccatcgcccagttctcctacctggagaagctgctgctggtgcatggagcctggagctacaacagagtgaccaagtgcatcctgtactgcttctacaagaatgtggtgctgtacatcatcgagctgtggtttgcctttgtgaatggcttcagcggccagatcctgtttgagcgctggtgcatcggcctgtacaacgtcatcttcaccgccctgccccccttcaccctgggcatctttgagaggagctgcacccaggagagcatgctgcgcttcccccagctgtacaagatcacccagaatggagagggcttcaacaccaaggtgttctggggccactgcatcaatgccctggtgcacagcctcatcctcttctggttccccatgaaggccctggagcatgacacagtgctgaccagcggccacgccacagactacctgtttgtgggcaacatcgtgtacacctacgtggtggtgacagtgtgcctgaaggccggcctggagaccacagcctggaccaagttcagccacctggccgtgtggggctccatgctgacctggctggtgttcttcggcatctacagcaccatctggcccaccatccccatcgccccagacatgaggggccaggccaccatggtgctgagcagcgcccacttctggctgggcctcttcctggtgcccacagcctgcctgattgaagatgtggcctggagggctgccaagcacacctgcaagaagaccctgctggaggaggtgcaggagctggagaccaagagccgggtgctgggcaaggctgtgctgcgggacagcaatggcaagaggctgaatgaaagagacaggctcatcaagaggctgggcaggaagaccccacccaccctcttccggggcagcagcctgcagcagggcgtgccccacggctacgccttcagccaggaggagcacggggctgtgtcccaggaggaggtgatccgggcctatgacaccaccaagaagaagagcaggaagaagtag

SEQ ID NO: 191760 - DNA, 3567 bp, Artificial Sequence
  derived and/or modified sequence
atgctgaacggcgccggcctggacaaggccctgaagatgagcctgccacgccgatctaggataagatcgtccgtcgggccggtccgctctagcctgggctacaagaaggccgaagacgaaatgagccgagccacctctgttggagatcaactcgaagctcccgcccggactatctacctgaatcagccccatcttaacaagtttagagataaccaaatttcaactgccaagtattccgtcttaaccttcttgccgaggtttctgtatgaacagatccgaagagccgccaacgccttctttctcttcatcgctttactgcagcagatcccggacgtttctccaactgggagatatactactcttgtgccgcttattattatactgaccatcgccggaatcaaagagatcgtcgaagattttaaaaggcataaagcggataacgcagtcaacaagaaaaaaaccattgtgctccggaacggaatgtggcacaccataatgtggaaggaggttgctgtgggtgacatcgtgaaggtggttaatgggcagtacttgccagctgacgtggtgctccttagcagttcagaaccccaagctatgtgttacgtggagaccgctaatttagatggggaaactaacctaaaaatccgccagggactttctcacactgcggacatgcagacccgcgaagtgctgatgaagttgtccgggaccattgagtgtgagggtcccaacagacacctatatgacttcacggggaacttgaatctggacggaaagtccctggttgccctgggacccgatcaaattttgctgaggggcacgcagctgcgcaacacccagtgggtgtttggcatcgtcgtctataccggccatgacactaaattgatgcaaaattcaaccaaagcaccattgaagaggtcgaatgtggagaaagtgacgaacgttcagattttggtgctcttcggaatcctgctcgtgatggctctggtctccagcgccggagcactgtattggaatcgaagtcacggggaaaaaaattggtatatcaaaaaaatggataccaccagcgacaactttggatacaacctgttgaccttcatcattctgtacaacaaccttatccccatctctctcctggtcactctggaagtggtgaaatacacccaggcgctctttatcaactgggacaccgacatgtactacattggtaatgacaccccagccatggcccggacaagcaatctgaacgaggagctcggccaggtaaaatacctgtttagcgacaagaccggtaccttgacttgtaatataatgaattttaaaaaatgttctattgctggggtgacctacggccactttccagaacttgcacgtgaaccatccagcgatgatttttgtcggatgccacctccatgtagtgatagctgtgacttcgacgaccccagactcctcaagaacatcgaggataggcatcctaccgcgccgtgcatccaggagtttctgacgctgctcgcagtctgccacaccgtcgtcccagagaaggacggggacaatatcatttatcaagcttcatcccccgatgaggcagcactggtcaagggagctaagaagctgggattcgtctttacagcccggaccccttttagcgtcatcatcgaagctatgggccaggaacagaccttcggcatcttaaacgtgctcgagttctcctcagataggaaacggatgagcgtaatcgttcgcacccccagcgggcggctccgactgtactgcaaaggggccgataatgttatttttgaaaggctgtctaaggactctaaatacatggaggaaaccctgtgtcacctggagtattttgcgacggaaggcctgagaactctatgtgtcgcttacgccgatctgagtgagaatgagtacgaggagtggctgaaggtttatcaggaagcatccacaattctcaaagaccgggctcagcgactggaggagtgctacgaaattattgaaaaaaatctcctgcttctgggcgcgacagctatcgaagacagattgcaagccggggtccccgaaacgatcgctacactcctgaaagctgaaatcaagatttgggtcctgacgggggataagcaggaaaccgccatcaacattggctactcttgcaggctcgtgagtcaaaatatggcactcatcctcctgaaggaggacagtttggatgctacccgcgcagcaatcacgcagcactgcacagatctgggaaatctactcggtaaagagaatgacgttgctttgataatcgacggccacacccttaagtacgccctgtcattcgaagtgaggagaagctttttagatttagccctctcctgtaaagcagttatatgttgtagagtcagccctcttcaaaaatccgagattgtagatgtggtgaaaaaaagggtgaaagctatcacactcgcgataggcgacggagctaacgacgtcggtatgatccagactgcccacgtgggtgtgggaatctcaggcaatgaaggcatgcaggctaccaacaactcagattatgctattgctcagttctcttacctcgagaaactcctgctggtccacggggcgtggagttacaacagagtcacaaaatgtattctgtattgtttttataagaacgttgttctgtacatcattgagctgtggtttgccttcgtaaatggttttagcggccagatcctctttgaaagatggtgcatcggcctctacaacgtaatctttactgctttgccaccttttaccttgggaatctttgaaaggagctgtactcaagagagcatgttgcgtttccctcagctgtataagatcactcaaaatggcgaaggttttaacacaaaggtgttctggggccattgcattaatgcactggtacattctcttatactcttttggttccctatgaaagccctggagcacgatacagtgctgacctcgggacatgccaccgattatctctttgtgggcaatatcgtctatacctatgtagtagtgacagtgtgtctgaaggcgggactggaaacaacagcgtggacgaagttttctcatcttgctgtttggggctccatgctcacatggttagtctttttcgggatctattccaccatttggccgaccatccctattgccccagacatgcggggtcaagccactatggtcttatcttctgcgcatttctggctcggcttattccttgtgcctacagcctgtctgattgaagatgtggcctggagagcggctaaacacacatgcaaaaaaactctgctcgaagaagtccaagagctcgaaacgaaatctcgtgtcctaggaaaagccgttctcagagatagcaatggcaagcggttgaacgaaagagaccggctcatcaagaggctaggaagaaagacaccccccaccctgttcagggggagttccttgcagcagggcgtgccacatgggtatgctttctctcaagaggaacatggcgcggttagccaagaagaagtcatacgcgcatacgacaccactaagaagaagagtcggaagaagtag

SEQ ID NO: 191761 - DNA, 2907 bp, Artificial Sequence
  derived and/or modified sequence
atgcggtgccccggcccccggctgctggagaccagctggcggcaccctcctgccccatttacatctaccaatcgccatctctacgacttcaccgggaacctcaatctagatggaaagtccctggtggctttaggccctgaccagatcctgctgcgcggcactcagctcagaaatacccagtgggtgttcggcatagtagtgtatactggccatgacacgaagctcatgcagaacagtaccaaagcccccctcaaacgaagcaatgttgaaaaggttaccaatgttcagatcttagtcttgtttggaatccttctggtgatggcgttggtcagctctgccggtgctctctactggaataggtctcacggagaaaaaaattggtatattaaaaaaatggacacaacctcagataatttcggatacaatctgctgacgtttatcatactctacaataatctgattccaatatctctcttagtgactctcgaagtggtaaaatatacccaggcgctgtttattaattgggatacggacatgtattacattggaaacgatacacccgccatggctcgaacaagcaatctgaatgaggagctgggtcaggtgaagtacctcttctctgataaaactggaactcttacttgtaatattatgaacttcaagaagtgctctatcgcaggcgtgacttatgggcacttccccgaactcgcaagggagcctagtagtgacgatttttgtcgcatgccgccaccatgcagtgatagctgtgatttcgatgatcctcggctattaaaaaatattgaggaccggcacccaacagccccctgcatccaggagtttctgacactcttagcagtttgccacacagtcgtccctgaaaaagacggcgacaacattatataccaggcctcctctcccgatgaggccgcgctggtcaagggtgccaaaaagctggggtttgtgttcacagccagaactcccttcagtgttattattgaggctatgggtcaggagcagacttttggaatactgaacgtgctagagttctctagcgaccgcaagcgaatgagcgtcatagtccggacccctagtgggagactgagattgtactgcaaaggcgctgacaacgttattttcgagagactaagtaaggatagtaaatacatggaagaaactctgtgccacctggaatacttcgctaccgaggggctcagaaccttatgtgtggcttatgctgacttgtccgagaatgagtacgaggaatggctgaaggtgtaccaagaagctagtacaatcctgaaggacagagctcagaggctggaagaatgttatgagattattgaaaaaaatctcctgctgctcggggcaacggcaatcgaggatcgacttcaagcaggtgtgcccgaaactattgccacgctgctaaaggctgagattaagatctgggtgttaactggcgataagcaggaaacagccatcaacatcggatacagctgtagactggttagtcaaaatatggccctgattcttctcaaggaagattccctggatgccacacgggcagccataacacagcactgcacagatctgggcaatctgttagggaaggaaaatgacgtggcactgattatagatgggcacaccctgaagtatgccttgtcatttgaagtgaggaggagtttcctcgacctcgcgttgagctgtaaggctgtgatctgctgtagagttagccccttgcagaagagcgagattgtggatgtagtcaaaaagagggtgaaagccatcaccctggcaataggagatggcgctaatgatgtgggtatgatacagactgcgcacgtgggtgtgggcatctctggcaacgagggtatgcaggctaccaataacagcgactatgcaatcgcccagttctcctacctggagaagctgctcctggtgcatggtgcctggtcttataatagggttactaaatgcattttatactgcttttataagaacgtcgtgctatacattatagagctgtggtttgctttcgtgaatggattcagcgggcagatcctgttcgaaagatggtgtattggactttataacgtgatattcactgctttgcctccgtttactttagggattttcgaacgtagctgcacacaggaaagcatgttgcgcttccctcagttatacaagattacacagaatggagagggcttcaacaccaaggtcttttgggggcattgtattaatgctctcgtgcactctttgatcttgttctggtttcctatgaaagccctggaacatgatactgtgctcacatctggacatgctacagactacctcttcgtggggaacatcgtatacacctatgtcgtagtgaccgtttgtctgaaagcaggacttgagacgacagcgtggacgaaattttctcatttagctgtttggggttctatgctcacatggctcgtgttttttggtatttatagtactatatggccaacaattccaattgcacctgatatgcgggggcaggcaacaatggtattatcttccgcgcacttttggctgggattatttctcgtcccgacggcctgtcttatcgaagatgtcgcctggagggcagctaagcatacatgcaaaaaaaccttgttagaggaagtgcaggagctggagacaaagtctcgcgtgctgggcaaggcagtattgagagattctaacgggaagcgcctgaacgagcgagaccgactgattaagaggttgggccgaaaaactcccccaaccctctttcgtgggagctctctgcagcagggcgtacctcatggatatgcattctcgcaagaggaacacggtgctgtgagccaggaggaggtcatcagggcgtacgacaccacaaagaagaagtctcgcaaaaaatag

SEQ ID NO: 191762 - DNA, 3567 bp, Artificial Sequence
  derived and/or modified sequence
atgttgaatggtgctggactggacaaggccctgaaaatgtctttgccccgtcgatccagaatccggagcagtgttggtcctgtgcgctcaagtctgggttataagaaggccgaggacgaaatgagccgggcaacatctgttggggaccagttggaagcacctgcaagaacaatttatctcaaccagccccatctgaacaaatttagggataatcagatttccacagccaagtattccgtcctgaccttcctaccacggtttctttatgagcagattcgcagggccgctaacgcattcttcctgtttattgctttgttacagcagattccagatgtctcacccacagggagatacaccactttagtacccctgattatcatactgacgatagcaggtatcaaggagatagtggaggatttcaagcgacacaaggccgataatgccgtgaacaagaagaagaccatagtccttaggaatggtatgtggcataccattatgtggaaagaagttgctgtaggcgatattgtcaaagttgtgaatggtcaataccttcccgcagatgtggttctcctgtcttcttcagagcctcaggccatgtgctacgtcgagaccgccaacctcgacggggaaacaaatcttaaaatccggcaggggctatcgcatacagccgacatgcagacgagggaagtactcatgaagctgagtgggaccatagagtgtgaggggccaaacaggcacctgtatgacttcaccggcaatcttaatctggacgggaagagcctggtggctcttggtcccgatcagatactgctgaggggtactcagttgcgaaacacccaatgggtctttggtatcgtggtatacactgggcatgacacaaaattgatgcagaatagtacaaaggccccactgaagagaagcaacgtggagaaagtaactaacgtgcagattctggtcctttttggaatactactcgttatggcacttgttagtagtgcgggtgccctatactggaatagatcacacggagaaaagaactggtacataaaaaaaatggacaccactagcgacaattttgggtataatcttctcacgttcatcatcttatataacaacttgatcccaatcagtctcctcgtgactctggaagtggtgaaatacacccaagctctctttatcaattgggacactgacatgtattacatcgggaatgatacacccgctatggctcggacgagtaatctgaatgaagagttgggtcaggtgaagtatctcttctctgacaaaactggaacactcacatgtaatatcatgaattttaagaaatgtagcattgccggtgtcacttatggtcacttcccagagctcgcaagggaacctagtagcgacgacttctgcaggatgcctcctccatgcagcgattcatgtgactttgacgaccccagactgcttaagaacatagaggataggcaccccaccgcaccctgtatccaagaattccttaccctcctggcagtctgtcacaccgtggtgcccgagaaagatggggacaacatcatataccaagcctcatcccctgatgaagccgctctcgtcaagggagctaagaagcttggattcgtgtttacagcgaggactcccttttctgtgattattgaagctatgggtcaggagcagacatttggtatacttaatgtgctcgagttttcttccgataggaagagaatgtctgttatcgtcagaactccatctggtcggttacggctgtactgtaagggagcagacaacgtgattttcgagcgtctcagtaaggattcaaaatacatggaggaaaccttatgccatctggagtattttgctacagagggactgaggactctttgcgtcgcctacgccgacctgtccgagaatgagtacgaagagtggctgaaagtgtaccaggaagccagcaccatcctgaaagaccgcgctcaaagactggaagaatgctacgaaattatcgaaaaaaacttattactgctaggcgcaactgccattgaggatcgtttgcaggccggagttcccgaaaccattgcgactttgctaaaggctgagatcaaaatctgggtgttgacaggcgataaacaggagacggccatcaacattggatatagctgtaggctagtatcccaaaatatggcactgatcctccttaaggaagacagcctggatgccacacgcgctgctataacccagcattgcacagatctcgggaacctgttaggtaaggaaaatgatgtcgcactaatcatcgatggacatactctcaagtacgcattaagcttcgaggtcaggcggtcctttctcgacctggctctcagctgcaaagccgtaatatgttgtagagtgagccctctgcagaaaagcgagatagtggatgtagttaaaaaaagagttaaagcaatcactctggccatcggggatggcgcaaatgacgttggaatgattcagaccgctcacgtcggggtgggaatttccggcaacgagggtatgcaagcgacgaacaatagtgactacgctatagcccagttctcttatttagagaagctcctgctcgtgcacggcgcttggtcttataatcgcgtgacaaagtgtattctgtactgtttttacaagaatgtcgtgctttacataatcgagctgtggttcgcttttgtgaacggattctctggacagatcctattcgaacggtggtgcatcggcctatacaacgttattttcactgccctgcccccttttaccctgggtatcttcgagaggagttgcacccaagaatctatgcttcggttcccacagctctataagatcacgcagaacggagaagggttcaatactaaggtgttctgggggcattgcatcaacgcacttgtccacagtctcattctcttttggttcccaatgaaggcattagagcacgacacagtgctgacatccggccacgccacagactacttgttcgtcggtaatatcgtttacacatatgtggtggtgacagtttgcctcaaagccggactagaaactacagcctggactaagttttcgcacctcgcggtctggggaagcatgttaacctggctggtcttctttggcatttactccaccatatggcctactatccctatcgcgcctgatatgaggggccaggccaccatggtgctcagctctgcccatttttggctgggtctcttccttgtccctaccgcttgtctcatcgaggacgtggcctggcgcgcagctaaacatacatgcaagaagacactgttggaggaggttcaggaactcgagaccaaatctagagtacttggcaaagctgtcctcagagattctaacggcaagcggttgaatgagagagacagactaataaagaggctgggacggaagacaccacctacacttttccggggatcgtctctacaacagggcgttcctcatggctacgctttcagccaggaggagcacggggctgttagccaggaggaggttatccgtgcttatgataccaccaagaaaaagtcacgcaagaagtag

SEQ ID NO: 191763 - DNA, 2907 bp, Artificial Sequence
  derived and/or modified sequence
atgagatgtcctggacccaggttactggaaaccagttggcggcaccctcctgcaccttttacatccactaatcgacacctgtatgacttcacaggaaatctgaatctggacggcaagtctttggttgcactgggcccagaccagatcctgttgcggggaacccaattaagaaatactcagtgggtcttcgggattgtggtatacactgggcacgatacaaaactcatgcaaaattccactaaagccccactgaagcgctctaatgtggagaaggtcacaaatgtgcaaattctggtcctgttcggtatcctcctggttatggccctggtgagcagtgcgggtgcattgtactggaatcgtagccatggcgaaaagaactggtatatcaaaaagatggacaccacatctgacaatttcgggtacaatctcctgacgttcatcatactttacaataatcttataccaatttccctgttggtgactctggaggtggtgaagtacacacaagccttattcatcaactgggacaccgatatgtattacatcggaaacgatactcccgcaatggcacggaccagtaatctgaacgaagaactggggcaggtgaagtacctgttctcagataagacaggcacactgacttgtaacatcatgaatttcaagaaatgcagtatcgctggtgttacctatggccacttcccagaactggcgagggaaccaagctctgacgacttctgcaggatgcccccaccatgctctgacagctgcgattttgatgatccccgattacttaagaacattgaggaccgacaccccacagcaccatgtatacaggagttccttactctgctggcagtgtgccatacagtcgtccccgagaaggatggtgacaatatcatataccaggcaagttctcctgatgaggcggcactggttaaaggggcaaagaagctgggattcgtgtttacggcccgtacccccttcagtgtgataatagaggccatggggcaggaacagaccttcgggatcctgaacgtcctggaattcagttcagatcgcaaacgtatgagcgtcatagttcggactccatcaggcagactgagactttattgcaaaggagccgacaacgtgatcttcgagcggttatccaaggactcaaaatacatggaggaaactctttgtcacctggagtactttgccacagagggactccggaccttatgtgtggcttatgctgacttaagtgagaatgagtacgaagagtggttgaaggtgtatcaggaggccagtacaattttgaaggatcgggctcagcgcttagaagagtgctatgaaatcatcgagaagaatctcttgcttttgggtgctaccgccatagaagacagactgcaggcaggtgtgcctgagactattgctactcttctgaaagctgaaatcaaaatttgggtgctaacaggagataagcaggagactgctataaacatagggtacagttgcaggctagtgtcccaaaacatggccttaatacttttaaaagaggattctctcgatgccacccgcgctgccataactcaacactgcacagacctcggaaatctcctcggaaaagagaacgacgttgcactgattatcgacgggcacaccttgaagtatgccctctcatttgaggtgcggaggagttttctggacctggcactgtcatgcaaggctgtgatttgctgcagggtgagcccattgcagaagtcagaaattgtggacgtggtgaagaagagggttaaagccatcactctcgcgattggggatggagctaatgacgtgggtatgattcagaccgctcatgtcggagtgggaatcagcggaaacgaggggatgcaagccacaaacaacagtgattacgcaatcgcgcagttttcatacctggaaaaacttttgttggtccacggagcatggagctataatcgggtgacaaaatgtatcttgtactgcttctataaaaatgtcgtgttgtatataatcgagctgtggttcgccttcgtgaacggtttttctggccagattctgttcgagagatggtgtattggcctttataacgtgatatttactgctttacccccatttactctgggaatcttcgagcgatcctgtacgcaggaaagcatgcttaggttcccacaattgtacaagatcactcaaaacggagagggtttcaatactaaggtgttctggggacactgcattaacgcacttgtgcatagcctgatactgttctggttccccatgaaagccctcgagcatgacaccgtcctgacatctggtcacgctaccgactacttatttgtgggtaacattgtgtacacttacgtggtcgtcacagtttgcttaaaggctggacttgagacaaccgcctggacaaaattctcccacctcgccgtttggggaagtatgttaacgtggctggtgttctttggcatctattccacaatttggccaaccattccaatcgccccagatatgagggggcaggcaactatggtgttatcttccgctcacttttggcttggtctgttcttggtacccacagcttgtctcatcgaagacgtcgcctggagagccgctaaacacacctgtaagaagactctcttggaggaagtgcaggagttggagacaaaaagcagagtgctgggaaaagccgtccttagggactccaatggtaagaggctgaatgagcgcgatcgactgatcaagcgccttggtcggaagactcctccaaccctgttccgcggatccagcttgcagcaaggcgttccacatggatatgcttttagtcaagaggaacatggcgctgtaagccaagaagaagtcatcagagcttacgatactacgaaaaagaaatcaaggaagaagtag

SEQ ID NO: 191764 - DNA, 9575 bp, Artificial Sequence
  derived and/or modified sequence
acaggcgccggcggtccccgccagctagcagcccggcgaggcgctggcccacccatggtcctcgggcggcggcccctgcgcccagccctgcgcgtagcctccgtctctcgcccggggccgccgagcccccgacacgggcgagatgctgaacggcgcaggcctggacaaagctcttaagatgtccctgccgcggaggtcgaggatccgctcgtccgtgggacctgttcgttcttctttgggctataagaaggcagaggatgagatgtcccgggccacgtctgttggagaccagctggaggcacccgcccgcaccatttacctcaaccaaccgcatctcaacaaattccgcgacaaccagatcagtacggccaagtacagcgtgttgacatttctacctcgattcttgtatgagcagattagaagagctgctaatgccttctttctcttcattgccttattacagcaaattccagatgtatctccaacaggaagatataccaccctggtgccattgatcattattttaacaattgcaggcatcaaagagattgtagaagattttaagcgacacaaggcagacaatgcagttaacaaaaagaaaacaatagtgttaagaaatggtatgtggcataccattatgtggaaagaggtggcagtgggagacattgtgaaggtcgtcaatgggcagtatcttccagcagatgtggtcctgctgtcatccagtgaacctcaggcaatgtgttatgttgaaacagctaatctggatggggagacgaaccttaaaatacgtcagggtttgagtcacactgctgacatgcaaacacgtgaagttctgatgaagttatctggaactatagagtgtgaagggcccaaccgccacctctatgacttcactggaaacttgaacttagatgggaaaagccttgttgcccttgggcctgaccagatcttattaagaggtacacagcttagaaatactcagtgggtctttggcatagttgtttatactggacacgacaccaaactcatgcagaattcaaccaaagcgcctctcaagagatcaaatgttgagaaggtgactaacgtgcagatcctggtgttgtttggcatcctcttggtcatggccttggtgagctcggcgggggccctgtactggaacaggtctcatggtgaaaagaactggtacatcaagaagatggacaccacctcagataattttggatacaacctactgacgttcatcatcttatacaacaatcttattcccatcagtctgttggtgactcttgaggttgtgaagtatactcaagcccttttcataaactgggacacagatatgtattatataggaaatgacactcctgccatggccaggacatcaaaccttaatgaagagcttgggcaggtgaaatatctcttttctgacaagactggaacgcttacatgcaatatcatgaactttaagaagtgcagcattgccggagtaacctatggtcacttcccagaattggcaagagagccgtcttcagatgacttctgtcggatgcctcctccctgtagtgattcctgtgactttgatgaccccaggctgttgaagaacattgaggatcgccatcccacagccccttgcattcaggagttcctcacccttctggccgtgtgccacacggttgttcctgagaaggatggagataacatcatctaccaggcctcttccccagatgaagctgctttggtgaaaggagctaaaaagctgggctttgtcttcacagccagaacaccattctcagtcatcatagaagcgatgggacaggaacaaacattcggaatccttaatgtcctggaattttctagtgacagaaaaagaatgtctgtaattgttcgaactccttcaggacgacttcggctttactgtaaaggggctgataatgtgatttttgagagactttcaaaagactcaaaatatatggaggaaacattatgccatctggaatactttgccacggaaggcttgcggactctctgtgtggcttatgctgatctctctgagaatgagtatgaggagtggctgaaagtctatcaggaagccagcaccatattgaaggacagagctcaacggttggaagagtgttacgagatcattgagaagaatttgctgctacttggagccacagccatagaagatcgccttcaagcaggagttccagaaaccatcgcaacactgttgaaggcagaaattaaaatatgggtgttgacaggagacaaacaagaaactgcgattaatatagggtattcctgccgattggtatcgcagaatatggcccttatcctattgaaggaggactctttggatgccacaagggcagccattactcagcactgcactgaccttgggaatttgctgggcaaggaaaatgacgtggccctgatcatcgatggccacaccctgaagtacgcgctctccttcgaagtccggaggagtttcctggatttggcactctcgtgcaaagcggtcatatgctgcagagtgtctcctctgcagaagtctgagatagtggatgtggtgaagaagcgggtgaaggccatcaccctcgccatcggagacggcgccaacgatgtcgggatgatccagacagcccacgtgggtgtgggaatcagtgggaatgaaggcatgcaggccaccaacaactcggattacgccatcgcacagttttcctacttagagaagcttctgttggttcatggagcctggagctacaaccgggtgaccaagtgcatcttgtactgcttctataagaacgtggtcctgtatattattgagctttggttcgcctttgttaatggattttctgggcagattttatttgaacgttggtgcatcggcctgtacaatgtgattttcaccgctttgccgcccttcactctgggaatctttgagaggtcttgcactcaggagagcatgctcaggtttccccagctctacaaaatcacccagaatggcgaaggcttcaacacaaaggttttctggggtcactgcatcaacgccttggtccactccctcatcctcttctggtttcccatgaaagctctggagcatgatactgtgttgacaagtggtcatgctaccgactatttatttgttggaaatattgtttacacatatgttgttgttactgtttgtctgaaagctggtttggagaccacagcttggactaaattcagtcatctggctgtctggggaagcatgctgacctggctggtgttttttggcatctactcgaccatctggcccaccattcccattgctccagatatgagaggacaggcaactatggtcctgagctccgcacacttctggttgggattatttctggttcctactgcctgtttgattgaagatgtggcatggagagcagccaagcacacctgcaaaaagacattgctggaggaggtgcaggagctggaaaccaagtctcgagtcctgggaaaagcggtgctgcgggatagcaatggaaagaggctgaacgagcgcgaccgcctgatcaagaggctgggccggaagacgcccccgacgctgttccggggcagctccctgcagcagggcgtcccgcatgggtatgctttttctcaagaagaacacggagctgttagtcaggaagaagtcatccgtgcttatgacaccaccaaaaagaaatccaggaagaaataagacatgaattttcctgactgatcttaggaaagagattcagtttgttgcacccagtgttaacacatctttgtcagagaagactggcgtcagcagccaaaacaccaggaaacacatttctgtggccttagccaagcagtttgttagttacatattccctcgcaaacctggagtgcagaccacaggggaagctatctttgccctcccaactcgtctgcagtgcttagcctaacttttgtttatgtcgttatgaagcattcaactgtgctctgtgaggtgtgaaattaaaaacattatgtttcaccaatatttaaacatcagtactagttgtcctgggagaaagggaaaggagttttatgttgcgtgagaggcccatcctgtgtaattggagcagggcacacttgcttcctgttgagttaactcagaggttaagtccaacgggccacatgcagacttcactgtaggcaggttgctctcctgctttgattcctgttttgtgtgtaaaattggcataaacttcttgattgcagtgaaatcacaaaattctctatcggggtggtcaacctgagaacatttatttgaacctcttagccacatttccagcagggcaaaccaactgatgccctggaagagtcttccgcaccctctccaggtgcactcggcccagtcctgccgccgtgtccaggcgcccctcacccccacacctgctgcatggctggccacaccactcagtgcatggcggccgatgggcagccaacccaaacccgcgcctttccttgttccactgcagactcagatacagatgcgaaaaattccttcttccaccgcccttctcgttctgtaaagaaagaaaagaaacatagcctttctgcatatattctaaacgtctctctgcctctgtctgacatggggccaccccacaggtcagagtggtggtagaaccccttcaggactcccagccgtggtcaggctctgaatactcccttcccaacatccagactgctgggcctttggcatccacttacattagaacccacgtttgtttcagagcacattttggactttcactgttgggaaatgaatgaatttataacatgcctgcacagcgaaggaacacacctgtcgctcttagctctagagtcagaggatgagtaaacccagatgcaagagtataggacattgagtggggagaacaagacgaccacagaagtcctcagaaggagaaggaaggacacggagacactgagaggaggacacagaggaatcgccaccagatctttgcagtagaaactctgaaataggccttgagacccagacaattgtcatgatcagcccagtgtgtatgagagcttaaacaagaccttcacacacagttctaattgaaaagaattccaaacatttcagggaaacacctttttaaaaaatatactgacatggtttcctttctgtatcccatcagtgttagacacaggtacctatcagaatacggcatatcctgaattatctaagacaaggaagtgaagagcggaatcactgactttcccaactgcagagtcccacacttaaatctcaacagaacctagatgtcttcaggcatgaatgtgagcacctggagcccttactaaacaacctgcctggagccctgttctctgctctggttgccaaaccagatttttggatggcctaaatacttgtgggcaactgttactggtgaaaaatgggagtggagagcatgttttggattttcactgtggggaaatgaatgaatttatcacatgactgtgcagcgaaggagcacacctgtcactcttagctctagagtcggaggatgagtcaaccctgtaggaatgattgtgctaaattaggaaataacactttagtgcactttgcttcctaacccttttttgtcagaaatctacaacctactgggcatggaaatgatttaaaatatgatctgcattgactaagaaaactcatcctcacttatgaggtgaccaggatgcagagagggcctgaggggcagcagaacaatgcaattcacaggtgaggctccaaaaagggccatttctttctccccaaggtgcatagaacatttttaaatatcagagtacccagcaagacggaaggactgtcatgcaggaactctaacacaaaatgtgcctatgactaacacgacaaaccaaggtgtatggtttctttgcacacccagaaaggtgatggccaagatacagaggagaaacgaaaactggaattgaatgtgcattaggcatcttaactattcatattttgtctcatttgggaactaagcctatttggaaagagtggattagaaattgaattctttgtcaaacagttagctctgtcttgaacttgaagccttccaaatcagaattatgtatttaagtgtgtgtttgtgtttgtttggggtttttgtttcttacattagagttcatattttctgggatttaaggatacaggtgtattttcctattctcttgagaagtagactaaacaatatttgcagtgatgacagacgcacacagaagaaaacattagaagagatgcctttctatcctctcatgtggttgagcattcttacagccaaatgactaaattggctgtaaattggtttctaggaggagcagctgtcactacgtgtgatgtataatatttagccagggccaactcaggggctgtgtcatttgtcctatctttaaattgaggtcagagtgtcacacacaacccctcccctggggcagggtggactggactaggttgcatacgctggctgtcagctcagcaaaaatgccacatggggcttgtcactccgccagacactcactgactcacgggctggcaggtcacgctcggttagcgctccagggcctgactctggattgagctaaactggcagaatccactcaggccaacccttggtctactgctgtgtacagacagcccagtcctgtgttgagtctctcttctcctggatgaccctgcaaaaggaagagaccagttgtactgtgggcttagttctgggtttccactgcacactgacacgtgccagcaagggtagctgtggaaaacacgtatcaggagagcagagtagtctggatgaatactctgtgctgatcagaacgggctcggtcataatttaggagtggagctgatgtgtctgtcctgcctcagtgcagaatattccaggcttcttgaccagggttatgttcacccatctcccaacacacacatgcacacatgaaaacaaaaacatggtaactcttttggttcggcacaccatacaaaacgtgctttggggcgaggagtgctgtttcttttaacacttgtagaggaatatcctgagaagtgaacctgggctttgggagagctcagctgagaattctgttgacattttctttcccttgacaaggcttcaggttcgtctcactatagggagctggctgtgaaaatcagtaataacttgtcaagaagcagtgaaaaatgcgggggggtggaaagagcctaggtaactaatgtcttataatgcatatgtatgtaaatattacaggatttaaggttgaattttttaaaaagaaagttatagtctgtaatttccatttgttataataatgacctttaatcttgtcatttggaaccataaagcatttttatcaggtacctctgttccaagggatttatgtcttagaccatagctgaattgaatgtttgcaaaacactgctataggataaggtggtctttagttttgaacgtgtgaaaggactgcacacttttcagccagggtttgagttactgcccagggtcatcgtctcaaagtaattcaaggagtgatttaacatcagcatttgaaatgtagtcttcatctcctgggatccataaaaaaatgtgaacagggaaatggtggctaagcagagcctgaaataataacttggcaaagaaatgagtttatcaggtcgagtcaaaacatggcatcccctgttacactcaagaaatgttttcttcatgtaaatgtttatacgggcatatataatcacaatgggaacagttaaaaccccctcccttcaaaaaaagaaaatctatatcagttgggtttggttttggttcttcattggctcaaggcagttaactgtctcagtatagccttcggggagatttaacctcattctagccatttttccatcctgaaggccaagaaggactattagaagggtttttgaggggtttcggaggtgagggcccaagacccccataatgacatcattaggcattcttgaaaggtgttaacagaccagcacgctcgatgtgttgtacccttcatttatttttttttctcagcatcccaagttgtccatcagtacattccccttcaccttacctgatcttcatttaatgcccagtctgtaactaatgttctgtttaaagctctcttaatttgttggctatgagtgatttgtgaatctgggatgtaaccctgagtgaggagaaaagggcattgagccagcataaatctgaatgggcagaagccacaaacaaatgggagcagaaaagaagggcgagctcccccgcgccgcaccccgtgtataatccagtgttaacctctgaggaacacctcggctctcccaactgaggagagacaaaagagggattctttttacacccaggctggcgcattttcaagtgacaatctcgggctctagttgcctttgagatatccactctgctctttctcccaggcctcagaccaagaaaaacatgctctcaagattagcccataggcagttcttgtgacctggctgaagaaagaaaggagacctgtttgttttaaaagtcgggcgcaaagtgtcaggtggctttgatttatgacagaaagaggaagaagaaagttggagtaatagcactatccaaataaccctgcccaggaaacttgggggtcaagagagcttatcaagagccttttataggtaagctcttccgtgtgaaagagaaaaggccggaaagagggagagagcccagagagcaggctgcgaactcacttccaatgggattggagtctgttgtattcttaagagatagcctgatatgtggtttataggtgaatcaataaacaccaacaacaacaaaaaaaaaaaaaaaaaaaaaggaagaaaagaaaaaaaggaaaccagccctgtcatggaatttctctccttccctgcacagtaaagacttttgggttttcatggataaaatcaatgtcagtactgaaactcctactctcccctcccgccccactctcccccgttgcccgagatggccaagttcaggcctgtgcaatgccgcttccctctgagcctccctctcaagggccacgcaggcagctgcagcagggccagctgcaggatggggctgccggtcactgaattgtcgttcaaatgcatcatctttgtggcgtctttctcatgcgagcaaagccacgtgctctcctgtctgctgtcacatctgtgcctggattgcttaaatattgtttgtgatggggaggttttaatctggtgatgcagagggaagcagggctgtgggggcacgtttaattggctcccagcagcgtggggggtgcttctatggtgtgtggggttttttgttgcctccctctagaagtgttaccgttttcacgtcctattaatgtcctctggttgttaaattacagcagcacattacagtgcactgggttccctcctggagtgaatacaaacggagggcatctacttgtatttttagaagttttgggagaatttagtgatttgtggctttgatcaatcctgttgactggtgtatgtctgcgcaaacctgtttcaaataaatcttttgttaaagtaa

SEQ ID NO: 191765 - DNA, 4204 bp, Artificial Sequence
  derived and/or modified sequence
atgagatgtcccgggccacgtctgttggagaccagctggaggcacccgcccgcaccatttacctcaaccaaccgccacctctatgacttcactggaaacttgaacttagatgggaaaagccttgttgcccttgggcctgaccagatcttattaagaggtacacagcttagaaatactcagtgggtctttggcatagttgtttatactggacacgacaccaaactcatgcagaattcaaccaaagcgcctctcaagagatcaaatgttgagaaggtgactaacgtgcagatcctggtgttgtttggcatcctcttggtcatggccttggtgagctcggcgggggccctgtactggaacaggtctcatggtgaaaagaactggtacatcaagaagatggacaccacctcagataattttggatacaacctactgacgttcatcatcttatacaacaatcttattcccatcagtctgttggtgactcttgaggttgtgaagtatactcaagcccttttcataaactgggacacagatatgtattatataggaaatgacactcctgccatggccaggacatcaaaccttaatgaagagcttgggcaggtgaaatatctcttttctgacaagactggaacgcttacatgcaatatcatgaactttaagaagtgcagcattgccggagtaacctatggtcacttcccagaattggcaagagagccgtcttcagatgacttctgtcggatgcctcctccctgtagtgattcctgtgactttgatgaccccaggctgttgaagaacattgaggatcgccatcccacagccccttgcattcaggagttcctcacccttctggccgtgtgccacacggttgttcctgagaaggatggagataacatcatctaccaggcctcttccccagatgaagctgctttggtgaaaggagctaaaaagctgggctttgtcttcacagccagaacaccattctcagtcatcatagaagcgatgggacaggaacaaacattcggaatccttaatgtcctggaattttctagtgacagaaaaagaatgtctgtaattgttcgaactccttcaggacgacttcggctttactgtaaaggggctgataatgtgatttttgagagactttcaaaagactcaaaatatatggaggaaacattatgccatctggaatactttgccacggaaggcttgcggactctctgtgtggcttatgctgatctctctgagaatgagtatgaggagtggctgaaagtctatcaggaagccagcaccatattgaaggacagagctcaacggttggaagagtgttacgagatcattgagaagaatttgctgctacttggagccacagccatagaagatcgccttcaagcaggagttccagaaaccatcgcaacactgttgaaggcagaaattaaaatatgggtgttgacaggagacaaacaagaaactgcgattaatatagggtattcctgccgattggtatcgcagaatatggcccttatcctattgaaggaggactctttggatgccacaagggcagccattactcagcactgcactgaccttgggaatttgctgggcaaggaaaatgacgtggccctgatcatcgatggccacaccctgaagtacgcgctctccttcgaagtccggaggagtttcctggatttggcactctcgtgcaaagcggtcatatgctgcagagtgtctcctctgcagaagtctgagatagtggatgtggtgaagaagcgggtgaaggccatcaccctcgccatcggagacggcgccaacgatgtcgggatgatccagacagcccacgtgggtgtgggaatcagtgggaatgaaggcatgcaggccaccaacaactcggattacgccatcgcacagttttcctacttagagaagcttctgttggttcatggagcctggagctacaaccgggtgaccaagtgcatcttgtactgcttctataagaacgtggtcctgtatattattgagctttggttcgcctttgttaatggattttctgggcagattttatttgaacgttggtgcatcggcctgtacaatgtgattttcaccgctttgccgcccttcactctgggaatctttgagaggtcttgcactcaggagagcatgctcaggtttccccagctctacaaaatcacccagaatggcgaaggcttcaacacaaaggttttctggggtcactgcatcaacgccttggtccactccctcatcctcttctggtttcccatgaaagctctggagcatgatactgtgttgacaagtggtcatgctaccgactatttatttgttggaaatattgtttacacatatgttgttgttactgtttgtctgaaagctggtttggagaccacagcttggactaaattcagtcatctggctgtctggggaagcatgctgacctggctggtgttttttggcatctactcgaccatctggcccaccattcccattgctccagatatgagaggacaggcaactatggtcctgagctccgcacacttctggttgggattatttctggttcctactgcctgtttgattgaagatgtggcatggagagcagccaagcacacctgcaaaaagacattgctggaggaggtgcaggagctggaaaccaagtctcgagtcctgggaaaagcggtgctgcgggatagcaatggaaagaggctgaacgagcgcgaccgcctgatcaagaggctgggccggaagacgcccccgacgctgttccggggcagctccctgcagcagggcgtcccgcatgggtatgctttttctcaagaagaacacggagctgttagtcaggaagaagtcatccgtgcttatgacaccaccaaaaagaaatccaggaagaaataagacatgaattttcctgactgatcttaggaaagagattcagtttgttgcacccagtgttaacacatctttgtcagagaagactggcgtcagcagccaaaacaccaggaaacacatttctgtggccttagccaagcagtttgttagttacatattccctcgcaaacctggagtgcagaccacaggggaagctatctttgccctcccaactcgtctgcagtgcttagcctaacttttgtttatgtcgttatgaagcattcaactgtgctctgtgaggtgtgaaattaaaaacattatgtttcaccaatatttaaacatcagtactagttgtcctgggagaaagggaaaggagttttatgttgcgtgagaggcccatcctgtgtaattggagcagggcacacttgcttcctgttgagttaactcagaggttaagtccaacgggccacatgcagacttcactgtaggcaggttgctctcctgctttgattcctgttttgtgtgtaaaattggcataaacttcttgattgcagtgaaatcacaaaattctctatcggggtggtcaacctgagaacatttatttgaacctcttagccacatttccagcagggcaaaccaactgatgccctggaagagtcttccgcaccctctccaggtgcactcggcccagtcctgccgccgtgtccaggcgcccctcacccccacacctgctgcatggctggccacaccactcagtgcatggcggccgatgggcagccaacccaaacccgcgcctttccttgttccactgcagactcagatacagatgcgaaaaattccttcttccaccgcccttctcgttctgtaaagaaagaaaagaaacatagcctttctgcatatattctaaacgtctctctgcctctgtctgacatggggccaccccacaggtcagagtggtggtagaaccccttcaggactcccagccgtggtcaggctctgaatactcccttcccaacatccagactgctgggcctttggcatccacttacattagaacccacgtttgtttcagagcacattttggactttcactgttgggaaatgaatgaatttataacatgcctgcacagcgaaggaacacacctgtcgctcttagctctagagtcagaggatgagtaaacccagatgcaagagtataggacattgagtggggagaacaagacgaccacagaagtcctcagaaggagaaggaaggacacggagacactgagaggaggacacagaggaatcgccaccagatctttgcagtagaaactctgaaata

SEQ ID NO: 191766 - DNA, 3567 bp, Artificial Sequence
  derived and/or modified sequence
atgctgaacggcgccggcctggacaaggccctgaagatgagcctgcccagaagaagcagaatcagaagcagcgtgggccccgtgagaagcagcctgggctacaagaaggccgaggacgagatgagcagagccaccagcgtgggcgaccagctggaggcccccgccagaaccatctacctgaaccagccccacctgaacaagttcagagacaaccagatcagcaccgccaagtacagcgtgctgaccttcctgcccagattcctgtacgagcagatcagaagagccgccaacgccttcttcctgttcatcgccctgctgcagcagatccccgacgtgagccccaccggcagatacaccaccctggtgcccctgatcatcatcctgaccatcgccggcatcaaggagatcgtggaggacttcaagagacacaaggccgacaacgccgtgaacaagaagaagaccatcgtgctgagaaacggcatgtggcacaccatcatgtggaaggaggtggccgtgggcgacatcgtgaaggtggtgaacggccagtacctgcccgccgacgtggtgctgctgagcagcagcgagccccaggccatgtgctacgtggagaccgccaacctggacggcgagaccaacctgaagatcagacagggcctgagccacaccgccgacatgcagaccagagaggtgctgatgaagctgagcggcaccatcgagtgcgagggccccaacagacacctgtacgacttcaccggcaacctgaacctggacggcaagagcctggtggccctgggccccgaccagatcctgctgagaggcacccagctgagaaacacccagtgggtgttcggcatcgtggtgtacaccggccacgacaccaagctgatgcagaacagcaccaaggcccccctgaagagaagcaacgtggagaaggtgaccaacgtgcagatcctggtgctgttcggcatcctgctggtgatggccctggtgagcagcgccggcgccctgtactggaacagaagccacggcgagaagaactggtacatcaagaagatggacaccaccagcgacaacttcggctacaacctgctgaccttcatcatcctgtacaacaacctgatccccatcagcctgctggtgaccctggaggtggtgaagtacacccaggccctgttcatcaactgggacaccgacatgtactacatcggcaacgacacccccgccatggccagaaccagcaacctgaacgaggagctgggccaggtgaagtacctgttcagcgacaagaccggcaccctgacctgcaacatcatgaacttcaagaagtgcagcatcgccggcgtgacctacggccacttccccgagctggccagagagcccagcagcgacgacttctgcagaatgccccccccctgcagcgacagctgcgacttcgacgaccccagactgctgaagaacatcgaggacagacaccccaccgccccctgcatccaggagttcctgaccctgctggccgtgtgccacaccgtggtgcccgagaaggacggcgacaacatcatctaccaggccagcagccccgacgaggccgccctggtgaagggcgccaagaagctgggcttcgtgttcaccgccagaacccccttcagcgtgatcatcgaggccatgggccaggagcagaccttcggcatcctgaacgtgctggagttcagcagcgacagaaagagaatgagcgtgatcgtgagaacccccagcggcagactgagactgtactgcaagggcgccgacaacgtgatcttcgagagactgagcaaggacagcaagtacatggaggagaccctgtgccacctggagtacttcgccaccgagggcctgagaaccctgtgcgtggcctacgccgacctgagcgagaacgagtacgaggagtggctgaaggtgtaccaggaggccagcaccatcctgaaggacagagcccagagactggaggagtgctacgagatcatcgagaagaacctgctgctgctgggcgccaccgccatcgaggacagactgcaggccggcgtgcccgagaccatcgccaccctgctgaaggccgagatcaagatctgggtgctgaccggcgacaagcaggagaccgccatcaacatcggctacagctgcagactggtgagccagaacatggccctgatcctgctgaaggaggacagcctggacgccaccagagccgccatcacccagcactgcaccgacctgggcaacctgctgggcaaggagaacgacgtggccctgatcatcgacggccacaccctgaagtacgccctgagcttcgaggtgagaagaagcttcctggacctggccctgagctgcaaggccgtgatctgctgcagagtgagccccctgcagaagagcgagatcgtggacgtggtgaagaagagagtgaaggccatcaccctggccatcggcgacggcgccaacgacgtgggcatgatccagaccgcccacgtgggcgtgggcatcagcggcaacgagggcatgcaggccaccaacaacagcgactacgccatcgcccagttcagctacctggagaagctgctgctggtgcacggcgcctggagctacaacagagtgaccaagtgcatcctgtactgcttctacaagaacgtggtgctgtacatcatcgagctgtggttcgccttcgtgaacggcttcagcggccagatcctgttcgagagatggtgcatcggcctgtacaacgtgatcttcaccgccctgccccccttcaccctgggcatcttcgagagaagctgcacccaggagagcatgctgagattcccccagctgtacaagatcacccagaacggcgagggcttcaacaccaaggtgttctggggccactgcatcaacgccctggtgcacagcctgatcctgttctggttccccatgaaggccctggagcacgacaccgtgctgaccagcggccacgccaccgactacctgttcgtgggcaacatcgtgtacacctacgtggtggtgaccgtgtgcctgaaggccggcctggagaccaccgcctggaccaagttcagccacctggccgtgtggggcagcatgctgacctggctggtgttcttcggcatctacagcaccatctggcccaccatccccatcgcccccgacatgagaggccaggccaccatggtgctgagcagcgcccacttctggctgggcctgttcctggtgcccaccgcctgcctgatcgaggacgtggcctggagagccgccaagcacacctgcaagaagaccctgctggaggaggtgcaggagctggagaccaagagcagagtgctgggcaaggccgtgctgagagacagcaacggcaagagactgaacgagagagacagactgatcaagagactgggcagaaagaccccccccaccctgttcagaggcagcagcctgcagcagggcgtgccccacggctacgccttcagccaggaggagcacggcgccgtgagccaggaggaggtgatcagagcctacgacaccaccaagaagaagagcagaaagaagtag

SEQ ID NO: 191767 - DNA, 2907 bp, Artificial Sequence
  derived and/or modified sequence
atgagatgccccggccccagactgctggagaccagctggagacacccccccgcccccttcaccagcaccaacagacacctgtacgacttcaccggcaacctgaacctggacggcaagagcctggtggccctgggccccgaccagatcctgctgagaggcacccagctgagaaacacccagtgggtgttcggcatcgtggtgtacaccggccacgacaccaagctgatgcagaacagcaccaaggcccccctgaagagaagcaacgtggagaaggtgaccaacgtgcagatcctggtgctgttcggcatcctgctggtgatggccctggtgagcagcgccggcgccctgtactggaacagaagccacggcgagaagaactggtacatcaagaagatggacaccaccagcgacaacttcggctacaacctgctgaccttcatcatcctgtacaacaacctgatccccatcagcctgctggtgaccctggaggtggtgaagtacacccaggccctgttcatcaactgggacaccgacatgtactacatcggcaacgacacccccgccatggccagaaccagcaacctgaacgaggagctgggccaggtgaagtacctgttcagcgacaagaccggcaccctgacctgcaacatcatgaacttcaagaagtgcagcatcgccggcgtgacctacggccacttccccgagctggccagagagcccagcagcgacgacttctgcagaatgccccccccctgcagcgacagctgcgacttcgacgaccccagactgctgaagaacatcgaggacagacaccccaccgccccctgcatccaggagttcctgaccctgctggccgtgtgccacaccgtggtgcccgagaaggacggcgacaacatcatctaccaggccagcagccccgacgaggccgccctggtgaagggcgccaagaagctgggcttcgtgttcaccgccagaacccccttcagcgtgatcatcgaggccatgggccaggagcagaccttcggcatcctgaacgtgctggagttcagcagcgacagaaagagaatgagcgtgatcgtgagaacccccagcggcagactgagactgtactgcaagggcgccgacaacgtgatcttcgagagactgagcaaggacagcaagtacatggaggagaccctgtgccacctggagtacttcgccaccgagggcctgagaaccctgtgcgtggcctacgccgacctgagcgagaacgagtacgaggagtggctgaaggtgtaccaggaggccagcaccatcctgaaggacagagcccagagactggaggagtgctacgagatcatcgagaagaacctgctgctgctgggcgccaccgccatcgaggacagactgcaggccggcgtgcccgagaccatcgccaccctgctgaaggccgagatcaagatctgggtgctgaccggcgacaagcaggagaccgccatcaacatcggctacagctgcagactggtgagccagaacatggccctgatcctgctgaaggaggacagcctggacgccaccagagccgccatcacccagcactgcaccgacctgggcaacctgctgggcaaggagaacgacgtggccctgatcatcgacggccacaccctgaagtacgccctgagcttcgaggtgagaagaagcttcctggacctggccctgagctgcaaggccgtgatctgctgcagagtgagccccctgcagaagagcgagatcgtggacgtggtgaagaagagagtgaaggccatcaccctggccatcggcgacggcgccaacgacgtgggcatgatccagaccgcccacgtgggcgtgggcatcagcggcaacgagggcatgcaggccaccaacaacagcgactacgccatcgcccagttcagctacctggagaagctgctgctggtgcacggcgcctggagctacaacagagtgaccaagtgcatcctgtactgcttctacaagaacgtggtgctgtacatcatcgagctgtggttcgccttcgtgaacggcttcagcggccagatcctgttcgagagatggtgcatcggcctgtacaacgtgatcttcaccgccctgccccccttcaccctgggcatcttcgagagaagctgcacccaggagagcatgctgagattcccccagctgtacaagatcacccagaacggcgagggcttcaacaccaaggtgttctggggccactgcatcaacgccctggtgcacagcctgatcctgttctggttccccatgaaggccctggagcacgacaccgtgctgaccagcggccacgccaccgactacctgttcgtgggcaacatcgtgtacacctacgtggtggtgaccgtgtgcctgaaggccggcctggagaccaccgcctggaccaagttcagccacctggccgtgtggggcagcatgctgacctggctggtgttcttcggcatctacagcaccatctggcccaccatccccatcgcccccgacatgagaggccaggccaccatggtgctgagcagcgcccacttctggctgggcctgttcctggtgcccaccgcctgcctgatcgaggacgtggcctggagagccgccaagcacacctgcaagaagaccctgctggaggaggtgcaggagctggagaccaagagcagagtgctgggcaaggccgtgctgagagacagcaacggcaagagactgaacgagagagacagactgatcaagagactgggcagaaagaccccccccaccctgttcagaggcagcagcctgcagcagggcgtgccccacggctacgccttcagccaggaggagcacggcgccgtgagccaggaggaggtgatcagagcctacgacaccaccaagaagaagagcagaaagaagtag

SEQ ID NO: 191768 - protein, 207 aa, Artificial Sequence
  derived and/or modified sequence
MAKTYDYLFKLLLIGDSGVGKTCLLFRFSEDAFNTTFISTIGIDFKIRTIELDGKKIKLQIWDTAGQERFRTITTAYYRGAMGIMLVYDITNEKSFDNIKNWIRNIEEHASSDVERMILGNKCDMNDKRQVSKERGEKLAIDYGIKFLETSAKSSANVEEAFFTLARDIMTKLNRKMNDSNSAGAGGPVKITENRSKKTSFFRCSLL

SEQ ID NO: 191769 - protein, 190 aa, Artificial Sequence
  derived and/or modified sequence
MAKTYDYLFKLLLIGDSGVGKTCLLFRFSEDAFNTTFISTIGIDFKIRTIELDGKKIKLQIWDTAGQERFRTITTAYYRGAMGIMLVYDITNEKSFDNIKNWIRNIEEHASSDVERMILGNKCDMNDKRQVSKERGEKLAIDYGIKFLETSAKSSANVEENDSNSAGAGGPVKITENRSKKTSFFRCSLL

SEQ ID NO: 191770 - DNA, 624 bp, Artificial Sequence
  derived and/or modified sequence
atggccaagacctacgactacctgttcaagctgctgctgatcggcgacagcggcgtgggcaagacctgcctgctgttcagattcagcgaggacgccttcaacaccaccttcatcagcaccatcggcatcgacttcaagatcagaaccatcgagctggacggcaagaagatcaagctgcagatctgggacaccgccggccaggagagattcagaaccatcaccaccgcctactacagaggcgccatgggcatcatgctggtgtacgacatcaccaacgagaagagcttcgacaacatcaagaactggatcagaaacatcgaggagcacgccagcagcgacgtggagagaatgatcctgggcaacaagtgcgacatgaacgacaagagacaggtgagcaaggagagaggcgagaagctggccatcgactacggcatcaagttcctggagaccagcgccaagagcagcgccaacgtggaggaggccttcttcaccctggccagagacatcatgaccaagctgaacagaaagatgaacgacagcaacagcgccggcgccggcggccccgtgaagatcaccgagaacagaagcaagaagaccagcttcttcagatgcagcctgctgtag

SEQ ID NO: 191771 - DNA, 573 bp, Artificial Sequence
  derived and/or modified sequence
atggccaagacctacgactacctgttcaagctgctgctgatcggcgacagcggcgtgggcaagacctgcctgctgttcagattcagcgaggacgccttcaacaccaccttcatcagcaccatcggcatcgacttcaagatcagaaccatcgagctggacggcaagaagatcaagctgcagatctgggacaccgccggccaggagagattcagaaccatcaccaccgcctactacagaggcgccatgggcatcatgctggtgtacgacatcaccaacgagaagagcttcgacaacatcaagaactggatcagaaacatcgaggagcacgccagcagcgacgtggagagaatgatcctgggcaacaagtgcgacatgaacgacaagagacaggtgagcaaggagagaggcgagaagctggccatcgactacggcatcaagttcctggagaccagcgccaagagcagcgccaacgtggaggagaacgacagcaacagcgccggcgccggcggccccgtgaagatcaccgagaacagaagcaagaagaccagcttcttcagatgcagcctgctgtag

SEQ ID NO: 191772 - DNA, 624 bp, Artificial Sequence
  derived and/or modified sequence
atggccaagacttacgattacttgttcaaacttctgctcattggtgattcaggcgtcggtaaaacatgcctcctgtttcgttttagcgaagatgcatttaacactaccttcattagcacaattggcatcgacttcaagattcgcacgatcgaactcgacggcaagaaaataaagctgcagatatgggatacggccggccaggagagattcaggacaattactactgcttactaccgaggcgccatgggtataatgctcgtctacgacatcacgaatgaaaagagctttgataacatcaaaaactggataaggaacattgaagagcacgcttcgtcagacgtggagaggatgatcctgggaaacaagtgcgacatgaacgacaaacggcaggtgagtaaagagcgtggggagaaacttgccattgactatggtatcaagtttctggagaccagtgcgaaatcctctgcgaatgttgaagaagcgtttttcactctagccagggatattatgacaaagctgaatcgcaagatgaacgactctaacagtgcaggcgccggagggcccgtgaagattacagaaaatagaagcaagaaaacgagcttcttccgctgctctctcctgtag

SEQ ID NO: 191773 - DNA, 573 bp, Artificial Sequence
  derived and/or modified sequence
atggcgaaaacatacgactatcttttcaagttgttgctgattggcgattctggagtcgggaaaacctgtcttttgttccgcttttctgaagacgcttttaacaccaccttcatcagtacaatcggtattgatttcaaaatccgtaccatagagctggatggtaaaaaaataaaattacagatttgggacaccgcgggccaagaacggttccggaccataactaccgcttactaccgcggggctatggggattatgctggtgtatgacattaccaatgagaagtcctttgacaacataaaaaattggatcagaaatatcgaggaacatgccagcagcgatgtggagcgtatgatccttggaaataagtgcgatatgaatgacaaaagacaggtttctaaagagaggggggaaaaattagctattgactacggaatcaagtttctggaaacaagtgccaaatccagcgccaacgtggaggaaaacgactctaatagtgctggagcaggcggcccagttaagatcaccgaaaatcgctccaaaaaaacatccttttttcgatgcagtctgctgtag

SEQ ID NO: 191774 - DNA, 624 bp, Artificial Sequence
  derived and/or modified sequence
atggccaagacctatgactacctgttcaagctgctgctgattggagacagcggcgtgggcaagacctgcctgctcttccgcttctctgaagatgccttcaacaccaccttcatcagcaccatcggcatcgacttcaagatccgcaccatcgagctggatggcaagaagatcaagctgcagatctgggacacagctggccaggagcgcttccgcaccatcaccacagcctactacagaggagccatgggcatcatgctggtgtatgacatcaccaatgagaagagctttgacaacatcaagaactggatccggaacatcgaggagcacgccagcagtgatgtggagaggatgatcctgggcaacaagtgtgacatgaatgacaagaggcaggtgtccaaggagcggggggagaagctggccattgattatggcatcaagttcctggagaccagcgccaagagcagcgccaacgtggaggaggccttcttcaccctggcccgggacatcatgaccaagctgaacaggaagatgaatgacagcaacagcgctggagctgggggccctgtgaagatcacagaaaatagaagcaagaagaccagcttcttccgctgcagcctgctgtag

SEQ ID NO: 191775 - DNA, 573 bp, Artificial Sequence
  derived and/or modified sequence
atggccaagacctatgactacctgttcaagctgctgctgattggagacagcggcgtgggcaagacctgcctgctcttccgcttctctgaagatgccttcaacaccaccttcatcagcaccatcggcatcgacttcaagatccgcaccatcgagctggatggcaagaagatcaagctgcagatctgggacacagctggccaggagcgcttccgcaccatcaccacagcctactacagaggagccatgggcatcatgctggtgtatgacatcaccaatgagaagagctttgacaacatcaagaactggatccggaacatcgaggagcacgccagcagtgatgtggagaggatgatcctgggcaacaagtgtgacatgaatgacaagaggcaggtgtccaaggagcggggggagaagctggccattgattatggcatcaagttcctggagaccagcgccaagagcagcgccaacgtggaggagaatgacagcaacagcgctggggccggcggccctgtgaagatcacagagaacagaagcaagaagaccagcttcttccgctgcagcctgctgtag

SEQ ID NO: 191776 - DNA, 624 bp, Artificial Sequence
  derived and/or modified sequence
atggccaagacctacgactacctgttcaagctgctgctgatcggcgattcgggtgtgggcaaaacatgtctgctgttcagattctcagaggatgcttttaatacaactttcatcagcactataggcattgacttcaagatccgaaccattgagttggatggtaaaaaaatcaaactgcagatctgggatactgctggccaagagaggttccgtaccattaccacggcgtattacagaggagccatggggattatgctcgtgtacgacatcacaaacgagaagtcctttgataatatcaaaaattggatacgcaacatcgaggaacatgccagctctgatgtggaacggatgatactggggaataagtgtgacatgaatgataaaaggcaggtgtcaaaggaacgcggagagaaactggcgatagactatggtatcaagttccttgagacaagcgcaaagtccagtgctaatgtggaggaggccttcttcaccctggctagagatatcatgacgaagctcaacagaaaaatgaatgattcaaattccgctggagcgggtgggccagttaagatcacggagaaccgttccaaaaaaacaagcttctttcggtgttccttgctctag

SEQ ID NO: 191777 - DNA, 573 bp, Artificial Sequence
  derived and/or modified sequence
atggccaagacctacgactacctgttcaagctgctgctgatcggcgactccggcgtggggaagacctgtctcttgttcagattcagtgaggacgcattcaatacaacattcatctcaactatagggatcgatttcaaaatacggactatagaactggatgggaagaagatcaagctgcagatctgggacacagcgggccaggagaggtttcggaccatcaccaccgcttattatcggggcgcgatgggcattatgctagtctacgacataactaatgaaaaatcttttgacaatatcaaaaattggattagaaacatcgaggagcatgcttcatccgacgtcgaacggatgatactaggtaataagtgcgacatgaacgataaacgacaggttagcaaagagcggggtgaaaaactggccattgactatggaatcaagttcctggaaacgtctgcgaaaagttctgctaatgtcgaagaaaacgattcgaactccgcgggtgctggggggcctgtaaagatcactgaaaacagatctaagaagacgagctttttcaggtgcagcttactctag

SEQ ID NO: 191778 - DNA, 624 bp, Artificial Sequence
  derived and/or modified sequence
atggccaaaacttatgattacctattcaagctgctcctgattggcgacagcggcgtcggaaaaacatgcctcctctttaggttcagcgaagacgcttttaacacaacctttatctctacaattggaattgacttcaagatacgaacaattgagctggacggcaagaaaatcaagctgcagatatgggatactgcagggcaggagcgcttccgtactattactaccgcctattataggggtgccatggggataatgctggtgtacgacatcacaaatgaaaagagcttcgacaatattaagaactggattaggaatatagaagaacatgccagctctgatgtggagcgtatgatattgggcaacaagtgcgatatgaatgacaaaagacaggtctctaaagagcggggagagaagctggccatcgactacggtattaagttcctggagacttccgctaagtcctcggctaatgtagaggaggcattttttaccttggccagagacattatgacgaagctgaaccggaagatgaacgactccaattcagcaggcgctggaggtccagtaaagataactgaaaaccggagcaaaaagacttcattttttagatgtagcctgctttag

SEQ ID NO: 191779 - DNA, 573 bp, Artificial Sequence
  derived and/or modified sequence
atggccaagacctatgactatctcttcaaactgctgcttatcggagactctggggtgggaaaaacttgcctcctgttcaggttcagtgaggacgcttttaacacaacgttcatcagtacaattggaattgattttaaaattagaactattgaactggatggtaaaaaaatcaaactgcagatttgggacaccgccggacaggagagattccggacaatcacaaccgcatactacagaggtgccatgggcatcatgctggtatacgatattacaaacgagaagagtttcgataatatcaaaaactggatcaggaatattgaggagcacgcaagcagtgacgtcgaacggatgattctggggaataaatgcgacatgaacgataagcgacaggtctctaaggaacgcggtgagaaactggccatcgactacggaattaaatttctagaaacgtctgccaaaagcagtgcaaacgtggaagagaacgactcaaactccgccggagccggaggaccagtaaagataaccgagaatcgctcaaaaaaaaccagcttcttccgatgctcgctcttatag

SEQ ID NO: 191780 - DNA, 4943 bp, Artificial Sequence
  derived and/or modified sequence
gggcggggcgcgcaggccttctccgagaggaggggcggggcgtggggcggggcgagcagcggcggattggcgggcacgccccctcgcccgcggccccctccccgcctctctccaccgcctcctctggctccccggtcagagggccggagcgagaagatggcgaagacgtacgattatctcttcaagctcctgctgatcggcgactcgggggtaggcaagacctgcctcctgttccgcttctcagaggacgccttcaacaccaccttcatctccaccatcggaattgattttaaaattagaacgatagaactagatggaaagaaaattaagcttcagatatgggacacagcgggtcaggaaagattccgaacaatcacgacagcgtactacagaggagccatgggcattatgctggtctatgacatcacaaatgaaaaatcctttgacaatattaaaaattggatcagaaacattgaagagcatgcctcttccgatgtcgaaagaatgatcctgggtaacaaatgtgatatgaatgacaaaagacaagtgtcaaaagaaagaggggagaagctagcaattgactatgggattaaattcttggagacaagcgcaaaatccagtgcaaatgtagaagaggcattttttacacttgcacgagatataatgacaaaactcaacagaaaaatgaatgacagcaattcagcaggagcaggtggaccagtgaaaataacagaaaaccgatcaaagaagaccagtttctttcgttgctcgctactttgatgaactctttctgagagactgcagcacacctagagggccctttcctgcttctctgaaagcacaggtcacccagcctcagaatcacacctcccggctgctgctgagagcaccactgaacttagacctctcaacacagtatgccaagtggattccagcctcatggcctagcaaaagaacagactccctttttcaaacatggaagcaatgaagtggagacacatgcaggacctaactcgttttttccttgttttattacctgttgcagaagcggttatctttcttttttactttgcacatcagtgttagcctttccctatttcagcacaatcttagactcatatttgcacacttttgtgtcgtgaagttctagacaaatttgtacatgtggcaatgttaaaagagcatttacagcagaggttaatatactaaaattaaagggtatttggtctggttcatatggtcaaatattactgccttggtagcatttatttaagggctttttcttaaataagaatcattaaagtcattaaaaaaatttactgaaatgcccatcttgtcatcaaaggccacaatttctttatttcttcagattaagagctttgcctcatccccgacctgttttccagagtctgggtagctgaatgaatcactttaaaatgattacctctgcctaatctatagaaactgcatttggaaatcaccataatctcatttttccctggggtttgtatttgctattctttcccatgtttgacttaagtgtaatcactcttaagtaatatttgaacattattatctgtttctatttgtgaacttcttgagctgaaattttacgtgggctgagagatataccatttagggttttagtgcagcatctaactgtgattctgtcaataaggatatgtaatatattttttcttaggttcactccttagctggctggtttagttgtaataccaaattcctaccataatccctgtctacaaaagttaggtttagattttagtttgcggaaaccttccctatatagagacagattaacttgttgatataaatttaatagagctagctcttggtaatggtgaaaataatgagttttggttggttttatttggcagatgtttttagaaataaaagtacttagacctagtgcagcctctaggaaaagtcttgccttttcattagagaaaacaggaccaaggtttcagttttcaaacagctgttgttgattgtgtagaacccagttccatctgttttggttcattgttacagaacttagtccagtcatttgggctaaagccaaccaaaagcttagttgcctttctcaacaaacactggtactggtatacttttgtagatgaaaccatcacaaggtatttagtgttaacttgtgtgccaaattcagatcactatgtcgttgttgctctagccttcagtgtcataacacaggggggataaaacagaggggatgagggaaatgaattctgttaataattattcttcctggtatgcctgttttgcttcacaaaggctactatcatgctggatagataagaacaggagatggcagtggaaagggattgcttgttaccacagagaattctcttcaaattaagatatgtcattagaatgcttggaccagtcaatcttttgtacttatttgaaaatataggaacaatttagcagctgcaaatatgcccaagctatttttaatagatatactaaacttattgttgacaaatttcagcctccttaatttttttttttttggtaattacctataggcttaaaagtcattcgttgctgttctagtataattagtagttccgtgattgaaagtttattgtaattctactatcttcaaattagatacattttcaaaaggaaaagataattttttagaaacatcttaatattcactatttcctgaaaaaatccaagcagttaacgctttctggatggtaacaaagtaccttctaaaagataagtgctatgacaccatgtatgaatgtaattctcttagtaatttacctctgactatttggtgtcttaacgctttggtttatataatctcaggggttgtctgcaaaccaaaactgacatattctgtggttagcttttattacttttttttttaacagaatgctttgctttggttatatttcttctttcttcttttgtcttatatggattaataactagtctccatgaacttcacttgaaagagcctgtaaaagttagatgagtctaaaagtgctctttgaagtagcagcaaattgggagtatatgctctgttatatagaaataaattgtccttgctattttcttacatttagctttgctagattgtatatacattgagctaagaccttaggaaattcactttctgcatgataaaatgacccaataaatattccactttgcttaataatgtacatacagtgcattattttttctatttgtagatgaatttaatgacagataattgtctgttccccgctgaaactgaagaaatctagtttttttgtgaacatttttgtggtcttatggataaggtacatgaagatttttgcagcagtattagtggttcagtggctgcactttattaatcagtgtgttaatttttgacagtgattggactagaccttttcaaatagagtctgagggtatcagacagtgaaaatgtgctgtaactaagtagcatgtaaatcagttgattgtaaaacgtttcgctgggaacttattttagctatattttacttcagacagattatgatacaataatctacctgtgcatcagttagtaggtgctgcagggtttcttactatttacagaaacattttgtgcagtctttgttataaattttcagaagactatactctttactttgaaggtctattttttaattatacctcatttagctaactagtattctaatacctggtagaaaaacagtgagccagcctttaagcatctaacaaaatttagactctttgttttgttttgaactgaagacatcattgggaaaggtaggaaatattagtttaggatagagcatacatgtcatatccagtagcataaaaaaagtattatctccctgtctccattaataaatttagctgtgcaatataggtgcgtttttgcagaagtttctagtaagagattataactccattttacaggttctgaatgctcagagtctatattaaggcttataaagtttttcctgtgatcagtaagtgacacatttaagcagacattcttttcaagttcatgacttagattcctttacaaatttagttctcaatctttaaaaaccacatttcattatgttggttaattattataaattttaagcactcatttctgcaatcaggtttctcagaattttttttttttaaacagaagagacattcctttttccttgttacatccaaggggggcacaggggtgggtggaaaggaatgtctaaaaatgaaatcccttgatatagagggacctagacggacaggatatgctaaaataatttcaaattctagcacaattttagagtagaataagtcatttttttagactaataaaattaatggctgtcatgttcactctgaaaaaaatctaaatgactgaaatgtacagaaataaaaattagcaaacaattattctagggatattttcagattttacttcatttcttgaaatgcgtgtgccatatgcaattgcatttcttgtgccaagaaactaatagaacttatttcactttacctttttttaaaatgtgaatttagttattatagttcaattttatggccttacagatggcttttattttgtttgcagctgacactgcagttcctttcatgcaaaataccataaactgtttgatgaaaatcatgcccctaatggaaactctctagtttttccatataactatcctactgtacatgtttaaacatattttatttttgctccaatggcttaatgtgaaaagctcctgcagataagtggacctgtcatgtggttaatcttgtttaagccaattcattaactgtgtactgatactgatgctatgttttttttaaatggattttattccaggtgaactttttttttataataatgttcgtctaaaataaaaactacataatgaaaatgaaaatgctaa

SEQ ID NO: 191781 - DNA, 1361 bp, Artificial Sequence
  derived and/or modified sequence
agagggccggagcgagaagatggcgaagacgtacgattatctcttcaagctcctgctgatcggcgactcgggggtaggcaagacctgcctcctgttccgcttctcagaggacgccttcaacaccaccttcatctccaccatcggaattgattttaaaattagaacgatagaactagatggaaagaaaattaagcttcagatatgggacacagcgggtcaggaaagattccgaacaatcacgacagcgtactacagaggagccatgggcattatgctggtctatgacatcacaaatgaaaaatcctttgacaatattaaaaattggatcagaaacattgaagagcatgcctcttccgatgtcgaaagaatgatcctgggtaacaaatgtgatatgaatgacaaaagacaagtgtcaaaagaaagaggggagaagctagcaattgactatgggattaaattcttggagacaagcgcaaaatccagtgcaaatgtagaagagaatgacagcaattcagcaggagcaggtggaccagtgaaaataacagaaaaccgatcaaagaagaccagtttctttcgttgctcgctactttgatgaactctttctgagagactgcagcacacctagagggccctttcctgcttctctgaaagcacaggtcacccagcctcagaatcacacctcccggctgctgctgagagcaccactgaacttagacctctcaacacagtatgccaagtggattccagcctcatggcctagcaaaagaacagactccctttttcaaacatggaagcaatgaagtggagacacatgcaggacctaactcgttttttccttgttttattacctgttgcagaagcggttatctttcttttttactttgcacatcagtgttagcctttccctatttcagcacaatcttagactcatatttgcacacttttgtgtcgtgaagttctagacaaatttgtacatgtggcaatgttaaaagagcatttacagcagaggttaatatactaaaattaaagggtatttggtctggttcatatggtcaaatattactgccttggtagcatttatttaagggctttttcttaaataagaatcattaaagtcattaaaaaaatttactgaaatgcccatcttgtcatcaaaggccacaatttctttatttcttcagattaagagctttgcctcatccccgacctgttttccagagtctgggtagctgaatgaatcactttaaaatgattacctctgcctaatctatagaaactgcatttggaaatcaccataatctcatttttccctggggtttgtatttgctattctttcccatgtttgacttaagtgtaatcac

SEQ ID NO: 191782 - protein, 345 aa, Artificial Sequence
  derived and/or modified sequence
MLMFDPVPVKQEAMDPVSVSYPSNYMESMKPNKYGVIYSTPLPEKFFQTPEGLSHGIQMEPVDLTVNKRSSPPSAGNSPSSLKFPSSHRRASPGLSMPSSSPPIKKYSPPSPGVQPFGVPLSMPPVMAAALSRHGIRSPGILPVIQPVVVQPVPFMYTSHLQQPLMVSLSEEMENSSSSMQVPVIESYEKPISQKKIKIEPGIEPQRTDYYPEEMSPPLMNSVSPPQALLQENHPSVIVQPGKRPLPVESPDTQRKRRIHRCDYDGCNKVYTKSSHLKAHRRTHTGEKPYKCTWEGCTWKFARSDELTRHFRKHTGIKPFQCPDCDRSFSRSDHLALHRKRHMLV

SEQ ID NO: 191783 - DNA, 5632 bp, Artificial Sequence
  derived and/or modified sequence
tacttaccccgccagccccgggaggctcgcagagcgagcggcgccggcgtcatgtgactgcccggagttggtgccaggagccagaggggagccaggagcggagccgcgcggagccggggcccgagccggagcgcagcgagagcgcccgccgcacgcgcgcccgtccccgtcccctgcggccgccaacgccgcccggactggagccctgacattgctgcgctcggggggctccaggcagcccgtatcggggcctttatttctcgtcggcggcgccctgcaccgcgcctcgcaaagccaaacaccagagcaccctagaaggtttaactaaaagaatgctcatgtttgacccagttcctgtcaagcaagaggccatggaccctgtctcagtgtcatacccatctaattacatggaatccatgaagcctaacaagtatggggtcatctactccacaccattgcctgagaagttctttcagaccccagaaggtctgtcgcacggaatacagatggagccagtggacctcacggtgaacaagcggagttcacccccttcggctgggaattcgccctcctctctgaagttcccgtcctcacaccggagagcctcgcctgggttgagcatgccttcttccagcccaccgataaaaaaatactcacccccttctccaggcgtgcagcccttcggcgtgccgctgtccatgccaccagtgatggcagctgccctctcgcggcatggaatacggagcccggggatcctgcccgtcatccagccggtggtggtgcagcccgtcccctttatgtacacaagtcacctccagcagcctctcatggtctccttatcggaggagatggaaaattccagtagtagcatgcaagtacctgtaattgaatcatatgagaagcctatatcacagaaaaaaattaaaatagaacctgggatcgaaccacagaggacagattattatcctgaagaaatgtcaccccccttaatgaactcagtgtcccccccgcaagcattgttgcaagagaatcacccttcggtcatcgtgcagcctgggaagagacctttacctgtggaatccccggatactcaaaggaagcggaggatacacagatgtgattatgatggatgcaacaaagtgtacactaaaagctcccacttgaaagcacacagaagaacacacacaggagaaaaaccctacaaatgtacatgggaagggtgcacatggaagtttgctcggtctgatgaactaacaagacatttccgaaaacatactggaatcaaacctttccagtgcccggactgtgaccgcagcttctcccgttctgaccatcttgccctccataggaaacgccacatgctagtctgattgcctctgtgtcctgcctcagcgtgactccccactcacctggctctctctctgtcctgcctcccattatctaacacattttttacatgtacattttaatttgattcagctggtctgaatctctgaatttatatcatccaaaacttccatatggtcagtagtagatgttctctaatcctccctctccttaccacgggtcagacctaaagaatgtgaacacttttttttttttttctggggatgctaagcaaacccttcttacagatacgtttaatgtaataagaacaagggaacatgtaaactaacataaccaattgtcagttctccatgtattcctcaaaagaatgtcagagtaaatgtattagaaatacagtatccagactgctagtccttgccagagacattcttacctctgccctgtgataatattttatgcttgacagtgaaaacaagtgtggccccttgcaccggttagctagaagtacagccagatttcaagctagtgcagtcacctcttccgtcattcttcacaaatcttgtcaacctggatcttagacttcatctgaatcgagttctttgccctcctttgtgcctgcagctcatatggaggtctttgccaccaatgggagatgagcccaaactttcgatctaggtgggtgatgtgtagcagttcaagggaagggtgctgtgttttcatagcatggagtcggaggagagggccatttagcagggggagcagaagaggcaattcctcctgggctaggggttgtcagtgaggtttcaacattttgttagctgtgtgcagcattcccagagcttcagtctctgtgcatactcagctttgtagaaccatgctgcaaagccatataccgatggggttatccatgcaactatctccattcctacaatgtccttaatatgagatcatcaaacattgatagtagggactccatggaatatttgcccagtaatggtaagaaatctttcgggtaagagtatggatggttcttcttttacccaatctgcttatagctttttttgtaaacagggaaatgttgagtggtacttgtattcccttatcaaattaatcacatagcttttatacagaaactcttcctgtgtgagctgttaaggtgccaaattggctgtcatttgtattcatgacacataccataaagcatctgctaatgctttaatggattgattcaattaagacctgagtgacactatttgtaaatataactagttgtgaagcacacatacctttattttgggaatttatgagaaaatatagaaaaccacagatcagggattcatatatgtagctcaaaaattcccaaaagtttactgttagagttggcaatttcctatcactatttcagtgtcagaacaaactgaaaataatggctcgtgtttatgttgaagataaatagcaccattattgggggaagttattcaaaagcaggcttttgagcaccatagtctaaatgccaataaaaataattcatacatagaaatgtcattggtcctgaatttgaagaaagtgagcaacagtagttaaatgtgggtgcatataaccaaattccccttcatcaagaatggaggagaagagagaagaatgaaatcctgaagattcatcccagccgcaactcaggatccaacacaactttaactgggaggaatacattgtttgatcatttttaaaacatctgtgaatgagtgattccggaggcctgtgaattgtgtggggagcttgctttgatggcactgtgttaataaaagttgtagggactgtgcacctaagaggctaagaggtcccactcatccgccctgtgaaccagctgtaaagaaatgtagttaagaaatgcaaagaaatgtgttatcttggcacttgggtttgattttcctttttttaaagcactgcaaaacttctttaggatactaaaacatcctaattgggctgtttttttgttttgttttgtttttcagctaaaggcaaagataatttttttttcagctgaagtttttcttttttgcaactatgacatgaattgagtgataaaatggctctttgaaaagtagatattgtctgtattgtaaatgcttagtcatattcatggcaaagtgttcatttcttgagatggttctttcacaacacacaagaatcaagatggaacgcaaggaaaatctttttgttttgaccgaggtaaccagtttatgtgtgttccaatccatagagaagtgggggaaagggcgagaaaggatcagattgatctgggatcagctttgagcctgagttcagtgaatagcctcatgggcatctcatggaattgatgcatttgctgtggcatatttaaattttgttcaaaagatttgaagcaagaccttgcaaagactcttaacattactgttcagcttgcttagattgtgttaacagttcatttaacaaagatccgttttaactctgaacaaaagcaacccagagcggccattctctattcccatgctggtcaatacgctttcattaccaattggcccttaccaaacttttcttatatatatatttgtattttactatgatagttgagaaatttagcctcttagtcatttttagctgttattgtggaagacctcaaatacaagattagatgcccttgaacatgttttaatgatgtgtgtcatgttactatcaatggtgatttcaatcgcaatattttaaattgatgagaatgatttgtaaacatgaagttactattacgtaaattctgtttgttatagagtttcttcagttgttacccaagtgtcatcctagagaagtcagaagaatcagaatccatcgtattttagagttatgtgaatctacatcataaatgggcattaacattctaaattgcttggtttggagaatgtgttagcagcatagctatattcaactagggagatgctaaatacacagaagtttcaagagccttggaacagaattacaggggaactatatatgtatatgtatattttattaaacacccatctgcactatcagtattgcactaatgtggaatttgaaagactattttgctgatactgtatatatgcgcatcattcctgattagattgttgtaaagacaatctgaaagatctaaggttttaaaataatttggtttgaaaatatacagttgtcttgaaggaattgctgtcatacatgaagttgctccgagctgtctttattctcttcttggtcaaggttaacaattgctaaatgatcgcaaattcacctaaacaatacatttacaaagccatctttacatgcattaaacgagggctacaacaatattgttttacaaatactagcacttttttttctgttatgtacttagtgttagagggtcaaaataatctttctgcttagcatctcttaaaccatacctgcaaatatagcaggattattacatttacagtactttaatacttgtataaactatgcagaaatttttaataaagtgtaatatattttataagctaataagactgaatgggtaaaggtttttagcatgcattagtatacttgcagatactgaaacattttggtaatctttcttactaaagatgtgaatgtttaatgtaccttctctgtttctactctgtagtccaatgggaattcagtaatgacattttgtcatgtcaaactgtgaacataaatttgtactgtacagtcctcatatactatatacagtatgcaatatatattatatacttgttaataaaaccatcagaatattaaatgtgatcatgtgattacttcatatgcagtgatcactagagcaaaacttacagagcaatgtaagaacccttgcttagaacattacttactctgatgggcagttattgttgatggagggacagaaaaatagatctaactggaagatgaactaccggaattaactcagccctcaagctatgtccctggttttctgaaaacagccaacaggaagtctcctaggctgaaatcataaaactgcagacaatccagcaaaaatctacaaactcacctagttcattcttgaaatacttcttgtatttgttatttatgaacccctgcctgcttccaaaaagaacttgcagcattttgtattaaaagacgcatgtgtataatactttaaacttttagagtaaaatatcaagactctcatgttggggagtggggaacgaggaacagaacaataacgcattaaagtaaataactctggaaaaaaaaaaaaaaaaaa

SEQ ID NO: 191784 - DNA, 5122 bp, Artificial Sequence
  derived and/or modified sequence
cgcagagcgagcggcgccggcgtcatgtgactgcccggagttggtgccaggagccagaggggagccaggagcggagccgcgcggagccggggcccgagccggagcgcagcgagagcgcccgccgcacgcgcgcccgtccccgtcccctgcggccgccaacgccgcccggactggagccctgacattgctgcgctcggggggctccaggcagcccgtatcggggcctttatttctcgtcggcggcgccctgcaccgcgcctcgcaaagccaaacaccagagcaccctagaaggtttaactaaaagaatgctcatgtttgacccagttcctgtcaagcaagaggccatggaccctgtctcagtgtcatacccatctaattacatggaatccatgaagcctaacaagtatggggtcatctactccacaccattgcctgagaagttctttcagaccccagaaggtctgtcgcacggaatacagatggagccagtggacctcacggtgaacaagcggagttcacccccttcggctgggaattcgccctcctctctgaagttcccgtcctcacaccggagagcctcgcctgggttgagcatgccttcttccagcccaccgataaaaaaatactcacccccttctccaggcgtgcagcccttcggcgtgccgctgtccatgccaccagtgatggcagctgccctctcgcggcatggaatacggagcccggggatcctgcccgtcatccagccggtggtggtgcagcccgtcccctttatgtacacaagtcacctccagcagcctctcatggtctccttatcggaggagatggaaaattccagtagtagcatgcaagtacctgtaattgaatcatatgagaagcctatatcacagaaaaaaattaaaatagaacctgggatcgaaccacagaggacagattattatcctgaagaaatgtcaccccccttaatgaactcagtgtcccccccgcaagcattgttgcaagagaatcacccttcggtcatcgtgcagcctgggaagagacctttacctgtggaatccccggatactcaaaggaagcggaggatacacagatgtgattatgatggatgcaacaaagtgtacactaaaagctcccacttgaaagcacacagaagaacacacacaggagaaaaaccctacaaatgtacatgggaagggtgcacatggaagtttgctcggtctgatgaactaacaagacatttccgaaaacatactggaatcaaacctttccagtgcccggactgtgaccgcagcttctcccgttctgaccatcttgccctccataggaaacgccacatgctagtctgattgcctctgtgtcctgcctcagcgtgactccccactcacctggctctctctctgtcctgcctcccattatctaacacattttttacatgtacattttaatttgattcagctggtctgaatctctgaatttatatcatccaaaacttccatatggtcagtagtagatgttctctaatcctccctctccttaccacgggtcagacctaaagaatgtgaacacttttttttttttttctggggatgctaagcaaacccttcttacagatacgtttaatgtaataagaacaagggaacatgtaaactaacataaccaattgtcagttctccatgtattcctcaaaagaatgtcagagtaaatgtattagaaatacagtatccagactgctagtccttgccagagacattcttacctctgccctgtgataatattttatgcttgacagtgaaaacaagtgtggccccttgcaccggttagctagaagtacagccagatttcaagctagtgcagtcacctcttccgtcattcttcacaaatcttgtcaacctggatcttagacttcatctgaatcgagttctttgccctcctttgtgcctgcagctcatatggaggtctttgccaccaatgggagatgagcccaaactttcgatctaggtgggtgatgtgtagcagttcaagggaagggtgctgtgttttcatagcatggagtcggaggagagggccatttagcagggggagcagaagaggcaattcctcctgggctaggggttgtcagtgaggtttcaacattttgttagctgtgtgcagcattcccagagcttcagtctctgtgcatactcagctttgtagaaccatgctgcaaagccatataccgatggggttatccatgcaactatctccattcctacaatgtccttaatatgagatcatcaaacattgatagtagggactccatggaatatttgcccagtaatggtaagaaatctttcgggtaagagtatggatggttcttcttttacccaatctgcttatagctttttttgtaaacagggaaatgttgagtggtacttgtattcccttatcaaattaatcacatagcttttatacagaaactcttcctgtgtgagctgttaaggtgccaaattggctgtcatttgtattcatgacacataccataaagcatctgctaatgctttaatggattgattcaattaagacctgagtgacactatttgtaaatataactagttgtgaagcacacatacctttattttgggaatttatgagaaaatatagaaaaccacagatcagggattcatatatgtagctcaaaaattcccaaaagtttactgttagagttggcaatttcctatcactatttcagtgtcagaacaaactgaaaataatggctcgtgtttatgttgaagataaatagcaccattattgggggaagttattcaaaagcaggcttttgagcaccatagtctaaatgccaataaaaataattcatacatagaaatgtcattggtcctgaatttgaagaaagtgagcaacagtagttaaatgtgggtgcatataaccaaattccccttcatcaagaatggaggagaagagagaagaatgaaatcctgaagattcatcccagccgcaactcaggatccaacacaactttaactgggaggaatacattgtttgatcatttttaaaacatctgtgaatgagtgattccggaggcctgtgaattgtgtggggagcttgctttgatggcactgtgttaataaaagttgtagggactgtgcacctaagaggctaagaggtcccactcatccgccctgtgaaccagctgtaaagaaatgtagttaagaaatgcaaagaaatgtgttatcttggcacttgggtttgattttcctttttttaaagcactgcaaaacttctttaggatactaaaacatcctaattgggctgtttttttgttttgttttgtttttcagctaaaggcaaagataatttttttttcagctgaagtttttcttttttgcaactatgacatgaattgagtgataaaatggctctttgaaaagtagatattgtctgtattgtaaatgcttagtcatattcatggcaaagtgttcatttcttgagatggttctttcacaacacacaagaatcaagatggaacgcaaggaaaatctttttgttttgaccgaggtaaccagtttatgtgtgttccaatccatagagaagtgggggaaagggcgagaaaggatcagattgatctgggatcagctttgagcctgagttcagtgaatagcctcatgggcatctcatggaattgatgcatttgctgtggcatatttaaattttgttcaaaagatttgaagcaagaccttgcaaagactcttaacattactgttcagcttgcttagattgtgttaacagttcatttaacaaagatccgttttaactctgaacaaaagcaacccagagcggccattctctattcccatgctggtcaatacgctttcattaccaattggcccttaccaaacttttcttatatatatatttgtattttactatgatagttgagaaatttagcctcttagtcatttttagctgttattgtggaagacctcaaatacaagattagatgcccttgaacatgttttaatgatgtgtgtcatgttactatcaatggtgatttcaatcgcaatattttaaattgatgagaatgatttgtaaacatgaagttactattacgtaaattctgtttgttatagagtttcttcagttgttacccaagtgtcatcctagagaagtcagaagaatcagaatccatcgtattttagagttatgtgaatctacatcataaatgggcattaacattctaaattgcttggtttggagaatgtgttagcagcatagctatattcaactagggagatgctaaatacacagaagtttcaagagccttggaacagaattacaggggaactatatatgtatatgtatattttattaaacacccatctgcactatcagtattgcactaatgtggaatttgaaagactattttgctgatactgtatatatgcgcatcattcctgattagattgttgtaaagacaatctgaaagatctaaggttttaaaataatttggtttgaaaatatacagttgtcttgaaggaattgctgtcatacatgaagttgctccgagctgtctttattctcttcttggtcaaggttaacaattgctaaatgatcgcaaattcacctaaacaatacatttacaaagccatctttacatgcattaaacgagggctacaacaatattgttttacaaatactagcacttttttttctgttatgtacttagtgttagagggtcaaaataatctttctgcttagcatctcttaaaccatacctgcaaatatagcaggattattacatttacagtactttaatacttgtataaactatgcagaaatttttaataaagtgtaatatattttataagctaataagactgaatgggtaaaggtttttagcatgcattagtatacttgcagatactgaaacattttggtaatctttcttactaaagatgtgaatgtttaatgtaccttctctgtttctactctgtagtccaatgggaattcagtaatgacattttgtcatgtcaaactgtgaacataaatttgtactgtacagtcctcatatactatatacagtatgcaatatatattatatacttgttaataaaaccatcagaatattaaa

SEQ ID NO: 191785 - DNA, 1038 bp, Artificial Sequence
  derived and/or modified sequence
atgctgatgtttgaccccgtgcccgtcaagcaggaggctatggatcccgtgagcgtttcttacccttcgaactatatggagtcaatgaaacccaataagtacggagtgatctactcgaccccgctgcctgaaaagttcttccagactccggaaggtctaagtcatgggatccaaatggagccagtggacctgacggtgaacaagcgctcaagccccccgtccgcaggtaacagcccttcttcattgaaattcccctcgtcccaccgcagggccagcccgggcttgtctatgcccagctcaagccctccaattaagaaatactccccccccagtcccggtgttcagcccttcggcgttccactgtctatgccccctgttatggcggccgcactgtccaggcacggaattcggagccccggaattctgcccgtcatccaaccagtcgtggtgcaaccagtcccattcatgtacacatctcaccttcagcaaccacttatggtgagcctatccgaggagatggaaaatagcagttcaagcatgcaagtacctgtgatcgagtcctacgagaaacctattagtcagaagaagatcaagatcgaacccggcatagagccacagcggactgattactatcccgaggagatgagccccccactgatgaattcggtaagccctccacaggccctgctgcaggagaaccatccaagtgtgatcgttcagccaggcaaaagacccctgcctgtggaaagccctgacacgcagaggaagagaaggatccatagatgcgactacgacggctgcaacaaagtctatacaaagagcagtcacctcaaagcccaccgacggactcacactggagagaaaccttacaagtgcacctgggagggctgtacatggaagtttgcacgctctgatgagctgaccagacatttccgcaaacacaccggcatcaaacccttccagtgtccggattgtgacaggagtttcagtcgctctgaccaccttgctttgcatagaaagcgccatatgctcgtctag

SEQ ID NO: 191786 - DNA, 1038 bp, Artificial Sequence
  derived and/or modified sequence
atgctgatgtttgatcctgtgcctgtgaagcaggaggccatggaccctgtgtctgtgtcctaccccagcaactacatggagagcatgaagcccaacaagtatggagtcatctacagcacccccctgcctgagaagttcttccagaccccagagggcctgagccacggcatccagatggagcctgtggacctgactgtgaacaagaggagcagcccccccagcgctggcaacagccccagcagcctgaagttccccagcagccacagaagagccagccctggcctgtccatgcccagcagcagcccccccatcaagaagtacagcccccccagccctggggtgcagccctttggagtgcccctgtccatgcctcctgtgatggctgctgccctgagccgccacggcatccgcagccctggcatcctgcctgtgatccagcctgtggtggtgcagcctgtgcccttcatgtacaccagccacctgcagcagcccctgatggtgtccctgtctgaggagatggagaacagcagcagctccatgcaggtgcctgtgattgagagctatgagaagcccatcagccagaagaagatcaagattgagcccggcatcgagccccagaggacagactactacccagaggagatgagcccccccctgatgaacagcgtgtccccaccccaggccctgctgcaggagaaccaccccagcgtcatcgtgcagcccgggaagaggcccctgcctgtggagagcccagacacccagaggaagaggcgcatccaccgctgtgactatgatggctgcaacaaggtgtacaccaagagcagccacctgaaggcccacaggaggacccacactggagagaagccctacaagtgcacctgggagggctgcacctggaagtttgcccggagtgatgagctgaccaggcacttcaggaagcacacaggcatcaagcccttccagtgcccagactgtgacaggagcttcagcagaagtgaccacctggccctgcacaggaagaggcacatgctggtgtag

SEQ ID NO: 191787 - DNA, 1038 bp, Artificial Sequence
  derived and/or modified sequence
atgctgatgttcgaccccgtgcccgtgaagcaggaggccatggaccccgtgagcgttagttacccttctaattatatggagtccatgaagccgaacaagtatggagtaatttatagtaccccactgcctgagaaattctttcaaaccccggaggggctgagccatgggattcagatggagccagtggacctcaccgtgaataagaggtcaagtccaccttccgccggcaatagcccttcttccttgaaatttccgagctcacacaggagagcctcccccggcctcagcatgccgtccagttcccccccgattaagaaatactctccccccagtcccggtgtgcaaccattcggtgtcccactctctatgccacccgttatggcagctgcactcagccgacatggcatcagatcacctgggatcctaccagtgatccagcccgtcgttgtccagccggtcccctttatgtatacctctcatcttcagcagcctttgatggtgtctctgagtgaagagatggagaattcatcatcatcgatgcaagtgcccgttattgaaagttacgaaaaacctatttctcagaagaagatcaaaattgaacctggaattgagccccagcggacagattattacccagaggaaatgtctcctccgcttatgaactcggtttctccgccacaagcattgcttcaggagaaccatccatccgttatcgtccaacccggaaagcggcccctacctgtggaaagccccgacacccaacggaagcgtcgcattcacagatgtgactacgacggctgtaacaaggtctatacgaaatcaagccacctaaaggcccataggcgcacacacacaggagagaagccatataagtgtacttgggagggatgtacctggaagttcgctcggagtgacgagcttacccgccactttaggaagcataccggcatcaaacccttccaatgcccagactgcgatcgctctttctctcgttccgaccacttagcccttcatcgtaaaagacacatgctcgtctag

SEQ ID NO: 191788 - DNA, 1038 bp, Artificial Sequence
  derived and/or modified sequence
atgttaatgttcgatcctgtccccgtgaagcaggaggcgatggatcccgtctcagtcagttatccctccaattatatggaatcaatgaagcctaacaagtacggcgtgatctatagtactccacttcccgagaaatttttccagacccccgaaggcctctcccacggaatccagatggagcccgtcgacctgacagtgaacaagaggtcctcccctccgtccgcagggaatagtccttccagtctgaaatttcccagctcgcaccgcagggcctcccctgggctctctatgccgagcagttcccctcctatcaagaagtattcaccaccttccccaggcgtccagccattcggagttccactgagcatgccccctgttatggcagcggctctgtccaggcacggcatccgttcaccaggtatcttgcccgtaattcagcccgtggttgttcagcccgtcccgtttatgtatacgtcccatcttcagcagcctttgatggtaagtctgagcgaggaaatggaaaactcttcctcatctatgcaggtgcctgtaatcgaaagttatgagaaaccgatctctcagaagaagataaaaattgagccaggtattgagccccagcgcacagattattatccagaggagatgagtcctccactcatgaacagcgtatctccacctcaggccttgctccaggagaaccacccttcagtgatagtgcagccagggaaaagaccacttccggttgaatcgcctgatacgcagaggaagagaagaattcaccggtgtgactatgatgggtgtaacaaagtgtataccaaatcctcacatttgaaagcgcaccgtcgcacacacacaggagaaaagccttataaatgcacctgggagggatgcacatggaagtttgcccgtagcgacgagctcacccgccatttccggaaacacaccggaataaaaccttttcagtgccccgattgcgatcggagcttcagtaggagtgaccatctagctctgcatcgcaaaagacacatgcttgtgtag

SEQ ID NO: 191789 - DNA, 1038 bp, Artificial Sequence
  derived and/or modified sequence
atgctgatgttcgaccccgtgcccgtgaagcaggaggccatggaccccgtgagcgtgagctaccccagcaactacatggagagcatgaagcccaacaagtacggcgtgatctacagcacccccctgcccgagaagttcttccagacccccgagggcctgagccacggcatccagatggagcccgtggacctgaccgtgaacaagagaagcagcccccccagcgccggcaacagccccagcagcctgaagttccccagcagccacagaagagccagccccggcctgagcatgcccagcagcagcccccccatcaagaagtacagcccccccagccccggcgtgcagcccttcggcgtgcccctgagcatgccccccgtgatggccgccgccctgagcagacacggcatcagaagccccggcatcctgcccgtgatccagcccgtggtggtgcagcccgtgcccttcatgtacaccagccacctgcagcagcccctgatggtgagcctgagcgaggagatggagaacagcagcagcagcatgcaggtgcccgtgatcgagagctacgagaagcccatcagccagaagaagatcaagatcgagcccggcatcgagccccagagaaccgactactaccccgaggagatgagcccccccctgatgaacagcgtgagccccccccaggccctgctgcaggagaaccaccccagcgtgatcgtgcagcccggcaagagacccctgcccgtggagagccccgacacccagagaaagagaagaatccacagatgcgactacgacggctgcaacaaggtgtacaccaagagcagccacctgaaggcccacagaagaacccacaccggcgagaagccctacaagtgcacctgggagggctgcacctggaagttcgccagaagcgacgagctgaccagacacttcagaaagcacaccggcatcaagcccttccagtgccccgactgcgacagaagcttcagcagaagcgaccacctggccctgcacagaaagagacacatgctggtgtag

SEQ ID NO: 191790 - protein, 372 aa, Artificial Sequence
  derived and/or modified sequence
MDVLSPLSFIKVSHVRMQGILLLVFAKYQHLPYIQILSTKSTPTGLFGYWGNKGGVNICLKLYGYYVSIINCHLPPHISNNYQRLEHFDRILEMQNCEGRDIPNILDHDLIIWFGDMNFRIEDFGLHFVRESIKNRCYGGLWEKDQLSIAKKHDPLLREFQEGRLLFPPTYKFDRNSNDYDTSEKKRKPAWTDRILWRLKRQPCAGPDTPIPPASHFSLSLRGYSSHMTYGISDHKPVSGTFDLELKPLVSAPLIVLMPEDLWTVENDMMVSYSSTSDFPSSPWDWIGLYKVGLRDVNDYVSYAWVGDSKVSCSDNLNQVYIDISNIPTTEDEFLLCYYSNSLRSVVGISRPFQIPPGSLREDPLGEAQPQI

SEQ ID NO: 191791 - protein, 448 aa, Artificial Sequence
  derived and/or modified sequence
MSSRKLSGPKGRRLSIHVVTWNVASAAPPLDLSDLLQLNNRNLNLDIYVIGLQELNSGIISLLSDAAFNDSWSSFLMDVLSPLSFIKVSHVRMQGILLLVFAKYQHLPYIQILSTKSTPTGLFGYWGNKGGVNICLKLYGYYVSIINCHLPPHISNNYQRLEHFDRILEMQNCEGRDIPNILDHDLIIWFGDMNFRIEDFGLHFVRESIKNRCYGGLWEKDQLSIAKKHDPLLREFQEGRLLFPPTYKFDRNSNDYDTSEKKRKPAWTDRILWRLKRQPCAGPDTPIPPASHFSLSLRGYSSHMTYGISDHKPVSGTFDLELKPLVSAPLIVLMPEDLWTVENDMMVSYSSTSDFPSSPWDWIGLYKVGLRDVNDYVSYAWVGDSKVSCSDNLNQVYIDISNIPTTEDEFLLCYYSNSLRSVVGISRPFQIPPGSLREDPLGEAQPQI

SEQ ID NO: 191792 - protein, 356 aa, Artificial Sequence
  derived and/or modified sequence
MQGILLLVFAKYQHLPYIQILSTKSTPTGLFGYWGNKGGVNICLKLYGYYVSIINCHLPPHISNNYQRLEHFDRILEMQNCEGRDIPNILDHDLIIWFGDMNFRIEDFGLHFVRESIKNRCYGGLWEKDQLSIAKKHDPLLREFQEGRLLFPPTYKFDRNSNDYDTSEKKRKPAWTDRILWRLKRQPCAGPDTPIPPASHFSLSLRGYSSHMTYGISDHKPVSGTFDLELKPLVSAPLIVLMPEDLWTVENDMMVSYSSTSDFPSSPWDWIGLYKVGLRDVNDYVSYAWVGDSKVSCSDNLNQVYIDISNIPTTEDEFLLCYYSNSLRSVVGISRPFQIPPGSLREDPLGEAQPQI

SEQ ID NO: 191793 - protein, 89 aa, Artificial Sequence
  derived and/or modified sequence
MDVLSPLSFIKVSHVRMQGILLLVFAKYQHLPYIQILSTKSTPTGLFGYWGNKGGVNICLKLYGYYVSIINCHLPPHISNNYQRLEHFD

SEQ ID NO: 191794 - DNA, 1347 bp, Artificial Sequence
  derived and/or modified sequence
atgagcagcagaaagctgagcggccccaagggcagaagactgagcatccacgtggtgacctggaacgtggccagcgccgccccccccctggacctgagcgacctgctgcagctgaacaacagaaacctgaacctggacatctacgtgatcggcctgcaggagctgaacagcggcatcatcagcctgctgagcgacgccgccttcaacgacagctggagcagcttcctgatggacgtgctgagccccctgagcttcatcaaggtgagccacgtgagaatgcagggcatcctgctgctggtgttcgccaagtaccagcacctgccctacatccagatcctgagcaccaagagcacccccaccggcctgttcggctactggggcaacaagggcggcgtgaacatctgcctgaagctgtacggctactacgtgagcatcatcaactgccacctgcccccccacatcagcaacaactaccagagactggagcacttcgacagaatcctggagatgcagaactgcgagggcagagacatccccaacatcctggaccacgacctgatcatctggttcggcgacatgaacttcagaatcgaggacttcggcctgcacttcgtgagagagagcatcaagaacagatgctacggcggcctgtgggagaaggaccagctgagcatcgccaagaagcacgaccccctgctgagagagttccaggagggcagactgctgttcccccccacctacaagttcgacagaaacagcaacgactacgacaccagcgagaagaagagaaagcccgcctggaccgacagaatcctgtggagactgaagagacagccctgcgccggccccgacacccccatcccccccgccagccacttcagcctgagcctgagaggctacagcagccacatgacctacggcatcagcgaccacaagcccgtgagcggcaccttcgacctggagctgaagcccctggtgagcgcccccctgatcgtgctgatgcccgaggacctgtggaccgtggagaacgacatgatggtgagctacagcagcaccagcgacttccccagcagcccctgggactggatcggcctgtacaaggtgggcctgagagacgtgaacgactacgtgagctacgcctgggtgggcgacagcaaggtgagctgcagcgacaacctgaaccaggtgtacatcgacatcagcaacatccccaccaccgaggacgagttcctgctgtgctactacagcaacagcctgagaagcgtggtgggcatcagcagacccttccagatcccccccggcagcctgagagaggaccccctgggcgaggcccagccccagatctag

SEQ ID NO: 191795 - DNA, 2628 bp, Artificial Sequence
  derived and/or modified sequence
tcccgcctccttctgcgaaccgcaccacccagatcccggggtgcgcggagggcgcgtctctgacggaagccggggcggacggtcggagtccggaagaaaaacagtccgcgacagctaggcgcgtgagaccggccgcccgcagggctgctctggccgggacccgctggccgggagacgcgaacctgccggaccaccgcgcggggacgacggcggccatgagctcgcggaagctgagcgggccgaaaggcaggaggctcagcatacacgtcgtgacttggaacgtggcttcggcagcgccccctctagatctcagtgacctgcttcagctgaacaaccggaacctcaatcttgacatatatgttattggtttgcaggaattgaactctgggatcataagcctcctttccgatgctgcctttaatgactcgtggagcagtttcctcatggatgtgctttcccctctgagcttcatcaaggtctcccatgtccgtatgcaggggatcctcttactggtctttgccaagtatcagcatttgccctatatccagattctgtctactaaatccacccccactggcctgtttgggtactgggggaacaaaggtggagtcaacatctgcctgaagctttatggctactatgtcagcatcatcaactgccacctgcctccccacatttccaacaattaccagcggctggagcactttgaccggatcctggagatgcagaattgtgaggggcgagacatcccaaacatcctggaccacgacctcattatctggtttggagacatgaactttcggatcgaggactttgggttgcactttgttcgggaatccattaaaaatcggtgctacggtggcctgtgggagaaggaccagctcagcattgccaagaaacatgacccgctgctccgggagttccaggagggccgcctactcttcccgcccacctacaagtttgataggaactccaacgactatgacaccagtgagaaaaaacgcaagcctgcatggaccgatcgcatcctgtggaggctgaagcggcagccctgtgctggccccgacactcccataccgccggcgtcacacttctccttgtctctgaggggctacagcagccacatgacgtacggcatcagcgaccacaagcctgtctccggcacgttcgacttggagctgaagccattggtgtctgctccgctgatcgtcctgatgcccgaggacctgtggaccgtggaaaatgacatgatggtcagctactcttcaacctcggacttccccagcagcccgtgggactggattggactgtacaaggtggggctgcgggacgttaatgactacgtgtcctatgcctgggtcggggacagcaaggtctcctgcagcgacaacctgaaccaggtttacatcgacatcagcaatatccctaccactgaagatgagtttctcctctgttactacagcaacagtctgcgttctgtggtggggataagcagacccttccagatcccgcctggctccttgagggaggacccactgggtgaagcacagccacagatctgagccaggatgggagtgaatcccaggcggaggccagagctggcagccagctctgcctttccactgccgggagtgctgggggcccagcctggccccctgaagagacagccaagtgtcgtccacatactcctcccagagtgagctctaaccaggctcatttgctctctccactactcatctctggaattagccgcttaaatacaggtttttgttgctgagatgtgagtgaaaccagctagtgtgtcaacagtgaagacctggggacagttctgcgtctcatttctggattcctaccccctcttctagtcttgcccaagtagtcctgccaggcacatgccccatttggcacaggcctgcattcttgtcgtgccgtcctgggcctcaggctgtctgggaggggagatgctcacatttgtacaggctacatagactggtgcaagcagtgctggattccaggagtcttggcatctcatagcttgtccccgtgaggagtgagcagagggtctgggatttctgctttcagcaaaagcagtctgactcagtgggcagaatggaggggcccctctagccaggctcttacgccatggttatgagcaggttgatgagggtccttcggccagcacaaccttcctccctactcacggcatggagtctgactgcatggaagttccagatcctgacagagagaactgggaaggatccaggttcgcttccgttggtagcttgagtcccatgcctccaccctgccatctgaggaaggggtgacaagtggtcaaggagctgtggccacagacttttccagggtggtccttggcaggtgaggtgcgtctgtgccacccttgtcaggagccattgacgacgggccccccctggaccccccgggacctcagagtgggggcaggcagaagggagaaccagctcaagacattttggaggatctggccctggggttcttcagagaacaccctctaggggctttggggacatggcctgtccccacatccagcacttgcctccgccatggtcactcggcagcccttttcccaggagaagacacctctgggagcct

SEQ ID NO: 191796 - DNA, 1347 bp, Artificial Sequence
  derived and/or modified sequence
atgtcctcccgtaagctctcaggccccaagggtaggcggctgtccattcacgtggttacctggaatgtcgcctcagccgcccctccgttggatctatccgacttactgcagctgaacaataggaatctgaatcttgacatctacgttatcggtcttcaggaactaaactccggaataatctccctcctgagcgatgcagccttcaacgattcttggtcttccttcctcatggatgtcctgtctcctctaagcttcatcaaggtgagtcacgtgcgtatgcaaggcattcttctgctggtcttcgcaaagtatcaacatttgccgtatattcaaattctctccaccaaatcaacacctactggcctgttcggatactggggaaacaagggcggtgtcaacatttgtctaaagctgtatgggtattatgtgtctataatcaattgccatctgccccctcatatctctaacaactatcagcgcctggagcactttgatagaatcctggagatgcagaactgtgaaggccgggacatccccaacatcctggaccacgatttaatcatatggttcggggacatgaactttcgtatcgaagatttcggcctgcattttgtgcgggaaagtataaagaatcgctgctatggaggcctgtgggagaaagaccaactctccatagcaaagaagcacgatcccttgcttcgcgagttccaggagggaaggctgttattcccccccacttacaagttcgatagaaattctaacgactatgacactagtgagaaaaaaaggaaacccgcttggacggaccgaatcctatggaggctgaaacgccaaccgtgtgcaggccccgataccccaattccgccagccagtcacttttcgctgtcccttcgggggtactccagtcatatgacatatggaatcagtgaccacaaacccgtgtcagggacctttgatctagagttgaaaccccttgtaagtgcccctttgatcgtactcatgcctgaagacctatggacagtcgaaaatgacatgatggtcagttacagctcgacatcagattttccgagttcaccatgggattggattggtctctacaaagtgggactacgggacgtgaacgactatgtgagctatgcctgggtcggtgactctaaagtgtcctgcagcgacaatctcaaccaggtgtatatagacatcagtaacatccccaccactgaagatgaattcctcttatgctattatagcaattcccttcgctcagtggtgggaattagccgcccctttcagatccccccaggctccttgagggaggacccactgggcgaggctcaaccacaaatatag

SEQ ID NO: 191797 - DNA, 1347 bp, Artificial Sequence
  derived and/or modified sequence
atgagcagcaggaagctgagcggccccaagggccggcggctgagcatccacgtggtgacctggaatgtggccagcgctgccccacccctggacctgagtgacctgctgcagctgaacaacagaaacctgaacctggacatctacgtgattggcctgcaggagctgaacagcggcatcatcagcctgctgagtgatgctgccttcaatgacagctggagcagcttcctgatggatgtgctgagccccctgtccttcatcaaggtgagccacgtgaggatgcagggcatcctgctgctggtgtttgccaagtaccagcacctgccctacatccagatcctgagcaccaagagcacccccaccggcctgtttggctactggggcaacaagggcggcgtgaacatctgcctgaagctgtatggctactacgtgtccatcatcaactgccacctgcccccccacatcagcaacaactaccagaggctggagcactttgaccgcatcctggagatgcagaactgtgagggccgggacatccccaacatcctggaccatgacctgatcatctggtttggagacatgaacttcagaattgaggactttggcctgcactttgtgcgggagagcatcaagaaccgctgctacggcggcctgtgggagaaggaccagctgagcatcgccaagaagcatgaccccctgctgcgggagttccaggagggccgcctgctcttcccccccacctacaagtttgacaggaacagcaatgactatgacaccagcgagaagaagaggaagccagcctggacagaccgcatcctgtggaggctgaagaggcagccctgtgccggccctgacacccccatccccccagccagccacttcagcctgagcctgcggggctacagcagccacatgacctacggcatcagtgaccacaagcctgtgtctggcacctttgacctggagctgaagcccctggtgtctgcccccctgattgtgctgatgcctgaggacctgtggacagtggagaatgacatgatggtgtcctacagcagcaccagtgacttccccagcagcccctgggactggattggcctgtacaaggtgggcctgagagatgtgaatgactatgtgtcctatgcctgggtgggggacagcaaggtgtcctgcagcgacaacctgaaccaggtgtacatcgacatcagcaacatccccaccacagaagatgagttcctgctgtgctactacagcaacagcctgcggtctgtggtgggcatcagccggcccttccagatccccccaggcagcctgcgggaggaccccctgggggaggcccagccccagatctag

SEQ ID NO: 191798 - DNA, 1347 bp, Artificial Sequence
  derived and/or modified sequence
atgagcagccggaagctgagcggccccaagggccggcggctgagcatacatgttgtcacctggaacgtagcatcagccgcccctccgctggacctgtccgatctattacaactcaacaaccggaatctgaatctggacatatatgtaatcggtttgcaggagctgaacagcgggattatctctctcctttcagatgcggcctttaatgactcctggtctagttttcttatggacgtcctgtcgcccttgagcttcatcaaggtgtcccatgtccgaatgcagggcatcttactgctggtcttcgctaagtaccaacaccttccctacatccagatcttgagcacaaagagcaccccgaccggactattcggatattgggggaataaggggggggtgaatatatgcttaaaactgtatggctactacgtgtcaatcatcaactgccacctccctccacacatttccaataattatcagcgcctggagcattttgatagaattctggagatgcagaattgtgagggtagagacataccgaacatcctggatcacgacctgatcatctggttcggagacatgaattttcgcatcgaggactttggcctccatttcgtccgggagagtatcaagaaccggtgttatggaggtctctgggagaaagaccaactgtcaattgcaaagaaacacgatccattgttaagagagtttcaagaaggacggttactgttccctccaacatacaaattcgatcggaactcgaacgattacgatacctcagagaagaaacggaagcctgcctggacagacagaatcttatggagactgaaaaggcaaccatgcgccgggccagatacccccattccccccgcatcccactttagcctgagcttgaggggctatagttcacatatgacatacgggatctcagaccacaagcccgtgtctggtacatttgaccttgagttgaagccgctggtgtcagcccccctgatcgtactgatgcctgaagacttgtggaccgttgagaatgacatgatggtctcttattcttccacaagtgactttccatcctccccctgggattggattgggttgtataaagtgggactgagggacgtgaacgactatgtgagctatgcttgggtgggcgactccaaggtgtcctgctccgacaatttaaatcaggtttatattgacatctccaatattcccaccaccgaggatgaattcctgctgtgctactactccaatagcttgcgctcagtggtggggatctctcggcccttccagatccctcccggcagcttgcgggaagaccctttgggcgaggctcagccccagatctag

SEQ ID NO: 191799 - DNA, 3094 bp, Artificial Sequence
  derived and/or modified sequence
gggcggacggtcggagtccggaagaaaaacagtccgcgacagctaggcgcgtgagaccggccgcccgcagggctgctctggccgggacccgctggccgggagacgcgaacctgccggaccaccgcgcggggacgacggcggccatgagctcgcggaagctgagcgggccgaaaggcaggaggctcagcacatacatcaggaggtctgcctgatcccatggtgaaccccgggaatccgaaatcagattgagataagatcctttagggaagtgacttagcctggtctcttgcctgctctttcacggggaacaacgctaatcgcccacttagtctaagtcacgatgcttggatttgctgctaatcgtcggatttgagagtgggaacaagaaatccggacttttgctctccatcctcttagaatctccagctgctgcaggtactcctcatcgtgtgcctaggactcatgctaggctgttcctggtctctgcagggtctgtagctcctgcccgctctgtgctccgcacagtctgaggcttcttgaagagctgctgtgactgactgttccactaaagacatctcatacacgtcgtgacttggaacgtggcttcggcagcgccccctctagatctcagtgacctgcttcagctgaacaaccggaacctcaatcttgacatatatgttattggtttgcaggaattgaactctgggatcataagcctcctttccgatgctgcctttaatgactcgtggagcagtttcctcatggatgtgctttcccctctgagcttcatcaaggtctcccatgtccgtatgcaggggatcctcttactggtctttgccaagtatcagcatttgccctatatccagattctgtctactaaatccacccccactggcctgtttgggtactgggggaacaaaggtggagtcaacatctgcctgaagctttatggctactatgtcagcatcatcaactgccacctgcctccccacatttccaacaattaccagcggctggagcactttgaccggatcctggagatgcagaattgtgaggggcgagacatcccaaacatcctggaccacgacctcattatctggtttggagacatgaactttcggatcgaggactttgggttgcactttgttcgggaatccattaaaaatcggtgctacggtggcctgtgggagaaggaccagctcagcattgccaagaaacatgacccgctgctccgggagttccaggagggccgcctactcttcccgcccacctacaagtttgataggaactccaacgactatgacaccagtgagaaaaaacgcaagcctgcatggaccgatcgcatcctgtggaggctgaagcggcagccctgtgctggccccgacactcccataccgccggcgtcacacttctccttgtctctgaggggctacagcagccacatgacgtacggcatcagcgaccacaagcctgtctccggcacgttcgacttggagctgaagccattggtgtctgctccgctgatcgtcctgatgcccgaggacctgtggaccgtggaaaatgacatgatggtcagctactcttcaacctcggacttccccagcagcccgtgggactggattggactgtacaaggtggggctgcgggacgttaatgactacgtgtcctatgcctgggtcggggacagcaaggtctcctgcagcgacaacctgaaccaggtttacatcgacatcagcaatatccctaccactgaagatgagtttctcctctgttactacagcaacagtctgcgttctgtggtggggataagcagacccttccagatcccgcctggctccttgagggaggacccactgggtgaagcacagccacagatctgagccaggatgggagtgaatcccaggcggaggccagagctggcagccagctctgcctttccactgccgggagtgctgggggcccagcctggccccctgaagagacagccaagtgtcgtccacatactcctcccagagtgagctctaaccaggctcatttgctctctccactactcatctctggaattagccgcttaaatacaggtttttgttgctgagatgtgagtgaaaccagctagtgtgtcaacagtgaagacctggggacagttctgcgtctcatttctggattcctaccccctcttctagtcttgcccaagtagtcctgccaggcacatgccccatttggcacaggcctgcattcttgtcgtgccgtcctgggcctcaggctgtctgggaggggagatgctcacatttgtacaggctacatagactggtgcaagcagtgctggattccaggagtcttggcatctcatagcttgtccccgtgaggagtgagcagagggtctgggatttctgctttcagcaaaagcagtctgactcagtgggcagaatggaggggcccctctagccaggctcttacgccatggttatgagcaggttgatgagggtccttcggccagcacaaccttcctccctactcacggcatggagtctgactgcatggaagttccagatcctgacagagagaactgggaaggatccaggttcgcttccgttggtagcttgagtcccatgcctccaccctgccatctgaggaaggggtgacaagtggtcaaggagctgtggccacagacttttccagggtggtccttggcaggtgaggtgcgtctgtgccacccttgtcaggagccattgacgacgggccccccctggaccccccgggacctcagagtgggggcaggcagaagggagaaccagctcaagacattttggaggatctggccctggggttcttcagagaacaccctctaggggctttggggacatggcctgtccccacatccagcacttgcctccgccatggtcactcggcagcccttttcccaggagaagacacctctgggagcctgctcagtgcttgtcctgccatcctgtgtcctgggactgagggttactccagttgctctgtgttgcatactctcccccgcaagcctgtgtatgaagaattgtcccctggcttccagcaggccatggctggctgttttgtgactgttaca

SEQ ID NO: 191800 - DNA, 1347 bp, Artificial Sequence
  derived and/or modified sequence
atgagctctcggaaactttcaggacctaagggaaggcggctctctattcacgtggtgacgtggaatgttgccagcgcagcaccaccattggacctcagtgacctccttcagctcaacaaccgtaatcttaacctggatatctacgtgatcgggttgcaagagctgaattcgggcattatttctttactgagcgatgccgcattcaacgacagttggtctagtttcctgatggatgttctgtctcccctgagtttcatcaaagtgtcgcacgttcgcatgcagggaattcttctgttagtgttcgcaaagtatcagcacctcccgtacatccaaatcttatcaactaagtccacaccaacaggtctgttcggttactggggcaataaggggggtgtaaacatctgtctgaagctgtatggatattacgttagcatcattaattgccacttaccaccccacatctccaacaactaccagcggctggagcacttcgatcgcattcttgaaatgcagaattgtgaaggccgagatattcctaacatcctggaccacgacctgatcatttggttcggggacatgaatttcaggatcgaggattttggcttgcatttcgttcgagagtccatcaaaaaccgttgctacggtgggctatgggagaaggatcagctctcaattgctaaaaagcacgatcctctgctgcgagaattccaagaaggaagactccttttccccccaacctataagtttgaccgcaatagtaacgactacgatacttccgaaaaaaagaggaagccggcttggactgaccggatcctgtggcgattaaagagacagccttgcgcaggccctgacacccctattccccctgctagccacttttcactgtcactgagggggtatagctcccatatgacttacggcatcagcgaccacaagcctgtgagcgggacattcgaccttgagctgaagccgctagtgagtgctcctttaattgtcttaatgccagaagacctgtggacagtcgagaacgacatgatggtatcttatagttctacatccgacttcccgagcagtccttgggactggatcggcttgtataaggtggggctgcgggatgtgaatgactatgtcagttatgcctgggtcggagatagcaaagtcagctgtagtgacaatctgaatcaggtatatatcgatatatcgaacatccccacaaccgaggacgaatttctcttatgctattactcaaactcccttcgctctgtggtgggcatcagcagaccctttcagatcccccctgggagtctgagggaagaccctctcggggaggcacagcctcaaatctag

SEQ ID NO: 191801 - DNA, 3212 bp, Artificial Sequence
  derived and/or modified sequence
acgctgggagctgcggacggcgggcgcgggctgggccgggtctagtggcggccgcacacctcgcgtcgtctggggcagtgttgcgcgtgcgctgatgacaggcccgacacgcccctcttacgtccgcgaacccgtcttcgctcagcctctcgcagctttgcgctcgtgggagagtcccgcctccttctgcgaaccgcaccacccagatcccggggtgcgcggagggcgcgtctctgacggaagccggggcggacggtcggagtccggaagaaaaacagtccgcgacagctaggcgcgtgagaccggccgcccgcagggctgctctggccgggacccgctggccgggagacgcgaacctgccggaccaccgcgcggggacgacggcggccatgagctcgcggaagctgagcgggccgaaaggcaggaggctcagcacatacatcaggaggtctgcctgatcccatggtgaaccccgggaatccgaaatcagattgagataagatcctttagggaagtgacttagcctggtctcttgcctgctctttcacggggaacaacgctaatcgcccacttagtctaagtcacgatgcttggatttgctgctaatcgtcggatttgagagtgggaacaagaaatccggacttttgctctccatcctcttagacatacacgtcgtgacttggaacgtggcttcggcagcgccccctctagatctcagtgacctgcttcagctgaacaaccggaacctcaatcttgacatatatgttattggtttgcaggaattgaactctgggatcataagcctcctttccgatgctgcctttaatgactcgtggagcagtttcctcatggatgtgctttcccctctgagcttcatcaaggtctcccatgtccgtatgcaggggatcctcttactggtctttgccaagtatcagcatttgccctatatccagattctgtctactaaatccacccccactggcctgtttgggtactgggggaacaaaggtggagtcaacatctgcctgaagctttatggctactatgtcagcatcatcaactgccacctgcctccccacatttccaacaattaccagcggctggagcactttgaccggatcctggagatgcagaattgtgaggggcgagacatcccaaacatcctggaccacgacctcattatctggtttggagacatgaactttcggatcgaggactttgggttgcactttgttcgggaatccattaaaaatcggtgctacggtggcctgtgggagaaggaccagctcagcattgccaagaaacatgacccgctgctccgggagttccaggagggccgcctactcttcccgcccacctacaagtttgataggaactccaacgactatgacaccagtgagaaaaaacgcaagcctgcatggaccgatcgcatcctgtggaggctgaagcggcagccctgtgctggccccgacactcccataccgccggcgtcacacttctccttgtctctgaggggctacagcagccacatgacgtacggcatcagcgaccacaagcctgtctccggcacgttcgacttggagctgaagccattggtgtctgctccgctgatcgtcctgatgcccgaggacctgtggaccgtggaaaatgacatgatggtcagctactcttcaacctcggacttccccagcagcccgtgggactggattggactgtacaaggtggggctgcgggacgttaatgactacgtgtcctatgcctgggtcggggacagcaaggtctcctgcagcgacaacctgaaccaggtttacatcgacatcagcaatatccctaccactgaagatgagtttctcctctgttactacagcaacagtctgcgttctgtggtggggataagcagacccttccagatcccgcctggctccttgagggaggacccactgggtgaagcacagccacagatctgagccaggatgggagtgaatcccaggcggaggccagagctggcagccagctctgcctttccactgccgggagtgctgggggcccagcctggccccctgaagagacagccaagtgtcgtccacatactcctcccagagtgagctctaaccaggctcatttgctctctccactactcatctctggaattagccgcttaaatacaggtttttgttgctgagatgtgagtgaaaccagctagtgtgtcaacagtgaagacctggggacagttctgcgtctcatttctggattcctaccccctcttctagtcttgcccaagtagtcctgccaggcacatgccccatttggcacaggcctgcattcttgtcgtgccgtcctgggcctcaggctgtctgggaggggagatgctcacatttgtacaggctacatagactggtgcaagcagtgctggattccaggagtcttggcatctcatagcttgtccccgtgaggagtgagcagagggtctgggatttctgctttcagcaaaagcagtctgactcagtgggcagaatggaggggcccctctagccaggctcttacgccatggttatgagcaggttgatgagggtccttcggccagcacaaccttcctccctactcacggcatggagtctgactgcatggaagttccagatcctgacagagagaactgggaaggatccaggttcgcttccgttggtagcttgagtcccatgcctccaccctgccatctgaggaaggggtgacaagtggtcaaggagctgtggccacagacttttccagggtggtccttggcaggtgaggtgcgtctgtgccacccttgtcaggagccattgacgacgggccccccctggaccccccgggacctcagagtgggggcaggcagaagggagaaccagctcaagacattttggaggatctggccctggggttcttcagagaacaccctctaggggctttggggacatggcctgtccccacatccagcacttgcctccgccatggtcactcggcagcccttttcccaggagaagacacctctgggagcctgctcagtgcttgtcctgccatcctgtgtcctgggactgagggttactccagttgctctgtgttgcatactctcccccgcaagcctgtgtatgaagaattgtcccctggcttccagcaggccatggctggctgttttgtgactgttacattgtgcaggggtaattattagcgtggctttt

SEQ ID NO: 191802 - DNA, 963 bp, Artificial Sequence
  derived and/or modified sequence
agctttgcgctcgtgggagagtcccgcctccttctgcgaaccgcaccacccagatcccggggtgcgcggagggcgcgtctctgacggaagccggggcggacggtcggagtccggaagaaaaacagtccgcgacagctaggcgcgtgagaccggccgcccgcagggctgctctggccgggacccgctggccgggagacgcgaacctgccggaccaccgcgcggggacgacggcggccatgagctcgcggaagctgagcgggccgaaaggcaggaggctcagcacatacatcaggaggtctgcctgatcccatggtgaaccccgggaatccgaaatcagattgagataagatcctttagggaagtgacttagcctggtctcttgcctgctctttcacggggaacaacgctaatcgcccacttagtctaagtcacgatgcttggatttgctgctaatcgtcggatttgagagtgggaacaagaaatccggacttttgctctccatcctcttagacatacacgtcgtgacttggaacgtggcttcggcagcgccccctctagatctcagtgacctgcttcagctgaacaaccggaacctcaatcttgacatatatgttattggtttgcaggaattgaactctgggatcataagcctcctttccgatgctgcctttaatgactcgtggagcagtttcctcatggatgtgctttcccctctgagcttcatcaaggtctcccatgtccgtatgcaggggatcctcttactggtctttgccaagtatcagcatttgccctatatccagattctgtctactaaatccacccccactggcctgtttgggtactgggggaacaaaggtggagtcaacatctgcctgaagctttatggctactatgtcagcatcatcaactgccacctgcctccccacatttccaacaattaccagcggctggagcactttgacc

SEQ ID NO: 191803 - DNA, 2818 bp, Artificial Sequence
  derived and/or modified sequence
ggtgcgcggagggcgcgtctctgacggaagccggggcggacggtcggagtccggaagaaaaacagtccgcgacagctaggcgcgtgagaccggccgcccgcagggctgctctggccgggacccgctggccgggagacgcgaacctgccggaccaccgcgcggggacgacggcggccatgagctcgcggaagctgagcgggccgaaaggcaggaggctcagcatacatcaggaggtctgcctgatcccatggtgaaccccgggaatccgaaatcagattgagataagatcctttagggaagtgacttagcctggtctcttgcctgctctttcacggggaacaacgctaatcgcccacttagtctaagtcacgatgcttggatttgctgctaatcgtcggatttgagagtgggaacaagaaatccggacttttgctctccatcctcttagacatacacgtcgtgacttggaacgtggcttcggcagcgccccctctagatctcagtgacctgcttcagctgaacaaccggaacctcaatcttgacatatatgttattggtttgcaggaattgaactctgggatcataagcctcctttccgatgctgcctttaatgactcgtggagcagtttcctcatggatgtgctttcccctctgagcttcatcaaggtctcccatgtccgtatgcaggggatcctcttactggtctttgccaagtatcagcatttgccctatatccagattctgtctactaaatccacccccactggcctgtttgggtactgggggaacaaaggtggagtcaacatctgcctgaagctttatggctactatgtcagcatcatcaactgccacctgcctccccacatttccaacaattaccagcggctggagcactttgaccggatcctggagatgcagaattgtgaggggcgagacatcccaaacatcctggaccacgacctcattatctggtttggagacatgaactttcggatcgaggactttgggttgcactttgttcgggaatccattaaaaatcggtgctacggtggcctgtgggagaaggaccagctcagcattgccaagaaacatgacccgctgctccgggagttccaggagggccgcctactcttcccgcccacctacaagtttgataggaactccaacgactatgacaccagtgagaaaaaacgcaagcctgcatggaccgatcgcatcctgtggaggctgaagcggcagccctgtgctggccccgacactcccataccgccggcgtcacacttctccttgtctctgaggggctacagcagccacatgacgtacggcatcagcgaccacaagcctgtctccggcacgttcgacttggagctgaagccattggtgtctgctccgctgatcgtcctgatgcccgaggacctgtggaccgtggaaaatgacatgatggtcagctactcttcaacctcggacttccccagcagcccgtgggactggattggactgtacaaggtggggctgcgggacgttaatgactacgtgtcctatgcctgggtcggggacagcaaggtctcctgcagcgacaacctgaaccaggtttacatcgacatcagcaatatccctaccactgaagatgagtttctcctctgttactacagcaacagtctgcgttctgtggtggggataagcagacccttccagatcccgcctggctccttgagggaggacccactgggtgaagcacagccacagatctgagccaggatgggagtgaatcccaggcggaggccagagctggcagccagctctgcctttccactgccgggagtgctgggggcccagcctggccccctgaagagacagccaagtgtcgtccacatactcctcccagagtgagctctaaccaggctcatttgctctctccactactcatctctggaattagccgcttaaatacaggtttttgttgctgagatgtgagtgaaaccagctagtgtgtcaacagtgaagacctggggacagttctgcgtctcatttctggattcctaccccctcttctagtcttgcccaagtagtcctgccaggcacatgccccatttggcacaggcctgcattcttgtcgtgccgtcctgggcctcaggctgtctgggaggggagatgctcacatttgtacaggctacatagactggtgcaagcagtgctggattccaggagtcttggcatctcatagcttgtccccgtgaggagtgagcagagggtctgggatttctgctttcagcaaaagcagtctgactcagtgggcagaatggaggggcccctctagccaggctcttacgccatggttatgagcaggttgatgagggtccttcggccagcacaaccttcctccctactcacggcatggagtctgactgcatggaagttccagatcctgacagagagaactgggaaggatccaggttcgcttccgttggtagcttgagtcccatgcctccaccctgccatctgaggaaggggtgacaagtggtcaaggagctgtggccacagacttttccagggtggtccttggcaggtgaggtgcgtctgtgccacccttgtcaggagccattgacgacgggccccccctggaccccccgggacctcagagtgggggcaggcagaagggagaaccagctcaagacattttggaggatctggccctggggttcttcagagaacaccctctaggggctttggggacatggcctgtccccacatccagcacttgcctccgccatggtcactcggcagcccttttcccaggagaagacacctctgggagcct

SEQ ID NO: 191804 - protein, 188 aa, Artificial Sequence
  derived and/or modified sequence
MAGLSRQLCALSHPKKAAETQTAEPGGAHAVCSRHPVRVKGLEGSEMESARENIDLQPGSSDPRSQPINLNHYATKKSVAESMLDVALFMSNAMRLKAVLEQGPSSHYYTTLVTLISLSLLLQVVIGVLLVVIARLNLNEVEKQWRLNQLNNAATILVFFTVVINVFITAFGAHKTGFLAARASRNPL

SEQ ID NO: 191805 - DNA, 567 bp, Artificial Sequence
  derived and/or modified sequence
atggctggattatcacggcaactctgcgccctgtctcatccgaaaaaggctgctgagactcagaccgccgaacccggtggagcgcacgccgtgtgctcacgccaccccgtccgggtgaaaggacttgagggcagcgagatggagtctgcgcgagaaaatattgatctacagccaggcagctccgaccctcgctctcaacctattaatctgaaccactatgccactaaaaagagcgtcgccgagtctatgttagatgtcgcactgtttatgtctaacgcaatgagacttaaggccgtccttgagcagggtccttcttctcattactatacgacattagtgacgctgatctccttgtctctgctgcttcaggtagtgattggagtcctacttgtggtgatcgcccgattgaatcttaatgaagtggaaaagcagtggaggctcaatcagctgaataatgccgcaaccatcttagtcttctttaccgtggtcattaacgtcttcattacggcatttggcgcacacaaaactggattcctagctgcccgggcatcgcgcaatcccctatag

SEQ ID NO: 191806 - DNA, 567 bp, Artificial Sequence
  derived and/or modified sequence
atggccggcctgagccggcagctgtgtgccctgagccaccccaagaaggctgctgagacccagacagctgagcctggaggagcccatgctgtgtgcagccgccaccctgtgcgggtgaagggcctggagggcagcgagatggagagcgcccgggagaacatcgacctgcagcccggcagcagtgaccccaggagccagcccatcaacctgaaccactacgccaccaagaagtctgtggccgagagcatgctggatgtggccctcttcatgagcaatgccatgaggctgaaggctgtgctggagcagggccccagcagccactactacaccaccctggtgaccctcatcagcctgagcctgctgctgcaggtggtgattggagtgctgctggtggtgattgcccggctgaacctgaatgaggtggagaagcagtggaggctgaaccagctgaacaatgctgccaccatcctggtgttcttcaccgtggtgatcaacgtgttcatcacagcctttggagcccacaagacaggcttcctggccgcccgggccagcaggaaccccctgtag

SEQ ID NO: 191807 - DNA, 567 bp, Artificial Sequence
  derived and/or modified sequence
atggccggcctgagccggcagctgtgcgccctgagccaccccaagaaggccgctgaaactcagaccgctgagcctgggggcgctcacgccgtgtgttctaggcaccctgtgcgagttaaggggctggaagggtcagagatggagtctgcccgcgaaaacatcgacctacagccaggctcttctgaccctagaagtcaacctatcaacctcaaccattacgcaaccaagaaatccgttgctgaaagcatgctggatgttgccttgtttatgtccaatgcaatgagacttaaggccgtgctggaacaggggcccagttcccactattatactaccctggtaaccctcatttctcttagccttctgctacaagtggtgataggcgtgttactggtagtcatcgccaggttgaacctgaacgaggtggaaaagcaatggagactgaaccagctgaacaacgccgccaccatccttgtgttctttacagtcgtgataaatgtgtttattactgccttcggcgcgcataagaccggttttttggctgcacgggctagtcgaaatcccctttag

SEQ ID NO: 191808 - DNA, 1252 bp, Artificial Sequence
  derived and/or modified sequence
aatttgcttgataaacatgcaggatttctttgccagtcataaagctactagctcaaagcaggctgggtgacctcagatggctccgctgggactggaaggtcactggagccactggtgaaaatgatgctgtcactaccaactcaaaaggtcacctatcagtgtgccatgtgccacctcctggagcacacacatgtgcacacacatacactcacacgtgtgtgcaggtgcacacctcccccagaggctgcagccaagacgggcatcccacatcagagggatgaatggcaggtctgtcccgccagctgtgtgctctctcccacccgaagaaagcagcagagactcagacggcggagcctggaggagcccacgcagtctgttcccggcacccggtgcgtgtgaagggacttgagggcagcgagatggaatcagcaagagaaaacatcgaccttcaacctggaagctccgaccccaggagccagcccatcaacctgaaccattacgccaccaagaagagcgtggcggagagcatgctggacgtggccctgttcatgtccaacgccatgcggctgaaggcggtgctggagcagggaccatcctctcactactacaccaccctggtcaccctcatcagcctctctctgctcctgcaggtggtcatcggtgtcctgctcgtggtcattgcacggctgaacctgaatgaggtagaaaagcagtggcgactcaaccagctcaacaacgcagccaccatcttggtcttcttcactgtggtcatcaatgttttcattacagccttcggggcacataaaacagggttcctggctgccagggcctcaaggaatcctctctgaatgcagcctgggacccaggttctgggcctggaacttctgcctccttcctccgtgatctgccaggctcgtgggcactttccacagcccaggagagcttctgaaaggacagtatagctgcccttgctccctacccacagcacctgagttaaaaagtgatttttatgttattggtctaagggacttccatcttggtctgaagtcctgagctcagacgcaggtactgccagccataccttcctggtagcatctgctggacctaagtaaggcatgtctgtctaaggccaagtctgcccggcttaaggatgctggttctgactctaccccactgcttccttctgctccaggcctcaattttcccttcttgtaaaatggaatctatatctataaaggtttcttcaaatcca

SEQ ID NO: 191809 - DNA, 567 bp, Artificial Sequence
  derived and/or modified sequence
atggctggtctatctagacaattgtgcgccctgtctcacccgaagaaagcggcagaaactcagacagccgaacccggaggggctcatgccgtgtgctctcggcaccccgtaagagtgaagggactggagggctccgagatggagagtgccagggaaaatatagatttacagcccggatcttctgatccacggagccaaccaattaatctaaatcactacgcaacaaagaagtctgtggcagaatccatgctcgacgtggcgctgttcatgagtaacgcgatgcggttgaaagcggtgctggaacaagggccaagctcccactactatacaacattagtgaccctcatttccctaagcctactgctccaggttgttatcggtgtgctgctagtggtcatagccagattgaatcttaacgaggtagaaaagcagtggcgccttaatcaactcaataacgctgccacgatcttagtgttcttcaccgtggtgatcaacgtgtttatcacggcgttcggagcacacaagaccggctttctcgccgctcgtgcatcgaggaaccccctctag

SEQ ID NO: 191810 - DNA, 567 bp, Artificial Sequence
  derived and/or modified sequence
atggccggcctgagcagacagctgtgcgccctgagccaccccaagaaggccgccgagacccagaccgccgagcccggcggcgcccacgccgtgtgcagcagacaccccgtgagagtgaagggcctggagggcagcgagatggagagcgccagagagaacatcgacctgcagcccggcagcagcgaccccagaagccagcccatcaacctgaaccactacgccaccaagaagagcgtggccgagagcatgctggacgtggccctgttcatgagcaacgccatgagactgaaggccgtgctggagcagggccccagcagccactactacaccaccctggtgaccctgatcagcctgagcctgctgctgcaggtggtgatcggcgtgctgctggtggtgatcgccagactgaacctgaacgaggtggagaagcagtggagactgaaccagctgaacaacgccgccaccatcctggtgttcttcaccgtggtgatcaacgtgttcatcaccgccttcggcgcccacaagaccggcttcctggccgccagagccagcagaaaccccctgtag

SEQ ID NO: 191811 - protein, 400 aa, Artificial Sequence
  derived and/or modified sequence
MAAGGLSRSERKAAERVRRLREEQQRERLRQVSRILRKAAAERSAEEGRLLAESADLVTELQGRSRRREGLKRRQEEVCDDPEELRGKVRELASAVRNAKYLVVYTGAGISTAASIPDYRGPNGVWTLLQKGRSVSAADLSEAEPTLTHMSITRLHEQKLVQHVVSQNCDGLHLRSGLPRTAISELHGNMYIEVCTSCVPNREYVRVFDVTERTALHRHQTGRTCHKCGTQLRDTIVHFGERGTLGQPLNWEAATEAASRADTILCLGSSLKVLKKYPRLWCMTKPPSRRPKLYIVNLQWTPKDDWAALKLHGKCDDVMRLLMAELGLEIPAYSRWQDPIFSLATPLRAGEEGSHSRKSLCRSREEAPPGDRGAPLSSAPILGGWFGRGCTKRTKRKKVT

SEQ ID NO: 191812 - protein, 320 aa, Artificial Sequence
  derived and/or modified sequence
MPGPRRRSPSACPQVSRILRKAAAERSAEEGRLLAESADLVTELQGRSRRREGLKRRQEEVCDDPEELRGKVRELASAVRNAKYLVVYTGAGISTAASIPDYRGPNGVWTLLQKGRSVSAADLSEAEPTLTHMSITRLHEQKLVQHVVSQNCDGLHLRSGLPRTAISELHGNMYIEVCTSCVPNREYVRVFDVTERTALHRHQTGRTCHKCGTQLRDTIVHFGERGTLGQPLNWEAATEAASRADTILCLGSSLKVLKKYPRLWCMTKPPSRRPKLYIVNLQWTPKDDWAALKLHGKCDDVMRLLMAELGLEIPAYSRVL

SEQ ID NO: 191813 - DNA, 1203 bp, Artificial Sequence
  derived and/or modified sequence
atggccgcaggtgggttgtcgaggtccgagcggaaagcagccgaacgggtgcgccgactcagagaggagcagcagagggagcgtctgcgccaggtcagtcggatccttcggaaagcagcagccgagagatcagccgaagaggggaggttgctcgctgaaagtgccgatctcgtaactgagctgcagggccgatcccgaagaagggaagggctcaagcggagacaggaagaggtgtgtgacgacccagaggaactacggggaaaagtgcgcgagcttgcttctgcagtgaggaacgctaagtacttggtggtctacactggcgccgggatatctactgcagcatcgatcccagactaccgtggccctaacggggtctggaccctcttgcaaaaggggcgaagcgtctccgccgccgacctgagcgaagccgaacccacactgacccatatgtcaatcacacggctgcacgagcagaagctggtccagcacgtggtttctcaaaattgtgacggtcttcatctgaggagtgggttgccacgaaccgcaatctccgagttacatggtaacatgtatattgaggtgtgcacatcttgtgtgcctaaccgggaatatgtgcgagtgtttgacgtgaccgaacgcactgcactacatcgccaccagacaggccgaacttgccataagtgcggtacccagctgcgagataccattgtccatttcggggagcgaggcacgttgggacagccgttgaactgggaggccgccaccgaagccgctagcagagctgataccatcctttgccttggaagttccttgaaggtactcaagaaatatcctagattatggtgcatgactaaacctcctagccgacgcccaaagctttacattgtcaatttgcagtggacccctaaggatgattgggctgccctaaagctgcatggaaaatgtgacgacgtgatgagacttctgatggccgagttgggtcttgagatccctgcctactcacgctggcaggatccaatctttagcttagccactcccttgcgggcgggagaggaaggttcccacagccgaaaaagcctctgtaggagccgggaggaagccccaccgggtgacagaggtgcacccttgtcctcagctcctattttgggaggttggttcggtcgaggttgcacaaagagaaccaaaagaaaaaaagtcacatag

SEQ ID NO: 191814 - DNA, 963 bp, Artificial Sequence
  derived and/or modified sequence
atgcctggcccacgccggcgctcaccctccgcatgcccacaagtctcacggatcctgagaaaagctgctgccgaacggagtgcagaggagggcaggctgctggctgaatccgctgatcttgttaccgagcttcagggccgatcacggcgaagagaaggtttgaagcggaggcaggaggaggtctgcgacgaccctgaggaactgcgaggaaaggtcagagagctagccagcgccgttaggaatgcaaagtacctagtcgtgtacacgggcgctggaataagcaccgcagcgagcatccctgactatcggggccccaatggagtgtggactttactgcagaaggggcgcagcgtttccgcagccgacctaagtgaagcagagccaaccctgacgcatatgtctatcaccagattgcacgaacagaagcttgtgcagcacgtcgtctctcagaactgcgacggtctgcacctgcgctcgggtctcccccgtactgcgataagcgaactacacggaaatatgtacattgaggtgtgtaccagttgtgttccaaacagggaatacgtgcgcgtctttgacgtcactgaacgaactgcactgcatcgccaccagaccgggcggacctgtcacaagtgcggcacacaactcagggacactatcgtgcactttggcgagcggggcactctcggacaacctctgaactgggaggcagccactgaagccgcttctcgagcagatacaatactatgcctaggcagttctctgaaggtgctgaaaaagtatccccggctatggtgcatgaccaaacccccatccaggaggcccaagctgtatattgttaatctgcagtggactcccaaggacgactgggcagcactgaagctgcacggcaaatgcgacgacgttatgcggcttcttatggctgagctgggactagagatcccagcttactcccgggtgctgtag

SEQ ID NO: 191815 - DNA, 1203 bp, Artificial Sequence
  derived and/or modified sequence
atggctgctgggggcctgagccgctctgagaggaaggctgctgagcgggtgcggcggctgcgggaggagcagcagcgggagcggctgcggcaggtgagccgcatcctgaggaaggctgctgctgagaggtctgctgaggagggccgcctgctggccgagagcgctgacctggtgacagagctgcagggccgcagcagaagaagagagggcctgaagaggcggcaggaggaggtgtgtgatgatcctgaggagctgcggggcaaggtgcgggagctggccagcgctgtgagaaatgccaagtacctggtggtgtacaccggggccggcatcagcacagctgccagcatcccagactaccggggccccaatggagtgtggaccctgctgcagaagggccgctctgtgtctgctgctgacctgtctgaggccgagcccaccctgacccacatgagcatcacccggctgcacgagcagaagctggtgcagcacgtggtgtcccagaactgtgatggcctgcacctgcggagcggcctgcccaggacagccatcagcgagctgcacggcaacatgtacatcgaggtgtgcaccagctgtgtgcccaaccgggagtatgtgcgggtgtttgatgtgacagagaggacagccctgcaccgccaccagacaggccgcacctgccacaagtgtggcacccagctgcgggacaccatcgtgcactttggagagcggggcaccctgggccagcccctgaactgggaggccgccacagaagctgccagcagagctgacaccatcctgtgcctgggcagcagcctgaaggtgctgaagaagtacccccggctgtggtgcatgaccaagccacccagcagaagacccaagctgtacatcgtgaacctgcagtggacccccaaggatgactgggccgccctgaagctgcacggcaaatgtgatgatgtgatgaggctgctgatggccgagctgggcctggagatcccagcctacagccgctggcaggaccccatcttcagcctggccacccccctgcgggccggggaggagggcagccacagcaggaagagcctgtgccgcagccgggaggaggcccctcctggggacagaggagcccccctgagcagcgcccccatcctgggcggctggtttggccggggctgcaccaagaggaccaagaggaagaaggtgacctag

SEQ ID NO: 191816 - DNA, 963 bp, Artificial Sequence
  derived and/or modified sequence
atgcctggcccccggcggcgcagccccagcgcctgcccccaggtgagccgcatcctgaggaaggctgctgctgagaggtctgctgaggagggccgcctgctggccgagagcgctgacctggtgacagagctgcagggccgcagcagaagaagagagggcctgaagaggcggcaggaggaggtgtgtgatgatcctgaggagctgcggggcaaggtgcgggagctggccagcgctgtgagaaatgccaagtacctggtggtgtacacaggagctggcatcagcacagctgccagcatcccagactaccggggccccaacggggtgtggaccctgctgcagaagggccgctctgtgtctgctgctgacctgtctgaggccgagcccaccctgacccacatgagcatcacccggctgcacgagcagaagctggtgcagcacgtggtgtcccagaactgtgatggcctgcacctgcggagcggcctgcccaggacagccatcagcgagctgcacggcaacatgtacatcgaggtgtgcaccagctgtgtgcccaaccgggagtatgtgcgggtgtttgatgtgacagagaggacagccctgcaccgccaccagacaggccgcacctgccacaagtgtggcacccagctgcgggacaccatcgtgcactttggagagcggggcaccctgggccagcccctgaactgggaggccgccacagaggccgccagcagagctgacaccatcctgtgcctgggcagcagcctgaaggtgctgaagaagtacccccggctgtggtgcatgaccaagccacccagccggcggcccaagctgtacatcgtgaacctgcagtggacccccaaggatgactgggccgccctgaagctgcatggaaaatgtgatgatgtgatgaggctgctgatggccgagctgggcctggagatcccagcctacagccgggtgctgtag

SEQ ID NO: 191817 - DNA, 1203 bp, Artificial Sequence
  derived and/or modified sequence
atggccgccggcggcctgagccggagcgagcggaaggccgccgagagggtgcgacgactgagggaggagcagcaacgcgaacgtctgcgacaggtgtccagaatcttgcgcaaggccgccgctgaacgatctgccgaggagggaaggctattagcagagagtgctgacttggtcacagagctccagggacgtagcagacgcagggagggcctgaagcgtcggcaggaagaggtttgcgacgaccccgaggaactccggggaaaagtgcgggaactagcctcagctgttaggaacgccaaatatttggtggtttacacgggcgccggtatatctaccgcagcctcgatcccagactaccgtgggcctaatggcgtttggaccctcctgcagaaagggcgtagtgtgtctgctgccgacctgagcgaggccgaacccactttgacacatatgtctatcactcgattgcacgagcagaagctcgtgcagcacgtggtgagtcagaattgtgacggcctgcatctgagatccggcctgccacgcacagccatctccgagctccacggcaacatgtacattgaagtgtgcacctcttgcgtgcccaacagagaatacgttcgggtctttgacgtcactgagcggaccgccttgcaccgacaccagactggccgtacctgtcacaaatgtggaacccaacttcgcgacactattgtccacttcggcgaacgcggtactctcggacagccactgaactgggaggccgcgactgaggcagccagccgagccgatactatcctttgcctgggatcaagcctcaaggtgctcaagaaataccctagactgtggtgtatgaccaagcccccctctagaaggccaaaattgtatatcgtgaaccttcagtggacccccaaagacgattgggcggccctcaaactacacggcaagtgtgacgacgtcatgcgcctgctaatggccgagctcggtctggagattcctgcctactccagatggcaggatcccatcttcagcctcgctacccccctgagagcaggtgaggagggatcacatagtcggaagtcactatgtagatctcgtgaagaagctcctcccggagaccgcggcgccccactctcgtcggcacccatactgggaggatggttcgggagagggtgtaccaagcgaaccaagcgcaaaaaagtgacatag

SEQ ID NO: 191818 - DNA, 963 bp, Artificial Sequence
  derived and/or modified sequence
atgcccggcccccggcggcggagccccagcgcctgcccccaggtgtcacggatcctgcgcaaggctgcagccgagcgtagcgctgaagagggacgtctgctcgctgagtcagcagatctggtgaccgaactgcaaggccgttctcggagaagagaggggctgaagcgcagacaagaggaagtctgcgatgaccccgaagaactgcgaggtaaggtccgcgaactggcgagcgcggtgcggaatgcaaagtacctcgtagtttacacaggcgctggcatcagcactgcggcgtcaatccccgactacagaggacccaacggagtgtggactctattacagaagggtcggagtgtttccgccgccgatctttcagaggcagagccgacgctgacgcacatgtcgatcaccaggcttcacgagcagaagctggtacagcacgtcgtgtcgcagaactgtgacggcctgcacttaaggtctggcttgccgaggactgcgatatcggagctgcatggaaatatgtatatcgaggtgtgtactagttgcgtgcctaacagagaatacgtgcgggtgttcgatgttacggaaagaacggccctgcatcgacatcagacaggacgtacatgtcataaatgtggcactcagctccgggataccatcgtacacttcggagaaagaggcaccttaggacagcctctcaattgggaggctgcaaccgaagcggcgtctcgggcagacactatattgtgtctagggagttcacttaaggttctgaagaagtaccctcgtctgtggtgtatgaccaaaccaccctcacgccgcccgaagctgtacatcgttaacctccaatggaccccaaaagatgactgggccgccctaaagctgcacggcaaatgcgacgatgttatgcgactcttgatggccgaacttggactggaaatcccagcgtacagccgcgtgctatag

SEQ ID NO: 191819 - DNA, 1203 bp, Artificial Sequence
  derived and/or modified sequence
atggcggctgggggtctcagccgctctgagcgaaaggcagctgaaagagtccgaaggcttagggaagagcagcaaagagaaaggctccgtcaggtgtcgcgtattttgcgcaaggcggcagcagagagatccgccgaggagggtaggctgcttgccgagtcagccgatctggtgacagagttacaggggaggagccgccgtagggagggactcaagaggcggcaggaggaggtttgcgacgatcccgaagagctgagagggaaagtcagagaattagcgtctgcagtccgaaatgcgaaatacttagtggtctacaccggagcaggcatctcgaccgccgcatctatccctgactatagaggcccaaatggagtgtggaccctcttgcagaagggaaggtctgtctccgccgctgatctttctgaggccgaaccaacacttacacacatgtctataacccgtctccacgagcaaaagctcgtccaacacgtggtgtcacagaattgcgacggtctgcacctccgcagcgggctcccaagaacagccattagtgaactccatggcaacatgtatatcgaagtatgcactagttgcgttcccaatagggaatatgttagggtctttgacgtgacagagagaaccgctctccacaggcatcagactggccgaacctgccacaagtgtggtacacaattgagggatactattgtgcacttcggagagcgcggaacactaggccaacctctgaattgggaggccgctacggaggctgcctcccgggctgacactattctatgtctggggtcctctcttaaagttttaaagaagtatcccaggctctggtgcatgacaaaaccaccatcacgcagacccaagctgtacatcgttaatttgcaatggactccaaaagacgactgggccgcactgaagttacacggaaagtgcgatgacgtcatgagactgttgatggccgaactgggcctagagatccctgcttactcgcggtggcaggatcccatcttttcattggccacgcctctgcgggcaggagaggaaggttctcactctaggaagtctctgtgtcgctcccgcgaagaggcccctccaggtgatcgaggcgcaccactttcttccgcaccgatcctcggcggatggtttggcaggggctgcacaaaacgcaccaagaggaagaaggtgacctag

SEQ ID NO: 191820 - DNA, 963 bp, Artificial Sequence
  derived and/or modified sequence
atgcccggtcctcggcgacgtagcccatcagcctgtcctcaggtctccaggatcctacgcaaagcggctgctgagcgaagcgcggaggagggacggctgctcgccgaatctgcagatttagtaaccgagctgcagggccgaagtagacgaagagaggggcttaagcgaaggcaggaggaagtatgtgacgatcctgaagagctccggggaaaagttcgagagctggcttccgccgtgagaaacgctaaatacctggttgtatataccggagcgggaatctccacagctgcctcgatacccgattaccgagggccaaacggagtctggaccctgcttcagaaggggcgatccgtctccgcagccgacctgagtgaggctgagccgaccctcacccatatgagtattacaagactccatgagcagaagctggtacagcacgtggtcagtcagaattgcgatggcctgcatctccgctccggactgccaagaacagccatctccgagttgcatggcaacatgtatatagaggtctgtacctcgtgcgtgccgaatagagaatacgtccgggtttttgatgtcacggaaagaaccgctttacacagacatcaaaccggccgtacctgccacaagtgtgggacacagctccgcgataccatcgttcattttggtgaacgtggaactcttggccagcccctgaattgggaagccgcaactgaagcagcctcaagggccgataccatcttatgcctgggatccagcctcaaggtcctgaagaagtatcctcggctttggtgtatgacaaaacccccaagtcggaggcccaagctgtacatcgtaaacttgcaatggactcccaaggacgactgggcggctcttaagctgcacggcaagtgcgatgatgtgatgaggctgcttatggccgaactgggcctagaaatccccgcttattctcgcgtgctgtag

SEQ ID NO: 191821 - DNA, 1713 bp, Artificial Sequence
  derived and/or modified sequence
gcggaagcggaagagcaggtctccaggggagcgatggcagccgggggtctgagccgctccgagcgcaaagcggcggagcgggtccggaggttgcgggaggagcagcagagggagcgcctccgccaggtgtcgcgcatcctgaggaaggcggcggcggagcgcagcgccgaggagggccggctgctggccgagagcgcggacctggtaacggagctgcagggccggagccggcggcgcgagggcctgaagcggcggcaggaggaggtgtgcgacgacccggaggagctgcgggggaaggtccgggagctggccagcgccgtccggaacgccaaatacttggtcgtctacacaggcgcgggaatcagcacggcagcgtctatcccagactaccggggccctaatggagtgtggacactgcttcagaaagggagaagcgttagtgctgccgacctgagcgaggccgagccaaccctcacccacatgagcatcacccgtctgcatgagcagaagctggtgcagcatgtggtgtctcagaactgtgacgggctccacctgaggagtgggctgccgcgcacggccatctccgagctccacgggaacatgtacattgaagtctgtacctcctgcgttcccaacagggagtacgtgcgggtgttcgatgtgacggagcgcactgccctccacagacaccagacaggccggacctgccacaagtgtgggacccagctgcgggacaccattgtgcactttggggagagggggacgttggggcagcctttgaactgggaagcggcgaccgaggctgccagcagagcagacaccatcctgtgtctagggtccagcctgaaggttctaaagaagtacccacgcctctggtgcatgaccaagccccctagccggcggccgaagctttacatcgtgaacctgcagtggaccccgaaggatgactgggctgccctgaagctacatgggaagtgtgatgacgtcatgcggctcctcatggccgagctgggcttggagatccccgcctatagcaggtggcaggatcccattttctcactggcgactcccctgcgtgctggtgaagaaggcagccacagtcggaagtcgctgtgcagaagcagagaggaggccccgcctggggaccggggtgcaccgcttagctcggcccccatcctagggggctggtttggcaggggctgcacaaaacgcacaaaaaggaagaaagtgacgtaatcacgtgctcgatgaagaacagttggcactttgcagatggccagtgtcacggtgaaggctgggttgcccccacgggtctagggagaacgaactctttggggatgacattttcaccgtgacatttttagccatttgtccttgaggaagccccttgcactgctgcggttgtaccctgatacggcctggccatcgaggacacctgcccatccggcctctgtgtcaagaggtggcagccgcacctttctgtgagaacggaactcgggttatttcagccccggcctgcagagtggaagcgcccagcggcctttcctcgctcaccaggccagtctcagggcctcaccgtatttctactactacttaatgaaaaagtgtgaactttatagaatcctctctgtactggatgtgcggcagaggggtggctccgagcctcggctctatgcagacctttttatttctattaaacgtttctgcactggc

SEQ ID NO: 191822 - DNA, 1883 bp, Artificial Sequence
  derived and/or modified sequence
ctgccgtgtgaggcggaagcggaagagcaggtctccaggggagcgatggcagccgggggtctgagccgctccgagcgcaaagcggcggagcgggtccggaggttgcgggaggagcagcagagggagcgcctccgccaggtacgccgccgccgctccccggcccggccatgcccggcccgcgccgccgctcaccgtccgcctgcccgcaggtgtcgcgcatcctgaggaaggcggcggcggagcgcagcgccgaggagggccggctgctggccgagagcgcggacctggtaacggagctgcagggccggagccggcggcgcgagggcctgaagcggcggcaggaggaggtgtgcgacgacccggaggagctgcgggggaaggtccgggagctggccagcgccgtccggaacgccaaatacttggtcgtctacacaggcgcgggaatcagcacggcagcgtctatcccagactaccggggccctaatggagtgtggacactgcttcagaaagggagaagcgttagtgctgccgacctgagcgaggccgagccaaccctcacccacatgagcatcacccgtctgcatgagcagaagctggtgcagcatgtggtgtctcagaactgtgacgggctccacctgaggagtgggctgccgcgcacggccatctccgagctccacgggaacatgtacattgaagtctgtacctcctgcgttcccaacagggagtacgtgcgggtgttcgatgtgacggagcgcactgccctccacagacaccagacaggccggacctgccacaagtgtgggacccagctgcgggacaccattgtgcactttggggagagggggacgttggggcagcctttgaactgggaagcggcgaccgaggctgccagcagagcagacaccatcctgtgtctagggtccagcctgaaggttctaaagaagtacccacgcctctggtgcatgaccaagccccctagccggcggccgaagctttacatcgtgaacctgcagtggaccccgaaggatgactgggctgccctgaagctacatgggaagtgtgatgacgtcatgcggctcctcatggccgagctgggcttggagatccccgcctatagcagggtcttataggggaaatcaataacttcttttaatcaaagggttcaagaaattaaggatcccttcaccttctgggcctggcacttcttgtggcaggatcccattttctcactggcgactcccctgcgtgctggtgaagaaggcagccacagtcggaagtcgctgtgcagaagcagagaggaggccccgcctggggaccggggtgcaccgcttagctcggcccccatcctagggggctggtttggcaggggctgcacaaaacgcacaaaaaggaagaaagtgacgtaatcacgtgctcgatgaagaacagttggcactttgcagatggccagtgtcacggtgaaggctgggttgcccccacgggtctagggagaacgaactctttggggatgacattttcaccgtgacatttttagccatttgtccttgaggaagccccttgcactgctgcggttgtaccctgatacggcctggccatcgaggacacctgcccatccggcctctgtgtcaagaggtggcagccgcacctttctgtgagaacggaactcgggttatttcagccccggcctgcagagtggaagcgcccagcggcctttcctcgctcaccaggccagtctcagggcctcaccgtatttctactactacttaatgaaaaagtgtgaactttatagaatcctctctgtactggatgtgcggcagaggggtggctccgagcctcggctctatgcagacctttttatttctattaaacgtttctgcactggc

SEQ ID NO: 191823 - DNA, 1203 bp, Artificial Sequence
  derived and/or modified sequence
atggccgccggcggcctgagcagaagcgagagaaaggccgccgagagagtgagaagactgagagaggagcagcagagagagagactgagacaggtgagcagaatcctgagaaaggccgccgccgagagaagcgccgaggagggcagactgctggccgagagcgccgacctggtgaccgagctgcagggcagaagcagaagaagagagggcctgaagagaagacaggaggaggtgtgcgacgaccccgaggagctgagaggcaaggtgagagagctggccagcgccgtgagaaacgccaagtacctggtggtgtacaccggcgccggcatcagcaccgccgccagcatccccgactacagaggccccaacggcgtgtggaccctgctgcagaagggcagaagcgtgagcgccgccgacctgagcgaggccgagcccaccctgacccacatgagcatcaccagactgcacgagcagaagctggtgcagcacgtggtgagccagaactgcgacggcctgcacctgagaagcggcctgcccagaaccgccatcagcgagctgcacggcaacatgtacatcgaggtgtgcaccagctgcgtgcccaacagagagtacgtgagagtgttcgacgtgaccgagagaaccgccctgcacagacaccagaccggcagaacctgccacaagtgcggcacccagctgagagacaccatcgtgcacttcggcgagagaggcaccctgggccagcccctgaactgggaggccgccaccgaggccgccagcagagccgacaccatcctgtgcctgggcagcagcctgaaggtgctgaagaagtaccccagactgtggtgcatgaccaagccccccagcagaagacccaagctgtacatcgtgaacctgcagtggacccccaaggacgactgggccgccctgaagctgcacggcaagtgcgacgacgtgatgagactgctgatggccgagctgggcctggagatccccgcctacagcagatggcaggaccccatcttcagcctggccacccccctgagagccggcgaggagggcagccacagcagaaagagcctgtgcagaagcagagaggaggccccccccggcgacagaggcgcccccctgagcagcgcccccatcctgggcggctggttcggcagaggctgcaccaagagaaccaagagaaagaaggtgacctag

SEQ ID NO: 191824 - DNA, 963 bp, Artificial Sequence
  derived and/or modified sequence
atgcccggccccagaagaagaagccccagcgcctgcccccaggtgagcagaatcctgagaaaggccgccgccgagagaagcgccgaggagggcagactgctggccgagagcgccgacctggtgaccgagctgcagggcagaagcagaagaagagagggcctgaagagaagacaggaggaggtgtgcgacgaccccgaggagctgagaggcaaggtgagagagctggccagcgccgtgagaaacgccaagtacctggtggtgtacaccggcgccggcatcagcaccgccgccagcatccccgactacagaggccccaacggcgtgtggaccctgctgcagaagggcagaagcgtgagcgccgccgacctgagcgaggccgagcccaccctgacccacatgagcatcaccagactgcacgagcagaagctggtgcagcacgtggtgagccagaactgcgacggcctgcacctgagaagcggcctgcccagaaccgccatcagcgagctgcacggcaacatgtacatcgaggtgtgcaccagctgcgtgcccaacagagagtacgtgagagtgttcgacgtgaccgagagaaccgccctgcacagacaccagaccggcagaacctgccacaagtgcggcacccagctgagagacaccatcgtgcacttcggcgagagaggcaccctgggccagcccctgaactgggaggccgccaccgaggccgccagcagagccgacaccatcctgtgcctgggcagcagcctgaaggtgctgaagaagtaccccagactgtggtgcatgaccaagccccccagcagaagacccaagctgtacatcgtgaacctgcagtggacccccaaggacgactgggccgccctgaagctgcacggcaagtgcgacgacgtgatgagactgctgatggccgagctgggcctggagatccccgcctacagcagagtgctgtag

SEQ ID NO: 191825 - protein, 355 aa, Artificial Sequence
  derived and/or modified sequence
MSVNYAAGLSPYADKGKCGLPEIFDPPEELERKVWELARLVWQSSSVVFHTGAGISTASGIPDFRGPHGVWTMEERGLAPKFDTTFESARPTQTHMALVQLERVGLLRFLVSQNVDGLHVRSGFPRDKLAELHGNMFVEECAKCKTQYVRDTVVGTMGLKATGRLCTVAKARGLRACRGELRDTILDWEDSLPDRDLALADEASRNADLSITLGTSLQIRPSGNLPLATKRRGGRLVIVNLQPTKHDRHADLRIHGYVDEVMTRLMKHLGLEIPAWDGPRVLERALPPLPRPPTPKLEPKEESPTRINGSIPAGPKQEPCAQHNGSEPASPKRERPTSPAPHRPPKRVKAKAVPS

SEQ ID NO: 191826 - DNA, 1065 bp, Artificial Sequence
  derived and/or modified sequence
atgagcgtgaactacgccgccggcctgagcccctacgccgacaagggcaagtgcggcctgcccgagatcttcgacccccccgaggagctggagcgcaaggtgtgggagctggcccgcctggtgtggcagagcagcagcgtggtgttccacaccggcgccggcatcagcaccgccagcggcatccccgacttccgcggcccccacggcgtgtggaccatggaggagcgcggcctggcccccaagttcgacaccaccttcgagagcgcccgccccacccagacccacatggccctggtgcagctggagcgcgtgggcctgctgcgcttcctggtgagccagaacgtggacggcctgcacgtgcgcagcggcttcccccgcgacaagctggccgagctgcacggcaacatgttcgtggaggagtgcgccaagtgcaagacccagtacgtgcgcgacaccgtggtgggcaccatgggcctgaaggccaccggccgcctgtgcaccgtggccaaggcccgcggcctgcgcgcctgccgcggcgagctgcgcgacaccatcctggactgggaggacagcctgcccgaccgcgacctggccctggccgacgaggccagccgcaacgccgacctgagcatcaccctgggcaccagcctgcagatccgccccagcggcaacctgcccctggccaccaagcgccgcggcggccgcctggtgatcgtgaacctgcagcccaccaagcacgaccgccacgccgacctgcgcatccacggctacgtggacgaggtgatgacccgcctgatgaagcacctgggcctggagatccccgcctgggacggcccccgcgtgctggagcgcgccctgccccccctgccccgcccccccacccccaagctggagcccaaggaggagagccccacccgcatcaacggcagcatccccgccggccccaagcaggagccctgcgcccagcacaacggcagcgagcccgccagccccaagcgcgagcgccccaccagccccgccccccaccgcccccccaagcgcgtgaaggccaaggccgtgcccagc

SEQ ID NO: 191827 - DNA, 1211 bp, Artificial Sequence
  derived and/or modified sequence
gggaaataagagagaaaagaagagtaagaagaaatataagagccaccatgtccgtgaattatgccgctggtctttccccgtacgccgataaaggaaagtgtggcctccctgagatttttgacccgccagaggagttggaacgcaaagtctgggagttggccaggttggtatggcagtcgtcatcggtggtatttcatacgggagctggaatttcaacggcatcgggaatcccggattttcggggtccccacggagtctggaccatggaggaaagggggctcgcccctaagttcgatacgacatttgagagcgcacgcccaactcaaacccatatggccctggtgcagctggaaagggtcggacttctccgcttcctcgtgtcgcagaatgtagacggattgcacgtgagatccggattcccaagggataagctggcggagctgcacggtaacatgttcgtcgaggaatgcgcgaagtgtaaaactcagtacgtgcgggatacagtagtcggaacaatgggactgaaggcgaccgggcgactttgtaccgtagcaaaggcgagaggattgagagcgtgccggggtgaattgcgggacacaatcttggactgggaggactcgcttccggatcgagatctggccctcgcggacgaagcgtcgcgaaacgcggacctgtcgattactctgggcacatcactgcaaatccgccccagcgggaacctccctcttgcaacaaaacggcgaggcggtagactggtcattgtcaacctccagccgaccaaacacgaccggcacgccgacttgagaatccatgggtatgtagatgaggtgatgacgcgcttgatgaaacatctcgggttggagatcccggcttgggacgggccaagggtccttgagagggcgctcccgcctttgccaagacccccgacgcccaagctggaaccaaaggaagaatccccgacgagaatcaatggctcaatccccgctgggcctaaacaggaaccgtgcgcgcagcataatgggtccgagcccgcatcacccaaacgagaaaggcccacatcgcctgcaccgcacagacccccaaagagggtaaaagcgaaagccgtgccctcgtaatgagctgccttctgcggggcttgccttctggccatgcccttcttctctcccttgcacctgtacctcttggtctttgaataaagcctgagtaggaag

SEQ ID NO: 191828 - DNA, 1065 bp, Artificial Sequence
  derived and/or modified sequence
atgagcgtgaactacgccgccggtctgagcccatatgctgataagggcaagtgcggactgccagagatctttgaccctcccgaagaactggagagaaaggtctgggagttagctagactagtctggcaaagttcctccgtggtctttcacaccggagccggcatctccaccgctagcggtattcccgactttagaggtccccacggggtatggacgatggaagaacgcggcctcgcccccaaattcgatacaactttcgagagcgcccgacccacgcagactcatatggctctggtgcaattggaacgcgtggggctcctcaggttcttggtgtctcagaacgtggatggtctgcacgtcagatccggcttcccccgagacaagctggcagagctccacgggaatatgtttgtcgaggagtgcgcaaagtgtaagacacagtacgtacgagataccgttgtgggtaccatggggctgaaggcaaccggtagactctgtacggtcgccaaagccagaggtttacgggcatgtcgaggcgagttgcgggatacaatccttgactgggaagattctctgcccgatagggatctggccctggcagatgaggcgagtcgaaatgcggatctctctattaccctcggcaccagcctacagatacggcccagcggcaacttacctctggctactaaacgccgtggcggaagattggtgatcgtcaacctgcagccaactaagcacgataggcacgctgaccttagaattcatggatatgttgatgaggttatgacaagactgatgaagcacctaggactcgaaattcccgcctgggatggacctagggtgttggaacgagccttgccaccccttccccgccctccaactcccaagctcgagcctaaggaagagtctcccactaggatcaatggatcaattcctgccggccccaaacaggagccctgtgcccagcataacgggtcggagccggctagcccaaaacgggagagacccactagccccgctccccatagaccacccaagcgggtgaaggcgaaggccgtgccatcg

SEQ ID NO: 191829 - DNA, 1065 bp, Artificial Sequence
  derived and/or modified sequence
atgtcggtaaattatgcggcgggtttatcgccgtatgcggataaaggtaaatgtggtctaccggaaatatttgatccgccggaagaactagaacgtaaagtatgggaattagcgcgtttagtatggcaatcgtcgtcggttgtatttcatacgggtgcgggtatatcgacggcgtcgggtataccggattttcgtggtccgcatggtgtatggacgatggaagaacgaggtttagcgccgaaatttgatacgacgtttgaatcggcgcgtccgacgcaaacgcatatggcgttagtacaattagaacgtgtaggtttattacgttttttagtttcgcaaaatgtagatggtttacatgtacgttcgggttttccgcgtgataaactagcggaattacatggtaatatgtttgttgaagaatgtgcgaaatgtaaaacgcaatatgttcgtgatacggtagtaggtacgatgggtttaaaagcgacgggtcgactatgtacggttgcgaaagcgcgtggtttacgtgcgtgtcgtggtgaactacgagatacgatattagattgggaagattcgttaccggatcgagatctagcgttagcggatgaagcgtcgcgtaatgcggatctatcgataacgttaggtacgtcgttacaaatacgaccgtcgggtaatctaccgctagcgacgaaacgtcgaggtggtcgattagtaatagtaaatttacaaccgacgaaacatgatcgtcatgcggatctacgaatacatggttatgttgatgaagttatgacgcgattaatgaaacatttaggtttagaaataccggcgtgggatggtccgcgagtactagaacgtgcgctaccgccgctaccgcgtccgccgacgccgaaactagaaccgaaagaagaatcgccgacgcgaataaatggttcgataccggcgggtccgaaacaagaaccgtgtgcgcaacataatggttcggaaccggcgtcgccgaaacgtgaacgaccgacgtcgccggcgccgcatcgaccgccgaaacgtgttaaagcgaaagcggtaccgtcg

SEQ ID NO: 191830 - DNA, 1065 bp, Artificial Sequence
  derived and/or modified sequence
atgtccgtcaactacgccgccggactttcaccgtacgcggataagggaaaatgtggcctcccagagatctttgacccaccagaggagctggaacggaaagtgtgggagctcgcgcgccttgtgtggcaatcctcctccgtcgtgtttcatacgggggcaggaatttcaaccgcctccggtatcccggacttccgcggaccgcatggagtctggaccatggaggaaaggggcctggcacccaagttcgacactacttttgaatccgctaggccaacccagactcacatggcgctcgtgcaactcgagcgcgtcggactgctccggttcctggtgtcacaaaatgtggatggactgcatgttcggtcgggattccccagagataagctggccgagcttcatggcaacatgtttgtggaagagtgtgcgaagtgcaagactcagtatgtgagagataccgtggtgggaaccatgggacttaaggcaaccggtaggctgtgcaccgtggccaaggcgcgcggtctgagagcatgtcgcggggagctgcgcgatactatcctcgattgggaggactcgctgccagatcgcgacctggcgcttgccgatgaggcctcgcggaacgctgacctgtccatcacgctgggtacttcactgcagatccggccttccgggaaccttccgctggccactaagcgtcggggaggacgcctggtgatcgtcaacctccagccgaccaagcatgaccgccacgctgacctccggatccacggatatgtcgacgaggtcatgactcggctgatgaagcacctcggactggagatcccagcgtgggacggacctcgcgtgctcgaaagagcgctgccgccattgccgcggcctccaaccccaaaactggaacctaaagaggagtcgccgacgagaatcaatggatcgattccggccggtccgaaacaggaaccgtgcgcacagcacaatggctcagaacctgcatcgccgaagcgcgaaagacccacttcgcccgctccgcaccggccgccgaaacgagtgaaagcgaaggccgtgccttcg

SEQ ID NO: 191831 - DNA, 1065 bp, Artificial Sequence
  derived and/or modified sequence
atgtccgtgaactacgccgcaggactttctccttacgctgacaagggcaaatgcgggctacccgaaatcttcgaccccccagaagagctggaaagaaaggtttgggagctggcccgactcgtttggcagtcctccagcgtcgtgtttcatacaggcgctggaatctctacagcttctggcataccagatttcaggggaccccacggcgtgtggaccatggaagaacggggcctggctccaaaattcgatacaacctttgagagcgccagacccacccaaacccatatggctctggtgcagttagagcgggttggcctccttcgtttcctcgtttcccagaacgtggacgggctccacgtgcggtccggcttcccgagagacaaattggctgagcttcacgggaacatgttcgtggaagaatgtgccaagtgcaagactcagtacgttcgggacactgtggtggggacaatggggctgaaagcaaccgggaggctttgcaccgttgccaaagccaggggcctgagggcctgccgcggggagctgagggacaccattctagattgggaagatagtttacctgatcgcgacctggctcttgcagacgaggcaagcaggaatgccgatctgagcataacactaggcaccagcctgcagatacgcccctctggaaacctgccactagctaccaagcgcaggggcggccgtctggtgatcgttaacctacaacccacaaagcatgacagacacgccgacttgcgaatacacggttatgttgatgaagttatgacaagactcatgaagcatctaggactagaaatccccgcatgggatggacctcgcgtgctggagcgcgccttacctccactgccacgcccaccaactcctaaacttgaaccaaaagaagaaagtccaacaaggataaatggcagtatacctgctggacccaaacaggagccatgcgcccagcataatggctcagaacccgccagtccaaaaagggagcggcctacctctcctgcacctcaccggcccccaaaacgggtgaaagccaaggccgtgccttcc

SEQ ID NO: 191832 - DNA, 1065 bp, Artificial Sequence
  derived and/or modified sequence
atgagcgtgaactatgctgccggcctgagcccctacgcggacaaaggcaaatgcggcctgcctgagatatttgacccgccggaagaactggagaggaaagtgtgggagttggctcgcctggtatggcagagtagcagcgttgtcttccacactggcgctgggattagcaccgcgagtggtattccagactttcgcgggcctcatggcgtatggaccatggaagagcgcggcttggcccccaagttcgataccacttttgagtctgcacggcctacacagacccacatggcgttggtccagctggagagggtgggcctcttacgatttctagtgagccagaatgttgacgggctacatgttcggagtggatttcctcgcgataaactggccgaattacacggtaacatgttcgttgaggagtgtgcaaagtgcaaaacacaatatgttcgggacactgttgtaggcactatgggtctgaaagcgaccggtcgcctctgcactgtggcgaaggctcgcgggctgcgtgcgtgtcgtggtgaactgcgtgataccatccttgactgggaggactccctgccggatcgcgacctggcattggccgacgaggccagccgcaatgcagacctgagcattaccctggggactagcctgcaaatccgaccttccggtaacctcccattggccacaaaacgccgcggcggccgcctggtcatcgtgaacctgcaaccgactaagcatgacagacacgctgacctgcggatacatgggtacgtggatgaggtgatgacgaggctgatgaaacacctgggtctggaaatccccgcgtgggacgggcctcgtgtcctggagcgcgctctgcctccgctcccgcgcccaccgactccaaagctggagccaaaagaggaaagccctacgcgcatcaatggttctatcccggcgggccctaagcaagagccatgcgcacagcacaatggctctgagccagcgagcccgaagagggaacgcccgactagcccggcaccacatcggccacctaaaagggtgaaggcgaaggctgtccctagc

SEQ ID NO: 191833 - DNA, 1065 bp, Artificial Sequence
  derived and/or modified sequence
atgagcgtaaactacgccgccggccttagtccttacgccgacaagggcaaatgcggactacccgagatcttcgatcctccagaagagctggagagaaaagtttgggagctagcaagactggtatggcagagttcctccgtcgtcttccacacaggagccggcatctcaacagccagtggtatacccgacttcaggggcccacatggggtatggactatggaagaaagagggttagctcccaagttcgataccacattcgaaagcgcccgtccaactcagactcatatggccttggtgcagctggagcgagtagggctgctgagatttctggtttcccagaatgtcgatggtctgcacgtgcggtcaggtttccctcgagacaagctcgcagagctccacgggaatatgttcgtggaagaatgtgcgaaatgtaagacccagtacgtgcgggacactgtcgtgggaactatggggctcaaggcaactggccgattgtgcacagtggcaaaagcccgaggactacgggcttgtcgtggagagctcagggatacgatcctggactgggaggactctttgccggatagagacttagcgcttgccgatgaggcctctagaaatgccgacctttcaatcacactgggcacatctctgcagattcggcccagtggtaatctccccctcgccacgaagaggcgcgggggccgcttggtgatcgtcaacttgcagccaactaagcatgataggcacgcagatcttcggattcacggctacgtggacgaagttatgactaggttgatgaaacatctgggcctggaaattcccgcttgggacgggccaagagtgctcgagcgggctctaccacccctgccgaggcctcctacccccaaactcgagcctaaggaggagagccccacccggatcaacggcagcattcctgccggacctaaacaggagccgtgcgcccagcataacggatcggaacccgccagtcctaaaagggaaagacctacaagtcccgccccacacagaccacctaaacgtgtcaaggccaaggccgtgccctcg

SEQ ID NO: 191834 - DNA, 1065 bp, Artificial Sequence
  derived and/or modified sequence
atgtcagtgaactacgctgccgggctgtctccgtacgcagacaaaggaaaatgcggccttccagagatcttcgatccaccggaagagctggaacgtaaggtttgggaactggcaagattggtgtggcaaagctcctccgtggtgttccacactggagcaggtatttccactgcttcgggaattcctgactttcgcgggcctcatggcgtgtggactatggaagagcgcggtttggcacccaagtttgatactacctttgagtcggcaagacctactcaaacccacatggcacttgtgcagttggaaagagtgggactgctgagatttctcgtctcccagaacgtggatggacttcatgtcagatcagggtttccacgggacaaacttgctgaactgcatggcaacatgttcgtcgaggaatgtgcaaagtgtaagacccaatatgtgcgtgatacggtcgtgggaacgatgggtctgaaggcaaccggcagactgtgtaccgtggcaaaggcgaggggactcagagcatgccggggtgaactccgtgataccattctcgattgggaggatagcctgccggaccgcgatctggcgctggcggatgaggcatcacggaacgcagacctgagcattactctcggaacgagcctccagatccgtccgtccggaaatctcccactggctaccaagcggcgtggcggtcgcttggtgatcgtcaaccttcaacccaccaagcatgatcggcatgcagacctgcgcatccacggatatgtggacgaggtcatgaccagacttatgaagcatcttggtcttgaaataccggcatgggacggaccaagagttctggagagggccttgccaccacttcctcggcctccgaccccaaaacttgaaccgaaggaagagtcacccactcggataaacgggagcatcccggcgggacccaaacaagaaccttgtgcacagcacaatggttccgaacctgcctcgcccaaacgagaaagacccacttcaccagcaccccatcgcccccctaaaagagtcaaggccaaggctgtgcctagc

SEQ ID NO: 191835 - DNA, 1065 bp, Artificial Sequence
  derived and/or modified sequence
atgtctgtgaattatgccgccggcctctctccctatgccgacaagggcaagtgtggcttgcctgagatattcgacccacccgaagaactcgagcgcaaggtctgggagctggccagattggtctggcagagcagctctgtggtgttccacacgggggctggaatttccactgcaagcggcatccccgacttccgagggccccacggcgtgtggacaatggaagaaaggggcctcgcccccaaattcgataccaccttcgaatcagcccgacctacgcagacccatatggcgctcgttcaactcgagcgcgtgggcttgttgcggttcctggtgtctcagaacgtagacggcctgcacgtgcggtctggattccctagagataaactcgccgagcttcatgggaacatgttcgtagaggaatgtgccaagtgtaagacccagtacgtcagagacactgttgtgggaaccatgggattgaaggccacaggccgcctgtgcaccgtggctaaggcacgcggtctgagggcgtgcaggggcgagctgcgagacaccatcctcgactgggaggatagcctgccagacagagacctggcgttggcggacgaggctagcaggaacgccgatctctccatcactctcggtacctctctgcaaatcagaccttctggaaacctgcccctggcaaccaaacgacggggcggtcgcctcgtgatagtgaaccttcagcctactaaacatgaccggcacgcagacctcagaattcatggctacgtggacgaagtaatgactcggttgatgaagcacctgggcctggagatcccggcctgggacgggccacgggttctggagcgggccttgccgcctctgcctcggccccctactcctaagctggagcccaaagaagaatccccaaccaggatcaatggctcaattccagccggccccaagcaggagccttgcgcccagcataacgggtcagagccggcaagcccaaagagggagcggcccactagccctgccccacacaggcctccaaagagagttaaggccaaggcagtgcccagc

SEQ ID NO: 191836 - DNA, 1065 bp, Artificial Sequence
  derived and/or modified sequence
atgtcggtcaactatgccgcaggactgtcgccatacgcagacaagggcaagtgtggccttccagagatatttgatccacccgaagagttggagcgtaaagtctgggagttggcacggcttgtgtggcaatcctcatcggtggtatttcacaccggggctggaatttccactgcatcgggtattcccgactttcgggggcctcatggcgtgtggactatggaggaacgcgggttggcacctaagttcgacaccacttttgaatctgcaagaccaactcagactcacatggctctggtgcaacttgaaagagtgggtctgcttcgatttctcgtcagccaaaacgtggatggactgcacgtgaggtcggggttccccagggataagctggcagaactgcatggcaatatgttcgtggaggaatgcgccaagtgtaagacgcaatacgttagggacacggtcgtggggactatgggtctgaaagccactgggcggctttgcaccgtggctaaggcccgaggactccgcgcctgtcggggtgaacttcgtgacactatccttgactgggaagatagccttcctgaccgggatctggcactggcagatgaggcctcgcgaaacgcggatcttagtatcactcttggcacctcattgcagatcaggccctctggaaatcttcctcttgccaccaagaggcgcggagggcgcctcgtgattgtcaaccttcaaccaactaagcatgatagacatgcagacctcagaatccacggatacgtggatgaagttatgacccggcttatgaaacatttgggacttgaaattcctgcatgggatggacccagagtccttgaaagagcactgccaccgctgccccgaccaccaactcctaaacttgaacctaaagaagaatcacctaccagaataaacggttcgattcccgctggacctaagcaggagccttgtgcccagcataacggaagcgagcccgcctcgcccaagagagagcgcccaacctctcctgcacctcacagaccacctaaaagggtcaaggcaaaggccgttccatcc

SEQ ID NO: 191837 - DNA, 1065 bp, Artificial Sequence
  derived and/or modified sequence
atgtcggtgaactacgcggccggcctgtccccctatgcggacaaaggaaaatgcggactgccggagatcttcgatcctccagaggagttggagcgcaaggtgtgggaactcgctcggcttgtgtggcagtctagctccgtggtgttccatactggagccgggatcagcaccgcctccggaatcccggacttccggggcccacatggagtctggaccatggaggagagaggactggcgcctaagtttgacaccaccttcgagtcggcgcggccaacccaaacgcacatggcactggtccaactcgaacgggtgggactgttgcgcttcctcgtgtcacagaacgtggacggcctccacgtccgtagcggttttcctagagataaactcgcggaactgcacggcaatatgtttgtggaagagtgcgcaaagtgcaagactcaatacgtccgggataccgtcgtgggaaccatgggcctgaaggccaccgggcgactttgtactgtcgccaaagcccgtggcctccgcgcgtgtcgtggggagctgcgcgacactatcctggactgggaagatagcctccctgaccgggatctcgctctcgcagacgaagcctcaagaaatgccgatctttccatcacgctcggtacttccctgcagattaggccgagcggcaacctgccgctggcaaccaagcgccggggcggtagactcgtgatcgtcaatctccaacccactaaacacgatcgccacgccgacctgcggatccacgggtacgtagacgaagtgatgacgcgcctcatgaagcatctgggactggaaataccggcttgggacgggcctcgggtgctcgaacgggccctgccaccgcttccgcgtcctccgactccaaaacttgagccgaaggaagagtcgccgaccagaatcaatgggagcatcccggctggtcctaagcaagaaccatgcgcgcagcataacggatctgaaccagcctccccaaagagggaacggcctacctcaccagccccccaccgccctccgaagagggtcaaggccaaggctgtcccctcc

SEQ ID NO: 191838 - DNA, 1065 bp, Artificial Sequence
  derived and/or modified sequence
atgtccgtgaattacgccgccggactttccccttacgctgacaagggtaagtgcggactcccagagatcttcgatcccccagaagagctcgaacgaaaagtgtgggagctcgcccgactcgtgtggcagtctagtagtgtggtcttccatacaggcgcagggatctctacagcttctggcatacccgactttagggggccgcacggagtgtggacaatggaggagcgcggactggcccctaaatttgacaccactttcgaaagcgcccggccaactcagacacacatggcgctggttcagctggaacgggtcggtcttttgagattcctcgtgtctcagaacgtggatggtttgcacgttcgatcagggtttcccagggacaaacttgcagaactgcatgggaatatgttcgtggaggagtgcgcgaaatgcaaaactcagtacgtccgggacacagtggttggtaccatgggtctgaaagctaccggtagactgtgtaccgtggcgaaggcccgcgggctgcgcgcttgtagaggcgagctcagggacactattctggactgggaggactctctgccagatagggacctcgcgctggctgacgaagcttctaggaacgctgatctttccatcacactgggcacaagtctccagatccggccttctggcaacctgccactggcgaccaaacgccgagggggtagattggttatcgtcaaccttcagccaacgaagcacgacaggcacgcagatttgcggatacacggctacgtcgacgaagtgatgactcgactcatgaagcacttgggactggaaatccccgcatgggatgggccacgagtgctggagagagccctgcccccacttcctcggccacctacacctaagctcgagccaaaggaagagtctcccaccaggattaatgggtcaattcccgccggccccaagcaggaaccctgcgcccagcataacggaagcgagcctgcatctccaaaacgcgagcgccctacaagtccagccccccacagaccaccaaagagggtgaaggcgaaagcggttccctct

SEQ ID NO: 191839 - DNA, 1065 bp, Artificial Sequence
  derived and/or modified sequence
atgagcgtcaattacgccgccgggctttcaccttacgcagacaagggtaagtgtggacttcccgagatttttgaccctccagaagagctcgaaagaaaagtctgggaacttgcgagattggtctggcaatcgtcgtccgtggtgtttcataccggagcgggcatatcaacggcaagcggtattccagactttaggggaccacatggtgtctggactatggaagaacgcggcttggcacctaagtttgacaccactttcgagagcgcaagaccgactcagacccatatggcacttgtgcaacttgaaagagtgggtttgctgcgattccttgtctcgcaaaatgtggatggactgcatgtgaggtccggatttcctagggataaacttgcagagctgcatggcaacatgtttgtggaggaatgtgcaaaatgtaagacgcagtacgtgcgagataccgtggtcggaactatgggtcttaaggcgactgggagactttgcactgtcgcaaaggcgagagggctgcgtgcttgtagaggagaactgcgggataccatcctggattgggaggactcactgccggatcgcgatcttgccctcgcagatgaggcgagccgaaacgctgatctgtccattaccctcggaacctccctccagattaggcctagcggaaacctgcctctggcaaccaagcgaagaggcggccgtcttgtgatcgtgaatctccaacccactaaacatgaccgtcacgccgatctgcggattcatggatacgtggatgaagtgatgacccgacttatgaagcatcttggcttggagattccagcatgggatggaccgcgggtgctggaaagagcactcccgcccctgcccagacccccaaccccgaaacttgaacctaaagaagagtctccgacccgcattaatggatcaattccagcaggacccaagcaagaaccttgcgcccagcataacggatcggaaccagcgtcgcccaagagagaaagacctacctctccagctccccaccggccccccaagcgcgtgaaagctaaggcagtgccatcc

SEQ ID NO: 191840 - DNA, 1065 bp, Artificial Sequence
  derived and/or modified sequence
atgagtgtgaactatgccgcggggctctcgccttacgctgataagggaaagtgcggtctgcctgaaatcttcgaccctccagaagaactggaacggaaggtgtgggaactcgccagactcgtctggcaatccagctcggtggtattccacaccggagcgggcatttcgactgcatcgggaattccagattttcggggaccccatggcgtgtggactatggaggaacggggtcttgcgccgaagtttgataccacttttgaatcagcaagaccaactcaaacccatatggcattggtacaactcgaaagagtcggtcttttgagatttcttgtatcacagaacgtggatggacttcatgtgagatccggatttccgagggataaactggctgagcttcacggcaatatgttcgttgaggaatgtgctaaatgtaaaacccagtacgtgagagacaccgtggtgggaactatgggtttgaaggcaactggacgcctgtgcacggtcgccaaggcaaggggactgcgtgcatgtcgtggtgagcttcgagacacgattctcgattgggaagattcccttcctgacagggaccttgcactggcagatgaggcgtcacgcaatgcagatctctcaatcaccctgggtacttccttgcaaattcgtcctagcggaaacctccctctcgcaacgaaaaggagagggggaagattggtgatcgttaacctgcagccaaccaagcatgatcgccatgcggatctccggatccacggctatgtggacgaggtcatgactcgcctgatgaagcatctgggactggagataccggcctgggacggtccgcgtgtccttgagcgagctcttccaccactgccacgacctccaacgcccaagttggagcccaaggaggaatcgccgacccgcattaacggatccataccagcaggtccgaagcaggaaccttgcgcccaacacaatgggagcgaacctgcctcccctaagagagaacggccaactagccctgcacctcatcgaccccctaagagggtgaaagcaaaagcagtcccttcc

SEQ ID NO: 191841 - DNA, 1065 bp, Artificial Sequence
  derived and/or modified sequence
atgagcgtaaactacgcagctgggctgtcaccctacgcggataaagggaagtgtggactcccagaaatcttcgacccccctgaggaactcgagaggaaagtatgggaactcgcgcgcttggtctggcagtcgtcgagcgtcgtgtttcacacaggtgccggtatctccaccgcgagcgggatcccagacttcagaggccctcacggagtgtggaccatggaagaacgggggctcgctccaaagttcgatacaacatttgaaagcgcccgaccaacacagacccatatggcgctggtacagctggagcgtgtgggcctattgagattcctggttagccaaaacgtggatggactgcacgtgcggtccggctttccccgcgataagctggcggagcttcacggtaatatgtttgtcgaagagtgtgcgaagtgcaaaacacagtatgtaagggacactgtggtgggcaccatgggattaaaagctaccggccgcctttgcactgtagccaaagcccgaggccttagggcatgcagaggggaactgagagacaccatactggactgggaggattccctgcccgacagagatctcgctttggcggacgaagccagccggaatgctgacctgagcattacgttaggcacctccctgcagatcagaccttctggtaaccttcccctggccacaaagcgcaggggggggcgcctggttatagtgaatctacagccgactaagcacgacagacacgcagatctgaggatacatggctacgtggacgaagtcatgacaagactgatgaagcacctaggtctcgagattcctgcatgggatggcccaagggtcctggagcgtgctctgcctccccttccgcggccccccacgccaaaactagagccgaaggaagagtctcccactcgtattaatggatcaattcctgccggacccaagcaggagccctgcgctcagcacaatggttcggaacccgccagtcccaaaagggagaggcctactagccccgcaccccatagaccccccaaaagggtgaaagccaaagccgtgccttcc

SEQ ID NO: 191842 - DNA, 1065 bp, Artificial Sequence
  derived and/or modified sequence
atgtcagtcaattacgctgccggactgagcccgtatgctgacaaaggcaagtgtggtctgccagagatttttgaccctccggaggaattagagagaaaggtgtgggaattggctaggcttgtgtggcagagctctagcgttgtcttccataccggagccggcatcagcactgcctctgggatccctgacttcaggggcccacatggcgtgtggaccatggaagagcgtggtctcgctcccaaatttgacactacctttgaatccgccagaccaacgcagacccacatggctttggtacagctcgaacgtgtgggcttgttgaggttcctcgtgagccagaatgtagacggactgcacgtcaggtcgggattccctcgggacaagttggccgaactgcacgggaatatgttcgtggaagagtgtgccaagtgtaaaacccaatatgtacgcgacaccgttgtagggacaatgggcttaaaggccaccgggagactgtgtacagtagctaaggcccgcggcctaagagcatgcaggggggagcttcgcgataccatattagactgggaagactcactcccagatcgggatttggccttggccgacgaggctagtcggaatgcggatttatcaattacactagggacctcattacaaatccgtccatctggcaatctgccactggctactaaacggaggggcggcaggctggtgattgtgaaccttcagccaaccaagcatgatagacacgctgacctgcgcattcacgggtacgttgatgaggtaatgacaagactgatgaaacatctcgggctggaaatcccagcgtgggatgggccccgagtattagagcgcgctctcccacctctaccaaggccacctactcctaagcttgagccaaaagaggaatccccaacaagaataaatggaagtattcccgctggaccaaagcaagagccatgcgcacagcacaacgggtcagagcctgcaagccctaagagggagagacctaccagcccagcaccacaccgaccccctaaacgtgtgaaggctaaggccgtgccgtct

SEQ ID NO: 191843 - DNA, 1065 bp, Artificial Sequence
  derived and/or modified sequence
atgtcagttaattatgctgctggtctttcaccttatgctgataaaggaaaatgtggattgccagaaatttttgatccaccagaagaattagaaagaaaagtatgggaattagctagattagtctggcaatcatcttcagttgttttccatactggagctggaatttctacagcttctggaataccagattttcgtggtccacatggtgtctggactatggaagaaagaggattagctccaaaatttgacacgacatttgaatcagctagacctacacaaactcatatggctttagtacaactagaaagagttggattgttgcgatttttagtttcacaaaacgttgatggacttcatgttaggtctggatttccacgtgataaattagccgaacttcatggaaatatgtttgtagaagaatgtgcaaaatgtaaaacacaatatgtaagagacactgtagttggaacaatgggattaaaagcaactggtagattatgtacagttgctaaagcaagaggattaagggcttgtagaggagagcttagagatacgattttagactgggaagattctttaccagatcgagatcttgcacttgcagatgaagctagtagaaatgctgatttgtctataacattaggaacctcacttcaaattagaccatcagggaatctacctttagcaactaaaagaagaggaggtcgtttggttattgttaatttacaaccaacgaaacacgacagacatgcagatttaagaattcatggatatgttgatgaagttatgactagattaatgaaacatcttggtttagaaatcccagcatgggatggtccaagagtattagaaagagctttaccacctttaccaagaccaccaactcctaaacttgaaccaaaagaagaatctcctacacgaattaatggatcaattcctgcaggaccaaaacaagaaccatgtgcacaacataacggttcagaaccagcttctcctaagagagaaagaccaactagtcctgcacctcatcgtcctcctaagagagtgaaagctaaggctgttccaagt

SEQ ID NO: 191844 - DNA, 1065 bp, Artificial Sequence
  derived and/or modified sequence
atgtcagtgaactacgctgctggcctttctccatatgcagacaaaggcaagtgcggactacccgaaatattcgacccacctgaggaactggaacgtaaagtgtgggagctggcgcgcctcgtctggcaaagcagttctgtggtgtttcataccggcgccggcataagtacagccagcggcatacctgatttcagaggcccccacggagtttggactatggaagaacgaggcctagcaccgaagtttgacacaacattcgaatcagctcgcccgacacagacacacatggcactggtgcagctggagagagtcgggctgctgaggtttttggtgagccagaatgtggacggccttcatgtaagatccgggtttcctagggacaagcttgccgagctgcacggcaatatgttcgtcgaggagtgcgctaagtgtaagacccagtacgttagggacacggtcgttggaaccatgggactgaaggccaccggacgcctttgcacagtggcaaaagccagaggtcttcgagcgtgtagaggagaacttcgagacactatactcgactgggaagatagccttcctgacagagacctggccctcgctgacgaggcatcccgcaacgccgatctcagtatcaccttaggtacatcgctccagatcaggcctagcggcaacctgccactcgcaacaaagaggcgcggtggtcgactcgtgattgtaaacttgcagccaaccaagcatgaccggcatgcagaccttcgcattcacggatatgtggacgaggtaatgactcgccttatgaagcacctggggttagaaatccctgcctgggatggccctagagtgttggagagagctttgccacctctcccacgtccaccgacgccaaagctggaaccgaaggaagaatcgcctacaagaattaacggcagcatccctgctgggcctaagcaggagccgtgcgctcagcacaatggcagcgagcctgcttcgcccaaaagggagaggccaactagcccagcgcctcatagacctcccaaaagagtgaaggccaaggccgtgccctct

SEQ ID NO: 191845 - DNA, 1065 bp, Artificial Sequence
  derived and/or modified sequence
atgagtgtgaattacgcagccgggctttccccttacgcagacaaggggaagtgcggcttgcccgagatcttcgacccacctgaagagcttgaaagaaaggtttgggaactggcacgtcttgtgtggcagagctcgtccgtcgtctttcacaccggagccggtatttcgacggcctcgggtattccggattttagaggcccacatggagtgtggactatggaagagagaggtctggcccctaagtttgacacgactttcgagtctgctagaccgactcagacccatatggctctcgtgcaacttgagcgagtaggacttcttagattcctggtgtcgcaaaacgttgatggactgcacgtgaggtccggctttcctcgcgacaaacttgccgaactccatggtaacatgtttgtggaagaatgtgcgaagtgcaaaacccaatatgtgagagacaccgtcgtaggaactatgggtcttaaagctacgggacgcctgtgtaccgtggcaaaagcaagaggcttgagggcctgtcgaggagaactccgcgataccatactggattgggaagattcgctgcccgatcgtgatcttgcactggcggatgaggcaagccgtaacgcagatctcagcatcactcttggcacgtcgctgcaaattcgaccttcaggtaacctgcccctcgcgactaagcgcagaggaggacggctcgtgattgtcaatctccaacccactaagcatgatcgtcacgctgacctgcggattcatggatacgtagacgaagtcatgactcggcttatgaagcaccttggcttggaaatccctgcgtgggatgggccccgagtcctggagcgagcactgcccccgcttccaagacctcctacccctaagctggagccaaaggaagaaagccccacccgcataaacggctcgattcctgcagggcctaagcaggaaccatgtgctcagcataatggatccgaacctgcatcaccaaagagagaaaggcccacctcacctgcaccgcatcggcccccaaagcgcgtgaaagcaaaagctgtgccatca

SEQ ID NO: 191846 - DNA, 1065 bp, Artificial Sequence
  derived and/or modified sequence
atgagcgtcaactacgccgcaggactctcgccgtacgcagataaagggaagtgcggcctgccggaaatctttgatcctccggaagaactggaaagaaaggtgtgggagctcgcacgcctcgtctggcaatcatcctctgtcgtgttccacaccggagccggaatctcaacggcctcgggtatcccagattttcgcggcccgcatggagtgtggaccatggaagaacgcggcttggcccctaagtttgacactactttcgaaagcgctagacccactcaaacccacatggccctggtgcagctggaaagagtcggtctgctccgcttcctcgtctcacaaaacgtggacggcctgcatgtgcgctccggattccctcgggataagctggcggaattgcacggaaacatgttcgtggaagaatgtgctaagtgtaagactcagtatgtccgcgacactgtggtcgggaccatgggactcaaggcgaccggacgcctgtgtactgtggcgaaggcccgcgggttgagagcatgccggggtgaactcagagacacgattttggattgggaagattcgctgccggaccgggacctggcacttgccgatgaggcgtcgcgaaacgcggacctcagcatcactttgggaacctcacttcagatcagaccttcgggaaacctgcctctggcgaccaagcgccggggaggaaggctcgtgatcgttaacctgcagccaactaaacacgatcgccacgccgacctgcgcatccatggatacgtggacgaggtgatgacgcgcctgatgaaacatctcggattggagatccccgcttgggacggaccccgcgtgttggaacgcgcactgcctcctctgccgcggcctccgactccaaagctggagccgaaggaagaatcaccgacgagaataaacggctccatcccggctggacctaagcaggaaccctgtgcgcaacataatggttcggaaccggcgtccccgaaaagggagaggccgacttcgcctgccccacatcggccgcctaagagagttaaagcgaaggccgtgcccagc

SEQ ID NO: 191847 - DNA, 1065 bp, Artificial Sequence
  derived and/or modified sequence
atgtctgtgaactatgctgctggcctgtccccttacgctgacaagggaaagtgtggcctgcccgagatctttgacccccccgaagagctggagaggaaggtgtgggaactagcacgcctggtctggcagagcagcagcgttgtctttcatactggcgccggcatcagtacagcgtccgggattccggacttccgtggcccacacggtgtctggacgatggaggagcgcgggctcgctcccaagttcgataccaccttcgagtctgcccgccccacccagacacacatggctctggtacagctggaacgcgtcggtctcctccgtttcctcgtcagccagaacgtagacggacttcacgtgcgttccggctttccccgtgacaagctcgctgagctgcacggcaacatgttcgtcgaggagtgtgctaagtgcaaaactcaatatgtgcgcgatacagtggtaggcaccatggggcttaaggctaccgggcgactgtgtaccgtcgcaaaagctcggggcttgcgtgcgtgccggggcgagctgcgtgacaccatcctcgactgggaggatagcctgccagatcgggacttggcactggctgacgaggcttctagaaatgccgatctgagcatcaccctcggtacatcgctccagatccggccctcgggaaacctccctctcgcaaccaagcgtcgggggggaagacttgtcatcgtcaacttgcagccgaccaagcacgaccgtcacgccgacttgcgcatccatggttacgttgatgaagtcatgacccgtttgatgaagcatttgggtttggagattcctgcttgggacggccctcgtgtccttgagcgcgctctgcccccgctcccgcgcccgcctactcctaagctcgagccgaaggaggaatcgcctactcgcatcaacgggagtattcccgctggcccaaagcaagagccttgcgctcagcacaacggctccgagccggcttcccctaagcgagagcggccgacgtccccggcaccgcatcgacccccgaagcgcgtcaaagcaaaggcagttccgtct

SEQ ID NO: 191848 - DNA, 1065 bp, Artificial Sequence
  derived and/or modified sequence
atgagtgttaactacgctgccgggctatccccttatgctgataaagggaaatgtgggttaccagaaatcttcgatccacctgaagagctcgagcgaaaagtttgggaacttgctcggctcgtttggcagtcctcgtctgtcgttttccacacaggggctggaatcagtactgcttccggaattcccgatttccggggacctcacggagtctggactatggaggaacggggactggcccccaaattcgacacaacatttgaatctgctagacctactcagacacatatggcccttgttcagctcgaacgggtcgggttgcttagattcctagtgtctcagaatgtcgatggacttcatgtaaggtctgggtttccccgcgataagttagcggaactccacgggaacatgtttgtggaggaatgcgccaaatgtaaaacacagtacgtaagagatactgttgtggggactatgggattgaaagcaacagggagactgtgtacagtggctaaggcacggggattgcgagcatgtaggggggagctgcgagatactatactggattgggaggactcactccccgatagggatttggccctggcggatgaagcctctaggaacgctgacctgagtatcactttgggaacttcactgcagatacggccctcaggaaacctcccattagctactaaaagacgaggaggacgcctcgtcatcgttaacctgcagccaacaaagcatgatcgacacgccgatttgcgcatacatgggtatgtcgacgaagtgatgacaaggcttatgaaacatctggggctggaaatacccgcctgggatgggcctagggtgctcgaaagggctcttcctcccctcccccgaccccctacacctaaactggaaccgaaagaagaatcacctactcggatcaatgggtctatcccagctgggccaaaacaggaaccctgtgcccagcacaatgggagtgaaccagcttccccaaaaagagagagaccaacatcacctgccccccaccgcccaccaaaacgagttaaagcgaaagctgtgccatcg

SEQ ID NO: 191849 - DNA, 1065 bp, Artificial Sequence
  derived and/or modified sequence
atgtctgtgaactacgccgctggcctgtctccttatgccgacaagggaaagtgtggactgcccgaaattttcgatcccccagaagagttagaacgtaaagtctgggaactggcgcgactggtgtggcaatcaagtagcgtggtgttccatacaggcgccggcatctccacagcgtctggcatccccgattttcgcggccctcacggcgtgtggacaatggaggaacgcggacttgcccccaagttcgataccacctttgagtctgccagacctacgcagacccatatggcattggttcaactcgaaagggtgggactccttagattccttgtcagccagaatgtggacggccttcacgtccgctccgggttccctagggacaagctcgctgaactccatgggaatatgtttgtggaggagtgcgccaaatgcaagacgcagtatgtgcgggacacggtagttggcaccatgggactgaaggctaccggccggctgtgtactgtggccaaagctcggggccttagggcttgcagaggagaattacgtgataccatcttggactgggaggattcactccctgatcgcgacttggccctcgcagacgaagccagcagaaatgcagatctctctattaccctgggaacttcactacagattcgcccaagcggaaacctcccactcgctactaagcgcagaggcggccgcttggtcatcgtgaatctgcaacccactaaacatgaccggcacgctgacctcaggatacacggatacgtggatgaggttatgacccggctgatgaagcatctgggattagagattcccgcatgggacggtccccgcgttctcgaaagggccctgcccccccttccaagacctcccacccctaagttggagcctaaagaggaatccccaacccgcattaatggcagcattccagccggtccgaaacaggaaccatgcgcccagcataacggaagcgagccggccagccctaaacgggaacgcccaacctcccctgcccctcaccggcctcctaagagagtcaaagccaaagctgtgccgtca

SEQ ID NO: 191850 - DNA, 1065 bp, Artificial Sequence
  derived and/or modified sequence
atgtcggtgaattatgccgccggacttagtccctacgcagataagggtaaatgtggacttcccgaaatctttgacccccctgaagaactcgaacgaaaggtgtgggaactagctcggttagtgtggcaaagttccagcgtggtctttcatacaggagcaggcatctcaaccgcttcggggattcccgatttcagaggcccccatggggtctggacaatggaggagagaggcctggcccctaaattcgatacaacgttcgagagcgcaaggcccactcagactcatatggccttggttcaattagaacgcgtaggcctcctgagattcctggtgtctcaaaacgtcgacggacttcacgtcagaagtgggttccccagggataaactggctgagctccacgggaacatgttcgtggaagagtgcgctaaatgcaagactcaatatgtgcgagataccgtcgtggggactatgggattgaaagcgaccggccgtctctgtacagtggcaaaggctaggggactgagagcatgccgcggcgagctgcgagacacaatacttgactgggaagactcccttccggatcgagatctcgccctggccgacgaggccagccggaatgctgacctgtccataaccctgggaacatcactgcaaatcagaccgtctggtaacttgcctctcgccacgaagaggcgaggagggcgccttgtgatagtgaatctgcaacctacgaaacacgatcgtcacgcagatctgaggatccacggctatgtcgatgaggttatgaccaggcttatgaagcatttgggactcgaaataccagcctgggatggacctagagtcctggagcgagccttgccccccctcccgcggcctccgacgcctaagttggaacctaaggaagagtctcctacccgaattaatgggtctatcccggccggacctaagcaagaaccctgtgcccagcacaacggcagtgaacccgcctcccctaagagagagagacctacctcaccggcgcctcaccgacccccaaaaagagtcaaagcaaaagcggtcccatcc

SEQ ID NO: 191851 - DNA, 1065 bp, Artificial Sequence
  derived and/or modified sequence
atgtccgtgaactatgctgcaggactcagcccttatgctgataaaggaaagtgtggtttgcccgagatctttgatcctccagaggagttggagcgcaaggtctgggaactcgcacgcctggtgtggcagtcctctagcgtggtcttccacactggcgccggtatcagcacagcctcaggaatcccagatttccgcggcccccatggtgtctggactatggaggagcgtggactcgccccaaagttcgacactactttcgaatctgcccgtcctactcaaacccacatggcactggtgcagctggaaagagttggcttgctgcgttttttggttagtcaaaacgtagacggcctgcacgtaagatccggatttccccgcgataaactggccgaattgcacggcaatatgtttgttgaggagtgcgccaaatgcaagacacagtatgtgagagacacagtcgttggtaccatgggacttaaggctacaggccgtctgtgcaccgtggctaaagccaggggcttgagagcctgcagaggtgagctgcgcgatacaatcctggactgggaagatagtctcccagacagagatttggcattggcagatgaagcttctagaaacgctgatctctcaattactctgggaaccagtctgcagatccgccccagtggtaatctgcccttggccaccaagcgtcgtggtggcaggttggtcatagtcaatcttcaacccactaagcatgatcgccatgctgacctgcgtattcacggttacgtggacgaagtaatgacccgcctgatgaaacatttgggtcttgagatccccgcctgggacggccctcgcgtgctggaacgtgccctcccaccacttccaagacctcccactcctaagctcgaacccaaggaagagagccctacaagaatcaacggaagtatcccagctggacctaagcaggaaccatgtgcccaacacaacggatccgagcctgcttcacccaagagagagagacccacaagtcccgccccacataggcctcctaaacgtgtgaaagcaaaagctgttccctcc

SEQ ID NO: 191852 - DNA, 1065 bp, Artificial Sequence
  derived and/or modified sequence
atgtccgttaactacgccgctggtttgagcccatacgctgacaaaggtaaatgtgggcttcctgagatctttgacccgcctgaagaactagagcggaaggtgtgggagctggctcggttggtgtggcaatcttcatcagtcgtttttcatacaggggctggcatcagtaccgcttcaggcattccagactttcgggggccccacggcgtgtggaccatggaagaacggggtctggcccctaagttcgatacaacgttcgagagcgcccgcccaacacaaacccatatggccctcgtacaacttgaacgcgttggactgcttaggttcctcgtgagccagaacgtagacggactgcatgtgaggtcgggatttccccgagacaaacttgccgagctgcatggcaacatgttcgtggaagaatgcgctaaatgcaagacacagtatgtgagggacactgtggttggaaccatgggcctcaaggctacaggcaggctgtgcaccgttgccaaagcacggggcctgagggcctgcaggggcgaattgagggatacaatcctggactgggaagactcactgccagatagagatttggccttggcagatgaggctagcagaaacgcagacctctcaatcactctcggcacaagcctccagatccgcccaagcggcaatctacccctggctactaaacgccgcggcggaaggctggtgattgttaatcttcagccaacaaagcatgacagacacgccgacctgcgtattcacggctatgtcgatgaagtcatgacaaggcttatgaagcatctcggtctggagattcccgcttgggacggcccaagggttcttgagagggcattgccacccctgcctaggcctccaactccaaaactggaacctaaagaggaatcccccacccggattaatggctcgatccccgccggtccgaagcaagaaccttgtgcccagcacaatggaagcgagcctgcctctcccaagagggaacggcctacaagtcccgcccctcacagaccacctaaaagggtgaaagctaaagcagttcctagc

SEQ ID NO: 191853 - DNA, 1065 bp, Artificial Sequence
  derived and/or modified sequence
atgtccgtaaactatgcagccggcctgtcaccctatgcagataaaggcaagtgcggtctccccgagatttttgatccccccgaggagctggagaggaaagtgtgggagctggccagactggtttggcagtcgtcctcagtggtgtttcacaccggcgctggtatctctacagcctccggaatccccgatttcaggggcccacatggggtgtggaccatggaagagaggggtttggctcctaaatttgataccacattcgaaagtgcgagaccaactcagacccacatggctcttgtgcagttggaacgggtcggcctacttagattcctggtatcccagaatgttgacggtctccacgttagatccggcttccccagggacaaactggctgaactgcatggaaatatgttcgtggaagaatgcgcgaaatgcaagactcagtacgtgcgcgacaccgtagttggtaccatgggcttaaaagcaaccggccgactgtgcactgtcgcaaaagcgaggggccttcgagcctgtcgaggagaattacgagatactatactggactgggaagattccctccccgaccgagaccttgcccttgccgacgaggcgagccgtaacgcagacctgtcaatcaccctggggacatccctccagattaggccctctggaaacctgccactcgccaccaaaagacgaggaggaaggcttgtcatcgtcaacttacagcctacaaagcacgaccgacacgctgacctaagaattcacgggtacgtggacgaagtaatgacgagattgatgaagcatctcggcctagaaatacccgcctgggacggaccccgggttctggagcgggcccttcccccactgcccagaccacccacacccaagctggagcccaaagaggagtccccaactaggatcaacggttctatcccagcaggtccaaagcaggaaccctgcgcccagcacaacggatccgagcccgccagccccaagagagagcgacccacctcccccgcgccacatagacctcccaagcgggtgaaagcaaaggccgtacccagt

SEQ ID NO: 191854 - DNA, 1065 bp, Artificial Sequence
  derived and/or modified sequence
atgtccgtgaactacgccgctgggctgtctccttacgctgataagggaaaatgcgggttgcctgaaatctttgatccaccagaagagcttgagcgcaaggtctgggaactggccaggcttgtgtggcagtcttctagcgtggtgtttcacaccggcgccggcatcagtaccgcctccgggatcccggattttcgagggccacatggggtgtggactatggaagagcgtgggcttgcacccaaattcgacaccacattcgagagtgcccgccccacacagacgcatatggccctggtgcagctggaaagagtcgggttactcagattcctggtttcccagaatgttgatggcttacatgtcagaagtggatttcccagagataagcttgctgagttgcacgggaatatgtttgtggaggagtgcgctaaatgcaagacccaatacgtgagggacactgttgttggaactatgggcctgaaggctactgggcgactctgtaccgtggctaaggcacgggggttgagagcctgcagaggagagctgcgagacacaatacttgactgggaagatagtctgccggaccgggatcttgctcttgctgacgaggcctccaggaatgctgatctatctattacgctcggcacctccctccagatccgaccgtcaggaaaccttcctctggcaacaaagcggcgcgggggacgcctcgtgatagtgaatctgcagccaaccaaacacgaccgccatgccgacttgcgaatccatgggtacgttgatgaagtgatgaccagactgatgaagcatttaggactagagattccagcctgggacgggccccgggtcttggaacgggcactgccccctctgcccagaccgcccacccctaaactcgaaccgaaggaagaaagcccgacgcggataaacggttctattcccgcggggcccaagcaggaaccctgcgctcagcacaacggaagcgaacccgcatccccgaaaagggagcggcctaccagccccgcgccacacagaccaccaaagagggtcaaggcgaaggcagtcccatcc

SEQ ID NO: 191855 - DNA, 1065 bp, Artificial Sequence
  derived and/or modified sequence
atgtcggtcaattacgccgccggtctgtctccatacgccgataaagggaagtgcggacttcctgagatcttcgatccaccggaagaactcgagcgcaaggtgtgggaactggcccggcttgtgtggcaaagctcgtcagtcgtgttccacaccggtgcagggatttccacggcgagcggcatcccggactttcgcgggccccatggggtgtggactatggaagaacggggactcgcgcctaagtttgacaccactttcgaatcagcgaggccaactcagactcacatggccctggtgcagctggaacgggttgggctgctccgcttcctcgtgtcccaaaacgtggatggtctgcacgtcagatcaggattcccccgggacaagttggccgaactgcacggcaatatgttcgtggaggagtgcgccaaatgcaaaacccagtacgtccgggacactgtcgtaggtacgatgggactcaaggccaccggacgcctttgcacggtggccaaggcacggggcctgcgggcttgcagaggcgaactcagagacactatcctcgactgggaggactccctcccagacagagatctcgccctggccgacgaagctagccgcaacgctgacctgagtattaccctcggaacctcactgcagatccgaccgtcaggcaatctccctctggcgaccaaacggagaggtggccgactggtgatcgtgaacctgcagcccaccaagcacgacagacatgcggatttgcgcatccatggttacgtcgatgaagtgatgactcggttgatgaagcatctcggactggaaataccagcttgggatggaccgagagtgctggaacgggcactccctcctctccctaggcctccaaccccgaagctcgagccgaaggaagagtcaccgaccaggatcaacggatcgatccctgcaggacctaaacaggagccgtgcgcgcaacataacggcagtgagcccgcgagcccgaagagagagcggcccacgtcgccggcaccgcaccgcccacccaagcgggtgaaagcaaaggctgtcccctcg

SEQ ID NO: 191856 - DNA, 1065 bp, Artificial Sequence
  derived and/or modified sequence
atgtcggtgaactatgccgcgggactttcaccctacgctgataagggaaagtgtggactgccagagatcttcgacccaccggaggagctcgaacggaaggtctgggagcttgcccggctcgtgtggcagagctcgtccgtggtgttccacaccggtgccggtatctccaccgcctcgggaatcccggactttcgcggaccgcacggagtgtggacgatggaggaacggggtctggccccgaagtttgatactactttcgagtcagctagacctactcagacgcacatggccttggttcaactggaacgcgtcggacttctgcggttcttggtgagccagaatgtggatggcctgcacgtcagaagcggattccctcgcgacaagctggcggaactccacggaaacatgttcgtggaagagtgcgccaagtgtaagactcagtacgttagagatacggtcgtcggcacgatgggcctcaaggccactggccgcctgtgcaccgtcgccaaagcccggggcctgcgggcttgccggggggaactccgggacactattctggactgggaagattccctgccggacagggacttggccctggctgatgaagcgtcgcgcaacgccgacctgtcgatcacccttggcacttcgctccagatcaggccttcggggaacctgccgctcgcgactaaaagacggggaggaagattggtgattgtgaacctccagcctaccaaacacgaccggcatgctgatttgcggatccatgggtacgtggatgaagtgatgacgcggttgatgaagcacctcggactggagatcccggcatgggatggacctcgggtgctggaacgcgctcttccgccgttgcctcggccacccacccctaaactggaaccgaaggaggaaagcccaacccggatcaatggatccatccccgcgggaccaaagcaagaaccgtgcgcccaacataatggaagcgagccggcgtccccaaagcgcgaaagaccgacttcaccagctccgcacagacctcctaagcgggtcaaagcgaaggcggtgccgagc

SEQ ID NO: 191857 - DNA, 1065 bp, Artificial Sequence
  derived and/or modified sequence
atgtccgtaaattatgcggctggtttatcgccctacgctgacaagggtaagtgtggcctaccagagatattcgatccccccgaagagctagagagaaaagtgtgggaattggctcggcttgtctggcaaagctcatccgtggtctttcataccggagcgggtatctccacggcttctggaattccagactttcgggggcctcatggcgtctggacgatggaggagcggggactggcccccaagttcgacacgactttcgaaagcgcaaggccgacgcagacccatatggcactcgtgcaactagaacgggttggcctgctgagatttcttgtgtcccaaaacgtagacggcttgcatgtgcgatccggtttccccagggataagcttgctgaattgcacggcaacatgtttgtggaagagtgcgcaaaatgtaagactcagtacgtgcgggatacagtggtaggaactatgggtcttaaggcgactggaaggctgtgcaccgtggcgaaggcccggggtctgcgtgcttgccgcggtgaactacgggatacgatcctggattgggaagacagtcttcctgatcgggatctcgctctggccgacgaggcgtctcgtaacgccgatttgagtattactctggggacctccctacagatacgtccatccggtaacctcccgctggcaactaagcgccgcggagggcggctcgtgatcgtaaacctacagcccaccaagcatgaccgccacgccgatttgcgaatacatggctacgttgacgaagtgatgactagactgatgaaacacctggggttagaaatcccggcatgggacggcccacgggtgctcgaaagagctctcccgccactcccaagaccaccaacccctaagctcgaaccgaaagaggagtcccctacaaggatcaatggtagcatccctgcgggccccaaacaggagccctgcgcacaacacaatgggtctgaaccagccagtccaaaacgcgagaggcccactagcccagcaccacatcggccccctaagcgcgttaaggccaaggccgttccctcc

SEQ ID NO: 191858 - DNA, 1065 bp, Artificial Sequence
  derived and/or modified sequence
atgtcagtgaactacgcagccggtttgagtccctacgctgataaagggaagtgcgggctgccggaaattttcgatccaccagaggaactcgagaggaaggtgtgggaattggctcgactagtctggcagagttcctcggtcgtgtttcacactggtgcaggtatttcaacggcttccggaattcctgattttagaggcccccacggagtttggactatggaagagagaggattagcaccaaaatttgataccacgttcgaatccgcaaggcctacgcaaacccatatggctctcgttcagttggagcgtgttggcttgttgagatttttagtgtcccaaaatgttgatggtctacatgttaggtctgggttcccacgtgacaaattggctgaactacatggaaacatgtttgttgaagagtgtgctaaatgcaagacgcaatacgttagagacactgtcgtcggaacaatgggtttaaaggctaccgggcgattatgcaccgtcgccaaagcacgaggattaagggcctgcagaggtgagttgcgcgacaccatcctcgattgggaggattctttacctgatagagacctggcacttgctgacgaggcatctagaaacgctgacttatccattactttgggtacatcgttgcaaattagaccttctggcaatctacctttggctactaagaggaggggcggaagacttgtgatcgttaacctgcagcccactaaacacgaccgtcatgcagatctaagaatacatggctatgtagatgaagtaatgactaggcttatgaagcacttaggtttggaaattcccgcctgggacggccctcgcgttcttgagcgtgctctccctcctcttcctaggcctcctacccctaagctcgagcctaaggaggagtctcctactcggatcaacggaagtattcccgcaggcccgaaacaagagccttgtgcacagcataacggcagtgaaccagccagtcccaaaagagagagacccacatcacctgctcctcatagacctcctaaacgcgttaaagccaaggcagttccttca

SEQ ID NO: 191859 - DNA, 1065 bp, Artificial Sequence
  derived and/or modified sequence
atgtcggtcaattatgccgccgggctttccccatacgcggacaaaggcaagtgtgggctgcctgaaatctttgatcctcctgaggaacttgaacgtaaggtttgggaactggccagactggtctggcaatcctcatctgtggtgtttcatactggcgcaggaatttccaccgcgtccggaattccagatttcagaggcccacatggggtctggacgatggaagaaaggggcttggcaccgaagtttgacaccactttcgaatccgcaagaccgacccagactcacatggcactggtgcagctggaaagagtcggacttctgaggttcctggtgtcacagaatgtggatggacttcacgtcagatcaggttttccacgagacaaactggcagaactgcacggtaatatgttcgtcgaagaatgtgcgaagtgcaaaactcaatacgtgcgtgataccgtggtgggaacgatgggacttaaagcaactggacgcctttgcacggttgcaaaggcccggggacttagggcgtgtagaggggaacttcgggatactattctcgattgggaagattcccttccagatcgcgacctggccctggcagatgaagcaagcagaaatgcagatctctcaatcaccctgggtactagcctgcagatccggccatcgggtaaccttcccctggcaactaaacggcgtggggggcggctggtgatcgttaaccttcagcctaccaagcacgacagacatgcagatttgaggattcacggttacgtggatgaggtgatgactaggctgatgaagcatctcggacttgagatcccagcatgggacggtcccagagtgcttgagagggccctccctcctcttccgcgcccccctaccccaaaacttgagcctaaggaggagtcgccaactcgcattaacggatccatccctgcgggaccaaagcaagaaccatgcgcacagcataatggctccgagccagctagcccaaaacgggaacgccccacttcacccgcaccacatagaccaccgaagcgcgttaaggcaaaggcagttccatcc

SEQ ID NO: 191860 - DNA, 1065 bp, Artificial Sequence
  derived and/or modified sequence
atgtcggtgaactacgcggccggcctgtcgccttacgcggacaagggaaaatgcggcttgccagagatctttgaccccccggaagagttggaaaggaaggtttgggagctggcccgcctcgtctggcagtcctcctcggtcgtgttccacaccggtgcggggatctccacggcatcaggcattcccgatttccggggaccgcatggagtgtggaccatggaggaacgcgggctcgcacctaagttcgataccactttcgagagcgcacgtccgacccaaacccacatggctctggtgcagcttgaacgagtggggctcttgaggttcttggtttcccagaatgtggatggacttcatgtgcggtcggggttcccaagggacaaactcgctgagttgcatgggaacatgtttgtcgaagaatgcgcgaagtgtaagactcagtacgtgcgggacactgtcgtggggactatggggctcaaagctaccggtcgcctctgcactgtcgctaaagcccgtggactgagagcctgcagaggagagctccgggacacgatcctggactgggaggacagcctgcctgaccgcgatttggccctggctgacgaagcaagccgaaacgccgatctctccatcacgctgggcacttccctccaaatccgaccaagtggaaatctccctctggcgaccaagcgccgcggtggtcggctggttatcgtcaatctgcagccaacgaaacatgaccgccacgccgatctcagaatccacggatacgtggacgaggtgatgaccaggctgatgaaacacctcggactggaaataccggcctgggacggacctagggtgttggagcgtgccctgcctccgctgccgcgcccacctaccccgaaactcgaaccgaaagaagagagtccgactcgcattaacggatcgatccccgccggccctaagcaagaaccatgtgcccaacataacggaagcgaaccagcctcgcccaagcgagagcggcccacttcaccagccccgcacagacccccaaagagagtgaaggccaaggcagtgccctcg

SEQ ID NO: 191861 - DNA, 1065 bp, Artificial Sequence
  derived and/or modified sequence
atgtccgttaattacgccgcaggactttcgccatacgccgacaaagggaagtgtggcctcccagaaatattcgaccctcctgaggagctggagcgtaaggtgtgggagctggcaaggttggtgtggcaatctagctccgtcgtgtttcacactggggcagggatttccactgctagcggcataccagattttcggggtccacatggagtgtggactatggaggagcgagggctggcaccaaagttcgataccacctttgaatccgcacgacccacacagacacacatggccctagttcagctggagcgagtcggtctgctgaggttcctcgtgtcacagaatgtagacggcctgcatgtaagatccggtttccccagagacaaactggccgagcttcatgggaatatgtttgtggaggaatgcgctaaatgcaagacacagtacgtgcgggacaccgtggtcggaactatgggactgaaagccacaggcaggctgtgtactgttgctaaggcaaggggcttgagggcttgccgtggcgaactccgggacacgatcctggactgggaagatagcctgccagatagagatctggcactggcggacgaggctagtcgtaacgccgaccttagtatcactctgggaactagcctgcagatcagaccgtcaggtaatctccctttggccaccaagcgcaggggcggccgcctcgtgatcgttaatcttcagcctaccaagcacgatcggcacgccgatctgcgcattcatggttatgtcgatgaggtgatgacacgccttatgaagcatcttgggttggaaatcccggcatgggacggtcctagggtgctggagagggccttacccccactaccccggccacccacccctaaactggagccgaaagaggaaagccccactcggatcaatggctccatccctgccggcccaaagcaggagccttgcgctcaacacaacggatctgaacctgcctctccaaaacgggaacgcccaacaagcccggccccccacagaccccccaaaagggttaaggccaaggcggttcctagc

SEQ ID NO: 191862 - DNA, 1065 bp, Artificial Sequence
  derived and/or modified sequence
atgtcggtgaattacgctgccggactttctccgtatgcagataaaggtaagtgcggactcccagaaattttcgatccgcccgaagaacttgaacgaaaagtctgggaactagcccgactcgtgtggcaatcctcatctgttgtgtttcacacgggtgctggaatatcaactgcatctggtattccggatttccgaggacctcatggtgtatggactatggaagaaagagggttggctccgaaattcgatacaacattcgaatctgcacgcccaactcagacacacatggcactcgtccaactcgaaagggttggattgttgagattcttggtgagtcaaaacgtagatggattacatgttaggtcagggttccctcgtgacaagctggctgaactccacggtaacatgtttgtagaagaatgtgcgaagtgtaagactcaatatgttcgagatacggtggtcggcacaatgggcctgaaagccaccggacgcctttgcactgttgctaaggcaagaggactcagagcatgtcggggagaattaagggacacgattcttgactgggaggatagtctccctgacagggatctggcgcttgctgacgaagcaagtcgaaatgcagatctttcaattacacttggaacctctctacagattaggccaagcggaaatcttccgttggcaactaaacgacgaggtggaagactcgttattgtgaatctgcaaccaacaaaacacgatcggcacgcagatttgagaatccacggatatgtggatgaagttatgacacgtttaatgaagcacttgggtcttgagatcccggcatgggatggaccacgcgtactggaaagagcgttgccacctctccccagaccacctacaccaaagcttgaacccaaggaagagagcccaactcggattaatggatcgattccagcagggcccaaacaagaaccatgtgctcagcacaacggatcggaacctgccagcccgaaacgtgaacgtcccacatcccctgcaccacaccggccgcccaagcgtgtaaaggccaaggcagtcccaagc

SEQ ID NO: 191863 - DNA, 1065 bp, Artificial Sequence
  derived and/or modified sequence
atgtctgtgaattatgccgccgggctcagcccatacgcggataaaggcaagtgcgggctcccggagatctttgatccgccagaagaactggagaggaaagtgtgggaactggctcggctggtgtggcagtcctcctcggtcgtgttccataccggagcgggtatttcaactgcgtcgggcatcccggacttccgcggaccgcatggagtttggaccatggaagaacgaggcttggccccgaaattcgacaccacctttgaaagcgcacgacccactcagacgcacatggctctggtccagctcgaaagagtcggactgttgcgttttctggtcagtcaaaatgtggacggactgcacgtgcgctcgggattcccgcgcgacaaacttgccgaactccatgggaacatgttcgtggaagaatgtgcgaagtgtaagacgcagtacgtacgggatactgtggtgggcactatgggactgaaggcaaccgggcgcttgtgcaccgtggccaaggccagaggtctgagagcatgccggggtgaactgagggacaccattctggattgggaagactccctgcctgacagagatctcgcccttgcagacgaggccagcaggaacgcggacctgtcgattacgcttggaacttcacttcaaattagaccatccggaaaccttccgctggccactaagcggcggggcggacgcctggtcatcgttaacctccagccgaccaagcatgacaggcacgccgaccttaggatccatggatacgtcgacgaggtgatgaccaggttgatgaagcacctgggactcgagatcccagcgtgggatggtccgagggtgttggaacgcgcgttgcctcccttgccaaggccgccgactccaaagctcgagccgaaggaggagagccccactagaatcaacggatctatcccagccggaccaaaacaagaaccatgcgcccagcacaatggctccgaacctgcatcccccaagagggaaagaccaacttcacctgcgccgcatcggccgccaaagcgggtgaaagcgaaggctgtgccatct

SEQ ID NO: 191864 - DNA, 1065 bp, Artificial Sequence
  derived and/or modified sequence
atgagcgtgaactatgctgctggtctctccccatacgccgacaaagggaaatgtgggcttcccgagatcttcgatccacctgaggagctggagagaaaggtttgggagctagcacggctggtctggcagtcttcatctgtggtgtttcacaccggggcaggtattagtaccgcctccggcattcccgatttccgggggcctcatggggtgtggacaatggaagagaggggcctggcccctaaatttgacaccaccttcgaaagcgctaggccaacccagactcacatggccctcgtgcagttggaacgtgtcggactgctgcgcttcctcgtgagtcaaaacgtcgacgggctgcacgtgcgaagcggttttcctagagataaacttgctgagcttcatgggaatatgttcgttgaggaatgcgccaagtgcaaaacgcaatatgttagagataccgtggtggggaccatgggtctgaaggccaccgggagactgtgcacggtggctaaggccaggggtctccgtgcatgccgtggagaattaagagatacaatcctcgattgggaagatagcttgccggatcgcgacctggcgctggcagatgaggctagtagaaacgccgacctgtctatcactctagggaccagcctgcagattcgtccatccggcaatttgcccctggcaactaagaggagaggcggcaggcttgtgatcgttaacctgcagccaaccaaacatgatagacatgccgatctgcgcatccatggctacgttgatgaggtgatgacacgcttgatgaagcatcttggactcgagataccagcgtgggacggtcccagggtgctggagagggccctgcccccactgccaaggccaccaacaccaaagctggagccaaaagaagaatcccctacgagaattaacgggtcaatccctgccggaccaaaacaagagccgtgcgcccagcacaacggctccgagcccgctagcccaaagcgcgaaaggcctacatccccggcgccccatagaccccctaaacgcgtgaaagcaaaagccgtgccctca

SEQ ID NO: 191865 - DNA, 1065 bp, Artificial Sequence
  derived and/or modified sequence
atgagcgtcaactacgcggcaggactgtcgccatatgcagataagggtaagtgtggactcccggaaatctttgatcctccagaagaactggagcgtaaggtctgggagctggcccgtcttgtgtggcaatcctcatccgtcgtgtttcatactggagccggaataagcactgcgtccggtattcccgattttagaggcccccacggcgtgtggaccatggaggaaagaggacttgcacctaagtttgataccacctttgaatcagcccgacctactcagacccacatggcactggtgcaactggagcgcgtcggattgctccgctttctcgtgtcgcagaacgtggacgggctgcacgtgcggtcgggttttccaagagacaagctggcagaactgcatggcaacatgtttgtggaagaatgtgcaaagtgcaagacccaatacgtcagagacactgttgttggtactatgggtcttaaggcaaccggacgcctttgcaccgtggctaaggccagaggattgcgcgcatgtaggggcgagttgcgtgatacgattcttgattgggaagatagccttcccgatagggatctggcacttgcagatgaagcgtcaagaaatgcggatcttagcattactcttggaacttctttgcaaattcgcccttccggaaacctcccgcttgcaaccaagcgcagagggggcagactggtcattgtcaatctccagccaaccaagcacgaccggcacgcggatctgcggatccatggttacgtggatgaggtcatgaccagactcatgaaacatttgggccttgaaatccctgcgtgggatggacctcgggtccttgaacgggcactgcctcctttgccacgtcctcctaccccgaagctggaacctaaagaagagtcgcccaccagaataaacggaagcattcccgcaggtcccaaacaagagccatgtgcacaacacaacggatccgaaccagcaagcccaaagagagagcgtccaaccagccctgcaccacacaggccgcctaagcgggtgaaggcaaaggccgtgccatcc

SEQ ID NO: 191866 - DNA, 1065 bp, Artificial Sequence
  derived and/or modified sequence
atgtctgtgaactacgctgcgggattgtctccatatgcagacaaagggaagtgtggcctccccgagatctttgacccacccgaagaactagagagaaaagtgtgggaactggcacgactggtttggcaatctagctcagtggtgtttcacactggggcaggtatttctaccgcctctggaattccagactttcgggggccccatggagtttggaccatggaagaacgtggactggctcctaagtttgatactaccttcgagtcagcacggcccacacaaacccacatggctctcgtgcagctcgagcgcgttgggctacttcgcttcctggttagccagaacgttgatggattacatgttagatctgggttcccacgcgataagcttgccgagttacacgggaacatgtttgttgaggagtgtgccaagtgcaaaacccaatatgtgagagataccgtggttggcactatgggcctgaaggccactgggaggttgtgtaccgtggccaaggcaaggggtctgcgtgcttgccggggcgagctgagggatacaatcttggactgggaagactcactgccagatcgcgacctagcactcgccgatgaagcctcaagaaacgcagatctgagcattacactaggaacttctcttcaaatccgacctagcggaaatctgccgctcgcaacgaagcggcgggggggccgtcttgtaatcgttaacttacaaccaaccaaacacgacaggcacgctgacctcagaattcacggatacgttgatgaagtgatgacccgtctgatgaagcacctaggtctggaaattcctgcctgggacggccctagagtcttagagcgagccctgccccccctgcctcgtccccccaccccaaagctggagcccaaggaagagtctcccacaaggattaacggatccattccagcaggccctaagcaagaaccctgtgcccagcacaacggctccgaacctgctagcccgaaaagggaaagacccactagtcccgctccacatcgcccgcctaaaagggtcaaggctaaggctgtgccctca

SEQ ID NO: 191867 - DNA, 1065 bp, Artificial Sequence
  derived and/or modified sequence
atgtccgtgaattacgcggcaggcctgtctccatacgcggataaggggaagtgcggactgccagagatcttcgatccgccggaagaattggagagaaaggtgtgggaactggcacggctggtctggcaatcgtcctcggtcgtctttcacacgggcgcagggatcagcactgcgtcgggaatccccgatttccgcggaccacacggtgtgtggaccatggaggagaggggtcttgccccgaagtttgacaccaccttcgaatccgcaaggcccactcagactcacatggcactggtgcaactggagagggtgggcctgctccgctttctggtgagccagaacgtggacggtttgcacgtgagatcaggattcccacgggataagctggcagaacttcacggaaacatgttcgttgaagagtgcgctaagtgcaagactcaatacgttagagataccgttgtgggaacgatggggctgaaggcaaccggacggctctgcaccgtggccaaagccagaggactccgagcgtgcaggggggaactccgcgacaccatcttggattgggaggactcattgcctgaccgagatctcgcgctggcagacgaggcatcacgcaatgcggatctctccatcaccctcggaacctccctgcagatccgcccgtccgggaacttgccactcgctacgaagcgccgcggcggtaggctggtcattgtgaacctgcagccgaccaagcacgacaggcacgctgaccttcgcatccatggctacgtagacgaagtgatgacgagactgatgaagcatctcggccttgagataccagcctgggacggaccacgcgtcctggagcgcgcactgcccccgctccccagaccgccaactcctaaactggaaccgaaggaggagagccctaccagaatcaatggttcaatccctgctggccctaagcaagaaccgtgcgctcagcacaacggatccgaacccgcaagcccgaagagagaacgcccaacttcaccggcgcctcaccggccgcctaagcgcgtgaaagccaaggccgtcccgtca

SEQ ID NO: 191868 - DNA, 1065 bp, Artificial Sequence
  derived and/or modified sequence
atgtctgttaattacgctgccggtctcagcccctatgccgacaagggaaaatgtgggctgccggagatcttcgaccctccagaagagctggagaggaaagtctgggagctggccaggctggtctggcagtcctcaagcgttgtattccacaccggagctggaatcagcactgcgagtggaatcccagatttcaggggaccccatggagtgtggaccatggaggagagaggcttggcaccaaaatttgacactaccttcgagagcgcccgaccaacgcaaacacacatggcactggttcagctcgagagagtaggactactgaggtttctcgtcagtcagaacgtcgatggtttgcatgtccgcagcggtttccctagagataaactcgcagaattacatgggaacatgtttgttgaggaatgcgctaagtgtaaaactcagtacgttcgcgacaccgttgtaggcaccatgggtctgaaggccaccgggcgtttatgcaccgtcgctaaggcaaggggcctgcgagcctgcagaggagagttgcgggataccattctggactgggaggatagccttcccgatagggatctggctcttgctgatgaagcctctagaaacgccgacctttctataacactcggcacctctctgcaaatacggccatcaggaaatctgcctttggccacgaagcgaagaggcggccgactggtcatagtcaatctgcaacccactaaacacgacaggcatgcagatctgcggatacacggatacgttgacgaagtcatgactcgactgatgaaacatctgggcctcgaaattcctgcctgggacggcccccgggtgctcgagagggcactgccccctctcccaaggccccctaccccaaaactggagcctaaagaagaatcacctacccgtattaatggctctattccagcaggccccaaacaggaaccatgcgcgcagcataatggcagtgagccggccagtcccaagagagagagacccacaagccctgctcctcataggccccccaaacgggtcaaagcgaaagctgtgccctct

SEQ ID NO: 191869 - DNA, 1065 bp, Artificial Sequence
  derived and/or modified sequence
atgtcggtcaattacgctgcaggactgtcgccgtacgcggacaaagggaagtgcggactcccggagatttttgatcccccggaggaacttgaacgtaaagtctgggagctggctagactggtgtggcagagcagcagcgtcgttttccacaccggagctggaatctcgactgcgtccggcatcccggattttagagggccccacggcgtgtggactatggaggagagaggacttgcccccaagtttgacaccacgttcgaatccgcccgcccaacgcagacccatatggcattggtgcagcttgaacgagtgggactgctgcgattcctcgttagccaaaacgtggatggactgcatgtgagatcgggattcccacgtgacaaactcgccgagctgcatggcaatatgttcgtcgaagaatgcgccaagtgtaagactcagtacgtgcgggatactgtggtggggacgatgggacttaaggcgaccggcaggctgtgtactgtcgcgaaggcacgcggactccgtgcttgcagaggtgagctgcgcgacactatcctcgattgggaggactcgctcccggaccgcgacctggccctcgcggacgaagcatccaggaacgcagacctctccatcactctgggaacttcactccaaatccgccctagcggtaacttgccgctggcgaccaagcggcggggaggacggctggtgatcgtcaacctgcagccgaccaagcacgaccggcacgcggatctgaggattcacggctacgtcgatgaggtcatgacccgcttgatgaagcacttgggcctcgaaatccctgcctgggacggcccgcgcgtgctcgaaagggccctgcctcctctgcctcgcccaccgaccccgaaactcgagccaaaggaggaatccccgacccggattaacggatcgatcccagccggtccaaagcaagaaccctgcgcccagcataatggctcagaaccggccagcccgaaaagagagcgtccgacgtccccggctccccaccgcccaccaaagagagtgaaggcgaaggcagtgccatca

SEQ ID NO: 191870 - DNA, 1065 bp, Artificial Sequence
  derived and/or modified sequence
atgagcgtcaactatgcggccggcctatcaccatacgctgataaaggcaagtgtggtctgcccgagattttcgaccctccggaggaactggaaagaaaggtgtgggaactcgcacgcctggtgtggcagtcttctagtgtagtgttccataccggcgctggtatttccactgcttcaggaatccctgatttccgtggcccccacggggtctggaccatggaagaacgcggacttgcccctaaattcgatacaacattcgagtcagctcgcccaacccaaacccacatggccctagttcagctcgaaagggtcggattgctcagattccttgtttctcagaatgtagatggcctccatgtaagaagtggttttcctagagataagctcgccgaactccacgggaacatgttcgtagaggaatgcgctaaatgcaaaacacagtatgtccgcgatacagtggtgggaaccatggggctaaaggcaactggcagactctgcacggtggctaaggctaggggactgagggcatgcaggggggagctgagagatacaattcttgactgggaagacagtctcccagatcgcgacctcgcgcttgccgatgaggcaagccggaatgcagacttaagtattactctgggaacctcgcttcagatcaggccatcaggcaacctccccctggcaactaaaagaagaggcggacggcttgtgatcgtcaacctacagccaaccaagcacgacagacacgctgacctccgaatccacgggtatgtggatgaagtgatgaccaggctcatgaaacacttaggactggagatacccgcatgggatggcccccgagtgctcgagcgggccctgcccccacttccgcgccctccaactcctaagctcgaacccaaagaggaaagcccaacacggatcaacgggagtataccagcagggccaaaacaggaaccatgtgcccaacataacggtagcgaaccggcatctcccaaacgcgagcgcccgacatctcctgcacctcacagaccacccaaacgggtgaaggcaaaagcagtcccgtcc

SEQ ID NO: 191871 - DNA, 1065 bp, Artificial Sequence
  derived and/or modified sequence
atgagtgtcaattacgcggccggacttagcccttatgctgacaagggtaagtgtggtctccccgaaatcttcgacccacccgaagagctggagagaaaagtatgggagttggcaagactggtttggcagtcttcttcagtcgtctttcacacaggcgctggcatctccacagccagtggaatccccgacttccgcggccctcatggagtctggacgatggaagaaagaggtcttgcgcctaagtttgatacgacattcgagtcagcacgcccgacacagacccatatggccctcgtgcagttggaacgcgtaggcctgctgaggtttctcgtatcacagaatgtggatggacttcacgtccgcagcggtttccccagagataagctggccgaactccacggaaatatgttcgttgaggagtgcgcaaagtgtaagactcagtatgttagggacaccgtggttggcactatgggcctgaaggccacaggcagactttgcaccgttgccaaagcgcgcggcctgagagcctgcaggggagaattgcgcgacacgattcttgattgggaggactccctccctgacagagatctggctctggccgacgaagccagccgcaatgcggacctcagtataaccctgggtacatcccttcaaattcgcccctccggcaatctgccattggcaaccaaaagaaggggcggccgccttgtgatcgtgaacttgcaacctactaaacatgacagacacgccgacctcagaattcatggctatgtggatgaggtaatgacccgcctgatgaaacatctgggtcttgaaattcctgcgtgggatggccccagagtgctggaaagagctttgccccccttgcccaggccgcctaccccaaagcttgagcccaaggaggagtcccctacaaggattaacggatctattccagctggacccaagcaggagccctgcgctcagcataacggaagcgagccagcttctcccaagcgcgagaggccgacatcacccgccccacacaggccgcccaagcgcgtgaaggccaaggctgtcccttcc

SEQ ID NO: 191872 - DNA, 1065 bp, Artificial Sequence
  derived and/or modified sequence
atgtctgttaactacgccgccggtctgtcgccctacgctgataaggggaaatgtggacttcctgagattttcgaccctccagaagagttggaaagaaaagtgtgggaattagctcggctcgtctggcaaagctcaagcgtagtatttcataccggcgctggcatttcaaccgcgtctgggatacccgacttccgggggccacatggggtgtggacaatggaagagaggggtctggcccctaaatttgataccacatttgagtcagcgcgtcccactcaaacacacatggctctggtgcagttggaaagagtggggctacttcggttcctggtgtcccagaacgttgacgggctccacgtgcgaagcgggttcccaagggacaagctggccgagcttcatggcaacatgtttgtggaggagtgtgctaagtgtaaaacacagtacgtgcgtgacacagtcgtgggcaccatgggtttaaaggctacagggcgcctctgcaccgtggctaaggcgagaggactgagagcctgccggggtgagttgcgggacaccatcctggattgggaggacagccttcctgatcgcgacttagccctcgcagacgaggcatctcggaatgctgacttgtctatcaccctagggactagcctgcagatcaggcccagcggcaatctgccgttggcaaccaagagacgtggaggccgtcttgtaattgtcaacttacagccgaccaaacacgatcggcatgctgacttgaggatacatgggtatgttgatgaggttatgactcgcttgatgaagcacctagggcttgagataccagcctgggatgggccacgggtcttggaaagagcgctgcccccactgccacgacccccgacacccaagctggaacccaaggaggaaagtcccacgaggattaacgggagcatccccgcaggccctaaacaggagccctgcgctcagcataacggaagcgaacctgcctcccccaagagagaacgaccgacatctcctgctccgcaccgcccacccaagcgcgtgaaggccaaagctgtgccttct

SEQ ID NO: 191873 - DNA, 1065 bp, Artificial Sequence
  derived and/or modified sequence
atgagcgttaactacgcagctggcctgtcgccttacgctgataagggaaagtgcggcctcccagagattttcgatcctcccgaggaattggagcgcaaagtgtgggaactcgcacgccttgtatggcagtcctcatccgtggtgtttcatactggggctggtatttcgactgcctcgggtatccctgatttcagaggtccacacggggtctggactatggaggaacgcggccttgcacccaagtttgataccacgttcgagtcggctaggccaacccaaactcatatggcgctggtgcagctcgaaagagtggggcttctgcggtttttggtgtcgcagaacgtggacggactgcacgtgaggtccggattcccccgggataagctcgccgaactccatggaaacatgtttgtggaggaatgcgctaagtgtaaaacccaatatgtgcgagacactgtggtgggaactatgggtcttaaggcgactggacgcctttgtactgtggccaaggcgcggggtctgcgagcctgtagaggtgagcttcgtgataccatcctggattgggaggatagccttccagatcgagatcttgcgcttgcagatgaagcaagcaggaacgcagacctcagcattactctgggtacgagcctgcaaattcgcccatcgggcaacctgccgcttgcaactaagcgtaggggtggtagactggtgattgttaatctccagcctaccaaacatgataggcacgcagatctcaggattcacggatacgtcgacgaagtgatgacccgccttatgaaacatctgggtcttgaaatacctgcctgggatggaccccgagtccttgagcgtgcccttcctccactgccacggcctcctactccaaaactggaacctaaagaggaatcccccacccgcattaacggatccatcccagctggaccgaagcaagagccttgtgcacaacataacggttcggagccagcatcaccaaaacgcgagcgtcctaccagccctgcacctcaccgaccacctaaacgggtcaaagccaaggccgtgcctagc

SEQ ID NO: 191874 - DNA, 1065 bp, Artificial Sequence
  derived and/or modified sequence
atgtcagtgaactacgctgccgggttgtctccctatgcggacaagggaaagtgtggtctgcccgaaatctttgaccctcctgaagagcttgaacgcaaggtgtgggagctggccaggctcgtctggcaaagcagcagcgtggttttccatacgggagcagggattagtaccgccagcggcatcccagatttcagaggaccccatggggtctggactatggaagagcgggggctggcccccaaattcgacacaaccttcgagagcgcacggccaacccagacacatatggctttggtccagctggaacgggtggggttgttgcgctttctggtctcacagaacgtcgatggtctccatgtgaggtcaggcttcccccgcgacaagctggctgagttacacgggaacatgtttgtggaggagtgcgccaagtgtaagacccaatatgtgcgagacaccgtggtgggaaccatgggcctcaaggccacaggacgcctttgcaccgtggctaaggcacgcggcctccgagcctgccggggagaactgcgcgacactatcctggattgggaagactccctccccgaccgagaccttgccctggcagatgaggccagtaggaatgccgatttaagcatcactctcggcacctcgctccagattcggccatcaggaaatctgcccctagccacaaagcggcggggcggacgcctggtgatagtgaacctgcagcccaccaagcatgatcgacacgcggatctgcgcatacatggctatgttgatgaggttatgactaggctgatgaaacatctgggcctcgaaattccggcatgggatggacctcgcgtgctggagagagcattacctcctcttccccggcctccaacacccaaattggaacccaaggaagagtccccaactagaataaatggcagcatacccgcgggacccaagcaagagccgtgtgctcagcataatggcagcgagcctgcctcccccaagcgagagagacccacctctccagctcctcacaggcccccaaagagagtgaaagccaaagcggtcccttcc

SEQ ID NO: 191875 - DNA, 1065 bp, Artificial Sequence
  derived and/or modified sequence
atgtcggttaattatgccgctggtctgtctccctatgcagacaaaggcaagtgcggtttgcccgagatatttgacccccccgaagagctggagcggaaagtgtgggaactcgcgcggctcgtgtggcagagctcaagtgttgtcttccatacaggggcagggatctctacagcatcaggtattcccgacttccggggaccccacggggtctggacgatggaggagcgggggctggctcccaagtttgatacaactttcgagtccgcccggcctacccagacgcacatggccctggtgcaattggagcgcgtcggccttctgcgattcctggtttcccagaatgtcgacggtctgcacgtccgtagcggcttccctagggataagctggccgagttacacggtaacatgttcgtggaagaatgcgccaagtgtaagactcaatatgtgcgagatactgttgtcggcactatgggtctgaaggctaccggcaggctctgcactgtggcaaaggcccggggtcttcgcgcttgtcgcggcgaattaagagataccatccttgattgggaggattcgctgcccgacagagacctcgcgctcgccgacgaggcttcacgcaatgctgatctgagcatcaccctggggacctctctccagattcgcccttctggcaacctgccgcttgcaacaaagcggcggggcggtagactcgtcattgttaacctacagcccacaaagcacgaccggcatgccgaccttcgcattcatggttatgttgatgaggtgatgacacgcttgatgaaacatctcggcttggagattcctgcctgggacggcccccgcgtcctggagcgtgcccttccaccccttccacgtcctccgacacctaagttggagcccaaggaggagtcaccaactcggataaatgggtcaattccagcagggccaaaacaggaaccctgtgcgcaacataatggctccgagcccgcctcaccgaagcgcgaacgcccgacatctccagctcctcacagaccccctaagagagtgaaagcgaaagctgtcccttct

SEQ ID NO: 191876 - DNA, 1065 bp, Artificial Sequence
  derived and/or modified sequence
atgtcagtgaattacgcagctgggctgtccccatacgccgataagggaaagtgcggattgcccgagattttcgatccccccgaagaactcgagcggaaggtctgggaattggcacggctcgtctggcagtcgtcatcagtcgtgtttcataccggagccggaatttcaactgcctctggtattcccgattttaggggcccacacggagtgtggactatggaggaacgaggactggcaccgaagttcgatactacttttgaatcggcacggcctacgcaaactcacatggcgctcgtgcaactggagcgagttggacttctgcggtttcttgtgtcacagaacgtggacggccttcatgtgcgttcgggatttccgcgcgacaagctggctgaactgcacggtaatatgttcgtggaagaatgcgcaaagtgtaaaactcaatacgtccgggacaccgtcgtgggtacgatgggactgaaggccaccggaaggttgtgtaccgtggcaaaggcgagaggtcttagagcgtgtcgcggagaacttcgggataccattcttgattgggaggacagccttcctgaccgcgatttggcacttgcagacgaggctagcaggaatgcagatcttagcatcactcttgggacgtccctccagatcagaccttccggaaacctgcccctggccactaaacggcggggaggacgcttggtgatcgtcaaccttcaacctacgaaacacgatagacatgccgatctgagaatacatggctacgttgatgaagtgatgactcgacttatgaagcatcttggactggaaatacctgcgtgggatggtccaagagtgcttgaacgtgcactgccacctcttcctcggcctccaacccctaaactggagccaaaagaagagagccctacgcgcattaatgggtcaatcccggcaggaccaaagcaggaaccatgcgcccagcataacggctccgagccagcatcccctaagagagagcgcccaacctcacctgccccacaccgccccccaaagagggtcaaggcgaaggcagtgccttct

SEQ ID NO: 191877 - DNA, 1065 bp, Artificial Sequence
  derived and/or modified sequence
atgtcggtgaactacgccgctggactgtcaccgtacgcagacaaaggcaagtgcgggctgccggagattttcgatcctccggaagaattggaacgtaaggtgtgggagctggcgcgcctcgtctggcagagttcatctgtcgttttccacaccggagccggaatctccaccgcgtcaggtattccggacttcagaggaccgcacggagtgtggactatggaggaacgcggtctggccccgaagtttgataccaccttcgagtccgcccggccgacccaaacccacatggccctggtgcaactggagcgcgtcggactgctcagattccttgtctcccagaatgtggatggactccacgtccggtctggcttcccgagagacaaactggccgaactccacggtaacatgttcgtggaggaatgtgcgaagtgcaagacgcagtacgtgagagataccgtggtgggcacgatgggcttgaaggcaaccggaaggctctgcactgtggcaaaggctcgcgggctgcgagcctgccgaggcgagctgcgcgacacgatcctcgactgggaggactccctcccagaccgggacctggcgctggctgacgaggcctcgcgcaacgcagatctgtccattaccctcggaacttcgttgcagatccggccttcgggcaacctgccgctggcaactaaaaggcggggagggagactcgtgatcgtcaacctccagcctactaagcatgacaggcacgccgacctgcggatccatgggtatgtcgatgaagtcatgacccgcctgatgaagcatttgggtctggaaatcccggcgtgggacggaccgagagtgctcgagcgcgccctgcctcccctgccccggccgccgactccgaagctcgaaccgaaggaagaaagcccgacccggatcaatggatcaattcctgcaggacccaaacaagagccttgtgcccaacataacggaagcgagccggcatcgccgaaacgggagcgccctacctccccggccccgcatcggcctcccaaaagagtgaaggccaaggcagtgccgtct

SEQ ID NO: 191878 - DNA, 1065 bp, Artificial Sequence
  derived and/or modified sequence
atgagcgttaactacgcagccggactttcgccgtacgcagataaggggaagtgcgggctcccagaaatctttgaccctcctgaagaacttgagcgcaaggtctgggaattggcacgtctggtgtggcaatcctccagcgtggtgtttcataccggagcaggaatttccacggcctcggggattcccgattttagaggtccacacggtgtgtggactatggaagaacggggactcgcccctaaattcgatacgacgtttgaatctgcacggcctacccaaacccatatggcacttgtgcagttggaacgcgtgggactcctgcgattcctcgtgtcccagaatgtggacggcctccacgtgagaagcggattccctagggataaacttgctgaactgcacggaaacatgttcgtggaagagtgtgctaagtgtaaaacccaatacgtcagagacactgtcgtcggaactatgggtctgaaggctaccggtagactgtgtactgtggcgaaggcaagaggtctgcgggcatgtagaggggaactcagggacactattcttgattgggaggactcacttcctgacagagacttggccctggcagatgaagcgtctcgcaatgcagatctgtccataactcttgggacctccctccaaattcgaccttctggtaatctccctctggcaaccaagcggagaggaggtagacttgtgattgtgaatctgcagcctaccaagcatgaccgccatgcggatctgcggattcatggttacgtggatgaagtcatgactcgcctgatgaagcatctcggcctcgagatccctgcgtgggacggtccacgcgtcctggagcgtgcactgcccccacttcctcgacctcctactccaaaactcgaacccaaggaagaaagcccaacccgtattaacggctcaattccagcgggccctaagcaagaaccttgtgcacagcataatggttccgaacccgcatcgccaaagcgggaaagacctacctcacccgcgccacaccgacccccaaagagagtcaaagcgaaggcagtgccaagc

SEQ ID NO: 191879 - DNA, 1065 bp, Artificial Sequence
  derived and/or modified sequence
atgtccgtcaactacgcggctggactcagcccttacgcggataaaggaaagtgcggcctcccggaaatctttgacccaccagaagaactggagaggaaagtctgggagctggcccgcctcgtctggcagtcctcctcagtggtgttccacacgggagcgggaatctcgacggcaagcggcatcccggattttagagggccgcatggcgtgtggactatggaagagagggggctggccccaaaattcgacaccacctttgaaagcgcccggccaactcagactcacatggcgctcgtccaacttgagagagtcggactgctgcgcttcctggtgtcacagaacgtggatggactgcacgtgcgctctggattccctagagataagctggccgaactccacgggaacatgttcgtcgaagaatgtgcgaagtgcaagacccagtacgtccgggatactgtggtcggcactatgggactcaaggctaccggaagattgtgcactgtggccaaagcgcgagggttgcgcgcctgtcggggagaactcagagatactatcctcgactgggaagattccctcccagatcgggacctggccctcgcagacgaagcgagccgcaatgccgacttgtcgatcacgcttggcacctccctccaaatccgaccaagcggcaatctgccgctggccaccaagaggcggggcggtaggctggtcattgttaacctgcaacctaccaagcacgatagacatgcggatctccggatccacggatacgttgacgaggtgatgactcgactcatgaaacacctggggctcgagatcccggcctgggatggcccacgggtgctcgagagggcactgccgccgctcccgcgcccaccgactccgaagctggagccaaaggaggagtcaccgacccgcatcaacggatcaatcccggcaggaccaaagcaagagccttgcgcacagcataatggaagcgagccggcatcgcccaagcgggagcggcctacctccccagccccacaccggcccccgaagcgcgtgaaggccaaggcggtgccgtcg

SEQ ID NO: 191880 - DNA, 1065 bp, Artificial Sequence
  derived and/or modified sequence
atgtctgtcaactacgcagcagggttgtccccttacgccgataagggcaagtgcgggttgcccgaaatcttcgatcctccagaggagctggagcgcaaagtatgggagctcgctagactcgtctggcagtcgtcttcggttgtttttcacacgggcgcaggcatcagcacggcttccggcatccccgactttcgcgggcctcacggcgtctggaccatggaggagaggggcttggcccctaagtttgatacaacatttgagagtgcacgccccacacaaacacatatggcactcgtgcagctcgagcgcgtcggcctgctccgctttctcgtctcccagaatgtggacgggttgcatgtgagatcgggctttccgagagacaagttggccgagttacacggaaacatgttcgtcgaggagtgcgccaagtgcaagactcagtatgtgcgcgacacagtggtcggaactatgggcctgaaggctaccggcaggctctgtacagtggccaaggcgcgggggttgagagcttgtcgtggggaattgagggacacaattctggactgggaggactccctgcccgaccgcgacttggcgctggccgatgaggcgagcagaaacgctgacttgtcaatcaccttaggtacgtccctccagattagaccatctggtaacctgcctctagctacaaaacggcgagggggtcggttggtgatagtcaacttgcaaccaaccaaacatgaccgacatgccgatctgcggattcatggatacgtggacgaagtaatgacccgcctgatgaagcacttggggctggagatcccggcctgggacggacctagggtcctcgagagggccctgccccctttacctagaccccctaccccaaagcttgagcctaaggaggagtccccaacccgcataaacggttctatccccgccgggcctaagcaggagccctgcgcgcaacacaacggaagcgaacccgcatctcccaagagagagcggccaaccagccccgcgccccacaggccgcccaaaagagtgaaggcgaaggctgtgcctagc

SEQ ID NO: 191881 - DNA, 1065 bp, Artificial Sequence
  derived and/or modified sequence
atgtcagtgaactacgctgccgggttgagtccttacgcagataagggtaaatgtggcctgcctgaaatctttgacccgcctgaagagcttgagagaaaggtctgggaactcgcccgcctggtctggcagtccagttccgtggtctttcacaccggtgcaggaatcagcactgcttccggaattcctgacttcagaggtcctcacggagtctggaccatggaggaaagaggtttggcaccaaaattcgatacgaccttcgaatccgcccggccaactcaaacccatatggcactcgtgcaactcgaacgagtggggctgctccgatttctggtgtcacagaacgtggacgggcttcatgtgaggagcgggtttcctcgagacaaacttgcggaattgcacggaaacatgtttgtggaagagtgtgcgaagtgtaaaacccagtacgtgcgcgatactgtggtcggaaccatgggcctgaaggcaactggacggctgtgtactgtggcaaaggcccgcggattgcgagcatgtcgcggtgaacttcgggatactattcttgattgggaagatagccttcctgatagagatttggcacttgcagatgaggcatcacgtaatgcagacctttctattacccttggaacttcgctgcaaattcgccccagcggaaacctgcctcttgcgaccaagcggaggggtggccggcttgtgatagtgaatcttcaacctaccaagcatgatagacatgcagatctgcggatacatggatacgtggatgaggtgatgaccagacttatgaagcatctgggcttggaaattcctgcctgggatggtcctcgtgtcctcgaacgggcactcccgcctcttccacgccctccgacccctaagctcgagccgaaggaagaatcacccactcggatcaacggatcgattccagccggacctaagcaggaaccttgcgcgcaacacaacggctccgagcctgcttcccctaagagagaaagacctacctcccctgcaccacatagaccaccaaagagagtgaaagcaaaggctgtgccatcg

SEQ ID NO: 191882 - DNA, 1065 bp, Artificial Sequence
  derived and/or modified sequence
atgtcagtgaattacgctgctggcttgagcccctacgcagacaaggggaagtgcggcctgccggaaatcttcgatccgccagaggaactggagcgaaaagtgtgggaactggctcggctggtgtggcaatcatcgtcagttgtgtttcacacgggagcgggaatttctactgcctcagggatcccagacttcaggggaccgcacggagtgtggaccatggaagaaagaggactcgcacctaagttcgatactacttttgaatccgctagaccaactcaaacccatatggcgctcgtgcagctggagagggtcgggcttctcagattcttggtgagccagaacgtggatggactgcacgtgagatcgggattcccaagagataagctcgccgaactgcacggaaatatgttcgtggaagagtgtgcgaagtgcaaaacccaatacgtaagggacaccgtcgtcggaaccatggggttgaaagccactgggaggctctgtaccgtcgctaaagccaggggactgcgcgcctgccggggagaattgagggacaccattctggattgggaggactcgcttcctgaccgtgacctggccctcgctgatgaagccagccggaacgcagacctgtcgattaccctgggcacctccctgcagattcgtccgtccggcaacctgccgcttgcgaccaagcggcgcggaggaagattggtgatcgtcaaccttcagcctactaagcacgatcgccatgcggacttgcgaatccatggctacgtggacgaggtgatgacgagactcatgaaacacctgggactggagatcccggcctgggacggaccccgtgtcctggagcgggccctgccacctctgccgcgtccaccaaccccgaaactcgaaccaaaggaagaatccccgacgcgcatcaacggttcaatcccagctggcccgaagcaggaaccttgcgcacagcacaatggcagcgagccagcctcccctaagcgggaacgcccaacctccccagccccacatcgcccgccgaagcgcgtcaaggctaaggcggtgcccagc

SEQ ID NO: 191883 - DNA, 1065 bp, Artificial Sequence
  derived and/or modified sequence
atgagcgtgaactacgcagctggcctctccccatacgcagataaaggcaagtgcggccttcccgagatatttgatccgcctgaagagttggagcgcaaggtgtgggagcttgcgcggctcgtctggcagtcctcgtcggtcgtttttcataccggagcgggtatctccaccgcatcgggcattcccgattttagaggtccccatggtgtgtggaccatggaagaaagagggctggcccccaagtttgacaccacctttgaatcggccaggcccacccagacccacatggcactggtccaacttgagcgagtaggtctgctgcggtttctggtgtcgcagaacgtggatggccttcacgtgaggtctggattccctagagataaactcgccgaactgcacggtaatatgtttgtcgaggaatgcgcaaagtgtaagacgcaatacgtgagagacactgtggttggaaccatgggactgaaggcaactgggaggctctgcaccgtggcaaaggcacgcgggctcagggcctgtaggggagagcttagagataccattctcgactgggaggactcactgccggatcgggatctggcactggcggacgaggctagccgcaatgcagacctttcaattaccctgggcacttcccttcagataagaccatccgggaacctcccactggcaactaagagaagaggaggccggcttgtgatcgtgaatctgcaaccaaccaagcatgaccggcatgccgaccttcgaatccacggttacgtggatgaagtgatgactaggctcatgaagcatctgggactcgaaatccctgcgtgggatgggccacgcgtgctcgaacgcgcactgcctcctctgccccgaccaccaacccctaaactcgaacccaaagaagaatcacctactcgcattaatggttccatacctgcaggaccaaaacaagagccctgtgcgcaacataacggtagcgagccagcatcacctaagagagaacgcccaacgtcacctgcacctcataggcctccaaaacgcgtgaaggcaaaggcagttccttcc

SEQ ID NO: 191884 - DNA, 1065 bp, Artificial Sequence
  derived and/or modified sequence
atgagcgtgaactacgccgccggactgtcaccgtacgctgataagggaaagtgtggactcccagaaatcttcgacccgcctgaagaactggagaggaaggtgtgggaactggcccggctggtgtggcagtcgtccagcgtggtctttcacactggcgccggaatctccaccgcgtccggaattccagatttccgcggcccgcacggagtgtggaccatggaggaacgcggtttggcccctaagttcgacaccaccttcgaatccgccagacctacccagacccatatggcgttggtgcaactcgagcgcgtgggtctgctgcgcttcctcgtgtcccaaaatgtcgatggactccacgtgcgctcgggattccccagagacaagctggcggaactgcacggaaacatgtttgtggaggagtgcgcaaaatgcaagacccagtacgtgcgcgacactgtggtgggaaccatgggactgaaggcgactggacggctgtgtaccgtggcgaaggcccggggcttgagagcttgtaggggcgaactgagagataccatccttgattgggaagattcattgcctgaccgcgaccttgcgctcgctgacgaagcctcccggaatgccgacctgtccatcacccttggaacttccctgcagatccgcccgagcggcaacctgccgttggccaccaaacgccgcgggggccgcctcgtgattgtcaatctccagcccaccaagcacgaccggcacgctgatcttcggatccatggatacgtcgatgaagtcatgacccggctcatgaagcatctcggcctggaaattcctgcatgggacggccctcgcgtgctcgagcgagccctgccaccattgccgcgaccgccgacgccgaagctcgaaccgaaggaggagagcccaactagaattaacggatcgatccctgcgggaccaaagcaggagccatgcgcgcaacacaacggcagcgagcctgcatccccgaaacgggaacgcccgacttcgcccgcccctcaccggccgccgaaacgggtgaaagccaaagcagtgccgagc

SEQ ID NO: 191885 - DNA, 1065 bp, Artificial Sequence
  derived and/or modified sequence
atgtccgtgaattatgccgcaggcctcagcccttacgcagacaagggaaaatgcggactccccgagatcttcgatccccctgaggaactggagcgcaaagtatgggaactcgccaggctagtatggcagagtagctctgtcgtgtttcacacgggggccggaatttccaccgctagcggaattcccgactttcgagggcctcatggcgtctggacaatggaggagcggggcctggccccgaagtttgacactaccttcgagagcgcccgcccgactcagactcatatggcactggtccaactggagagggtgggcctgctgcgatttttggtctcccagaacgtggacggactgcacgttcgatcagggtttccaagagacaagctggccgaactgcacggaaatatgtttgtggaagaatgtgctaagtgtaaaacgcagtatgtgagagataccgtggtgggcactatgggtctaaaggccacgggcagactgtgcacggttgcaaaggctagggggctgcgggcttgccggggcgaactgcgcgatacaatcctggattgggaggattcactgccggatagggacctggccttggccgacgaggcctctaggaatgccgacctcagcattacgctgggaacttccctgcagattagaccgtcgggaaatctgcccctggcgactaagagacggggcgggcggctcgtcatcgtgaacctccagccaactaagcacgacaggcatgcggatttacgtattcacggctacgtggatgaggttatgaccaggctcatgaagcatttgggcttagagattccggcttgggatgggcctcgcgtcttagagcgtgccctccctcctctacccaggcctcctactcctaagctggagcccaaggaagaatcccctacccgtattaacggttcaataccggccggcccaaagcaagaaccctgtgcgcagcataacggatccgaacctgcctcacccaagagagaacggcctacatctcccgcccctcatcgaccaccaaagagggtgaaggccaaggcagtgccctca

SEQ ID NO: 191886 - DNA, 1065 bp, Artificial Sequence
  derived and/or modified sequence
atgtccgtcaactatgcagcagggctcagtccatacgcagataaaggcaagtgtgggctcccagagatttttgatcctcctgaagaactcgagcggaaggtttgggaactggctagactagtttggcaaagcagcagcgtcgtgtttcacacaggcgcaggcatcagcaccgcctccggcatcccagacttccgcggaccccatggcgtatggaccatggaagagagaggcctggcacctaaattcgacactacattcgagtctgcccggccaacccagactcatatggccctggtgcagctggagcgggtgggccttctcagattcctggtttcccagaatgtcgatggactgcatgtcaggtccggctttcccagagataaactcgctgagctacacggaaacatgttcgtggaggagtgcgctaaatgtaagacgcaatacgtgagggacaccgttgtcggaacaatgggattgaaggcaaccggaagactctgtactgtggccaaagcccgaggacttagggcgtgccggggtgagctgcgagacacaattctggactgggaagacagtctgcccgaccgcgacctggcacttgcagatgaggcaagtcgcaatgcagatctgagtatcactctgggaacttccctgcagatcaggccatctggaaatctgcccctggctactaagcgaaggggcggaagattagtgattgttaacctccaaccaaccaaacacgaccggcacgccgacttgcgtattcatggctacgtcgacgaggtgatgacccgactgatgaagcacctcggcctcgagattcctgcttgggatggaccccgcgtcttagaaagagccttacccccgctgccacggccgccaactcccaagctagagccaaaggaggagtcacctactcgaatcaacggaagcatccctgctggccccaaacaagaaccctgcgcccaacataatggctctgaacccgcctctccaaaacgcgagaggcctacatcccctgctccacaccgcccaccaaaaagggtgaaagccaaggcggttccctct

SEQ ID NO: 191887 - DNA, 1065 bp, Artificial Sequence
  derived and/or modified sequence
atgagcgtgaactatgccgcgggactgtccccctacgcggataaggggaagtgtgggctgccggagatcttcgatcctccggaagaactggaacgcaaggtgtgggagctggcccgcctcgtgtggcaatccagctcggtcgttttccacactggagcaggaatctcaactgcatctggcatacccgatttcagaggaccacacggcgtgtggactatggaggaaagaggactggcacctaagttcgataccactttcgagtcggcaagaccgactcagacccacatggcactggtgcaactggagcgcgtgggcttgttgcgcttcctggtcagtcaaaacgtggatggactccatgtccggagcggatttcccagagacaagctcgccgaacttcacgggaatatgtttgtggaggaatgcgcaaagtgcaagacccagtacgtccgcgataccgtggttggaaccatgggactgaaagctaccgggcgactgtgcacggtggccaaagcaagaggattgagagcctgcaggggcgaactccgcgataccattctggattgggaagattccctgccggaccgggaccttgccctcgcggacgaggcgtcgagaaacgcagacttgtcaatcaccctcggtacttcgctgcagatccggccttccggaaacttgcctctggcgacgaagcggcgcggaggacgcctcgttatcgtcaacctccagccgactaaacatgatagacatgccgacctgcgaatccatgggtatgtcgacgaggtcatgactcggctgatgaaacacctcggattggaaatcccagcttgggacggccctcgcgtgctcgagcgcgctctgcccccgctgccacggccgccaaccccgaaactcgagccgaaggaagaaagcccaacccgcatcaacggatccatcccggctggaccgaagcaggagccgtgtgcccagcacaacggatccgaaccagcgtcgccgaaaagagaacgccctacttcacccgctccgcatcgaccgcctaagcgcgtgaaggccaaggctgtgcccagc

SEQ ID NO: 191888 - DNA, 1065 bp, Artificial Sequence
  derived and/or modified sequence
atgtcagtgaactacgcagcaggactgtccccttacgccgacaagggtaagtgcggcctgccagagatttttgatccccctgaagagcttgaacgtaaggtgtgggagcttgctcggcttgtgtggcagtcctcgtcggtggtctttcatactggagccgggatttcgaccgcaagcggtattcctgattttagaggaccccacggagtgtggaccatggaagaacggggactggcacctaagtttgataccacttttgaatccgcacgacccactcagactcatatggcacttgtgcaactggaacgcgtcggtctgctccgttttttggtatcgcagaacgtcgatggactccatgtccgctctggctttccacgcgataagctggcagaacttcatggcaacatgtttgttgaagaatgtgcaaagtgtaagactcagtacgtgcgcgacacggtggtcggtaccatgggcctgaaagcgaccggcagactttgtaccgtggccaaggcacgcggtctgagagcgtgtaggggagaacttcgagatactatccttgactgggaagatagtctgccggaccgcgatctggctctggcagacgaggcttcgcggaacgcagatctttcgatcacccttggaacctcacttcagatccgaccatcgggtaaccttcccctggccactaagaggagaggcggcagacttgtgattgtgaatctccaacctaccaagcatgatagacacgcagatctccgcatccatggatacgtcgatgaagtcatgactcgacttatgaaacaccttggcttggagatcccagcatgggacggaccgagagtgctggaaagggcgcttcccccactgccaagacctcccactcccaagctcgaaccaaaggaagagtcccctacgcgcattaacgggtcgattcccgccggacctaagcaggaaccttgtgcccaacataatgggtccgaaccggcatccccgaaaagagagcgcccaacgagccccgcaccacatcgaccacctaagagagtcaaggcaaaagcagtcccatcc

SEQ ID NO: 191889 - DNA, 1065 bp, Artificial Sequence
  derived and/or modified sequence
atgtcagtcaattacgcagctggactgagtccatatgccgataagggcaagtgcggcctgcccgaaatttttgaccccccggaagagctagagcgcaaggtatgggaactcgctagactagtttggcagtccagctctgtcgtcttccataccggcgcaggcatatcgaccgcctctggcatccctgacttccgtggccctcatggcgtgtggaccatggaggaaaggggcctggcgcctaagttcgacaccaccttcgagtccgccagaccaacccagactcacatggcacttgtgcagctcgagcgcgtgggccttcttcgattcttggtaagccaaaacgtcgacggcttgcacgtacgttcaggctttccacgcgataagttggcggagctacatggcaatatgttcgtggaggagtgtgccaaatgtaagacacagtacgtgcgtgatacggtcgtgggaacaatgggcttgaaggccacgggacggttgtgtactgttgctaaggcccggggcttgcgagcgtgccgtggagagttgcgagatacaatcctggactgggaagactctcttccagatcgcgaccttgcgttggccgacgaggcctcgcggaacgcagatctctcaatcaccctgggcacgtcacttcaaatccggccctcaggcaacctgcccctagcgacgaaacgtcgagggggaagactcgttattgtgaacctgcaaccaaccaaacatgaccgtcacgctgacctgcgtatccacggctatgtcgacgaagtcatgacacgacttatgaagcacctaggcctggagataccggcttgggatggcccccgggtgctcgagcgcgcgttgcccccgctgcccaggccccccacgccgaagctcgagcccaaggaggaaagccccacaaggattaacggcagcatccccgccggccccaagcaggagccctgtgctcagcacaacggctcggaaccggcctcccctaagagagagcggccaacctcaccagccccgcataggcctccgaagagagtcaaggcgaaggctgtaccatct

SEQ ID NO: 191890 - DNA, 1065 bp, Artificial Sequence
  derived and/or modified sequence
atgagcgtcaattacgcagcagggctgtcaccttacgcggataagggaaaatgtgggcttcctgagatattcgaccctccagaggaacttgagaggaaggtgtgggaactggcaaggcttgtctggcaatcgtcgtccgtggtctttcatactggcgcaggcatctccaccgccagcggaattccggattttagaggacctcatggtgtgtggactatggaagaaagaggacttgctccaaagtttgataccacctttgagtccgcccgccctactcagactcatatggcactggtccaattggaaagggttggtctgctgcgctttctcgtgtcacaaaatgtcgatgggttgcatgtgagatccgggtttcctagagataaactcgcggagctgcacggaaacatgttcgtggaggagtgtgcaaagtgcaaaactcagtatgtgcgtgatactgtggtggggacgatgggactgaaggcaacgggacgcctgtgtactgtggcaaaggccagaggactcagagcctgccgtggagaattgagagatactattctggattgggaggactcacttccagacagggatctggcgcttgctgatgaagcctcccgcaatgccgatctgagcattacgttgggcacgagccttcaaatcagaccttccggcaacctgcctcttgccactaagcggcgtggggggaggctggtgattgtgaaccttcaacccactaagcatgatcgtcatgccgacctcagaattcacggttacgtggatgaagtgatgactagacttatgaagcatctgggactggaaattcctgcgtgggatgggcctagggtccttgaaagagctctgcctccactgcctagaccaccaactccgaaacttgaaccaaaggaagagtccccgacccggattaatggttccatcccggcaggtcccaagcaggagccctgtgctcaacataacggtagcgagcctgcatcgccaaagcgagaacgcccaacttcgccggcgccacaccgaccacccaagcgcgtgaaggccaaagctgtgccttca

SEQ ID NO: 191891 - DNA, 1065 bp, Artificial Sequence
  derived and/or modified sequence
atgtctgtcaactacgcagcaggactgtccccatatgctgacaaagggaagtgtggacttccagagatatttgacccacctgaagagctcgaaaggaaggtgtgggaattggcccgcttggtgtggcaatcgtcctccgtcgtgttccacacgggtgcaggaatttcgacggcctccgggatccccgattttcggggccctcacggcgtgtggaccatggaggaacggggcctggcaccaaagttcgatactacttttgaaagcgccagacccactcagacccatatggcacttgtccagcttgagagagtggggctcctgcggtttttggtatcacagaatgtggatggtctgcacgtcagatcaggattcccaagggataagctggcagaattgcatggtaacatgtttgtggaggaatgcgcaaagtgtaagacccaatacgtccgggataccgtggtgggtactatgggccttaaggcaaccggccggctctgtactgttgcgaaagccagaggacttcgtgcttgtcgcggtgagctgcgggatacgattctcgattgggaagatagccttcccgatcgagatctcgcgcttgctgatgaggcctctcggaatgcggacctgagcatcaccctgggaacttctctgcagattcgaccatccggtaacttgccgctggcaacgaagaggagaggaggtcgcttggtcattgtaaacctgcaacccactaaacatgaccgacatgcagacctgcgcatccacggatacgttgacgaggtcatgaccagactgatgaaacatctcggccttgaaattccagcatgggacgggccaagagtgcttgaaagagcactgccccctcttcctaggcctcctactccaaaacttgaacccaaggaagaaagccctacccgcattaatggaagcataccagctggaccaaagcaagaaccttgcgcccaacacaacgggtccgaacccgcctcacctaaacgagagaggcctacctcaccggcaccccatcgcccccctaaaagggtgaaagctaaggcagtgccatcg

SEQ ID NO: 191892 - DNA, 1065 bp, Artificial Sequence
  derived and/or modified sequence
atgtcggttaactacgcagcaggactgagcccatacgctgataaggggaaatgcggactcccggaaatctttgacccgccggaagagctggaacggaaagtctgggaactggcgcggctcgtgtggcagtccagctccgtggtattccacactggagcaggaatcagcacggctagcggtattcccgatttccgcggacctcacggagtgtggaccatggaggaacgcggcctggccccgaaatttgatactactttcgagagcgcccgcccaactcaaacccacatggcgctggtgcaactggaaagagtgggtttgcttcgcttcctcgtctcgcagaacgtggatggtctgcatgtcaggtccggattcccgagggacaaactggcagagctgcatggaaacatgttcgtggaggagtgcgctaagtgcaagacccagtatgtccgcgatactgtggtgggaaccatggggctcaaagcgaccggaaggctctgcaccgttgcaaaggcacggggactcagagcgtgccgcggagaactgagagatactattctggattgggaggactcgctgccggacagagatctggctctcgcagacgaagcaagcaggaacgccgacttgtccatcacgctcgggacctcgctgcaaatccggccatcaggaaacttgccgctcgcaaccaagcggcggggaggacgtcttgtgattgtgaatctgcagcctactaaacatgatagacacgctgacctgcgcatccacgggtacgtggacgaggtcatgactcggctgatgaagcatctggggttggaaatcccggcatgggacgggccaagagtgctcgaaagggcactgccaccgctcccacggcccccaacccctaagctggagccgaaggaggaaagccccactcgcatcaacggttctattccggccggtcctaagcaggagccatgtgcccaacacaatggctcggaacccgcgagcccaaagagagaacggccgacctctccggcaccccaccggccgccgaagcgggtgaaggccaaggctgtgccatcc

SEQ ID NO: 191893 - DNA, 1065 bp, Artificial Sequence
  derived and/or modified sequence
atgtcggttaactatgccgccggccttagtccttacgccgacaaggggaaatgcggcctacctgagattttcgatcctcctgaggagctcgagagaaaggtatgggagcttgcccgattggtttggcagtcttcttcggtggtctttcacaccggggccggtataagcaccgccagtggtatccctgattttagaggaccgcatggcgtatggaccatggaggaacggggtttagcccctaaattcgacacaacattcgagagtgctagacccacccagacccacatggccttggtacaactagaacgggttgggctccttaggttcctagtctcacagaatgtggatggtctgcacgtgagatctggatttccgcgggacaagctggccgagcttcatggtaacatgtttgttgaggaatgtgcaaagtgtaagacccagtatgttcgtgatacggtggtgggtacaatgggactgaaggcgacaggccggctgtgtactgttgccaaagccagagggctaagggcctgtagaggagagctgcgggacaccatactggattgggaggactctcttccagacagggatctggcactagcagatgaagcctctcgcaacgcagacctctcaatcaccttgggaacttctcttcagatccgtccaagcgggaacctgcctctcgcgacaaaacggaggggagggagactggtgatcgtcaacctacagcctaccaaacatgaccgtcacgccgatttgaggatccatgggtacgtagacgaggtcatgacgaggcttatgaaacatctgggattggagatcccagcttgggacggtccccgcgtattggaacgagcgctgcctccgctcccacggccacctacccccaagcttgaaccaaaggaagagagtcctactcggatcaacgggtccataccggctggccctaaacaagagccatgcgctcagcacaacgggtcagagcctgccagccctaaacgtgagcgccctacttcccctgctccccatcgcccgcccaaaagagtcaaggccaaagctgtccccagc

SEQ ID NO: 191894 - DNA, 1065 bp, Artificial Sequence
  derived and/or modified sequence
atgagcgttaattatgctgctggactgagtccctacgcagataagggcaagtgcggcctaccggaaattttcgatcccccagaagagctagagcggaaggtctgggaactggcgcgcctagtgtggcagagctcttcggtggtttttcacactggagctggaatatctactgccagtggcatacccgattttcgggggcctcatggcgtgtggaccatggaagaacgaggtctcgccccgaaatttgatacaacattcgaaagtgctcgcccaactcagacacatatggccttggtacaactcgagagagtagggctgctcaggttcctcgtgtcccaaaatgttgatggactccatgtgcgctccggtttcccacgagacaaattggctgagctccatgggaatatgtttgtagaagagtgcgccaagtgtaaaactcagtacgttagggatactgtggttggaacgatgggtctgaaggcaacagggcgcttgtgtacagtggccaaagccagaggactgagggcatgtcgtggagagctgcgcgatacgatccttgattgggaggactccctacctgacagagatttggccctagccgatgaggcaagccgaaatgcagatctaagtatcaccctgggaaccagcctgcagattcgcccgtcgggcaatcttcccctagccaccaagaggcggggaggccgacttgttatcgtgaacttgcagccaacaaaacatgataggcacgccgacctgcgtatccacggatacgtcgatgaggtgatgaccagactgatgaagcatctgggcttggagatccccgcttgggacgggccgagggtcctggaacgagccctgcctccacttcccagacccccgacccccaaacttgagcccaaagaagaaagccctactcgaattaacgggagcattcccgctggcccgaaacaggaaccatgcgctcagcataatggctcagagcctgcgagccccaaacgcgaacggcctacttctcctgccccccaccgcccccctaaacgcgtgaaggctaaggcagtgccttcc

SEQ ID NO: 191895 - DNA, 1065 bp, Artificial Sequence
  derived and/or modified sequence
atgtctgtcaactatgcagcgggtctgtcaccttatgccgacaaaggcaagtgcggcctccccgaaatattcgacccacctgaagagttggaaagaaaagtgtgggaactggctcgtttggtctggcaatcatcaagtgtggtgttccacacgggggcggggataagcacagcctccgggatacctgactttagaggaccacacggggtctggacaatggaggaaaggggtctggctcccaaattcgacaccacatttgagagcgctcggcccacacagacacacatggcattagtgcagctggagcgcgtgggactcctgagattccttgtatcccagaacgtcgacgggctgcacgtgcgctcaggcttcccccgtgataaattggccgagctccacgggaacatgtttgttgaggagtgtgccaaatgtaagacccagtacgtgagggataccgtggtaggaacaatgggcctgaaggctactggacggctttgcactgttgcaaaggcccgtgggctgcgcgcttgtcggggcgaattgagggacactattctggactgggaggacagcctgcccgatagagatctggccttagccgacgaggccagtcgaaacgccgacctcagtattacgctgggaactagcctccagatccgacccagcggaaacctgccacttgcgacgaaaaggaggggagggcggcttgtaatcgtgaacctgcaaccaactaaacatgataggcacgcagatttgcggattcacggatacgtggatgaggttatgactcggctgatgaaacatctaggtttggagatcccggcctgggatggcccacgggtcctggagcgcgccctgccaccccttccgcgccctcccacccctaagctcgagcctaaggaagaatcgccaacccgcattaacggctccattccagccgggcccaaacaagagccatgtgcacaacataacggctccgagcctgcttcgccaaagagggaaaggccgacgagcccagctccgcatcgaccacccaaacgcgttaaagcaaaggctgtcccgtcc

SEQ ID NO: 191896 - DNA, 1065 bp, Artificial Sequence
  derived and/or modified sequence
atgagcgtgaattatgcggccggcctgagcccctacgcagacaaaggaaagtgcggcctcccagagatcttcgatccacccgaagaactcgaaaggaaggtttgggagctagcccggcttgtttggcagagtagtagtgttgtgttccacaccggagctgggattagcacagcatccgggatccctgactttagaggccctcatggggtgtggacaatggaagagcgtggtctggctccgaaattcgatactaccttcgagagcgcaaggcccactcagactcatatggctcttgtgcagctcgaacgtgtgggacttctcaggttcctggtttcacagaatgtcgatggcctccacgtgcgcagtggttttccccgcgataagctcgccgaactacatggaaacatgttcgtcgaagaatgtgccaagtgcaagactcagtacgtgcgggataccgttgttgggacaatgggccttaaagcaaccggaagactgtgcacggtcgcaaaggccaggggccttcgagcctgtcgcggagagcttcgagatactatacttgattgggaagattcactgccagaccgggatctggctttagcggatgaggcatctcggaacgccgatctgtccataaccttggggacttcactgcagatccgtccctcaggcaacctccctctggcgacgaaacggcgcggagggcgattagtcattgtcaacctgcaacctacaaagcacgatagacacgctgacctcagaattcacggatacgttgacgaagtgatgactaggctgatgaaacatcttggcttagaaatccccgcttgggacggccctcgggtcttggaacgggcgttacctccattgcctcgtccacccacccctaagcttgaacctaaggaggagagcccaactaggatcaatggtagcatccccgccggtcctaaacaagaaccctgcgcgcagcacaacggcagcgagcccgcgtctccaaagagagaacggcccacatctcccgctcctcacagaccccccaagagagtcaaggctaaggcagtcccatcg

SEQ ID NO: 191897 - DNA, 1065 bp, Artificial Sequence
  derived and/or modified sequence
atgtccgtcaactatgcagctggtctttccccatacgccgataagggaaagtgcgggctgccagaaatattcgaccctcccgaagagctggagcggaaggtttgggagttggcccgactagtgtggcagtccagcagtgtggtctttcatactggcgccggaatctcgactgcatctggcattccagactttcgcggtcctcatggagtctggacaatggaggagcgtggattggcgcctaagtttgacacaaccttcgagtctgccagacccacccagacccatatggctctggtgcagctggaacgagttgggctgctgcgctttctggtgtctcagaacgtcgacggactgcacgtgagatcaggcttccccagggataaactggccgagcttcacggcaatatgtttgtcgaggagtgcgccaaatgtaagacgcagtacgtaagagacactgtcgtggggactatgggattgaaagcaaccgggcgcttatgtacggtggcaaaggctcgggggttgcgggcttgcagaggagagttgagggataccatacttgactgggaggacagcctgccagaccgcgacctagccctcgctgacgaggcttccaggaacgctgatctgagtataacgttgggaacttcgcttcaaataagaccgtccggaaatcttccactggccaccaagagacgaggtggcaggctggtgatcgtgaacctgcagcccaccaagcatgacagacatgcagacctgcgaatccacggttatgtggatgaggtaatgactcggctaatgaaacatctcggattggagataccagcttgggatggccctcgggtattagagcgagccttacctcccctcccacggcctcccacacccaagctagagccaaaagaggagagtcccacaagaattaacggaagtatccctgccggacccaaacaggagccgtgtgcacagcataacgggtccgagcccgcatcccccaagcgcgagcgccccacaagccctgccccacatcgcccccctaagcgggttaaggcgaaggctgtgcccagc

SEQ ID NO: 191898 - DNA, 1065 bp, Artificial Sequence
  derived and/or modified sequence
atgtcagttaactatgcggcgggcctcagcccatacgccgacaaaggaaagtgcggactgccagaaatcttcgatccgccggaagaattggaacggaaggtctgggagctcgcccggctggtttggcagagctcatccgtcgtgtttcacaccggtgcaggcatttcgaccgcatcaggcattccggactttagaggtccacacggcgtgtggacgatggaggaaagaggactggcaccaaaattcgataccactttcgagagcgccaggccgacgcaaacccacatggcgctcgtccaactggaacgagtgggactcctgcgcttcttggtgtcgcagaacgtagacggactccatgtgcggagcggattcccccgcgacaagctcgcggaactgcacggaaacatgttcgttgaagagtgcgctaaatgcaagactcagtacgtgcgcgacaccgtggtgggaacgatgggtctgaaggccactggaaggctgtgcactgttgccaaggcccgcgggctccgcgcgtgccggggggagctccgggatacgatccttgactgggaggactccctgccggaccgcgatctggcactcgctgatgaagcctcgaggaacgctgacctctctatcaccctgggaacttcgctccagatccgcccgtccgggaacctgcctctggctaccaagcgccggggaggtcgcctggtgatcgtcaatctgcagccaaccaagcacgatcggcacgcagatctgagaatccacggttacgtggacgaggtcatgacccggctgatgaaacaccttggactcgaaatccccgcatgggacggcccgcgggtgctcgagcgggctctgcccccgttgccacggccgccaactccgaaactggaaccaaaggaggaatcaccgacccggattaacggttcgattccagcgggaccgaagcaagaaccgtgtgctcagcacaacggctcggagccggcctcgccgaagagagagaggccgacctcgccagcccctcaccgcccgccgaagcgagtgaaagctaaagctgtgccttct

SEQ ID NO: 191899 - DNA, 1065 bp, Artificial Sequence
  derived and/or modified sequence
atgagcgtgaactacgctgccggattgagcccatacgcagacaagggaaagtgcggactgcccgaaatcttcgaccccccggaggaactggaacgcaaggtgtgggagctggccagactcgtgtggcaaagctcatccgtggtgttccacaccggagccggtatctcgaccgcgtcaggaatcccggactttcgggggccgcacggtgtgtggactatggaagaacgaggacttgcgcccaagttcgacacgacttttgagtccgcccgcccaacgcagacccacatggcgcttgttcagttggagcgcgtgggattgctgagattcctcgtgtctcagaacgtcgatgggctgcatgtgaggtcgggcttccctagagataagctggcagagttgcacggcaacatgttcgtggaagagtgtgccaaatgcaagacccagtacgtcagagacaccgtggtcggtactatgggcctcaaagccactggacggctgtgcaccgtcgcaaaagcccgcggcttgcgggcctgtcggggggagctccgcgataccatcctcgactgggaagattcacttcctgatagggatctcgccctggcggacgaggcttcacgcaacgcagatctgtccattactctgggaacgtcgctgcaaatccgcccgtcgggcaatctcccgctggcgaccaagagacggggaggtcggctggtcattgtcaatctgcagccaaccaagcatgacagacatgccgacctgcgaatccacggctacgtggacgaggtgatgactaggctcatgaagcatctgggacttgagatcccggcttgggacggaccgcgggtactcgaacgcgcactcccgccgctgcctcgcccacccactccaaaactggaaccaaaggaggaatcccccacccgtatcaatgggtcgatcccggccggacctaagcaagaaccttgcgctcagcacaacggcagcgaaccagcgtccccgaaacgggaacggccgacttcgccggcgccacaccgccctccgaagcgcgtgaaggcaaaagctgtcccatcc

SEQ ID NO: 191900 - DNA, 1065 bp, Artificial Sequence
  derived and/or modified sequence
atgtccgtcaattacgctgccggtctcagtccttacgccgataagggaaagtgtggtttgccggagatctttgatcccccagaagaactggagcgcaaagtttgggaactcgccaggctcgtctggcaatcttcttcagttgtctttcataccggtgccggaatcagtacggcctctggaattcctgacttcaggggaccccatggcgtttggacaatggaagagcgtgggcttgcgccaaagttcgacacgacgtttgaatccgcccgccctactcaaacacacatggcccttgtccagctggaaagggtcggactcctgcggttcttagtgtcgcagaatgtagatggtttgcatgtaaggtcgggtttcccgcgcgacaagttggccgagctccatggcaacatgttcgtggaggaatgtgccaaatgcaaaactcagtatgtccgagatacagtcgtcgggaccatgggtttgaaggctacggggcgcctatgtacggttgctaaagctagggggctccgcgcgtgccgcggagaattgagggacaccattctggattgggaggactcattacctgatagagacctggcactagcagatgaagcctctcgtaatgcagatctctccattacgctgggtaccagcctgcagattcgcccgtcaggtaacctgccacttgcgactaagcgccgtgggggcagacttgttatcgtcaatctccaacccacaaagcacgatcgacacgccgatttgcgaatccatggatacgtagatgaggtgatgacccgcctgatgaagcacctcggtttggaaattccggcctgggatggcccacgagtgctagaaagagctttaccaccgctgccccggccacctaccccaaagctcgagccaaaggaggaatcgcctacacgtatcaacgggtcaatcccggctggtccaaagcaagagccttgtgctcaacacaatgggtcggaacctgcctccccgaaacgtgaacgaccaacttcgcccgctccgcaccgtccgccaaagagagtcaaggcaaaggcggtgccttcc

SEQ ID NO: 191901 - DNA, 1065 bp, Artificial Sequence
  derived and/or modified sequence
atgtcagtgaattacgccgcaggactgtcaccttacgccgataaaggaaagtgtggtttgccagagatattcgatccacctgaagaactggaaagaaaggtttgggaacttgctcgactggtgtggcagtcatcgagcgtggtgtttcatacgggcgcaggaatttcaactgcatccggaatcccagatttccggggtccacatggcgtgtggaccatggaagaaaggggtctggcacccaagtttgatacgacctttgaatcggcacgtcctactcaaactcacatggcgctcgtccagcttgagcgggttggcctgctccggtttctcgtgtcacaaaatgtcgatggacttcatgtgaggagcggatttccacgagataagctggctgaacttcacggaaacatgttcgtggaggaatgcgcaaagtgtaagactcagtatgtgagagacacggtcgtgggtactatgggactcaaggcaaccggacgtctctgcactgttgcaaaggcaagaggtcttagagcctgccggggcgagctgcgagacaccatccttgattgggaggattcgctcccggatagggatctggctctggccgatgaagccagccgaaacgctgatctctcaatcacccttggtacctcgctgcaaatacgtccttcgggaaatttgcccttggccactaagagaagaggaggaaggcttgtaatcgtcaaccttcaaccaaccaagcacgataggcatgccgatcttcgcattcatggctatgtcgacgaggtcatgaccagactgatgaagcacctgggtcttgaaattccagcgtgggatggaccgcgggtgctggaacgcgcactgcctccactccctcgcccacccacccctaagctggaaccgaaggaggagtcccctactagaattaacggatccattccagccggtccgaaacaagagccttgtgcacagcataacggttcagagcccgcatcgcctaagcgggaacgccctacctcccccgccccccataggcctcccaagcgggtgaaggcaaaggccgtcccgtcg

SEQ ID NO: 191902 - DNA, 1065 bp, Artificial Sequence
  derived and/or modified sequence
atgtccgtgaactacgcagctggactcagtccatacgccgacaaggggaagtgtgggctgcccgagatttttgatcctcccgaggaacttgaaagaaaggtctgggagctggccaggcttgtgtggcagagttccagcgtggtgtttcacaccggcgcgggcatcagcacagcttctggaattccagatttcagaggacctcatggcgtttggactatggaggaaaggggactcgcaccgaagttcgacacaacgttcgagtctgctagacccactcagacccacatggcccttgtgcagctcgagagagtcggattgctgcgcttcctggtcagccaaaacgtggacggcctgcatgtgcgatccggtttcccgcgcgacaagttggccgagctgcatggcaacatgttcgttgaggaatgtgccaaatgtaagacgcaatatgtgcgagatacggtggttgggacaatgggccttaaagctaccggtagactgtgcacagtggccaaagccaggggcctccgggcttgcaggggcgagctgagagacacgatccttgactgggaggatagtctgcccgatagagatctggcactcgctgacgaggctagcagaaacgcagatctctccatcactctcggcacgtctttgcagatcaggccctccggtaacttgccccttgccaccaagcgacggggcggaagactggtgatcgtcaacttgcaacccactaaacacgaccgacacgctgacttgcgcatccatggttatgttgacgaggtcatgacgcggttgatgaaacatctgggcctcgagatacctgcgtgggatgggccccgggtattggagagagccctgccgcctctgccaaggccacccactcctaaactggagcccaaggaggagtcacccaccagaatcaacggatctatccctgcagggcccaaacaagaaccctgcgctcagcacaatgggtcagaacccgcatccccgaagagggagcggcccacgtcccccgccccccacaggcctcccaaacgggtgaaggctaaagcagtgcctagt

SEQ ID NO: 191903 - DNA, 1065 bp, Artificial Sequence
  derived and/or modified sequence
atgagcgtcaactacgccgcggggctcagcccttatgccgataagggaaagtgcggactgcccgaaattttcgatcctcctgaggaactggagagaaaggtttgggagctcgcacggttagtttggcagtcttcatccgtcgtgttccataccggcgcaggcatcagcaccgcgagcggtattcccgatttcaggggcccccatggggtgtggaccatggaggaaaggggactagcccctaaattcgacaccaccttcgaaagcgctaggccgacccagacccacatggctctggtgcagctagagcgggtgggacttttgaggtttctggtgtcacagaacgtcgacggtctgcatgtgcgctcaggctttcctcgagacaagctggccgaactccatggcaacatgttcgtggaggagtgtgcgaagtgtaagactcagtatgtccgcgacaccgtagtgggaacgatgggcctgaaagcaacaggacgtctgtgcacagtggctaaagcaaggggattgcgcgcctgccgtggagagctgagggatactattctagactgggaagattctctacccgatcgggatcttgctctggccgatgaggcttcgaggaacgccgacctgtcgattaccctgggcacgagcctacagattcggcctagtggcaaccttccccttgccacaaagaggaggggcggacgtttggtgatagtgaatttgcagccaactaagcacgatagacacgctgacctcaggatacacgggtacgttgatgaagtgatgacgaggttaatgaagcaccttggattggagattcccgcatgggacggcccaagggtgctggaacgcgcactgccaccactgccgaggccccccaccccgaaactggagcccaaagaggaatcccccacacgcataaacgggtctataccagctggaccaaagcaggagccctgcgcccaacataatggaagtgagccagcatctcccaagcgggaaaggccgacatctccggcccctcatcgaccccctaaaagggttaaggccaaggccgtgcctagt

SEQ ID NO: 191904 - DNA, 1065 bp, Artificial Sequence
  derived and/or modified sequence
atgtcggtaaattacgccgcgggtctgtcgccatatgccgacaaaggcaaatgtggactacccgaaattttcgatcctccggaggaattggaaagaaaggtgtgggagttggcccggctcgtctggcagtcgagctcagtcgtgtttcacaccggggcaggcatttccacagcatccgggatccccgattttagagggccccacggagtatggacaatggaggagaggggcctggcaccgaaattcgacactacatttgagagtgcaaggcctactcagacccacatggctttagtgcagttggaacgcgttggcttactgcggtttcttgtatctcagaatgttgatggattgcacgtccggtccggcttcccacgggataagctcgcggagttgcatggaaatatgtttgtggaggaatgcgccaagtgtaagacacagtacgtaagggatacagtggtggggaccatgggcctgaaggccaccgggcgcctatgtaccgtcgcaaaggcccgcggactgcgcgcatgccgcggggaattgcgcgataccatcctggactgggaagattcactaccggacagagatctcgccctggccgacgaggcctctcgcaacgccgatttgagtatcactttgggcacttcccttcagatacgtcctagcggaaatctgccgctcgctaccaagagacgaggcggacgactggtcatcgtgaatctgcagcccacgaaacacgacaggcatgcagatctgaggattcacggatacgtggacgaagtcatgactcgacttatgaagcacctgggcctggagatccctgcgtgggacggccctcgtgtacttgaacgggccctgccgcctcttcccagacctccaactcccaaactagaacctaaagaggaaagccccaccagaatcaacggcagtatacccgccggtcccaagcaggagccgtgcgcccagcacaatggcagcgaacctgctagccctaagagggagcgaccaacatcaccagcaccccaccgtccccctaagcgggtaaaggccaaggccgtgccaagc

SEQ ID NO: 191905 - DNA, 1065 bp, Artificial Sequence
  derived and/or modified sequence
atgagcgtcaattatgcagcaggtcttagcccttatgctgataaaggtaaatgcggtctgcctgaaattttcgatccgcccgaggaacttgaacgtaaagtctgggagttagcacgccttgtatggcagagtagcagcgtcgtgttccatacaggcgcgggcatttcgactgcgtccgggatacctgactttcgtgggccgcatggggtctggaccatggaagaacgagggttagccccgaaatttgacacgacctttgaatcggcaaggccgacacaaacacacatggctttggtgcaacttgagagagtcggactgctacgatttcttgtgtcacaaaacgttgatggattacatgtccgcagcggctttccgcgtgataaacttgcggaactacatggaaacatgtttgtggaggagtgtgccaaatgtaaaacgcagtatgttcgagatactgttgttggaacgatgggcttgaaggcaacaggacggctgtgtacagttgctaaagcgagaggccttcgtgcatgccgtggagaactcagagacacaattttagattgggaggatagtctgcccgaccgagacctggcccttgccgatgaagcaagtagaaatgctgatttatcgattacccttggaacgtccctgcagattcgcccatcggggaatctcccgctcgcaacaaaacgccgtggcggccgactggtgattgttaatttacagccgacaaagcacgatcgacacgcagatctgagaattcacggatatgttgatgaagtgatgacacgactcatgaagcacctgggcttagaaattccagcgtgggatggtccgagagttttggaaagggctttgccgccgttacctcgtccgcctacgccgaagctggaaccgaaggaagaatcacctacgagaatcaacggctcaattcccgcgggtccgaaacaagaaccgtgcgcgcagcataatggtagcgaaccggcctccccgaaacgggaacgtcctacatcaccggcgccccatcggccaccgaaaagggttaaagctaaagcggttccgtct

SEQ ID NO: 191906 - DNA, 1065 bp, Artificial Sequence
  derived and/or modified sequence
atgagcgttaattacgctgctggactgtccccttatgctgacaaaggaaagtgcggcctccccgagatctttgatccaccggaggagctagagaggaaagtgtgggagctggcccgcctagtttggcagtcctcctccgtggttttccacaccggcgccggtatctccactgctagcggcattcctgactttcgaggaccccatggcgtctggactatggaagaacgcggactcgcccccaagttcgataccacttttgaatcagcgagacctactcaaacacacatggcattggtgcaacttgagcgcgtcggcctgctacggtttctggttagccagaacgtggatggtctgcatgtgaggtctgggtttcccagggataagctggctgagctgcacggaaacatgttcgtggaggagtgtgcaaaatgtaaaactcagtacgtgcgcgatactgtagtgggtaccatgggccttaaagccacgggacgcttgtgtacggttgccaaagcaaggggcctccgcgcatgccgtggcgagctcagagatactatcttggactgggaggactctctgccagatcgggacctggctctggcagacgaggcttctcgcaatgccgatctgtcgattaccctgggtaccagcttgcagatccgccccagcggtaatctccctttggctacgaaacgtaggggcggtagacttgttattgtaaacctgcaacccactaagcacgatagacatgctgatctgaggatccacgggtacgtagacgaagtcatgacacggctcatgaaacacttgggactggagatccctgcatgggatggaccacgcgtgctggaacgggctctgcctcccttaccccggcccccgacaccaaagctggagccaaaggaggaatcccctacccggatcaatggtagtatccctgctgggccgaaacaagagccctgtgcgcagcacaatgggagcgaaccagcaagcccaaagagggaacggcctacatctcccgcaccacatagaccaccaaaaagggtgaaggccaaggcagtgcctagc

SEQ ID NO: 191907 - DNA, 1065 bp, Artificial Sequence
  derived and/or modified sequence
atgtctgtcaactatgctgctggtttatctccgtacgccgacaaagggaagtgcggcttacccgaaatatttgatccacctgaagagttggagcggaaggtgtgggaactggcccgactcgtgtggcaaagcagctcagtggtcttccatacaggagcgggaatctcgactgcctcaggaattcccgatttcaggggtccgcacggagtctggaccatggaggaacgtggactggcgcccaaattcgacacgacttttgagtcagctcgcccgacacaaactcacatggcgctggtacagttggagcgcgtcggactgctgcggttcctcgtttcacagaatgtggacggcttgcacgtgcggtctggctttcctcgggataaactggcggagctccatggaaatatgttcgtggaagaatgcgcaaaatgtaagactcagtacgttagagacacagtcgtgggcaccatgggactcaaagccaccggaaggctgtgtacagtagccaaggctagggggctgcgggcttgtagaggagaactaagggataccatcttggattgggaagacagcctgcctgatcgggacctagccctggctgatgaggcttcaaggaacgcagatctctccattacgttgggcaccagcctgcagataaggccttccggaaaccttcccttggccacaaagcgacggggagggcgcttagtcatagtcaatttgcagcccacgaagcacgacagacacgctgacctacgcatccatgggtacgtcgatgaggtgatgacgcggcttatgaagcaccttggcttggaaataccggcgtgggacggacctcgggtgctcgaacgagccttgccgccactcccccggccaccgaccccaaagttagaaccgaaggaggaaagccccactcgcattaatgggagcattcctgccggccctaaacaagagccctgcgcccagcacaatgggagtgaacccgcctcgccgaaaagagagcggcctacgagccccgccccccatcgcccgccaaagagagtgaaggccaaggcagtgccttct

SEQ ID NO: 191908 - DNA, 1065 bp, Artificial Sequence
  derived and/or modified sequence
atgtccgtgaattacgcagcagggctgtcgccgtatgcagataagggaaaatgtggcctccctgagatcttcgatcctccagaagaactggagagaaaggtctgggagcttgcgagactggtgtggcaatcgtcatccgtggtctttcataccggtgcgggaatatcgactgccagcggtatccccgattttagaggcccacacggagtttggaccatggaggaaagagggctcgccccaaaattcgacactaccttcgagagcgcgcgtccgactcagactcacatggctcttgtccagctcgaacgcgtcggtctgcttcgtttcctggtgagccaaaacgtggacggcctccacgtgcgttcaggatttccaagagataaactggcggaattgcacggaaatatgtttgtggaagaatgtgcaaaatgcaagacgcagtacgtgagagacaccgtcgtgggaactatgggccttaaggctaccggacgtctgtgtaccgtggccaaggctagggggctgagagcatgtaggggcgaactgcgggacaccattctggactgggaggattcactgcctgaccgggaccttgcacttgcggacgaagccagccgaaacgcagacctttcgattacccttggaactagcctgcaaattcggccaagcggtaatttgccgctcgcaaccaagagacgcggaggtcggctggtgatagtgaacctccaacccaccaagcatgatcgccatgccgatttgaggatccatggttacgtcgatgaggtgatgacccggcttatgaagcatctcggcctggagataccggcgtgggatggaccgagagtgctggaaagggctctccctccccttccaagacctcctaccccaaagctcgaacccaaggaagaatcgccgacccggataaatggaagcattccagcaggcccaaagcaagaaccatgcgcacaacataacggttccgaacctgcgtcgccaaaaagggagaggcctaccagtcctgctccacaccgtcctccaaaacgcgtcaaggccaaggcggtgccctcc

SEQ ID NO: 191909 - DNA, 1065 bp, Artificial Sequence
  derived and/or modified sequence
atgtccgtgaactatgccgcggggctgtccccttacgcagacaaggggaagtgtggcctcccagagattttcgaccctcccgaggaacttgaacgaaaggtctgggagttggctagactggtgtggcagagctcaagcgtcgttttccatacaggagccggcatttccactgccagtggaatcccagattttcgaggcccacatggagtgtggactatggaagagagaggactcgccccaaaattcgatactacctttgagtccgcgcggccaacccaaacccacatggctctggtgcagctcgaaagggtgggcctgctgaggttcctggtaagtcagaacgttgacggactgcatgtaagaagtggtttcccccgggacaagttagcggagttgcacggaaacatgtttgtggaagaatgcgccaaatgcaaaacccagtacgtgcgcgacaccgttgtcggcactatggggttgaaagccacaggacggctgtgtacagtcgccaaggcaaggggccttagggcatgtcgaggcgagctgcgggatactattctggactgggaggatagcctccctgatcgggacttagcactggctgatgaggcctctaggaatgcggatctgtcaatcacactagggacctcactgcagatccgtccaagcggaaatttgcctctcgcaacaaagagacggggagggagactggtgatcgtcaatctgcagccgactaagcacgacagacacgccgatttgaggattcacggctatgtggacgaggtgatgactcggctgatgaagcatctcggcttggagattccggcatgggatgggcctagggtcctggagcgggcgttaccccctctcccaaggccccctaccccaaaactcgagccaaaggaggagtcaccaacacgaattaacggaagtattcccgcaggacctaagcaggagccatgcgctcaacataacggatctgagccggcctcccctaaacgcgaacggcccacttcccccgctccacatcggccccccaaacgagtgaaggcgaaggccgttccttcg

SEQ ID NO: 191910 - DNA, 1065 bp, Artificial Sequence
  derived and/or modified sequence
atgtcagtgaattatgcggcgggactgtcgccgtacgccgacaaaggaaagtgcggactgcctgaaatctttgacccgccggaggaactggagcggaaggtctgggaacttgcacgcctggtgtggcagtcatcgtcggtggtgttccatactggtgccggaatcagcactgcgtccggaatccctgacttcaggggaccccacggcgtgtggaccatggaggagaggggcctggctccgaagttcgataccactttcgaaagcgcccggccgacgcagacccacatggccctcgtgcaactggagcgggtggggctgctccggtttcttgtctcgcaaaacgtggacggactgcatgtgcgctcaggattcccgcgggataagctggctgagctccacggtaatatgttcgtggaagagtgcgccaaatgcaagactcaatacgtgcgggataccgtggtcggtaccatgggcctcaaggcgaccggaaggctctgtaccgtcgcgaaggcccggggactcagagcgtgccggggagaactccgcgataccatcctggactgggaagatagcttgccggaccgcgacctggctcttgcggatgaagcgtcgcgcaatgcggatctgtctataaccctcggaacgagcctgcaaatccgcccatccgggaacctccctttggccactaaacggcggggcgggaggctggtgattgtcaacttgcagccaactaagcacgaccggcatgcggatctgcggattcatggatacgtggatgaagtgatgactcgcctgatgaagcatcttggattggaaatccctgcgtgggacggaccacgcgtgctcgaacgcgctctgccgccactcccacgcccgccgacccctaagctggaaccgaaggaggaatcgccaactagaatcaacggtagcatcccggcaggaccgaagcaggagccctgcgcacagcacaacggatcagaacctgcgtcccctaagagagaaaggccaacgtccccggccccacaccgtccaccgaaaagagtgaaggccaaggccgttccatcc

SEQ ID NO: 191911 - DNA, 1065 bp, Artificial Sequence
  derived and/or modified sequence
atgagcgttaactacgccgccggcctttccccctacgctgataaaggcaagtgcggactcccagagattttcgacccgccggaagagctcgaacggaaggtttgggagcttgcacgcctggtctggcagagctcgagcgtcgtgttccacaccggcgccggaatctcgactgcgtccgggatccctgacttccgcggtccccatggagtgtggaccatggaagaaagaggactcgcccctaaattcgatacgactttcgagtcggccagacccacgcagacccacatggcattggtgcagctggagagagtcggactgctgcgatttcttgtgagccagaacgtggacggactccacgtgcgctcagggttcccgcgggacaagttggctgaactgcatggaaacatgtttgtcgaagaatgcgcaaagtgtaagacccagtacgtcagggacactgtggtgggcaccatggggcttaaggccacgggacggctctgtaccgtggcaaaggcaagggggctgcgcgcgtgcagaggcgagctgcgcgacactatcctggattgggaggacagcttgcccgatagggacctggcactcgcagatgaggcttcgcgcaatgcggacctctccataactttgggcacttcactgcaaatcaggccgtcaggaaacctgccattggcgaccaagagacgcggaggacggctggtgatcgtgaatctccagcctaccaaacacgaccggcacgcggacttgaggatccacggttacgtggatgaggtgatgaccaggctcatgaaacatctgggtctggagatcccggcgtgggacggcccccgcgtattggaaagagcactcccgccgctccctcgcccgccgactcctaaactggaaccgaaggaagaatcaccgactcggattaatggaagtatccccgccggacctaaacaagaaccttgcgcacaacacaacggatcggagcccgcgtccccgaagcgcgagcgtccaacgtccccagctcctcatcggccgcccaagcgcgttaaggccaaggcggtaccttct

SEQ ID NO: 191912 - DNA, 1065 bp, Artificial Sequence
  derived and/or modified sequence
atgtcagttaattatgcagccgggctctcgccctatgcggataagggaaaatgcgggctccctgaaatctttgaccccccagaagaactcgaacggaaagtttgggagcttgcccggttggtctggcagtcctcttccgtggttttccacactggagccgggatcagtacagcctccgggatacccgatttccgggggcctcacggagtttggacaatggaagaacgcggactggcccccaaatttgatacaacatttgaatcagctcggccgactcaaacacacatggctctcgtccagctcgaacgggtaggactgcttcgatttctcgtatctcagaatgtcgatgggcttcatgtccgatccgggtttcctagggataaacttgcagaactccatgggaacatgttcgtcgaagaatgcgctaaatgcaaaactcagtatgtgagggatactgtcgtgggaacaatgggactcaaagctacagggaggctatgtacagttgcgaaggcacggggactaagagcatgtcggggagagctgagagatacaatcctagattgggaagattctctgcctgatcgggacctggccctcgctgatgaggcatctcggaacgcagatctctccatcacactcggaacatcactccagataaggccttccggaaacttgcccctagcaacaaaaagaagagggggacggctcgtgatagtgaacctgcagcctacaaaacatgatcggcatgccgatctgcgaattcatgggtacgtggatgaagtgatgactcgccttatgaaacatctgggacttgaaattcccgcctgggatgggcctcgagtattggaaagggccctcccaccactccctcgaccccccacacctaaactggaaccaaaagaagaatccccaactcggatcaacggatccattcccgctgggcccaaacaagaaccatgcgctcagcataatggatctgagccagcatctccaaaacgtgagcggcctacttctcctgctccccaccggcctcccaaaagagtgaaagctaaagctgtaccctct

SEQ ID NO: 191913 - DNA, 1065 bp, Artificial Sequence
  derived and/or modified sequence
atgtccgtcaactacgcggctggtctgtcaccatacgctgataaaggcaaatgcggcctgccggaaatctttgatccacctgaagagttggagaggaaggtgtgggagctggccagattagtgtggcagagctcgtccgttgtgttccatacgggtgctggtatcagcactgcatccggcatcccggacttccggggcccacatggagtgtggacaatggaggaaaggggactggccccaaagtttgacacaacctttgaaagcgctaggccaacccagacccacatggctctggtccaacttgagagagtaggcctgttgcgtttcctggtgtcacagaacgtagatggactccatgttcgaagcggcttcccaagagataagctggccgaattacatggcaacatgtttgttgaggagtgtgccaagtgcaaaacccagtacgtgagggacacagtggtcggaactatgggtctgaaggcgaccggcaggctgtgtaccgtagcgaaggccaggggcctcagagcctgccgaggtgaactgcgcgatacaattctagattgggaagactctctacctgacagggatctggccctagcagatgaggcctcccggaacgcagatctgtctataaccctagggacatctctgcagatcaggccctctggcaacctgccacttgccacgaaacgcaggggaggaagactggtaatcgtcaacttgcagccgacaaagcatgatagacatgcggaccttaggattcacggctacgtagacgaggttatgactcgactaatgaaacacctgggcctggagatccccgcgtgggatggacccagggtcttagagcgggcgctgcctcctctaccacggccccctacccctaagttggaaccaaaggaagaatctccaacgagaatcaacgggtcgatcccagccggtcccaaacaggagccatgtgcacagcacaacgggtctgagcctgcgagtcccaagcgtgagagacctacctcaccagccccgcatagaccgcccaagagagtgaaagccaaagccgtcccgtcc

SEQ ID NO: 191914 - DNA, 1068 bp, Artificial Sequence
  derived and/or modified sequence
atgagcgtgaactacgccgccggcctgagcccctacgccgacaagggcaagtgcggcctgcccgagatcttcgacccccccgaggagctggagagaaaggtgtgggagctggccagactggtgtggcagagcagcagcgtggtgttccacaccggcgccggcatcagcaccgccagcggcatccccgacttcagaggcccccacggcgtgtggaccatggaggagagaggcctggcccccaagttcgacaccaccttcgagagcgccagacccacccagacccacatggccctggtgcagctggagagagtgggcctgctgagattcctggtgagccagaacgtggacggcctgcacgtgagaagcggcttccccagagacaagctggccgagctgcacggcaacatgttcgtggaggagtgcgccaagtgcaagacccagtacgtgagagacaccgtggtgggcaccatgggcctgaaggccaccggcagactgtgcaccgtggccaaggccagaggcctgagagcctgcagaggcgagctgagagacaccatcctggactgggaggacagcctgcccgacagagacctggccctggccgacgaggccagcagaaacgccgacctgagcatcaccctgggcaccagcctgcagatcagacccagcggcaacctgcccctggccaccaagagaagaggcggcagactggtgatcgtgaacctgcagcccaccaagcacgacagacacgccgacctgagaatccacggctacgtggacgaggtgatgaccagactgatgaagcacctgggcctggagatccccgcctgggacggccccagagtgctggagagagccctgccccccctgcccagaccccccacccccaagctggagcccaaggaggagagccccaccagaatcaacggcagcatccccgccggccccaagcaggagccctgcgcccagcacaacggcagcgagcccgccagccccaagagagagagacccaccagccccgccccccacagaccccccaagagagtgaaggccaaggccgtgcccagctag

SEQ ID NO: 191915 - DNA, 1068 bp, Artificial Sequence
  derived and/or modified sequence
atgtctgtcaactacgcggctggtctgtcaccatacgctgataagggaaagtgcggactgccagaaattttcgacccacccgaggagctcgaacgcaaggtatgggaattggctagacttgtgtggcaaagcagcagcgtggtctttcacactggggctgggatcagcacagcgtcaggaatccctgatttccgaggacctcatggcgtatggactatggaggagcgcggactagctcccaagttcgacacgacttttgagagtgcaagaccaacccagacacacatggcattggtacagttagagcgagtgggactacttcggttccttgtttctcagaacgtcgacggactccacgtacgaagcgggttcccccgagacaagctggccgaactccacggaaacatgttcgtcgaagaatgcgccaaatgtaagacccaatacgtccgggatacggttgtgggtacaatgggattaaaagccaccggtagactgtgtaccgtggcgaaagcccgggggctcagggcatgtaggggggaacttcgggataccattctagattgggaagactctctgcctgacagggacctcgccctggctgacgaagcaagcagaaatgcagacctgagtattacactcgggacttcactgcaaattaggccgtccggcaatcttcctctagccacaaaacgaagaggcggtaggcttgtgattgtgaatctccaacccacaaagcacgaccggcacgcagacctgcggatacacggctacgtggacgaagttatgacacggctgatgaagcacctaggactcgagattccggcttgggacggccccagggtgctagaaagagcccttccccccctaccgcggccccccacaccgaagctagaacccaaagaggagagccccacccgaattaacggatctatccccgcaggtccaaaacaggagccatgtgcacagcacaatgggtctgagccagcctcaccaaagcgggagcggccgacctcacccgctccccaccggcctccaaaacgcgtaaaggcgaaggctgtacccagctag

SEQ ID NO: 191916 - DNA, 1068 bp, Artificial Sequence
  derived and/or modified sequence
atgtctgtgaactatgctgctggcctgagcccctatgctgacaagggcaaatgtggcctgcctgagatctttgaccccccagaggagctggagaggaaggtgtgggagctggcccggctggtgtggcagagcagctctgtggtgttccacactggagctggcatcagcacagccagcggcatcccagacttccggggcccccacggcgtgtggaccatggaggagcggggcctggcccccaagtttgacaccacctttgagagcgcccggcccacccagacccacatggccctggtgcagctggagcgggtgggcctgctgcgcttcctggtgtcccagaatgtggatggcctgcacgtgcgcagcggcttcccccgggacaagctggccgagctgcacggcaacatgtttgtggaggagtgtgccaagtgcaagacccagtatgtgcgggacacagtggtgggcaccatgggcctgaaggccaccggccgcctgtgcaccgtggccaaggcccggggcctgcgggcctgccgcggggagctgcgggacaccatcctggactgggaggacagcctgcctgaccgggacctggccctggctgatgaggccagcagaaatgctgacctgagcatcaccctgggcaccagcctgcagatccggcccagcggcaacctgcccctggccaccaagagaagaggaggccgcctggtgattgtgaacctgcagcccaccaagcatgacagacatgctgacctgcgcatccacggctacgtggatgaggtgatgacccggctgatgaagcacctgggcctggagatcccagcctgggatggcccccgggtgctggagcgggccctgccccccctgccccggccccccacccccaagctggagcccaaggaggagagccccacccgcatcaatggcagcatcccagctggccccaagcaggagccctgtgcccagcacaacggcagcgagcccgccagccccaagcgggagcggcccaccagccctgccccccaccggccccccaagagggtgaaggccaaggctgtgcccagctag

SEQ ID NO: 191917 - DNA, 1068 bp, Artificial Sequence
  derived and/or modified sequence
atgagcgtgaactacgccgccggcctgagcccctacgccgacaaggggaaatgcggactgcccgaaattttcgacccgccagaagaattggagcggaaagtgtgggagctggcccgactcgtgtggcaatcctctagcgtggtattccataccggggctggcatcagcactgcatcagggatccccgactttaggggcccacacggagtgtggacaatggaagagcgtggtctggcccctaagtttgatacaactttcgagagcgccaggccgacacagacccatatggcactggtgcagttagagcgagtcggcctcctgcgtttcctcgtgagccagaatgtggacgggctgcacgtgcgcagcggtttccctcgtgacaagttggccgagctgcacggaaatatgttcgtcgaagagtgtgccaaatgtaagactcagtacgttcgggacactgtggtgggtacaatggggctgaaggcaacagggagactgtgcacagtcgcaaaggcaagagggctgcgagcatgccgcggagagcttagggatacaatcctcgattgggaagactctcttcccgacagagacctggcgcttgcagatgaagctagcagaaatgcagatcttagtatcaccctgggcactagcctgcaaatccggccgagcggcaatcttcccttggccaccaagcgacgcggcggccggcttgtaatcgtcaacctgcagcccactaagcacgaccggcacgctgatctgcggatccatggatatgtggacgaggtcatgactcggctgatgaaacacctcggtctggagattccggcctgggacgggcctcgcgtcttagagcgcgctttgcctcctctgccgcggccaccgactcccaagctggagccaaaggaggagagtcccactcggatcaacggatccatccccgctggacccaagcaggaaccttgcgcacagcacaatggcagcgagcccgcttcacccaagagagaacggcccacttctccggccccccaccgccctccgaaacgcgtaaaggccaaagctgttccttcctag

SEQ ID NO: 191918 - DNA, 1068 bp, Artificial Sequence
  derived and/or modified sequence
atgtccgttaattacgccgcaggcttgagcccctacgcagataagggaaagtgtggcctccctgaaatcttcgacccccctgaagaattggagcggaaggtgtgggaactggcgaggctggtctggcaatcaagtagcgtcgtcttccataccggtgcaggaatcagtaccgcaagcggcatccccgattttcgcggaccccacggggtatggaccatggaggagagggggctggctcctaagttcgacaccaccttcgagagcgcccgacccacacaaacacatatggctctggtgcagctcgaaagagtggggttgttgcgattcctcgtatcccagaatgtagatggcctccatgtgaggagcggcttccctcgcgacaagctggctgaactacatgggaacatgtttgttgaagaatgtgctaagtgtaagactcaatatgtgagggacactgtcgttggaaccatgggattgaaagcaacaggtcgattgtgcaccgtggccaaggcacggggactacgtgcgtgtcgcggtgaacttcgcgatactattttggactgggaagacagcctccccgatcgtgatcttgctcttgctgatgaagccagtagaaatgcagacctttccattaccttagggactagcttacagattcggccttctggtaacctgcctcttgccactaagcggaggggcggaagactcgtgattgtcaatttacagcccacgaaacatgatcgacacgctgaccttcggatccacggctacgttgatgaggtgatgacacgcctgatgaagcatctgggactcgagatccctgcttgggacggccctagggttctggaacgagccctgcctccactgccaagacctcctacaccaaagctggaacccaaagaggagtctcccaccagaattaatggatcgatccccgctggtcctaagcaggaaccatgtgcccagcataacggcagcgagcccgctagtcctaaacgagagaggccaacgtcccccgctccccaccggccacctaaacgagtgaaggctaaagccgtcccaagttag

SEQ ID NO: 191919 - DNA, 1068 bp, Artificial Sequence
  derived and/or modified sequence
atgtctgttaactacgccgctggcctgtcaccatatgcagacaagggcaagtgcggactgcccgaaattttcgaccctcccgaggaattggaacggaaagtgtgggaactcgcccgactcgtctggcagagcagttcagttgtatttcacaccggagcagggatctctactgcgtccggaatccccgatttccgagggccccacggtgtttggacaatggaggaaagggggctagcacccaagttcgataccacttttgagagcgccagacctacccaaactcatatggctctggtacagctggagcgcgtcgggctgctgagattcctggtgtcacagaacgttgacggactgcacgtgaggtccggttttccgcgcgataaacttgccgaattacacgggaatatgtttgtggaggagtgcgctaaatgcaagacacaatacgtaagggacaccgttgtcggaactatggggctgaaggcaacggggcgcttgtgtaccgtcgctaaagctcggggacttcgtgcctgtagaggtgaactgcgagatacaatcctcgactgggaagacagcctcccagaccgcgacttagcactggctgatgaagcttccagaaacgccgatctgagcattaccctcggaacttccctgcagatccgccccagcgggaacctgccgttagctacgaagcggagaggtggacgcttagtgatcgtgaatttgcagccgacaaagcacgatcgccatgctgatctcaggatacatggctatgtggacgaggtgatgaccagactgatgaaacatttgggtttggagatcccagcttgggatggacctagggtactagagagagcgctcccgcctttaccaagaccacccactcctaaactggagccaaaggaggagtctccaactagaataaacggttccattccagctggccctaagcaggagccctgtgcacaacacaatggatccgagcctgcaagccctaagcgagagagacctacatcgcccgccccccacagacctcccaaaagagtgaaagccaaggccgtgcctagctag

SEQ ID NO: 191920 - DNA, 1068 bp, Artificial Sequence
  derived and/or modified sequence
atgtccgtgaattatgccgctggcctttcaccttatgctgacaagggcaagtgtggactgcccgagatcttcgacccaccggaagaactggagagaaaggtttgggaattggcccggctggtctggcagtcctcctccgtggtgtttcatactggtgcaggaatttcaactgcctctggaattcccgactttagaggaccccatggtgtttggaccatggaagagcgaggtttagctcctaagtttgatacaacctttgagagcgcaagacccactcagacgcatatggcactcgtccagttggaacgggtggggctcttgcgatttctggtgagccaaaatgtggatgggttgcatgtcagatcaggcttccctagggacaaactggcagagctgcatggcaatatgttcgttgaggagtgtgcaaaatgcaaaacccaatatgtcagagacactgttgtgggaactatgggactcaaggcaacgggaagactatgtacagttgccaaggctcgtggtctccgtgcctgcaggggtgagctcagagatacaattttggattgggaggatagccttccagatagagatctggctttagctgatgaagcaagccgaaacgccgatctgtctattacattgggcacgagcctgcagatccgtccgagtggtaacctcccactagcgaccaaacggcgcggaggccgccttgtaattgtgaatcttcagcccacaaagcatgatcgacacgccgacctcaggatccatggttatgtggatgaggtgatgacacgtctgatgaaacacttgggattagagatcccagcttgggacggacccagagttcttgaaagggccctgcccccactgcctagaccccctacacctaaattggagcctaaagaggagtctcccacaaggattaatggcagcatccccgcaggcccaaagcaagaaccatgcgctcaacataatggaagtgagccagcctcacccaagcgagagagacccacgagcccagccccacatcggccccctaagcgtgttaaggcaaaggcggtcccgtcctag

SEQ ID NO: 191921 - DNA, 1636 bp, Artificial Sequence
  derived and/or modified sequence
gcttccggcggaagcggcctcaacaagggaaactttattgttcccgtggggcagtcgaggatgtcggtgaattacgcggcggggctgtcgccgtacgcggacaagggcaagtgcggcctcccggagatcttcgaccccccggaggagctggagcggaaggtgtgggaactggcgaggctggtctggcagtcttccagtgtggtgttccacacgggtgccggcatcagcactgcctctggcatccccgacttcaggggtccccacggagtctggaccatggaggagcgaggtctggcccccaagttcgacaccacctttgagagcgcgcggcccacgcagacccacatggcgctggtgcagctggagcgcgtgggcctcctccgcttcctggtcagccagaacgtggacgggctccatgtgcgctcaggcttccccagggacaaactggcagagctccacgggaacatgtttgtggaagaatgtgccaagtgtaagacgcagtacgtccgagacacagtcgtgggcaccatgggcctgaaggccacgggccggctctgcaccgtggctaaggcaagggggctgcgagcctgcaggggagagctgagggacaccatcctagactgggaggactccctgcccgaccgggacctggcactcgccgatgaggccagcaggaacgccgacctgtccatcacgctgggtacatcgctgcagatccggcccagcgggaacctgccgctggctaccaagcgccggggaggccgcctggtcatcgtcaacctgcagcccaccaagcacgaccgccatgctgacctccgcatccatggctacgttgacgaggtcatgacccggctcatgaagcacctggggctggagatccccgcctgggacggcccccgtgtgctggagagggcgctgccacccctgccccgcccgcccacccccaagctggagcccaaggaggaatctcccacccggatcaacggctctatccccgccggccccaagcaggagccctgcgcccagcacaacggctcagagcccgccagccccaaacgggagcggcccaccagccctgccccccacagaccccccaaaagggtgaaggccaaggcggtccccagctgaccagggtgcttggggagggtggggctttttgtagaaactgtggattctttttctctcgtggtctcactttgttacttgtttctgtccccgggagcctcagggctctgagagctgtgctccaggccaggggttacacctgccctccgtggtccctccctgggctccaggggcctctggtgcggttccgggaagaagccacaccccagaggtgacaggtgagcccctgccacaccccagcctctgacttgctgtgttgtccagaggtgaggctgggccctccctggtctccagcttaaacaggagtgaactccctctgtccccagggcctcccttctgggccccctacagcccaccctacccctcctccatgggccctgcaggaggggagacccaccttgaagtgggggatcagtagaggcttgcactgcctttggggctggagggagacgtgggtccaccaggcttctggaaaagtcctcaatgcaataaaaacaatttctttcttgca

SEQ ID NO: 191922 - DNA, 1473 bp, Artificial Sequence
  derived and/or modified sequence
ttattgttcccgtggggcagtcgaggatgtcggtgaattacgcggcggggctgtcgccgtacgcggacaagggcaagtgcggcctcccggaggggtccccacggagtctggaccatggaggagcgaggtctggcccccaagttcgacaccacctttgagagcgcgcggcccacgcagacccacatggcgctggtgcagctggagcgcgtgggcctcctccgcttcctggtcagccagaacgtggacgggctccatgtgcgctcaggcttccccagggacaaactggcagagctccacgggaacatgtttgtggaagaatgtgccaagtgtaagacgcagtacgtccgagacacagtcgtgggcaccatgggcctgaaggccacgggccggctctgcaccgtggctaaggcaagggggctgcgagcctgcaggggagagctgagggacaccatcctagactgggaggactccctgcccgaccgggacctggcactcgccgatgaggccagcaggaacgccgacctgtccatcacgctgggtacatcgctgcagatccggcccagcgggaacctgccgctggctaccaagcgccggggaggccgcctggtcatcgtcaacctgcagcccaccaagcacgaccgccatgctgacctccgcatccatggctacgttgacgaggtcatgacccggctcatgaagcacctggggctggagatccccgcctgggacggcccccgtgtgctggagagggcgctgccacccctgccccgcccgcccacccccaagctggagcccaaggaggaatctcccacccggatcaacggctctatccccgccggccccaagcaggagccctgcgcccagcacaacggctcagagcccgccagccccaaacgggagcggcccaccagccctgccccccacagaccccccaaaagggtgaaggccaaggcggtccccagctgaccagggtgcttggggagggtggggctttttgtagaaactgtggattctttttctctcgtggtctcactttgttacttgtttctgtccccgggagcctcagggctctgagagctgtgctccaggccaggggttacacctgccctccgtggtccctccctgggctccaggggcctctggtgcggttccgggaagaagccacaccccagaggtgacaggtgagcccctgccacaccccagcctctgacttgctgtgttgtccagaggtgaggctgggccctccctggtctccagcttaaacaggagtgaactccctctgtccccagggcctcccttctgggccccctacagcccaccctacccctcctccatgggccctgcaggaggggagacccaccttgaagtgggggatcagtagaggcttgcactgcctttggggctggagggagacgtgggtccaccaggcttctggaaaagtcctcaatgcaataaaaacaatttctttcttgc

SEQ ID NO: 191923 - RNA, 1211 nt, Artificial Sequence
  derived and/or modified sequence
gggaaauaagagagaaaagaagaguaagaagaaauauaagagccaccauguccgugaauuaugccgcuggucuuuccccguacgccgauaaaggaaaguguggccucccugagauuuuugacccgccagaggaguuggaacgcaaagucugggaguuggccagguugguauggcagucgucaucggugguauuucauacgggagcuggaauuucaacggcaucgggaaucccggauuuucgggguccccacggagucuggaccauggaggaaagggggcucgccccuaaguucgauacgacauuugagagcgcacgcccaacucaaacccauauggcccuggugcagcuggaaagggucggacuucuccgcuuccucgugucgcagaauguagacggauugcacgugagauccggauucccaagggauaagcuggcggagcugcacgguaacauguucgucgaggaaugcgcgaaguguaaaacucaguacgugcgggauacaguagucggaacaaugggacugaaggcgaccgggcgacuuuguaccguagcaaaggcgagaggauugagagcgugccggggugaauugcgggacacaaucuuggacugggaggacucgcuuccggaucgagaucuggcccucgcggacgaagcgucgcgaaacgcggaccugucgauuacucugggcacaucacugcaaauccgccccagcgggaaccucccucuugcaacaaaacggcgaggcgguagacuggucauugucaaccuccagccgaccaaacacgaccggcacgccgacuugagaauccauggguauguagaugaggugaugacgcgcuugaugaaacaucucggguuggagaucccggcuugggacgggccaaggguccuugagagggcgcucccgccuuugccaagacccccgacgcccaagcuggaaccaaaggaagaauccccgacgagaaucaauggcucaauccccgcugggccuaaacaggaaccgugcgcgcagcauaauggguccgagcccgcaucacccaaacgagaaaggcccacaucgccugcaccgcacagacccccaaagaggguaaaagcgaaagccgugcccucguaaugagcugccuucugcggggcuugccuucuggccaugcccuucuucucucccuugcaccuguaccucuuggucuuugaauaaagccugaguaggaag

SEQ ID NO: 191924 - RNA, 1068 nt, Artificial Sequence
  derived and/or modified sequence
augucuguuaacuacgccgcuggccugucaccauaugcagacaagggcaagugcggacugcccgaaauuuucgacccucccgaggaauuggaacggaaagugugggaacucgcccgacucgucuggcagagcaguucaguuguauuucacaccggagcagggaucucuacugcguccggaauccccgauuuccgagggccccacgguguuuggacaauggaggaaagggggcuagcacccaaguucgauaccacuuuugagagcgccagaccuacccaaacucauauggcucugguacagcuggagcgcgucgggcugcugagauuccuggugucacagaacguugacggacugcacgugagguccgguuuuccgcgcgauaaacuugccgaauuacacgggaauauguuuguggaggagugcgcuaaaugcaagacacaauacguaagggacaccguugucggaacuauggggcugaaggcaacggggcgcuuguguaccgucgcuaaagcucggggacuucgugccuguagaggugaacugcgagauacaauccucgacugggaagacagccucccagaccgcgacuuagcacuggcugaugaagcuuccagaaacgccgaucugagcauuacccucggaacuucccugcagauccgccccagcgggaaccugccguuagcuacgaagcggagagguggacgcuuagugaucgugaauuugcagccgacaaagcacgaucgccaugcugaucucaggauacauggcuauguggacgaggugaugaccagacugaugaaacauuuggguuuggagaucccagcuugggauggaccuaggguacuagagagagcgcucccgccuuuaccaagaccacccacuccuaaacuggagccaaaggaggagucuccaacuagaauaaacgguuccauuccagcuggcccuaagcaggagcccugugcacaacacaauggauccgagccugcaagcccuaagcgagagagaccuacaucgcccgccccccacagaccucccaaaagagugaaagccaaggccgugccuagcuag

SEQ ID NO: 191925 - RNA, 1068 nt, Artificial Sequence
  derived and/or modified sequence
auguccgugaauuaugccgcuggccuuucaccuuaugcugacaagggcaaguguggacugcccgagaucuucgacccaccggaagaacuggagagaaagguuugggaauuggcccggcuggucuggcaguccuccuccgugguguuucauacuggugcaggaauuucaacugccucuggaauucccgacuuuagaggaccccaugguguuuggaccauggaagagcgagguuuagcuccuaaguuugauacaaccuuugagagcgcaagacccacucagacgcauauggcacucguccaguuggaacggguggggcucuugcgauuucuggugagccaaaauguggauggguugcaugucagaucaggcuucccuagggacaaacuggcagagcugcauggcaauauguucguugaggagugugcaaaaugcaaaacccaauaugucagagacacuguugugggaacuaugggacucaaggcaacgggaagacuauguacaguugccaaggcucguggucuccgugccugcaggggugagcucagagauacaauuuuggauugggaggauagccuuccagauagagaucuggcuuuagcugaugaagcaagccgaaacgccgaucugucuauuacauugggcacgagccugcagauccguccgagugguaaccucccacuagcgaccaaacggcgcggaggccgccuuguaauugugaaucuucagcccacaaagcaugaucgacacgccgaccucaggauccaugguuauguggaugaggugaugacacgucugaugaaacacuugggauuagagaucccagcuugggacggacccagaguucuugaaagggcccugcccccacugccuagacccccuacaccuaaauuggagccuaaagaggagucucccacaaggauuaauggcagcauccccgcaggcccaaagcaagaaccaugcgcucaacauaauggaagugagccagccucacccaagcgagagagacccacgagcccagccccacaucggcccccuaagcguguuaaggcaaaggcggucccguccuag

SEQ ID NO: 191926 - protein, 423 aa, Artificial Sequence
  derived and/or modified sequence
MVPHLLLLCLLPLVRATEPHEGRADEQSAEAALAVPNASHFFSWNNYTFSDWQNFVGRRRYGAESQNPTVKALLIVAYSFIIVFSLFGNVLVCHVIFKNQRMHSATSLFIVNLAVADIMITLLNTPFTLVRFVNSTWIFGKGMCHVSRFAQYCSLHVSALTLTAIAVDRHQVIMHPLKPRISITKGVIYIAVIWTMATFFSLPHAICQKLFTFKYSEDIVRSLCLPDFPEPADLFWKYLDLATFILLYILPLLIISVAYARVAKKLWLCNMIGDVTTEQYFALRRKKKKTIKMLMLVVVLFALCWFPLNCYVLLLSSKVIRTNNALYFAFHWFAMSSTCYNPFIYCWLNENFRIELKALLSMCQRPPKPQEDRPPSPVPSFRVAWTEKNDGQRAPLANNLLPTSQLQSGKTDLSSVEPIVTMS

SEQ ID NO: 191927 - DNA, 4282 bp, Artificial Sequence
  derived and/or modified sequence
gtgccgaccgcgggctggtggcgggcggcgcggtgctccgcgcgtccgggctccctggctcctcgggacggccttgtatgctgtgcgccccgcaccccggctgcgcgctccgatcccagcgggaggggacgcccggcccgcaggctcccaggggaggggtggctcctgcaaaatggtccctcacctcttgctgctctgtctcctccccttggtgcgagccaccgagccccacgagggccgggccgacgagcagagcgcggaggcggccctggccgtgcccaatgcctcgcacttcttctcttggaacaactacaccttctccgactggcagaactttgtgggcaggaggcgctacggcgctgagtcccagaaccccacggtgaaagccctgctcattgtggcttactccttcatcattgtcttctcactctttggcaacgtcctggtctgtcatgtcatcttcaagaaccagcgaatgcactcggccaccagcctcttcatcgtcaacctggcagttgccgacataatgatcacgctgctcaacacccccttcactttggttcgctttgtgaacagcacatggatatttgggaagggcatgtgccatgtcagccgctttgcccagtactgctcactgcacgtctcagcactgacactgacagccattgcggtggatcgccaccaggtcatcatgcaccccttgaaaccccggatctcaatcacaaagggtgtcatctacatcgctgtcatctggaccatggctacgttcttttcactcccacatgctatctgccagaaattatttaccttcaaatacagtgaggacattgtgcgctccctctgcctgccagacttccctgagccagctgacctcttctggaagtacctggacttggccaccttcatcctgctctacatcctgcccctcctcatcatctctgtggcctacgctcgtgtggccaagaaactgtggctgtgtaatatgattggcgatgtgaccacagagcagtactttgccctgcggcgcaaaaagaagaagaccatcaagatgttgatgctggtggtagtcctctttgccctctgctggttccccctcaactgctacgtcctcctcctgtccagcaaggtcatccgcaccaacaatgccctctactttgccttccactggtttgccatgagcagcacctgctataaccccttcatatactgctggctgaacgagaacttcaggattgagctaaaggcattactgagcatgtgtcaaagacctcccaagcctcaggaggacaggccaccctccccagttccttccttcagggtggcctggacagagaagaatgatggccagagggctccccttgccaataacctcctgcccacctcccaactccagtctgggaagacagacctgtcatctgtggaacccattgtgacgatgagttagaagaggttgggaagagggagtgggaggggtctgtctccacctgaggcagggaaagagagcctattctcacacatgatcttcagagtgctggaaacacactcctgcagaagctgtaggactcttgaattcctaggaaactgtccagcctcctagccccatgtgatgtgaaaactaaaaggcaccaccaactagacatgtgttcataaattcccatctaagaaacactgggaggcacagcagcctgtatctctgaggaagaggagcgaggacaacgttggcccagatgggggctgaatcattcaactgcctccatctgtggggcagctgctgccttacagcccttcctactgctgagcatccctaagggagacctaaatcatactttgggtgtggtgacccagatgcacagagctctgcttgaaacaggtacacgggccagggaaatgccagcaagccagagcgggcgtggagatttttatgcctcactttctggagtcactgggccatgatgaatcataagtcttcagtggcctagcaatatccagataagaaaggaccaacttgggttccttaaaacaaagggaaattattattgccacttagaaaaattcagaaaagcacacactcacatacacacacacaaaatcactctcttatcccatccatttgtgataacatctgtgaacatgctgtggctctatttgcaacattttccttcgtgtgtgtgattgtgtgcatgtgtgcatgaccttttttttttctttttttttttttttttgagatggaatctcgctctgtcacccaggttggagttcagtggcacaatctcggctcactgcaagctctgcctcccaggttcatgccgttctcctgcctcagcctccctagtagctgggactacaggtgcccgccaccatgcccggctaatcttttgcatttttagtagagacggggtttcaccgtgttagccaggatggtctcgatctcctgacctcgtgatccacctgcctaggcctcccaaagtgttgggattacaggcgtgagccaccccgcccggcccttttttttcatttatactttttcatttagattgtaatgattaacagaaacaggggtacctttcccaggggtgtccaccagaagagttgaagaagaggtgagaagatcccaaggtgaagcctgtcaccacgcagacagaactgccccctattgtagacagtggtgggaagggcctggctcacatgcccctccttagaggcagcctcaagatgaaccagggaatcaaactcaaccaggaggcatgattccttctctcctgcaattgcacaaaaacaagtggtggtgaaacattgttctgttttcacaagagatgagggagcaggctttccaatatgctggaagtaattgtgcttagacacctcatcctcccaagctgtctagaaaggccatttcgctgtgttgtctaaataatgagggttttttcacaccatttctcaaaaggagattcgctgtcaacatcattttggtggttcaggtgtaactttcacttacagaaacttatgcatccttaagagatctcaattcttaagggtctaacttgccagagaaatctcattccagggactgattgtttttatcaccttctgtctggtcctgagtgactcactgtgtcacccagaaaagagacctgtcaggcagaatcgagcttaattcacctgctctaaacaattgttactgacacactgcttttaggttttcttctagcaccagataaactctgaaatcaaagcatggatatgagctcagtaggaaactaaggtttgagggagaaagagtttgtcacttagacctcttggctgttaactgaaactgaacttgctcacatcatctgcttccctgtaatgaactatgagggttctttatcctagtttctatttatgaagatggttgaaaattttcaagacacaagattttgaaaactcactgaattatgggcaaaaccatgactttcattgggcagacagagtcttctaagcccacagggatccccagatggatttttcaggacaaatggctcatgtgcctgtacttattgtctctgtggtgtgtcaagaagtagctaatggtttcatctgaaagctgccatagaaattctgtgaaccagaatgagacaaggcagcaggcatacagaaggtttgtcctgctctgggaagcatggaggatgttgtacttcactcctctctgagggtgtctaggaatacagaagctccttgacttacatctcaataaacccatcgtaagtccaaaatattggaagttgaaaatgcattgaatacacccaacctactgaacatcgtagcttagccaagcctaccttaaatgctctgagaacacttatattagcctacagctgggaaaaatcatttaacacaaagcctatcttctaatgaagtatggaatatctcatgtaatttattgaatactgtactgaaggtgaaaaccagaatggttgtatggatatgcgaagtatggtttctactgaatgtgtattgctttcccatcatcataaaatttttaaaaatcctaagttgaatcattgttagtccgggaccttcagtactgccaagtcccagagaaaacccttttactctggggagaacccactgatggctcattagatctgtcccttccccgaggtccgtgtgtgactttgagcaaaaagtgacttctttttgtgaatgtaaaatttgtgaaacttgagtttttccaatgtgctgtaaagtgttttattgtaaattgctcatctcaataaaatttacttcaggtttgtggactgtg

SEQ ID NO: 191928 - DNA, 1272 bp, Artificial Sequence
  derived and/or modified sequence
atggtaccccatctgctgttactgtgtctgttgcctctggtcagagccaccgagccgcacgaaggaagagcagatgagcagtctgccgaggctgccctggcagtgcccaatgcttcccacttcttctcgtggaacaactacacattttctgattggcaaaacttcgtgggcaggaggcgctacggagccgagagccagaatccgaccgtgaaagcgctgttgatcgtcgcatattccttcattattgtgttttccctctttgggaacgtgctggtgtgtcacgtcatattcaaaaaccagcggatgcattcagcgacatctttatttatcgtgaatttggcggttgccgatattatgataactctgcttaacactccctttactctagttcggtttgttaacagcacttggatctttgggaaggggatgtgtcacgttagtcgctttgctcagtattgttcgctgcatgtttcggctctgaccctcacagccattgctgtggatcgtcaccaagtcatcatgcatcccctgaagccacgcatttcgataacaaagggcgtgatttacatcgctgttatctggactatggcaacctttttttctctgccccacgccatctgccagaagctttttacctttaagtactcagaggacatcgtgcggtcattatgcctccccgactttccagagccggctgatctcttctggaaatacctcgatctggccacattcatccttctttacattctacccctcctgatcataagtgtggcgtacgcacgagtagcgaagaagttgtggctctgtaacatgattggggatgtgactaccgaacaatacttcgctctgcggaggaagaaaaaaaagacaataaaaatgttgatgctggtcgtcgtgctctttgctctttgctggtttcctctgaattgctacgtcctgcttctttcatccaaagtgattcgtactaataacgctctttactttgcatttcattggttcgccatgagcagtacgtgctacaacccattcatctactgctggctgaacgaaaatttcaggatagaattaaaagcactgttatctatgtgccagagaccacctaagcctcaggaagatcgccccccatcaccagtgcctagctttcgggtggcttggaccgaaaagaatgacggccagcgagctcctctagcgaataatctgctgccgaccagtcaattacaaagcggtaaaactgacctctccagcgtcgagcccatcgtcactatgtcctag

SEQ ID NO: 191929 - DNA, 1272 bp, Artificial Sequence
  derived and/or modified sequence
atggtgccccacctgctgctgctgtgcctgctgcccctggtgcgggccacagagccccatgagggccgggcagatgagcagagcgctgaggccgccctggccgtgcccaatgccagccacttcttctcctggaacaactacaccttcagtgactggcagaactttgtgggcagaagaagatatggagctgagagccagaaccccaccgtgaaggccctgctgattgtggcctacagcttcatcatcgtgttcagcctgtttggaaatgtgctggtgtgccacgtgatcttcaagaaccagaggatgcacagcgccaccagcctcttcatcgtgaacctggccgtggccgacatcatgatcaccctgctgaacacccccttcaccctggtgcgctttgtgaacagcacctggatctttgggaagggcatgtgccacgtgtccagatttgcccagtactgcagcctgcacgtgtctgccctgaccctgacagccatcgctgtggacagacaccaggtgatcatgcaccccctgaagccccgcatcagcatcaccaagggcgtcatctacatcgctgtgatctggaccatggccaccttcttcagcctgccccacgccatctgccagaagctgttcaccttcaagtacagtgaagatattgtgcgcagcctgtgcctgcctgacttccctgagcctgctgacctcttctggaagtacctggacctggccaccttcatcctgctgtacatcctgcccctgctgatcatctctgtggcctatgcccgggtggccaagaagctgtggctgtgcaacatgattggagatgtgaccacagagcagtactttgccctgcggaggaagaagaagaagaccatcaagatgctgatgctggtggtggtgctgtttgccctgtgctggttccccctgaactgctacgtgctgctgctgagcagcaaggtgatccgcaccaacaatgccctgtactttgccttccactggtttgccatgagcagcacctgctacaaccccttcatctactgctggctgaatgaaaacttccgcatcgagctgaaggccctgctgtccatgtgccagaggcctcccaagccccaggaggaccggccccccagccctgtgcccagcttccgggtggcctggacagagaagaatgatggccagagggcccccctggccaacaacctgctgcccaccagccagctgcagagcggcaagacagacctgagctctgtggagcccatcgtgaccatgtcctag

SEQ ID NO: 191930 - DNA, 1272 bp, Artificial Sequence
  derived and/or modified sequence
atggtgccccacctgctgctgctgtgcctgctgcccctggtgcgggccactgaaccgcatgagggcagagcggatgagcaatctgcggaggcagcactggccgttccaaacgcttctcatttctttagctggaacaactatactttcagcgactggcagaacttcgtcggcagaagaaggtacggcgccgaaagccagaacccaaccgtgaaggccctgctgattgttgcctatagctttattatcgttttctcactctttggcaacgtgctggtatgccacgttatttttaaaaaccaaaggatgcactctgcaacaagcctatttatagtgaacctcgctgtggctgatattatgattactcttttaaacaccccatttactttagtaaggttcgttaacagcacatggatcttcgggaaggggatgtgtcacgtgtcaagattcgctcagtactgctccttgcacgtgtcagcgctcacactcactgctatcgccgttgatcggcaccaggtcatcatgcacccacttaagccacgtatctcaatcactaagggcgtaatctacatagccgtgatctggacaatggctacatttttttcgctgccccatgctatctgtcagaaattattcacctttaagtacagtgaagacattgtgcgctccctgtgtctgcccgacttcccagagcccgccgatcttttctggaaatacttggacctcgccaccttcatactgctgtatatccttcccctactcatcatctcggttgcttacgccagagtggctaagaagttgtggctctgcaacatgataggagacgtgactacggaacaatatttcgcgctgcgaaggaagaaaaagaaaacaatcaagatgctcatgctggtcgttgtcttgttcgccctctgctggttcccgcttaattgctatgttctgctgttgtcatcaaaggttattcgcacaaacaatgcactatattttgcttttcattggttcgcgatgtcctccacctgctataaccctttcatctattgctggctgaatgagaacttccgaatagagttgaaggctctactgtcgatgtgccagcgaccgccaaagcctcaggaagataggccaccctcccccgtgccctcattcagagttgcctggaccgaaaagaacgatggacagagagcccccttggcgaacaacctcttgcccacctcccagttacagagcgggaaaactgatctctcttccgtcgagcctattgtgacgatgtcctag

SEQ ID NO: 191931 - DNA, 1272 bp, Artificial Sequence
  derived and/or modified sequence
atggtcccccacttactgcttttatgcttgctccctttggtaagggcaacggagccacacgagggtagagcagatgagcagtctgcggaggccgctctggctgtaccgaatgccagtcatttcttttcatggaacaactacacgttttctgattggcaaaactttgtcggccgacgtcggtatggagcagagtctcagaatcccacggttaaagccttactgattgtggcttatagcttcataatagtgttcagtctgttcggcaatgtactcgtgtgtcatgtaatttttaagaaccaacgcatgcattctgcaactagcttattcatcgtcaacctcgctgtcgccgacataatgatcacattactgaacacgccatttacactggtgcgcttcgtcaatagcacctggatcttcggaaaaggaatgtgccacgtgtctcggttcgctcagtactgctcactgcatgtgtctgctcttacactgacagcaatcgccgtcgatcggcaccaggtcatcatgcaccccttgaagccaagaattagcataacaaagggcgtgatctacattgcagttatctggactatggcaacattcttcagcctgcctcatgccatctgccagaagctgttcacattcaaatacagcgaggacatcgttcgctcactctgcctgcctgacttcccagaacccgctgatctcttttggaagtatttggatcttgcaacgtttattctactgtatattctacccctgctgattatttccgttgcatacgctagggtggcaaaaaagttgtggctgtgtaatatgatcggagatgttactaccgagcaatatttcgcgctgagacggaaaaaaaagaaaacaatcaaaatgttaatgctcgtggtggtgctgttcgcactctgttggttccccttgaattgctacgtattactgctgtcttccaaagttatacggactaataacgccctgtactttgccttccattggttcgctatgtcttcaacctgctacaacccttttatttactgttggctgaacgaaaatttccgcattgagctaaaagccctcctttccatgtgccaaagacctccaaagccccaggaagatcgacctccgtcaccggtcccgagcttccgtgtcgcgtggactgaaaagaacgacggtcagagagctcctctcgcgaacaacctgctgcccacttctcagcttcagagtgggaaaactgatctctcaagcgtggagccaattgtgacaatgtcttag

SEQ ID NO: 191932 - DNA, 1272 bp, Artificial Sequence
  derived and/or modified sequence
atggtgccccacctgctgctgctgtgcctgctgcccctggtgagagccaccgagccccacgagggcagagccgacgagcagagcgccgaggccgccctggccgtgcccaacgccagccacttcttcagctggaacaactacaccttcagcgactggcagaacttcgtgggcagaagaagatacggcgccgagagccagaaccccaccgtgaaggccctgctgatcgtggcctacagcttcatcatcgtgttcagcctgttcggcaacgtgctggtgtgccacgtgatcttcaagaaccagagaatgcacagcgccaccagcctgttcatcgtgaacctggccgtggccgacatcatgatcaccctgctgaacacccccttcaccctggtgagattcgtgaacagcacctggatcttcggcaagggcatgtgccacgtgagcagattcgcccagtactgcagcctgcacgtgagcgccctgaccctgaccgccatcgccgtggacagacaccaggtgatcatgcaccccctgaagcccagaatcagcatcaccaagggcgtgatctacatcgccgtgatctggaccatggccaccttcttcagcctgccccacgccatctgccagaagctgttcaccttcaagtacagcgaggacatcgtgagaagcctgtgcctgcccgacttccccgagcccgccgacctgttctggaagtacctggacctggccaccttcatcctgctgtacatcctgcccctgctgatcatcagcgtggcctacgccagagtggccaagaagctgtggctgtgcaacatgatcggcgacgtgaccaccgagcagtacttcgccctgagaagaaagaagaagaagaccatcaagatgctgatgctggtggtggtgctgttcgccctgtgctggttccccctgaactgctacgtgctgctgctgagcagcaaggtgatcagaaccaacaacgccctgtacttcgccttccactggttcgccatgagcagcacctgctacaaccccttcatctactgctggctgaacgagaacttcagaatcgagctgaaggccctgctgagcatgtgccagagaccccccaagccccaggaggacagaccccccagccccgtgcccagcttcagagtggcctggaccgagaagaacgacggccagagagcccccctggccaacaacctgctgcccaccagccagctgcagagcggcaagaccgacctgagcagcgtggagcccatcgtgaccatgagctag

SEQ ID NO: 191933 - protein, 416 aa, Artificial Sequence
  derived and/or modified sequence
MAHSPVAVQVPGMQNNIADPEELFTKLERIGKGSFGEVFKGIDNRTQQVVAIKIIDLEEAEDEIEDIQQEITVLSQCDSSYVTKYYGSYLKGSKLWIIMEYLGGGSALDLLRAGPFDEFQIATMLKEILKGLDYLHSEKKIHRDIKAANVLLSEQGDVKLADFGVAGQLTDTQIKRNTFVGTPFWMAPEVIQQSAYDSKADIWSLGITAIELAKGEPPNSDMHPMRVLFLIPKNNPPTLVGDFTKSFKEFIDACLNKDPSFRPTAKELLKHKFIVKNSKKTSYLTELIDRFKRWKAEGHSDDESDSEGSDSESTSRENNTHPEWSFTTVRKKPDPKKVQNGAEQDLVQTLSCLSMIITPAFAELKQQDENNASRNQAIEELEKSIAVAEAACPGITDKMVKKLIEKFQKCSADESP

SEQ ID NO: 191934 - DNA, 1251 bp, Artificial Sequence
  derived and/or modified sequence
atggcccacagccccgtggccgtgcaggtgcccggcatgcagaacaacatcgccgaccccgaggagctgttcaccaagctggagagaatcggcaagggcagcttcggcgaggtgttcaagggcatcgacaacagaacccagcaggtggtggccatcaagatcatcgacctggaggaggccgaggacgagatcgaggacatccagcaggagatcaccgtgctgagccagtgcgacagcagctacgtgaccaagtactacggcagctacctgaagggcagcaagctgtggatcatcatggagtacctgggcggcggcagcgccctggacctgctgagagccggccccttcgacgagttccagatcgccaccatgctgaaggagatcctgaagggcctggactacctgcacagcgagaagaagatccacagagacatcaaggccgccaacgtgctgctgagcgagcagggcgacgtgaagctggccgacttcggcgtggccggccagctgaccgacacccagatcaagagaaacaccttcgtgggcacccccttctggatggcccccgaggtgatccagcagagcgcctacgacagcaaggccgacatctggagcctgggcatcaccgccatcgagctggccaagggcgagccccccaacagcgacatgcaccccatgagagtgctgttcctgatccccaagaacaacccccccaccctggtgggcgacttcaccaagagcttcaaggagttcatcgacgcctgcctgaacaaggaccccagcttcagacccaccgccaaggagctgctgaagcacaagttcatcgtgaagaacagcaagaagaccagctacctgaccgagctgatcgacagattcaagagatggaaggccgagggccacagcgacgacgagagcgacagcgagggcagcgacagcgagagcaccagcagagagaacaacacccaccccgagtggagcttcaccaccgtgagaaagaagcccgaccccaagaaggtgcagaacggcgccgagcaggacctggtgcagaccctgagctgcctgagcatgatcatcacccccgccttcgccgagctgaagcagcaggacgagaacaacgccagcagaaaccaggccatcgaggagctggagaagagcatcgccgtggccgaggccgcctgccccggcatcaccgacaagatggtgaagaagctgatcgagaagttccagaagtgcagcgccgacgagagcccctag

SEQ ID NO: 191935 - DNA, 1251 bp, Artificial Sequence
  derived and/or modified sequence
atggcccactctcccgtcgcagtgcaggtccccggcatgcagaacaacattgccgaccccgaagagttgttcacaaagctcgagcgcattggcaaaggcagctttggggaagtgtttaagggcatcgataaccggacacaacaggttgttgcgattaagatcatcgacctggaagaagctgaagatgagattgaagacatacagcaggaaattactgttctgtcccagtgtgactcttcttatgtgaccaaatactacggctcatacctcaaaggctcaaaactgtggatcataatggagtacctgggcgggggatcagccctagatctcctcagggccgggccatttgatgagtttcagatcgcgacgatgttgaaagagatccttaaaggattggattatcttcacagcgagaaaaaaattcatcgagatattaaagcagctaacgtgttactgagcgagcaaggagacgtgaaactcgccgacttcggggtggcagggcaattgactgacacacagatcaagcggaacacgttcgttggaacgcccttctggatggccccggaggtcatccagcagagcgcctacgactccaaagcagatatatggtccctcggaataacagctatcgaacttgctaagggggagcctccaaacagcgatatgcatcctatgagagtcctgtttttgattcctaaaaataatcctcctacgttggtcggagacttcacaaaaagtttcaaggaatttatagacgcctgcctgaataaagatcccagcttcagaccaacagccaaggaactcctgaagcataaattcatcgttaagaactctaagaaaactagctatctcaccgagttgatcgacaggtttaaacgctggaaggccgaagggcactcagatgacgagtcggactccgaaggatcggactcagagagcacgtcaagggagaataacacgcacccagaatggtctttcacaaccgtgcgtaagaaacccgaccctaagaaggtccagaacggggccgagcaggacctcgtgcagacactcagttgcctgagcatgataatcactcctgctttcgccgagctgaaacagcaagatgagaataatgcttctcgcaatcaggccatagaggagctggagaaatcaattgccgtggctgaggcagcatgtccggggatcacggataagatggtgaagaagctcattgaaaagtttcagaagtgctctgcggacgagagcccttag

SEQ ID NO: 191936 - DNA, 1251 bp, Artificial Sequence
  derived and/or modified sequence
atggcccacagccctgtggccgtgcaggtgcccggcatgcagaacaacattgctgaccctgaggagctgttcaccaagctggagcgcatcggcaagggcagctttggagaggtgttcaagggcatcgacaacagaacccagcaggtggtggccatcaagatcatcgacctggaggaggctgaagatgaaattgaggacatccagcaggagatcaccgtgctgagccagtgtgacagcagctatgtgaccaagtactacggcagctacctgaagggcagcaagctgtggatcatcatggagtacctgggcggcggcagcgccctggacctgctgcgggccggcccctttgatgagttccagatcgccaccatgctgaaggagatcctgaagggcctggactacctgcacagcgagaagaagatccaccgggacatcaaggccgccaacgtgctgctgtctgagcagggagatgtgaagctggccgactttggagtggccggccagctgacagacacccagatcaagaggaacacctttgtgggcacccccttctggatggcccctgaggtgatccagcagagcgcctatgacagcaaggctgacatctggagcctgggcatcacagccatcgagctggccaagggggagccccccaacagcgacatgcaccccatgagggtgctcttcctgatccccaagaacaacccccccaccctggtgggggacttcaccaagagcttcaaggagttcattgatgcctgcctgaacaaggaccccagcttccggcccacagccaaggagctgctgaagcacaagttcatcgtgaagaacagcaagaagaccagctacctgacagagctgattgaccgcttcaagcgctggaaggccgagggccacagtgatgatgaaagtgacagcgagggcagtgacagcgagagcaccagccgggagaacaacacccaccctgagtggagcttcaccaccgtgaggaagaagccagaccccaagaaggtgcagaatggagctgagcaggacctggtgcagaccctgagctgcctgtccatgatcatcaccccagcctttgctgagctgaagcagcaggatgaaaataatgccagcaggaaccaggccatcgaggagctggagaagagcattgctgtggccgaggccgcctgccccggcatcacagacaagatggtgaagaagctgattgagaagttccagaagtgcagcgcagatgagagcccctag

SEQ ID NO: 191937 - DNA, 3288 bp, Artificial Sequence
  derived and/or modified sequence
ctcctcttcctaaagcggcgaggcgcagaggagcggcatcactcgagcccaggtcccagccaccaccactcacagcgctcggcgttcaggaagaggagcagcagcggaggcggctgcttcagcggcgggcgggcgccagaaaggccccgatcgaaaagcctgggagggccgccgaactacccccggagggaggagccagtccgaacccaaggcgccaccgccgcagaagcggagcgaggcagcattcgcctccatggcccactcgccggtggctgtccaagtgcctgggatgcagaataacatagctgatccagaagaactgttcacaaaattagagcgcattgggaaaggctcatttggggaagttttcaaaggaattgataaccgtacccagcaagtcgttgctattaaaatcatagaccttgaggaagccgaagatgaaatagaagacattcagcaagaaataactgtcttgagtcaatgtgacagctcatatgtaacaaaatactatgggtcatatttaaaggggtctaaattatggataataatggaatacctgggcggtggttcagcactggatcttcttcgagctggtccatttgatgagttccagattgctaccatgctaaaggaaattttaaaaggtctggactatctgcattcagaaaagaaaattcaccgagacataaaagctgccaatgtcttgctctcagaacaaggagatgttaaacttgctgattttggagttgctggtcagctgacagatacacagattaaaagaaatacctttgtgggaactccattttggatggctcctgaagttattcaacagtcagcttatgactcaaaagctgacatttggtcattgggaattactgctattgaactagccaagggagagccacctaactccgatatgcatccaatgagagttctgtttcttattcccaaaaacaatcctccaactcttgttggagactttactaagtcttttaaggagtttattgatgcttgcctgaacaaagatccatcatttcgtcctacagcaaaagaacttctgaaacacaaattcattgtaaaaaattcaaagaagacttcttatctgactgaactgatagatcgttttaagagatggaaggcagaaggacacagtgatgatgaatctgattccgagggctctgattcggaatctaccagcagggaaaacaatactcatcctgaatggagctttaccaccgtacgaaagaagcctgatccaaagaaagtacagaatggggcagagcaagatcttgtgcaaaccctgagttgtttgtctatgataatcacacctgcatttgctgaacttaaacagcaggacgagaataacgctagcaggaatcaggcgattgaagaactcgagaaaagtattgctgtggctgaagccgcctgtcccggcatcacagataaaatggtgaagaaactaattgaaaaatttcaaaagtgttcagcagacgaatccccctaagaaacttattattggcttctgtttcatatggacccagagagccccaccaaacctacgtcaagattaacaatgcttaacccatgagctccatgtgccttttggatctttgcaacactgaagatttggaagaagctattaaactattttgtgatggcgtttatcattttatattttgaaaggattattttgtaaggaataacttttaatactatagtttcacctgtattctagtaaatgttgagacaccgttttgcttttaagtatccctatttcttaagttacgaggatgaatacctttcacattttgatctttagttgactctacagtcatgaaacatacaggtctttcaaagtcattctcaatattcagcttttgtaaattatcaagcttcaaaaagcttttttttttaaaaaaaaacatgcatattctaaaaatgactattggtggggaggtgtaaataagtcataccttcttaaaacagaaaatttaagtaaagtcttttaaatgaaacctgtaaaagtattgactcttctaccaagttggtatgatattccaggcagctcaatgattatcacatttgagaccctgtgtttgaagcatttacaggcaatgtacagcaacagaggtacctcttggtgtatagtatttacattctcttttaggtagaagaggcaattttacccttatttcacatggttagaaatttaaagcaagatcatttacccaaggataggtgtttggtaatgttgaaggagttagtctggcttcatgttttacatcttcaactaaaatcccatactatctgcttggatttggagagccaaaaaataaagctgattgtcatgtgattaaatatctgatcaacaggtatgaatataacttaaatcagcatatttttgccatggtaataaattgtcctataaactatttatatatttttgttcttcataattatcactaataagcatcagtttgttgtttttaaaaggatatttaagtgagcattttctagttcatatgaaaataaccatagtacaggatgatttctgtccacacaaaggttaaattagattgcacagttaattttcacttatatttatggtactattatgtgggtgatgcctttttcttttaagcccagtacatatattatgcctgcctaagttctgaactggggctgtatttcagtagttgtagaattattgatatttagttttgatagctaatgtttaattgtttggatctgcacagtttggtttttgcacaaaagtcatttaaaaaaatctgagtaattgtcaaatattaaaagaaagatattcttcctgtaaggaatacagtttttagtcaaagtggccattacatcctctttttaatttacataatacagatacttgagaaagttgttgtggtgttgtatgccaagaaaattctttttattggtgcctatattgtaacaattatttttaatgcattgtattttgaagtaacggttcagttaaatttttcacctgctgtgtaactgaaacacaattacagtttataatcatctgtagaagtctggagataattttgcaactcatgttatgggttaaatgaatatttttgtaaaagtaaaagcaacaaatttataaattgattatttgaaactttacaacacaattgcatcccaaatacaaattgtattgcttattcattatagctattcgtcctgtaatctgtttctaggtgaagcatactccagtgttttaggggttttgaaaataaatatttaaatttcacagtc

SEQ ID NO: 191938 - DNA, 1251 bp, Artificial Sequence
  derived and/or modified sequence
atggcccacagccccgtggccgtgcaggtgcccggcatgcagaacaatattgccgacccagaggagcttttcaccaaattggagaggatcggtaaaggctcatttggagaggtgttcaagggcattgacaacaggacccagcaagtggttgctatcaaaataattgacctggaagaagctgaggatgaaattgaggacatccagcaggagattacagtgctcagccagtgtgactcctcttatgtgactaagtactacggctcctacttgaaaggcagcaagctgtggattatcatggagtacttggggggcggctccgccttggatctgttacgggccgggccctttgatgagtttcagatagccaccatgctgaaggagatcttaaagggactggactatctccatagcgaaaagaagatccacagagacatcaaagccgctaacgtgctgttatccgaacagggggacgtaaagctggcggactttggagttgccgggcagctcactgacactcaaatcaagagaaataccttcgttgggacccctttctggatggctccagaggtgatccagcagtctgcctacgattccaaagcagacatttggagcctgggtattactgctattgagttagcaaaaggtgagcctcccaactctgacatgcatcccatgcgggtcctgtttctaatccccaaaaataaccccccaaccctcgtaggagattttacaaaatcttttaaggagtttatcgacgcttgcctgaataaggacccctcatttcgccctacagctaaggaactcctcaaacataaattcatagttaaaaacagcaaaaagacttcttatctaaccgagctgattgatagatttaaacgatggaaagcggagggacacagcgacgacgaaagcgattcagaaggctccgattccgagagcacatccagagagaataacacacacccagaatggtcgttcacaactgtgagaaagaagcctgatcctaaaaaggttcaaaatggagcagagcaggatctggtccaaacccttagttgtctctcgatgatcattacccctgcatttgccgaattaaaacagcaggatgaaaacaatgcctcacgcaatcaggcaatcgaggaattggagaagtcaatagcagtcgctgaggctgcgtgccctggcatcaccgataagatggttaaaaagctcattgagaaatttcagaaatgtagcgccgatgagtccccctag

SEQ ID NO: 191939 - DNA, 1251 bp, Artificial Sequence
  derived and/or modified sequence
atggcgcactccccagtggcagtgcaggtgcctgggatgcagaacaacatcgccgatcccgaggaactcttcacaaagctggagagaatcggcaagggcagcttcggagaggtctttaagggtattgataacaggacccagcaagtggtggcaatcaagatcattgacctagaggaagctgaggacgagatcgaggatatccaacaggagattacagtcctctctcagtgtgactctagctacgtgaccaaatattatggatcttacttgaagggatcaaagctttggattatcatggaatacctaggaggcggttcagccctggacctgttacgcgcagggcctttcgacgaatttcagatcgcaaccatgctcaaagagatactgaagggactggattacttacactcagagaaaaagattcatcgggacataaaggctgccaacgtcctgctctccgagcaaggagatgtgaagctggctgatttcggcgtcgcaggtcagctgacagacacacagatcaaacgcaatacgtttgttggcacgcccttttggatggctcctgaagtgattcagcagtcagcctacgatagcaaggcagatatttggtctctcggcatcacagccatcgagctcgctaaaggggagccccctaatagcgacatgcatcccatgcgggtgctgttcctgattcctaaaaataacccccctaccctggtcggcgatttcactaagtcctttaaggagttcatagatgcgtgtctcaacaaagatcctagttttcgaccaacagctaaggaactgttaaagcacaagtttatcgttaagaattccaaaaaaacttcctatctgaccgaacttatcgatcgctttaagcggtggaaggcagaaggccattcagatgacgaatccgactcagaaggttcagatagcgagtcaactagccgcgagaataacacccatccagaatggtccttcactaccgtccggaagaaaccagatcccaagaaggtgcagaatggggctgagcaggacttagttcaaacattgtcttgtctgtctatgatcattactcctgcattcgctgagttgaaacagcaggatgaaaataatgcctcacgcaaccaggccattgaggaattagagaagagtatagctgtcgccgaggcagcctgcccaggaattaccgacaaaatggtgaagaagctgatcgagaaatttcagaagtgtagcgcagatgaaagcccttag

SEQ ID NO: 191940 - protein, 374 aa, Artificial Sequence
  derived and/or modified sequence
MLLLLLLPLLWGRERVEGQKSNRKDYSLTMQSSVTVQEGMCVHVRCSFSYPVDSQTDSDPVHGYWFRAGNDISWKAPVATNNPAWAVQEETRDRFHLLGDPQTKNCTLSIRDARMSDAGRYFFRMEKGNIKWNYKYDQLSVNVTDPPQNLTVTVFQGEGTASTALGNSSSLSVLEGQSLRLVCAVDSNPPARLSWTWRSLTLYPSQPSNPLVLELQVHLGDEGEFTCRAQNSLGSQHVSLNLSLQQEYTGKMRPVSGVLLGAVGGAGATALVFLSFCVIFIVVRSCRKKSARPAADVGDIGMKDANTIRGSASQGNLTESWADDNPRHHGLAAHSSGEEREIQYAPLSFHKGEPQDLSGQEATNNEYSEIKIPK

SEQ ID NO: 191941 - protein, 145 aa, Artificial Sequence
  derived and/or modified sequence
MLLLLLLPLLWGRERVEGQKSNRKDYSLTMQSSVTVQEGMCVHVRCSFSYPVDSQTDSDPVHGYWFRAGNDISWKAPVATNNPAWAVQEETRDRFHLLGDPQTKNCTLSIRDARMSDAGRYFFRMEKGNIKWNYKYDQLSVNVTE

SEQ ID NO: 191942 - DNA, 1125 bp, Artificial Sequence
  derived and/or modified sequence
atgctgcttctcctgctcttgccactcctctggggacgagagcgtgtggaaggccagaagtccaatcgaaaggattattcgctgactatgcagtcatccgtgacagttcaagaaggcatgtgcgttcacgtgaggtgtagtttctcctaccctgtagattcccagacagattcagacccagtgcatggctattggttccgagccgggaacgacatctcctggaaggcccctgtggcaacaaataatccagcatgggcagtgcaagaagagacccgcgacaggtttcacctgctgggtgatccacagactaaaaattgcaccctgtctattagagacgcccgcatgtccgatgccggtaggtatttctttaggatggagaaggggaacattaagtggaactataagtatgatcaactgagtgtgaatgttaccgaccctcctcagaacttgactgtaaccgtgttccagggggaaggaactgcgtccaccgccctcggcaactcttccagcctatctgttctagagggccagtctttaagattagtttgtgccgtcgattccaatccgccagcacgactgtcttggacctggagaagtctcactctataccccagtcagccctctaaccccctggtattggagctccaagtgcatctgggcgacgagggggaattcacctgtcgggcgcagaactccctgggttcacagcatgtatcccttaacctctcgctacagcaggagtacaccggaaaaatgcgccccgtgagtggagttctgttgggggcagtcgggggcgctggagcaacagccttggtattcctgtctttttgcgtgattttcatcgtggtgagaagctgtcggaagaagtccgcacgacccgccgcagacgtgggcgacattggtatgaaggacgccaatacaataagaggaagcgcctcccagggcaacctaaccgagagctgggctgatgacaacccgcgccaccacgggctggccgcacactccagtggggaggagagagagatccagtacgctccactgtccttccacaagggggaaccacaagacctgagcgggcaggaggcaaccaacaacgagtactccgagatcaaaatccccaagtag

SEQ ID NO: 191943 - DNA, 1125 bp, Artificial Sequence
  derived and/or modified sequence
atgctgctgctgctgctgctgcccctgctgtggggccgggagcgggtggagggccagaagagcaacaggaaggactacagcctgaccatgcagagctctgtgacagtgcaggagggcatgtgtgtgcacgtgcgctgcagcttctcctaccctgtggacagccagacagacagcgaccctgtgcacggctactggttccgggctggaaatgacatctcctggaaggcccctgtggccaccaacaacccagcctgggccgtgcaggaggagacccgggaccgcttccacctgctgggggacccccagaccaagaactgcaccctgagcatcagagatgccaggatgtctgatgctggccgctacttcttcaggatggagaagggcaacatcaagtggaactacaagtatgaccagctgtctgtgaatgtgacagaccccccccagaacctgactgtgacagtgttccagggcgagggcacagccagcacagccctgggcaacagcagcagcctgtctgtgctggagggccagagcctgcggctggtgtgtgctgtggacagcaaccccccagcccggctgtcctggacctggaggagcctgaccctgtaccccagccagcccagcaaccccctggtgctggagctgcaggtgcacctgggagatgaaggagagttcacctgccgggcccagaacagcctgggcagccagcacgtgtccctgaacctgagcctgcagcaggagtacacaggcaagatgaggcctgtgtctggagtgctgctgggcgctgtgggcggggccggggccacagccctggtgttcctgtccttctgtgtgatcttcatcgtggtgcgcagctgcaggaagaagagcgcccggcctgctgctgatgtgggggacatcggcatgaaggatgccaacaccatccggggcagcgccagccagggcaacctgacagagagctgggcagatgacaaccccaggcaccacggcctggccgcccacagcagcggggaggagcgggagatccagtatgcccccctgtccttccacaagggggagccccaggacctgagcggccaggaggccaccaacaatgagtacagcgagatcaagatccccaagtag

SEQ ID NO: 191944 - DNA, 1125 bp, Artificial Sequence
  derived and/or modified sequence
atgctgctgctgctgctgctgcccctgctgtggggccgggagcgggtggagggtcagaagtctaaccgcaaggactacagcctaacgatgcagagttcagtgacagtgcaggaaggtatgtgcgtgcatgtcagatgttctttttcctaccccgtggactcacagacagacagcgacccagtacacgggtattggtttcgcgctgggaacgacatatcctggaaagcccccgttgctacgaataacccggcttgggccgtgcaggaggaaacacgggaccgcttccatctgctgggtgacccacagaccaagaattgcaccctgtccatcagagatgcgcgcatgtccgatgctgggcgctatttcttccgtatggagaaaggtaatattaaatggaattacaaatatgatcagttgtcagtaaacgtgactgacccaccgcagaacctgaccgttaccgtcttccaaggtgagggaacagcatccaccgcactaggtaacagctcttctctgtccgtcctcgaagggcagtctctacgactggtttgcgcagtcgactccaaccctcctgcccgcttatcttggacgtggcgaagcctgacgctgtatccttcgcagcccagcaaccccctggttctggagctccaggtccacctcggcgatgagggcgaatttacttgtcgggcccagaactctctgggctcccaacacgtatctctgaatcttagtctccaacaggagtatactggcaagatgaggccagtttcaggagtcctcctcggcgccgtgggcggggccggcgcaactgctcttgtctttctgagcttctgtgtaatctttatcgtggtacgatcctgtcggaaaaaaagcgctcggcctgctgcagatgttggcgacataggcatgaaggatgctaacacaatcaggggatcagcgagccagggtaatctaaccgagagctgggcagacgataatccaaggcatcacggcctggccgcccatagttccggggaggaacgcgagatccagtacgcccccctgtcattccacaagggtgagccacaggatctatcaggtcaggaagccaccaataatgaatacagtgaaattaagattcctaagtag

SEQ ID NO: 191945 - DNA, 1125 bp, Artificial Sequence
  derived and/or modified sequence
atgttgttgctgctgctattgcccctgctctggggaagagaacgggtggaggggcagaagagcaatagaaaggattatagcctgacgatgcaatcaagcgtcacagtccaggagggaatgtgtgtccacgtcagatgtagtttttcttacccagtcgactcacagactgactccgaccctgtgcacggatactggtttagggcaggtaatgatatctcctggaaggctccggtagctacaaataatcccgcttgggcagtgcaggaagaaactcgcgacagattccacttgctgggagacccccagactaaaaattgtaccctgtccatcagagacgccaggatgtcagatgccggacgctactttttccggatggagaaggggaatataaagtggaactacaagtacgatcaattgtctgtgaacgttaccgaccctccacaaaacttgacggtgacggtttttcagggagaaggtacggctagcacggcactcggcaattcctcatcactctcggtgctggagggacaaagtctgcgtctggtctgtgccgtggacagcaatccacctgccaggctgtcttggacctggaggtccctaacgctctacccatcgcaaccatccaaccctcttgttttggaactgcaggtgcacctcggggatgagggagagtttacctgccgtgcacaaaacagtctggggtctcagcacgtttcactcaacctctccttacagcaggagtacaccggcaagatgcgtccagttagcggagtgctgctgggagcagtgggaggggcaggagccaccgcccttgtgttcctctccttctgcgtcatctttatagtggtccggtcttgtagaaaaaagtcagctcggccagcagcggacgtcggcgatattggtatgaaagatgccaacaccattcgtggaagcgcctcacagggtaatttgactgaatcctgggccgatgacaatccgagacatcatggcttagccgcacacagctctggggaggaacgggaaattcagtatgccccattgagcttccacaagggtgagccacaggacctgtccgggcaggaggcgaccaataatgagtacagcgaaattaagattcctaaatag

SEQ ID NO: 191946 - DNA, 1475 bp, Artificial Sequence
  derived and/or modified sequence
gcagttcctgagagaagaaccctgaggaacagacgttccctcgcggccctggcacctccaaccccagatatgctgctgctgctgctgctgcccctgctctgggggagggagagggtggaaggacagaagagtaaccggaaggattactcgctgacgatgcagagttccgtgaccgtgcaagagggcatgtgtgtccatgtgcgctgctccttctcctacccagtggacagccagactgactctgacccagttcatggctactggttccgggcagggaatgatataagctggaaggctccagtggccacaaacaacccagcttgggcagtgcaggaggaaactcgggaccgattccacctccttggggacccacagaccaaaaattgcaccctgagcatcagagatgccagaatgagtgatgcggggagatacttctttcgtatggagaaaggaaatataaaatggaattataaatatgaccagctctctgtgaacgtgacagaccctcctcagaacttgactgtgactgtcttccaaggagaaggcacagcatccacagctctggggaacagctcatctctttcagtcctagagggccagtctctgcgcttggtctgtgctgttgacagcaatccccctgccaggctgagctggacctggaggagtctgaccctgtacccctcacagccctcaaaccctctggtactggagctgcaagtgcacctgggggatgaaggggaattcacctgtcgagctcagaactctctgggttcccagcacgtttccctgaacctctccctgcaacaggagtacacaggcaaaatgaggcctgtatcaggagtgttgctgggggcggtcgggggagctggagccacagccctggtcttcctctccttctgtgtcatcttcattgtagtgaggtcctgcaggaagaaatcggcaaggccagcagcggacgtgggagacataggcatgaaggatgcaaacaccatcaggggctcagcctctcagggtaacctgactgagtcctgggcagatgataacccccgacaccatggcctggctgcccactcctcaggggaggaaagagagatccagtatgcacccctcagctttcataagggggagcctcaggacctatcaggacaagaagccaccaacaatgagtactcagagatcaagatccccaagtaagaaaatgcagaggctcgggcttgtttgagggttcacgacccctccagcaaaggagtctgaggctgattccagtagaattagcagccctcaatgctgtgcaacaagacatcagaacttattcctcttgtctaactgaaaatgcatgcctgatgaccaaactctccctttccccatccaatcggtccacactccccgccctggcctctggtacccaccattctcctctgtacttctctaaggatgactactttagattccgaatatagtgagattgtaacgtg

SEQ ID NO: 191947 - DNA, 1125 bp, Artificial Sequence
  derived and/or modified sequence
atgctgctgctgctgctgctgcccctgctgtggggcagagagagagtggagggccagaagagcaacagaaaggactacagcctgaccatgcagagcagcgtgaccgtgcaggagggcatgtgcgtgcacgtgagatgcagcttcagctaccccgtggacagccagaccgacagcgaccccgtgcacggctactggttcagagccggcaacgacatcagctggaaggcccccgtggccaccaacaaccccgcctgggccgtgcaggaggagaccagagacagattccacctgctgggcgacccccagaccaagaactgcaccctgagcatcagagacgccagaatgagcgacgccggcagatacttcttcagaatggagaagggcaacatcaagtggaactacaagtacgaccagctgagcgtgaacgtgaccgaccccccccagaacctgaccgtgaccgtgttccagggcgagggcaccgccagcaccgccctgggcaacagcagcagcctgagcgtgctggagggccagagcctgagactggtgtgcgccgtggacagcaacccccccgccagactgagctggacctggagaagcctgaccctgtaccccagccagcccagcaaccccctggtgctggagctgcaggtgcacctgggcgacgagggcgagttcacctgcagagcccagaacagcctgggcagccagcacgtgagcctgaacctgagcctgcagcaggagtacaccggcaagatgagacccgtgagcggcgtgctgctgggcgccgtgggcggcgccggcgccaccgccctggtgttcctgagcttctgcgtgatcttcatcgtggtgagaagctgcagaaagaagagcgccagacccgccgccgacgtgggcgacatcggcatgaaggacgccaacaccatcagaggcagcgccagccagggcaacctgaccgagagctgggccgacgacaaccccagacaccacggcctggccgcccacagcagcggcgaggagagagagatccagtacgcccccctgagcttccacaagggcgagccccaggacctgagcggccaggaggccaccaacaacgagtacagcgagatcaagatccccaagtag

SEQ ID NO: 191948 - protein, 273 aa, Artificial Sequence
  derived and/or modified sequence
MEANMPKRKEPGRSLRIKVISMGNAEVGKSCIIKRYCEKRFVSKYLATIGIDYGVTKVHVRDREIKVNIFDMAGHPFFYEVRNEFYKDTQGVILVYDVGQKDSFDALDAWLAEMKQELGPHGNMENIIFVVCANKIDCTKHRCVDESEGRLWAESKGFLYFETSAQTGEGINEMFQTFYISIVDLCENGGKRPTTNSSASFTKEQADAIRRIRNSKDSWDMLGVKPGASRDEVNKAYRKLAVLLHPDKCVAPGSEDAFKAVVNARTALLKNIK

SEQ ID NO: 191949 - protein, 202 aa, Artificial Sequence
  derived and/or modified sequence
MAGHPFFYEVRNEFYKDTQGVILVYDVGQKDSFDALDAWLAEMKQELGPHGNMENIIFVVCANKIDCTKHRCVDESEGRLWAESKGFLYFETSAQTGEGINEMFQTFYISIVDLCENGGKRPTTNSSASFTKEQADAIRRIRNSKDSWDMLGVKPGASRDEVNKAYRKLAVLLHPDKCVAPGSEDAFKAVVNARTALLKNIK

SEQ ID NO: 191950 - DNA, 822 bp, Artificial Sequence
  derived and/or modified sequence
atggaggcgaacatgcccaagcggaaggaaccgggaagaagcttgagaataaaagtcatcagcatgggcaacgctgaagtgggcaagtcttgtattataaaacgctattgcgaaaaacgatttgttagcaaatatctagcaactattggaatcgattacggcgtgactaaggtacacgtgagagacagggagattaaggtgaacatctttgacatggcaggtcatccttttttctacgaggtgcgtaacgaattctacaaagacacccagggagtcatattggtatatgatgtggggcagaaggacagtttcgacgcactcgacgcatggctcgccgagatgaaacaagaactcggcccacacgggaacatggaaaacattatttttgtagtgtgcgccaataaaattgattgtaccaagcatcggtgcgttgatgagagcgaaggaaggctgtgggctgaaagtaaggggtttctgtatttcgagacttctgcccagaccggcgagggtatcaatgaaatgttccagaccttttacataagcattgtcgacctatgcgagaacggaggcaagcgccctacaacgaacagcagtgcctcgtttacgaaagaacaggctgacgccatccgccggattaggaactccaaagatagctgggatatgttgggcgtgaaaccgggggcctcacgcgacgaggtcaacaaggcttatcggaagctggctgtgctactccatcccgataaatgtgtggctcctggatctgaggacgccttcaaggctgtcgtgaacgcccgaacagccttgctgaaaaatattaagtag

SEQ ID NO: 191951 - DNA, 609 bp, Artificial Sequence
  derived and/or modified sequence
atggccggccatccgttcttttacgaagtgagaaacgaattttataaagacactcaaggtgtgatcctcgtttatgacgtaggtcagaaggatagttttgacgccctcgacgcctggttggccgagatgaaacaggagttgggacctcacgggaacatggaaaatatcatctttgtcgtctgcgcaaacaagatagactgcactaagcacaggtgcgtggacgagagtgaagggaggctgtgggctgagtctaaagggttcttgtacttcgagacaagcgctcagaccggggagggcatcaacgagatgtttcaaactttttacatctctatcgtcgacctgtgcgaaaacggcggcaagagaccaacaacgaacagctctgcgtcttttactaaggagcaagccgacgcaataaggagaatacggaacagtaaggactcctgggacatgctcggggtgaagccgggcgcctctcgcgacgaggtaaataaggcttataggaagttggctgtgttactccaccccgacaagtgcgttgcacctggcagtgaagacgcctttaaggctgttgtgaacgcccgaactgcccttttgaagaatattaaatag

SEQ ID NO: 191952 - DNA, 822 bp, Artificial Sequence
  derived and/or modified sequence
atggaggccaacatgcccaagaggaaggagcccggccgcagcctgcgcatcaaggtgatctccatgggaaatgctgaggtgggcaagagctgcatcatcaagcgctactgtgagaagagatttgtgtccaagtacctggccaccatcggcattgattatggagtgaccaaggtgcacgtgcgggaccgggagatcaaggtgaacatctttgacatggccggccaccccttcttctatgaggtgagaaatgagttctacaaggacacccagggcgtcatcctggtgtatgatgtgggccagaaggacagctttgatgccctggatgcctggctggccgagatgaagcaggagctgggcccccacggcaacatggagaacatcatctttgtggtgtgtgccaacaagattgactgcaccaagcaccgctgtgtggatgaaagtgagggccgcctgtgggccgagagcaagggcttcctgtactttgagaccagcgcccagacaggagagggcatcaatgagatgttccagaccttctacatcagcatcgtggacctgtgtgaaaatggaggcaagaggcccaccaccaacagcagcgccagcttcaccaaggagcaggctgatgccatccgccgcatccggaacagcaaggacagctgggacatgctgggcgtgaagccaggggccagcagagatgaggtgaacaaggcctacaggaagctggccgtgctgctgcacccagacaagtgtgtggcccctggctctgaagatgccttcaaggctgtggtgaatgccaggacagccctgctgaagaacatcaagtag

SEQ ID NO: 191953 - DNA, 609 bp, Artificial Sequence
  derived and/or modified sequence
atggccggccaccccttcttctatgaggtgagaaatgagttctacaaggacacccagggcgtcatcctggtgtatgatgtgggccagaaggacagctttgatgccctggatgcctggctggccgagatgaagcaggagctgggcccccacggcaacatggagaacatcatctttgtggtgtgtgccaacaagattgactgcaccaagcaccgctgtgtggatgagagcgagggccgcctgtgggccgagagcaagggcttcctgtactttgagaccagcgcccagacaggagagggcatcaatgagatgttccagaccttctacatcagcatcgtggacctgtgtgaaaatggaggcaagaggcccaccaccaacagcagcgccagcttcaccaaggagcaggctgatgccatccgccgcatccggaacagcaaggacagctgggacatgctgggcgtgaagccaggggccagcagagatgaggtgaacaaggcctacaggaagctggccgtgctgctgcacccagacaagtgtgtggcccctggctctgaagatgccttcaaggctgtggtgaatgccaggacagccctgctgaagaacatcaagtag

SEQ ID NO: 191954 - DNA, 822 bp, Artificial Sequence
  derived and/or modified sequence
atggaggccaacatgcccaagcggaaggagcccggccggagcctgcgtatcaaagtgatctctatggggaacgccgaggtggggaagtcctgtatcatcaagcggtactgcgagaagagatttgtgtctaagtacctggccactatcggaattgattacggtgttaccaaggtgcacgttagggaccgggagattaaggtgaacatcttcgacatggcaggccaccccttcttctacgaggtgagaaatgaattctacaaagatactcagggcgtgatccttgtttatgatgtaggacagaaagattcatttgatgctcttgacgcttggctggccgaaatgaagcaggagcttggccctcatgggaacatggagaacatcattttcgtggtgtgtgccaacaaaatagattgtaccaagcaccgatgcgtcgatgaatccgaggggcggctctgggctgaatctaaggggtttctctattttgaaacctcggcacaaaccggcgaagggattaatgagatgttccagaccttctatatctcaatcgtggatctgtgtgaaaatggcggtaaacgccccaccaccaattcctcagcgtctttcaccaaggaacaggctgacgctatcagaaggattagaaacagtaaagacagctgggatatgctcggggtgaagccgggagccagccgagacgaggtcaataaggcctataggaagttagcagttctgctccaccccgacaaatgcgtggctcccggctctgaagacgcgttcaaggccgtcgtcaatgctaggactgcactgctaaagaatataaagtag

SEQ ID NO: 191955 - DNA, 609 bp, Artificial Sequence
  derived and/or modified sequence
atggccggccaccccttcttctacgaggtgcggaacgagttctacaaggacacccaaggagtcatactggtgtatgatgtgggacagaaggactcattcgatgccctggacgcatggctcgctgaaatgaaacaggagctcggacctcatggcaacatggagaacattatcttcgtggtgtgcgcaaataagattgactgcaccaaacaccggtgcgtagacgaatccgaggggaggctctgggcagaaagcaaggggtttctatactttgagacttctgctcaaactggagagggcataaacgaaatgttccagacattctatatctccatcgtcgatttgtgtgagaatggagggaagcgacccaccacaaattcctctgcttcattcaccaaggaacaggcagacgccatccggcgcataagaaactcgaaggactcttgggacatgttaggagtcaagcccggggcgtccagggacgaggtaaacaaggcctacaggaagttagcagtcttgctgcatcccgacaagtgtgtagcgcccggaagcgaagacgcatttaaagctgtagtaaacgccaggaccgccctgctcaagaatattaaatag

SEQ ID NO: 191956 - DNA, 822 bp, Artificial Sequence
  derived and/or modified sequence
atggaagccaacatgccaaaacggaaggaacctggcagatctcttcgcattaaggtaatctcaatgggaaacgctgaagtcggcaagtcatgcataataaagcggtactgcgagaaacggttcgtgagtaaataccttgccaccatcggcatagattacggggtgacgaaagtccatgtgcgggaccgagagatcaaggtaaacatttttgacatggccggacaccctttcttctacgaggtccggaatgaattttacaaggacacgcagggagtgatcttagtttacgatgtgggtcaaaaagattcctttgacgccctggatgcttggctggccgagatgaaacaggaattggggccacatgggaacatggaaaatattatcttcgtggtgtgtgcgaacaaaatagactgcactaaacacagatgcgtagacgaaagtgaaggcaggctctgggccgagagtaaaggatttctatactttgaaaccagcgctcagaccggagaaggtattaacgaaatgtttcagaccttctatatcagtatcgtggacctttgcgaaaatggtggaaagcggccaacgaccaatagctccgcctccttcaccaaggagcaggctgacgccattcgcagaatccgcaatagcaaggatagctgggacatgctcggggtcaaaccaggtgctagtcgtgatgaggtgaataaagcctataggaaacttgccgtgttactccaccccgataagtgtgttgctcctggcagtgaggacgcctttaaagcggtcgtgaacgcccgtaccgccctgttgaaaaatataaaatag

SEQ ID NO: 191957 - DNA, 609 bp, Artificial Sequence
  derived and/or modified sequence
atggcgggtcacccattcttttacgaagtcagaaatgaattctataaagacacccaaggcgtgatactcgtgtatgatgtaggccaaaaggatagttttgacgcactggacgcctggcttgccgagatgaagcaagagctgggtccccatgggaacatggaaaatattatatttgtggtttgcgctaataaaatcgactgtactaagcacaggtgcgtggacgaatctgaaggccgtctgtgggcagagagcaagggcttcctctacttcgagacgtcagcccagactggtgagggaattaacgagatgttccagaccttctatattagcatcgtggacctttgtgagaatggagggaaacggccaacaactaactcaagcgccagcttcactaaggagcaagccgacgcgatacgcagaataaggaatagcaaggactcctgggatatgttgggagtcaagcctggagcctcgcgcgatgaggtgaataaggcctaccgtaagttggccgtgctcctgcacccagacaaatgtgtcgcacccggtagcgaggacgcgttcaaagccgtggtgaatgccaggacagccttactcaaaaacattaagtag

SEQ ID NO: 191958 - DNA, 822 bp, Artificial Sequence
  derived and/or modified sequence
atggaggccaacatgcccaagagaaaggagcccggcagaagcctgagaatcaaggtgatcagcatgggcaacgccgaggtgggcaagagctgcatcatcaagagatactgcgagaagagattcgtgagcaagtacctggccaccatcggcatcgactacggcgtgaccaaggtgcacgtgagagacagagagatcaaggtgaacatcttcgacatggccggccaccccttcttctacgaggtgagaaacgagttctacaaggacacccagggcgtgatcctggtgtacgacgtgggccagaaggacagcttcgacgccctggacgcctggctggccgagatgaagcaggagctgggcccccacggcaacatggagaacatcatcttcgtggtgtgcgccaacaagatcgactgcaccaagcacagatgcgtggacgagagcgagggcagactgtgggccgagagcaagggcttcctgtacttcgagaccagcgcccagaccggcgagggcatcaacgagatgttccagaccttctacatcagcatcgtggacctgtgcgagaacggcggcaagagacccaccaccaacagcagcgccagcttcaccaaggagcaggccgacgccatcagaagaatcagaaacagcaaggacagctgggacatgctgggcgtgaagcccggcgccagcagagacgaggtgaacaaggcctacagaaagctggccgtgctgctgcaccccgacaagtgcgtggcccccggcagcgaggacgccttcaaggccgtggtgaacgccagaaccgccctgctgaagaacatcaagtag

SEQ ID NO: 191959 - DNA, 609 bp, Artificial Sequence
  derived and/or modified sequence
atggccggccaccccttcttctacgaggtgagaaacgagttctacaaggacacccagggcgtgatcctggtgtacgacgtgggccagaaggacagcttcgacgccctggacgcctggctggccgagatgaagcaggagctgggcccccacggcaacatggagaacatcatcttcgtggtgtgcgccaacaagatcgactgcaccaagcacagatgcgtggacgagagcgagggcagactgtgggccgagagcaagggcttcctgtacttcgagaccagcgcccagaccggcgagggcatcaacgagatgttccagaccttctacatcagcatcgtggacctgtgcgagaacggcggcaagagacccaccaccaacagcagcgccagcttcaccaaggagcaggccgacgccatcagaagaatcagaaacagcaaggacagctgggacatgctgggcgtgaagcccggcgccagcagagacgaggtgaacaaggcctacagaaagctggccgtgctgctgcaccccgacaagtgcgtggcccccggcagcgaggacgccttcaaggccgtggtgaacgccagaaccgccctgctgaagaacatcaagtag

SEQ ID NO: 191960 - DNA, 4992 bp, Artificial Sequence
  derived and/or modified sequence
gtctccctcccccggctccccacgctcccaaccgcccgcgcctgctgccaggcagcggcggggatggcgagcagcggaggcgaggcggtgacgagagcagcggctccgccattggacgaggaggcctgagggacgggccagcggtgcacaagaagagaccgaggcgggtggccccgagagagccagggccatggaggccaacatgccgaagcggaaggagcccggcaggtctctccgcatcaaagtcatctccatgggcaacgccgaagtggggaaaagctgtattataaagcgatactgtgagaaaagattcgtgtctaaatacctggcaacaattggaattgactatggagtcacaaaggtacacgtcagagacagagaaatcaaagttaacatctttgatatggctggacatcccttcttctatgaggttcgaaatgagttttacaaggacacacagggtgtgatactggtctatgatgttgggcagaaagactcctttgacgcccttgatgcgtggctggcagaaatgaagcaagagcttggacctcatggaaacatggaaaatattatatttgtagtttgtgccaacaagattgattgtaccaaacatcgctgtgtagatgaaagtgaaggacgtctttgggctgaaagcaaagggttcctgtactttgaaacttcagcacaaactggagaaggcattaatgagatgttccagaccttttatatatccatagttgatttatgtgaaaatggcgggaaacgccctaccaccaatagcagtgctagtttcaccaaagaacaagcagatgccattcgcagaattcgaaatagtaaagacagttgggacatgctgggagtcaaacctggggcctcaagggatgaagtcaataaagcgtatcggaaacttgctgtgcttcttcaccctgacaaatgtgtagcacctggcagtgaagatgccttcaaagcagttgtgaatgctcggacagccctcctgaaaaacatcaagtagaaagtacagaaaaaagccacatgtgggactcaaatgcaaacagactttccctagaggtgaaataaccaacgtggagttttccttcccagaatctcactgctcttttcattcatgtgttgtcatttgtatatcagtaattcaggtacccatttcatagacattttactgagaaatgacctgcatttgtatgaagtgaactgagcgtcacaccctgtacttcatttcatatttctagataattctgaatttttttctcattcgtcagctctgtaattatagtatcacttagacatttcacttggggaaatccacaaggttcctggaggagggaagagaggacaagaggaccctttcactttttcttttttacggaattcatcatcagagaagaaaataacaaaaatggaagcaaacaacatcagaacccctgtaagtttggtgtgaccttacagacaagttgctgcttttacaatgagttccttaggtggtattttaacccatcgatctataatgatgactcttggcagccctttgggagtttgtaaaatgaggtgatacagttctgaattgagcattcctttatgatattcactctgttcctcttctgcagccaccagtgggagagacaagccagtcctaagagaaaaggtggtggcagccacaaattctaggtacactggctgctgcctatcctgtccctggatctgaggcctttcccttgccatagaaatggttgctggtagcagtagagagcactgtgcacctgggaatgaggaatcaggccccaagacagaagtacttggaggagccagctgcagtagtatccgcctgtagtcccagctactcaggaggctgagacaggaggattgcttaagcccaggagctcaagtcccacctgggcaacatagtaagatcttgtctcttaaagaaaaaaaaaaaaggtacttagaggtcgcacttaaagattatgcacatcagcagaggaaaggccagccaagcttggggcaagcttgatgcagtaggagagactccttatgaggcttagcccttgtcttactgccagcctttgccacaggcaggtgagaaaggcagggccactcctcagcaaagttggcctcttctacacttcctcaccagtgttgtttcttccttttttcccctcttccccttcccgtcttgtgttttttctgaaccccacatctgccatcatttctctcctctagagtccctggcttctggccactgcctcctccctcttctaagccttggcctgaatctggttgatcagaggcaagtgtggatcctttgggtggcagtcaggggagatctcagggcctctgttgggaggaatctctgtaattcctgcttgggctccaaatttctgaagagtaatatttttaaactatagcttacaaaatacattctctgaccacagtctcctccttgatatacaagggatggatgaagttcatgtattaggactggcactccttacggtgcttatagaactagtctcaccacttgactcattacgtcgtcattcttgttacatcactcatacttttagctgcaaccacactaattcacatttttatatactttcaattagctgtactaattggggcttgaaagtatataaaatcttcctgtcctgtgaattttaaaaagctatcccatatcgattgccaaagagcatctaccttacctcctaagaagaaaagccactttcttccaatccaagcccactgcagccttgtggattttccacacagcagcttttcactgtatgcctgtacttgggctgcactgagcttgtcttcaggaaaccagagcgttgctttatcatcgcacttttcatcttggtaatatcaaaacaactttttaaatgaactgattgatatatgttatttcttgcgaggttttcctctggcctttaactggcttctgaggctacagaactccaacccagagttcttcgggacctaaattttgcttaaggaaggcctttatcatgctgaaagcactcagacatgtctgtcctcacagcagaatgtagaagtcatatgaatgagggatcgtgcacggtagcgtcagcccgaattgacacgacaactctgaatgtgtggccctctatgaaagctggtgccagttttcatcactgttattaaatactagattgggaacctcattcagccgtattgcacagatgagcaattacagcagagaaaattcattagtgctcccactcatatccttatgtgtgagttggtgaaatttagcctgagcttgattcttaggtcttgagactcagtttccaacaccttcattattaatgttaagaatggccatataccacttcatttacgtaaaaggaataaaataagcaagttaagcttcagggtcctagaatttttctgatttctataatccttcagcagaatattaagaaataaagcatgatctgcaatggaaaggtttttttggcactaacttcatgcagaatttcacagacatctatgcattaatttaaattcttggtgcaaatgtgtgctttgtagttcaaccttattaaaaattcttcagccagttaggatttcaaaatacattagtgagagtaacagctagcagaataattacaatggctaaaacgtttttatagagaatcttgtttttcaaaaaagaataaaaagtttgaatagctattattaaagaaaagccatgtcttcaacatctgagtcaccaagaagtaacactttttaaacttgttagaaatccctggaggcatttcaaattcatcttctaacctacctaagcactttaaaatacagcctccttctgttcctctgttccccttcatgcctccttttgaattgatatctcagctgtcaatatttctttgacttcagcattgttattttatttctctatatcaatgtgtccttagttttcttagcctgttaatttaaaaatccagacttgggggtcattgtgttgctacccaagagaaaatgctacagttttatagattgcacatcattctttaaggcatacttttacctcaggaaacttactctagtatgttctcatatattgaattctcaactaagtaactatttctttatacctataaactagtacctaattcactgttagttaaatgagctatagataaggcagctaaatttctgaaagatagccagagtaagtaagcagccactgcaagctctgaatcagttttttaaaaaaaagaaaaaaaaaaaaaaggagctgtgccccattgaacaatgacaacatcacaaggggaagggagggattttgccaaaagttagaaaggtggagctgtaagccatgtgcttgttgcctttgacagtgacagtgcgcgtcttacaactaattccactaggcatgggaatgtcacctcctttgccactgtaccccatcaagcttactctgaatcaaaggttttgtaaaacttttgaaaatgaacttagctgcaaaatatagctaaccactttccattgcaagctttgcaaagtgaagagaggttcgtacttctcataattggtatttagcacaattgtaagatacagttttactgtttgtacatcgtttttttccattaaacttttctagagaagacaaaagcttacactggtgacatggataagtgagatggtgtctaacgagcagtgcaatattaggcggtgcaatagaggccctgttggcaagatgagttttgctggagagctggacagtgttggttagcttcctgcattgattgcccctgggcgttcttcccccttaactgtgaaagcagagtctataaatgaactctttgctcttacaaggtaatttacatattttctttctgttgaaataactgaaaatgttaaatctaccagtttatgtcttgtaaacagagtgtcatatgtatttaagttgtgtatttttataaagtaaagccaagtatcaaacaccgg

SEQ ID NO: 191961 - DNA, 1415 bp, Artificial Sequence
  derived and/or modified sequence
gtcactcttccggagatggtgtctggggtggcctctaagccttgaatgtacccccaaaagaagctgtattataaagcgatactgtgagaaaagattcgtgtctaaatacctggcaacaattggaattgactatggagtcacaaaggtacacgtcagagacagagaaatcaaagttaacatctttgatatggctggacatcccttcttctatgaggttcgaaatgagttttacaaggacacacagggtgtgatactggtctatgatgttgggcagaaagactcctttgacgcccttgatgcgtggctggcagaaatgaagcaagagcttggacctcatggaaacatggaaaatattatatttgtagtttgtgccaacaagattgattgtaccaaacatcgctgtgtagatgaaagtgaaggacgtctttgggctgaaagcaaagggttcctgtactttgaaacttcagcacaaactggagaaggcattaatgagatgttccagaccttttatatatccatagttgatttatgtgaaaatggcgggaaacgccctaccaccaatagcagtgctagtttcaccaaagaacaagcagatgccattcgcagaattcgaaatagtaaagacagttgggacatgctgggagtcaaacctggggcctcaagggatgaagtcaataaagcgtatcggaaacttgctgtgcttcttcaccctgacaaatgtgtagcacctggcagtgaagatgccttcaaagcagttgtgaatgctcggacagccctcctgaaaaacatcaagtagaaagtacagaaaaaagccacatgtgggactcaaatgcaaacagactttccctagaggtgaaataaccaacgtggagttttccttcccagaatctcactgctcttttcattcatgtgttgtcatttgtatatcagtaattcaggtacccatttcatagacattttactgagaaatgacctgcatttgtatgaagtgaactgagcgtcacaccctgtacttcatttcatatttctagataattctgaatttttttctcattcgtcagctctgtaattatagtatcacttagacatttcacttggggaaatccacaaggttcctggaggagggaagagaggacaagaggaccctttcactttttcttttttacggaattcatcatcagagaagaaaataacaaaaatggaagcaaacaacatcagaacccctgtaagtttggtgtgaccttacagacaagttgctgcttttacaatgagttccttaggtggtattttaacccatcgatctataatgatgactcttggcagccctttgggagtttgtaaaatgaggtgatacagttctgaattgagcattcctttatgatattcactctgttcctcttctgcagccaccagtg

SEQ ID NO: 191962 - protein, 327 aa, Artificial Sequence
  derived and/or modified sequence
MEFKLEAHRIVSISLGKIYNSRVQRGGIKLHKNLLVSLVLRSARQVYLSDPCPGLYLAGPAGTPAPPPQQQPGEPAAGPPAGWGEPPPPAARASWPETEPQPERSSVSDAPRVGDEVPVATVTGVGDVFQGGEADATEAAWSRVEGPRQAAAREAEGTAGGWGVFPEVSRAARRPCGCPLGGEDPPGTPAATPRAACCCAPQPAEDEPPAPPAVCPRKRCAAGVGGGPAGCPAPGSTPLKKPRRNLEQPPSGGEDDDAEEMETGNVANLISIFGSSFSGLLRKSPGGGREEEEGEESGPEAAEPGQICCDKPVLRDMNPWSTAIVAF

SEQ ID NO: 191963 - protein, 139 aa, Artificial Sequence
  derived and/or modified sequence
MEFKLEAHRIVSISLGKIYNSRVQRGGIKLHKNLLVSLVLRSARQVYLSDPCPGLYLAGPAGTPAPPPQQQPGEPAAGPPAGWGEPPPPAARASWPETEPQPERSSVSDAPRVGDEVPVATVTGVGDVFQGRSAAISRC

SEQ ID NO: 191964 - DNA, 522 bp, Artificial Sequence
  derived and/or modified sequence
atgatggcccagctgttcctgctgcaggccaatgctgtgctgcccctgagccatgagatcaaggtgaagaggcagatccggctgcctgcccccctgtacccacctgagagaaatgacagccgctccttccagatcccccaggacctgcgggagaagggctgggaggagggccagcagcactttgctgggaaggccgcagatgccttccctgcccctgtgcagctggagggcctggaggccggccagaccaccctggccagccctgaggtgggcccctggaggcccaagaggctgtctggagtgtgcctgctgagcgccctgctgcctgacccctgcaagaccaacggcaccttcctgctgcagaagcaccacctgcccagcctgctggccgtcatcctcttccctgtgatcatcctgaccggggccagctttgcccacctgtttgtggccctgtttgtgagccacctgctgctgaagctgcccctgggcgccggcatgaggatgcagagagatgccaggtag

SEQ ID NO: 191965 - DNA, 561 bp, Artificial Sequence
  derived and/or modified sequence
atgtggttggtggagtgcacaggtagagacctgaccggcctgtcatgcttactgtcaatggataggcagccccgcaggcggcagcacgtagcagggtgtagagatgtccctccccctcttccccaaggaagctggggtcagacatcccccaggcactcaattttgtgcagcaagtccggctgcgatctactgggaggcggggagtacaacggcgagacttcgggcgaagaattcctcgcccctgcctggacatgtcgagcccagcaggcagccacatggttgtctgtccagcaaacttcccataaggccctgggacccgccgggggggctgcgatgtcatccaagttgagccctgaggaacagtttctatcgaggatacattttctgcgtacattcatgtgctctgtcgccggtgccgaactgcctggtatacctcaggcaacagaaaatggcgaaggatgtaggccagccagagacccagccagctctccttcctccctgagcatggcctccgtatatacacaatgcagcagcgcacaacttgtgtcagccctatcctag

SEQ ID NO: 191966 - DNA, 561 bp, Artificial Sequence
  derived and/or modified sequence
atgtggctggtggagtgcaccggccgggacctgaccggcctgagctgtctgctgtccatggatcgtcaacctcgtagaagacaacacgttgccggctgtcgagacgtacctcctccacttcctcaaggtagctggggacaaacaagtcctaggcattctatcctgtgcagtaaaagcggctgcgatctgctgggaggaggcgaatacaatggcgaaacgtcaggagaggaatttctggcccctgcgtggacatgtagggcccagcaagccgcaacgtggctgtccgtgcagcagacctctcacaaagctctgggcccagccggaggagcggctatgtcctctaagctctcacctgaggaacagtttctgagtagaattcactttttgcgcacattcatgtgtagtgtcgcaggggcggagttaccgggcatcccgcaggcgacagagaacggtgagggctgtcgccccgcaagagaccccgcctctagcccttcatccctgagcatggcctctgtttatacacagtgcagcagtgcccagcttgtaagtgcgctgtcttag

SEQ ID NO: 191967 - DNA, 561 bp, Artificial Sequence
  derived and/or modified sequence
atgtggcttgtcgagtgtacaggcagggatctcactggcctttcttgcctcttatctatggatcgccaacccaggcgcaggcagcacgttgcaggatgtagagatgtgcccccacccctacctcagggatcttggggccaaacttcccctcgtcacagcatcctatgtagtaagtcaggttgtgatctgcttggcggaggggagtataatggggagaccagcggggaagagtttctcgcacctgcttggacatgcagagcgcagcaggctgcaacatggctgtccgtgcagcagacgtcacacaaagcgctgggtcctgcgggtggcgctgcaatgagttccaaattatcccctgaagagcagttcttaagcaggatccattttctgagaacctttatgtgcagcgtggcaggagccgagctacccggaatcccgcaggccacagagaatggcgagggatgccggccagccagagacccagccagctctccatcatcgctgagcatggccagcgtgtatacacagtgctctagtgctcaactggtctcagctttatcatag

SEQ ID NO: 191968 - DNA, 984 bp, Artificial Sequence
  derived and/or modified sequence
atggaattcaagctggaagcccaccgaatcgttagtatcagtttaggaaagatctacaattcgcgcgtccagaggggagggattaagcttcacaaaaacctgctggtatcactggtactaagaagtgccaggcaggtgtacttgtcagacccatgccccggactgtacctggccgggcccgctggcactcctgctccaccaccacagcagcaacctggggaaccagccgcaggacctcctgccggctggggtgaaccgccccccccggccgcaagagccagctggccagagaccgaaccccagcctgagagatccagcgtcagcgatgccccgcgcgtgggggacgaggtgcctgtggctaccgtgaccggcgtgggtgacgtgtttcagggcggagaagcagatgcaaccgaagctgcttggagtagagttgaaggtcccagacaggcggcggctcgagaggccgaggggaccgccggcggatggggtgttttccctgaagtttccagagcggcacggcgaccctgtggctgccctctgggaggcgaggatcctcctggaaccccggcagccacgccaagagctgcgtgctgttgcgcgccccagccagctgaggatgagccgcccgctccccctgctgtgtgccctaggaaacggtgcgcggccggagtgggcgggggacccgctggctgtccagcccccggtagtacacctttaaagaagcctcgacgaaacctcgaacagccaccttccggaggggaggacgatgatgcagaggagatggaaacaggaaatgtggccaacctgatatcgatttttggatctagctttagtggcttgcttcgcaagtcccctggcggaggacgcgaggaggaagagggagaggagtccggtcctgaggccgctgaacctgggcagatctgctgcgataaaccggttctgcgcgacatgaatccgtggagtactgctatagttgctttctag

SEQ ID NO: 191969 - DNA, 420 bp, Artificial Sequence
  derived and/or modified sequence
atggagtttaagctggaagctcatcgtatcgttagcattagcctgggtaaaatctacaattccagggtccaacgcggaggcataaaactgcataaaaacctgttggtcagtttagtattgagaagcgcacggcaagtctatttgagcgatccatgtccaggactctatctggcaggcccagcaggcacccctgccccccccccacagcagcagcccggtgaacccgccgccggcccacctgctggctggggtgagcctcctcccccagcggccagggctagctggcccgaaaccgagccccagcccgaaaggtcttctgtgtccgatgcgccgagggtcggggatgaggtgcccgtggccaccgtcaccggggtgggagacgtctttcaggggagatcggctgctatttccagatgctag

SEQ ID NO: 191970 - DNA, 2340 bp, Artificial Sequence
  derived and/or modified sequence
gcggccgcaagccgtcgccccctttaagagcctgctccgcgggactaacgttcgaacgggccctggcgcccctcctcgggctccgattggccgtgcgcggcgcacgagggcgcgccggccagccccggaacggttggcggcccttcgtgattggcggtcgagaagcctatataaggcgcggggcagccaggctgccctgtttagcgaccggacccgaaacggggaagttgtcttgtttggagaggttagtagagcagcgcgcgcgtcaccagagtcgtttctcttcggagtcttaggtgatcgagggtgtgcccagggggcggacttgtttgcgcctcccgttccctcccaatttccaaacgtgtcaccccggcgccgacggccctgtgcaggggaagcagatggagttcaagctggaggctcatcgcatcgtcagcatctctctgggcaagatctacaactcgcgggtccagcgcggcggcatcaagctgcataagaacctcctggtctcgctggtgctgcgcagcgcccgccaagtctacctgagcgacccgtgccccggcctctacctggccggtcccgctgggaccccggcgccgccaccgcagcagcagcccggggagccggcggccgggccacccgccggctggggagagccgcccccgcccgccgctcgtgcctcttggccggagaccgagccgcagccggagcgctcctccgtctcagacgcgccgcgggtaggggacgaggtgccggtggccacggtgactggagtcggggacgtttttcagggcggagaggcggacgcgacggaagctgcctggagccgcgtggaggggccgcgccaggcggcggccagagaagccgagggtaccgccggaggctggggcgtcttccccgaggtatctcgtgccgcgcgccgcccctgcggctgccccctaggcggggaggacccgccgggtacaccggccgcgaccccccgcgctgcctgctgctgcgcgccgcaaccagcggaggacgagccccccgcgccgcccgcggtgtgccccaggaagcgctgcgcggcgggggtgggcggcggcccagcgggctgcccggcgcccggctcgaccccgctcaagaagccccgccggaacttagagcagccgccgagtggaggagaggacgacgacgcggaggagatggagaccgggaacgtggctaacctcatcagcatcttcggttccagtttctcgggactcctacggaaaagccccgggggcggcagagaggaagaggagggagaggagagcggtccggaagccgccgagcccgggcagatctgctgcgataagccggtgctgagagacatgaacccctggagcacagccatcgtggccttctgagcccttggcccccctgcggggaggaggtggagcagcgggcgtccccgaagtgagggccaggcccttcccggctgcgaggacgcccagagaccgcgggcgctgagcgcgttgggcagactggttgcctctgggcatcgcaaactgcccccgggcgcatctggcttatctggagacctgggagcttgaggctcattggaagaggacgatcgttaacttttgtgtttgtgtatgtctgtgtatgtaagtttgtcttgtggcattaagactattttgctcttctggaatgcaccactccttccccagggtttaagagattgggggcagacagggactttcctctgccggctgcgtggagaaggaagcggctaaaaggtttgggccggggagttccccattcgttctccggggagggagggactttacacctacccctcaccggaaagctagacccgcttcagggccaggagtggcgtttccgcacaggatttcctaagacgagagggatttagccaagagcacagacttggattccttctgtccctccccacctttctctcccaatgaagaaacgtttatatcctgtgattactctaggaaaggggcgtattaacggtcctttgcttccccgcaggggagaaaaagcttgacgaacttcacagaagagttcaagcttggaaataatggagtttatagagaaaagatatatttttaaaagctctaggtcagaagtactacacagtgcttttaaaaagtgtttaatgagagtttacagacagaagcccgaagtggaaagaccttatggttttgtagatatggtgactccagtctttgttgtataaaggttgggggagctgataaggtttttgtacagtattttctccttcgttgtattgatttttgtataaaaatgtaacttctacgtgtctaacacgtattaaatattttgaagcaacgt

SEQ ID NO: 191971 - DNA, 966 bp, Artificial Sequence
  derived and/or modified sequence
gtttagcgaccggacccgaaacggggaagttgtcttgtttggagaggttagtagagcagcgcgcgcgtcaccagagtcgtttctcttcggagtcttaggtgatcgagggtgtgcccagggggcggacttgtttgcgcctcccgttccctcccaatttccaaacgtgtcaccccggcgccgacggccctgtgcaggggaagcagatggagttcaagctggaggctcatcgcatcgtcagcatctctctgggcaagatctacaactcgcgggtccagcgcggcggcatcaagctgcataagaacctcctggtctcgctggtgctgcgcagcgcccgccaagtctacctgagcgacccgtgccccggcctctacctggccggtcccgctgggaccccggcgccgccaccgcagcagcagcccggggagccggcggccgggccacccgccggctggggagagccgcccccgcccgccgctcgtgcctcttggccggagaccgagccgcagccggagcgctcctccgtctcagacgcgccgcgggtaggggacgaggtgccggtggccacggtgactggagtcggggacgtttttcagggcagatctgctgcgataagccggtgctgagagacatgaacccctggagcacagccatcgtggccttctgagcccttggcccccctgcggggaggaggtggagcagcgggcgtccccgaagtgagggccaggcccttcccggctgcgaggacgcccagagaccgcgggcgctgagcgcgttgggcagactggttgcctctgggcatcgcaaactgcccccgggcgcatctggcttatctggagacctgggagcttgaggctcattggaagaggacgatcgttaacttttgtgtttgtgtatgtctgtgtatgtaagtttgtcttgtggcattaagactattttgctcttctggaatgcaccactccttcccca

SEQ ID NO: 191972 - DNA, 984 bp, Artificial Sequence
  derived and/or modified sequence
atggagttcaagctggaggcccaccgcatcgtgtccatcagcctgggcaagatctacaacagccgggtgcagaggggcggcatcaagctgcacaagaacctgctggtgtccctggtgctgcggagcgcccggcaggtgtacctgagtgacccctgccccggcctgtacctggccggccctgctggcaccccagcccccccaccccagcagcagcccggggagcctgctgctggccccccagctggctggggcgagcccccacctcctgctgcccgggcctcctggccagagacagagccccagcctgagaggagctctgtgtctgatgccccccgggtgggagatgaggtgcctgtggccaccgtgactggagtgggagatgtgttccagggcggggaggctgatgccacagaagctgcctggagccgggtggagggcccccggcaggccgccgcccgggaggccgagggcacagctgggggctggggcgtcttccctgaggtgtccagagctgcccggcggccctgtggctgccccctgggcggagaagatcctcctggcaccccagctgccacccccagggctgcctgctgctgtgccccccagcctgcagaagatgagcccccagcccctcctgctgtgtgccccaggaagagatgtgccgccggcgtgggcggcggccctgctggctgcccagcccctggcagcacccccctgaagaagcccaggaggaacctggagcagcccccatctggaggagaagatgatgatgctgaggagatggagactggaaatgtggccaacctgatcagcatcttcggcagcagcttcagcggcctgctgaggaagagccctgggggcggccgggaggaggaggagggggaggagagcggccctgaggccgctgagcccggccagatctgctgtgacaagcctgtgctgcgggacatgaacccctggagcacagccatcgtggccttctag

SEQ ID NO: 191973 - DNA, 420 bp, Artificial Sequence
  derived and/or modified sequence
atggagttcaagctggaggcccaccgcatcgtgtccatcagcctgggcaagatctacaacagccgggtgcagaggggcggcatcaagctgcacaagaacctgctggtgtccctggtgctgcggagcgcccggcaggtgtacctgagtgacccctgccccggcctgtacctggccggccctgctggcaccccagcccccccaccccagcagcagcccggggagcctgctgctggccccccagctggctggggcgagcccccacctcctgctgcccgggcctcctggccagagacagagccccagcctgagaggagctctgtgtctgatgccccccgggtgggagatgaggtgcctgtggccaccgtgactggagtgggagatgtgttccagggccgctctgctgccatcagccgctgctag

SEQ ID NO: 191974 - DNA, 984 bp, Artificial Sequence
  derived and/or modified sequence
atggagttcaagctggaggcccaccggatcgtgagcatcagcctgggaaaaatctacaacagtagggtgcagagggggggaatcaaattgcacaagaatttgctggtaagtctggtcctccgtagcgctcgacaagtgtacttgtctgatccttgtccaggactgtacttggccggccctgctggtactcccgcccctccgccgcagcagcaaccaggcgaaccggcggccggaccccctgccgggtggggcgaacctccacccccagctgctcgcgcttcctggcctgaaactgaaccgcagcctgagaggagttccgtgagtgatgccccccgcgttggagacgaggtacccgtcgcgaccgtcaccggagtaggggacgttttccaagggggcgaggcagatgccaccgaggcggcttggtcccgggtcgaaggacccagacaagccgcagccagggaagcagagggcacagccgggggatggggcgtgttcccggaggtcagcagggctgcccgccggccttgtggctgtccactcggaggagaagacccccctggaacaccagctgctacacctagagccgcatgctgttgcgcacctcagcctgctgaggacgaaccaccagctccccctgctgtgtgtccacgaaagcgctgcgccgccggcgtagggggtggccctgcggggtgcccggccccaggaagtactcctctcaaaaagccacgaagaaatctagaacagcctccttcaggaggggaggatgatgacgcagaagagatggaaacagggaatgtggcaaaccttattagcattttcggttcgagcttctctggcctgctgcggaagagcccaggcggcgggcgggaggaagaagaaggcgaagagtcgggccctgaggccgccgagcctgggcagatctgctgtgataagccagtgttacgggatatgaacccctggtccacagcaattgtagctttctag

SEQ ID NO: 191975 - DNA, 420 bp, Artificial Sequence
  derived and/or modified sequence
atggagttcaagctggaggcccaccggatcgtgagcatcagcctgggcaagatctataactcaagagtccagcggggcggcatcaagctacacaagaacctgctggtcagtctggttttaaggtcggccaggcaggtctatctaagcgatccctgtcctggattatatctcgcgggaccagctggcactcctgcgcctccaccccaacagcagccaggggagcctgccgctggccctcctgcagggtggggggaaccgccgccacctgccgcccgggcttcctggccagaaacagagccccagccagaacgatcatcagtgtccgatgctccaagagtgggagacgaggtccctgtggcaactgttacaggagttggagacgtgtttcagggccgcagcgcagctatctctcgatgctag

SEQ ID NO: 191976 - DNA, 984 bp, Artificial Sequence
  derived and/or modified sequence
atggagtttaaattggaggctcataggattgtatccatctcattaggaaaaatatacaactcaagagtgcagcgaggtggaatcaaactgcacaagaatctgctggtctctctcgttctgagatcggcgaggcaagtgtacctttcagacccatgtcccggtctgtacctggctggccctgctggcacgcctgctcccccaccgcagcagcagcccggtgaacctgctgccggtcccccagctgggtggggggaaccgcctcctcctgccgctagagcaagctggccagaaaccgagccccaacctgaaagatcttctgtatcagatgctccacgggtgggcgacgaagtgccagttgctaccgtgaccggagtaggtgacgttttccagggtggcgaggccgacgcgaccgaggcggcttggtccagagtggaggggccacgacaggccgcagctagggaggcagagggaactgccggagggtggggtgtgttccccgaggtgtcaagagcagcgcgaaggccttgtggctgccctctggggggtgaggacccccctggaaccccggctgccacgccacgagcggcttgctgttgtgccccacagcccgctgaggacgagccgcctgcccctccagccgtttgccccaggaagcggtgtgcagccggtgtgggtgggggacctgcgggatgccctgctccaggctctaccccattgaaaaagccccgacgaaatctggagcagcccccatccggcggtgaagacgatgatgcggaggagatggagactggcaatgtggccaatcttatcagcatttttggtagcagttttagtggtctgctccggaagtcccctggcggaggtagggaggaggaggagggcgaggagtccggcccagaagccgctgagcccggtcagatctgctgtgataagcctgtgctcagggacatgaatccctggagcactgccatcgtggctttttag

SEQ ID NO: 191977 - DNA, 420 bp, Artificial Sequence
  derived and/or modified sequence
atggaattcaagttggaagcccataggatagtctcaatttcactgggcaagatatataattccagagtgcagaggggagggatcaagctgcacaaaaatctgcttgtgagtttagtgttacggtctgcaaggcaggtctatctgagcgatccttgtccgggtctatatcttgcagggcctgcaggtacacctgccccacctccccagcaacaaccgggagagcccgctgctgggccacccgcaggctggggtgaaccgcctccgccagcagcccgtgcttcgtggcccgaaaccgagccacaaccggagaggagcagcgtgtctgatgcccctcgcgttggcgacgaggtccccgtggctactgtcactggagtgggggacgtcttccagggtcgatctgctgccattagtagatgttag

SEQ ID NO: 191978 - DNA, 984 bp, Artificial Sequence
  derived and/or modified sequence
atggagttcaagctggaggcccacagaatcgtgagcatcagcctgggcaagatctacaacagcagagtgcagagaggcggcatcaagctgcacaagaacctgctggtgagcctggtgctgagaagcgccagacaggtgtacctgagcgacccctgccccggcctgtacctggccggccccgccggcacccccgccccccccccccagcagcagcccggcgagcccgccgccggcccccccgccggctggggcgagccccccccccccgccgccagagccagctggcccgagaccgagccccagcccgagagaagcagcgtgagcgacgcccccagagtgggcgacgaggtgcccgtggccaccgtgaccggcgtgggcgacgtgttccagggcggcgaggccgacgccaccgaggccgcctggagcagagtggagggccccagacaggccgccgccagagaggccgagggcaccgccggcggctggggcgtgttccccgaggtgagcagagccgccagaagaccctgcggctgccccctgggcggcgaggacccccccggcacccccgccgccacccccagagccgcctgctgctgcgccccccagcccgccgaggacgagccccccgccccccccgccgtgtgccccagaaagagatgcgccgccggcgtgggcggcggccccgccggctgccccgcccccggcagcacccccctgaagaagcccagaagaaacctggagcagccccccagcggcggcgaggacgacgacgccgaggagatggagaccggcaacgtggccaacctgatcagcatcttcggcagcagcttcagcggcctgctgagaaagagccccggcggcggcagagaggaggaggagggcgaggagagcggccccgaggccgccgagcccggccagatctgctgcgacaagcccgtgctgagagacatgaacccctggagcaccgccatcgtggccttctag

SEQ ID NO: 191979 - DNA, 420 bp, Artificial Sequence
  derived and/or modified sequence
atggagttcaagctggaggcccacagaatcgtgagcatcagcctgggcaagatctacaacagcagagtgcagagaggcggcatcaagctgcacaagaacctgctggtgagcctggtgctgagaagcgccagacaggtgtacctgagcgacccctgccccggcctgtacctggccggccccgccggcacccccgccccccccccccagcagcagcccggcgagcccgccgccggcccccccgccggctggggcgagccccccccccccgccgccagagccagctggcccgagaccgagccccagcccgagagaagcagcgtgagcgacgcccccagagtgggcgacgaggtgcccgtggccaccgtgaccggcgtgggcgacgtgttccagggcagaagcgccgccatcagcagatgctag

SEQ ID NO: 191980 - protein, 487 aa, Artificial Sequence
  derived and/or modified sequence
MPGPRVWGKYLWRSPHSKGCPGAMWWLLLWGVLQACPTRGSVLLAQELPQQLTSPGYPEPYGKGQESSTDIKAPEGFAVRLVFQDFDLEPSQDCAGDSVTISFVGSDPSQFCGQQGSPLGRPPGQREFVSSGRSLRLTFRTQPSSENKTAHLHKGFLALYQTVAVNYSQPISEASRGSEAINAPGDNPAKVQNHCQEPYYQAAAAGALTCATPGTWKDRQDGEEVLQCMPVCGRPVTPIAQNQTTLGSSRAKLGNFPWQAFTSIHGRGGGALLGDRWILTAAHTIYPKDSVSLRKNQSVNVFLGHTAIDEMLKLGNHPVHRVVVHPDYRQNESHNFSGDIALLELQHSIPLGPNVLPVCLPDNETLYRSGLLGYVSGFGMEMGWLTTELKYSRLPVAPREACNAWLQKRQRPEVFSDNMFCVGDETQRHSVCQGDSGSVYVVWDNHAHHWVATGIVSWGIGCGEGYDFYTKVLSYVDWIKGVMNGKN

SEQ ID NO: 191981 - protein, 438 aa, Artificial Sequence
  derived and/or modified sequence
MPGPRVWGKYLWRSPHSKGCPGAMWWLLLWGVLQACPTRGSVLLAQELPQQLTSPGYPEPYGKGQESSTDIKAPEGFAVRLVFQDFDLEPSQDCAGDSVTISFVGSDPSQFCGQQGSPLGRPPGQREFVSSGRSLRLTFRTQPSSENKTAHLHKGFLALYQTVAVNYSQPISEASRGSEAINAPGDNPAKVQNHCQEPYYQAAAAGALTCATPGTWKDRQDGEEVLQCMPVCGRPVTPIAQNQTTLGSSRAKLGNFPWQAFTSIHGRGGGALLGDRWILTAAHTIYPKDSVSLRKNQSVNVFLGHTAIDEMLKLGNHPVHRVVVHPDYRQNESHNFSGDIALLELQHSIPLGPNVLPVCLPDNETLYRSGLLGYVSGFGMEMGWLTTELKYSRLPVAPREACNAWLQKRQRPEVFSDNMFCVGDEAGESLEPGRRRLQ

SEQ ID NO: 191982 - DNA, 1464 bp, Artificial Sequence
  derived and/or modified sequence
atgccgggtcctcgagtgtggggcaagtatctctggcgcagcccccactccaaggggtgcccgggtgctatgtggtggttactgttgtggggtgtgctccaagcctgcccaacccgtgggtcagtattgctggcccaagagctgccccagcagctaacctcgcccggctatcccgagccctacggaaagggacaagaatcttccacagatatcaaggctccggagggttttgccgtccggctggtgttccaggactttgatctggaacccagtcaggactgcgcgggagactccgtgacgatctccttcgtcgggtcagatcccagccaattttgtggccagcagggctcgcccttggggaggcctccaggccagcgcgaattcgttagtagtggacgctctctccgcctgacctttcgtacgcaaccatcatctgagaataagaccgctcacctacacaagggctttcttgctctgtaccagactgtagctgttaattatagtcagccaatttccgaggccagccgcggttcagaggctatcaatgctccaggagacaaccctgctaaagtccagaatcactgtcaggaaccatattaccaggctgccgccgctggcgccctgacctgcgctactcccggtacgtggaaagaccggcaggatggggaggaagtcctgcagtgtatgcctgtgtgcggccgccccgtgactcccatcgcacaaaaccagaccacactgggtagcagccgggccaagctcggcaactttccatggcaggctttcactagcatccacggacgcggagggggcgccctgctaggagacaggtggatcctgacagcagcccatacgatttatccaaaagactcagtcagcctgagaaagaatcagtcagtgaatgtgttcttgggccacacggccatcgatgagatgctgaaactcgggaaccaccccgtgcaccgggtggtggttcatccagactataggcagaacgaatcacacaattttagtggggatattgcgctgctggagctgcagcactccattcccttgggcccaaatgtactgccagtgtgtctaccagacaacgaaacactctacaggtccgggctgctaggatacgttagtggcttcggcatggagatgggctggcttaccaccgagctcaagtatagcagactccccgtggctcctagagaagcgtgtaatgcctggcttcagaaaaggcaaagacctgaagtgtttagcgacaacatgttctgcgtgggagacgagacacagcgccattcagtatgccagggtgactcaggatccgtctatgtcgtgtgggacaatcatgcacaccactgggtcgcaacgggaattgtatcatggggcatcggctgcggcgaggggtacgacttttacaccaaagtgctgtcgtacgttgactggattaagggggtaatgaatggtaagaattag

SEQ ID NO: 191983 - DNA, 1317 bp, Artificial Sequence
  derived and/or modified sequence
atgcctgggccccgggtatggggcaaatatctatggcggtccccacactcgaaggggtgccccggggctatgtggtggttattactgtggggagtgctacaggcgtgcccaaccagggggtcagtcctcctggcacaggagctccctcagcagctcacgtcccccggttatccagaaccctacgggaaaggtcaggagtcctctaccgatatcaaagcccccgaaggcttcgccgttagactcgtgttccaggatttcgatctggagccgtcccaggactgtgctggggattctgtcaccatttcttttgtaggttccgaccccagccagttttgtggtcagcaggggtccccacttgggaggccccctgggcagagagaattcgtcagttctggtaggtctctgcgtctaacgtttcgtacccagccttcatccgaaaataaaactgcccacctccacaaagggtttctcgcactttatcaaacagttgctgtcaactattcccagccaatttccgaggcttcccgtgggtcagaagctatcaatgcaccaggagacaatccggccaaggtccagaatcattgccaggagccctactaccaggccgcggctgctggagccctaacttgcgcgacacctggtacttggaaagataggcaggacggtgaggaggtactccagtgtatgcctgtctgtggacggcctgttactcccattgcccagaatcagaccactttaggctcaagcagggcaaagctgggcaatttcccatggcaggcctttacttcaatccacggcagggggggcggcgctctccttggggataggtggattctgaccgctgctcatacaatatatcctaaggattctgtgtctctgaggaagaaccaatcagtaaatgttttcctgggccatacagccatcgacgagatgctgaagctaggaaatcatcctgtgcatcgagtggtcgtgcaccccgattacagacagaatgagagccataactttagcggagacatagcgttgctagaacttcagcactcaatccctctgggccccaatgtcctcccagtttgcctccctgataacgagacactttatcggtccgggctattgggatatgtctctgggttcggcatggagatgggatggctgacgacggaattgaagtactccagactcccagtagcaccaagagaggcttgtaatgcttggctgcagaaaaggcaacgccccgaagttttttccgacaacatgttctgcgttggcgatgaagcgggggagagcctggaaccaggtcggaggcgtctacagtag

SEQ ID NO: 191984 - DNA, 1464 bp, Artificial Sequence
  derived and/or modified sequence
atgcctggcccccgggtgtggggcaagtacctgtggaggagcccccacagcaagggctgccctggggccatgtggtggctgctgctgtggggcgtgctgcaggcctgccccacccggggctctgtgctgctggcccaggagctgccccagcagctgaccagccctggctacccagagccctacggcaagggccaggagagcagcacagacatcaaggcccctgagggctttgctgtgcggctggtgttccaggactttgacctggagcccagccaggactgtgccggggacagcgtgaccatcagctttgtgggcagtgaccccagccagttctgtggccagcagggcagccccctgggccggcccccaggccagcgggagtttgtgagcagcggccgcagcctgcggctgaccttccgcacccagcccagcagcgagaacaagacagcccacctgcacaagggcttcctggccctgtaccagacagtggccgtgaactacagccagcccatcagcgaggccagccggggcagcgaggccatcaatgcccctggggacaacccagccaaggtgcagaaccactgccaggagccctactaccaggccgctgctgctggggccctgacctgtgccaccccaggcacctggaaggaccggcaggatggagaggaggtgctgcagtgcatgcctgtgtgtggccggcctgtgacccccatcgcccagaaccagaccaccctgggcagcagccgggccaagctgggcaacttcccctggcaggccttcaccagcatccacggccggggcggcggggccctgctgggggaccgctggatcctgacagctgcccacaccatctaccccaaggacagcgtgtccctgaggaagaaccagagcgtgaatgtgttcctgggccacacagccattgatgagatgctgaagctgggcaaccaccctgtgcaccgggtggtggtgcacccagactaccggcagaatgaaagccacaacttcagcggggacatcgccctgctggagctgcagcacagcatccccctgggccccaacgtgctgcctgtgtgcctgcctgacaatgagaccctgtacagaagtggcctgctgggctacgtgtctggcttcggcatggagatgggctggctgaccacagagctgaagtacagccggctgcctgtggccccccgggaggcctgcaatgcctggctgcagaagaggcagaggcctgaggtgttcagtgacaacatgttctgtgtgggagatgagacccagaggcacagcgtgtgccagggcgacagcggctctgtgtatgtggtgtgggacaaccacgcccaccactgggtggccactggaattgtgtcctggggcatcggctgtggggagggctatgacttctacaccaaggtgctgtcctatgtggactggatcaagggcgtgatgaatggcaagaactag

SEQ ID NO: 191985 - DNA, 1317 bp, Artificial Sequence
  derived and/or modified sequence
atgcctggcccccgggtgtggggcaagtacctgtggaggagcccccacagcaagggctgccctggggccatgtggtggctgctgctgtggggcgtgctgcaggcctgccccacccggggctctgtgctgctggcccaggagctgccccagcagctgaccagccctggctacccagagccctacggcaagggccaggagagcagcacagacatcaaggcccctgagggctttgctgtgcggctggtgttccaggactttgacctggagcccagccaggactgtgccggggacagcgtgaccatcagctttgtgggcagtgaccccagccagttctgtggccagcagggcagccccctgggccggcccccaggccagcgggagtttgtgagcagcggccgcagcctgcggctgaccttccgcacccagcccagcagcgagaacaagacagcccacctgcacaagggcttcctggccctgtaccagacagtggccgtgaactacagccagcccatcagcgaggccagccggggcagcgaggccatcaatgcccctggggacaacccagccaaggtgcagaaccactgccaggagccctactaccaggccgctgctgctggggccctgacctgtgccaccccaggcacctggaaggaccggcaggatggagaggaggtgctgcagtgcatgcctgtgtgtggccggcctgtgacccccatcgcccagaaccagaccaccctgggcagcagccgggccaagctgggcaacttcccctggcaggccttcaccagcatccacggccggggcggcggggccctgctgggggaccgctggatcctgacagctgcccacaccatctaccccaaggacagcgtgtccctgaggaagaaccagagcgtgaatgtgttcctgggccacacagccattgatgagatgctgaagctgggcaaccaccctgtgcaccgggtggtggtgcacccagactaccggcagaatgaaagccacaacttcagcggggacatcgccctgctggagctgcagcacagcatccccctgggccccaacgtgctgcctgtgtgcctgcctgacaatgagaccctgtacagaagtggcctgctgggctacgtgtctggcttcggcatggagatgggctggctgaccacagagctgaagtacagccggctgcctgtggccccccgggaggcctgcaatgcctggctgcagaagaggcagaggcctgaggtgttcagtgacaacatgttctgtgtgggagatgaggccggggagagcctggagcccggcagaagaaggctgcagtag

SEQ ID NO: 191986 - DNA, 1464 bp, Artificial Sequence
  derived and/or modified sequence
atgcccggcccccgggtgtggggcaagtacctgtggcggagcccccattctaaggggtgcccaggcgcgatgtggtggctgctgctgtggggcgtcctacaggcgtgcccgacaaggggaagtgtgttgctggctcaggagttgccccagcagctcacatccccgggttacccggaaccctatggcaagggtcaggagagctcaacggacataaaagctccagagggatttgccgttagactcgttttccaggatttcgatctcgagccttcccaggattgcgctggtgatagcgtcactatctccttcgtggggagtgaccccagccagttctgcggacaacaagggagcccgttgggacgcccccctgggcagcgcgaattcgtctctagtggacggtcccttagactgacattcaggacacaaccaagctccgaaaacaaaacggcgcatttacacaaaggctttctggccctctatcaaacagtggctgtgaactacagccaaccaatttctgaagcttctcggggtagcgaggccattaatgccccaggcgacaatcccgccaaagtgcagaatcactgccaggagccatactaccaggctgccgctgctggagcactgacttgcgccacccccggcacctggaaggaccgtcaggatggggaagaggtgctgcagtgtatgcctgtgtgcggccgtcctgtgactcccatcgctcaaaaccagaccacgttaggctcgagtcgtgcgaaactgggaaattttccttggcaggcttttacgagcatacatggtaggggaggaggggcactgttgggcgatagatggatcctgaccgcagcccatacaatttatcccaaagactccgtgagcctaaggaagaatcagagcgtcaatgtctttcttggacacactgcgattgacgagatgctcaaattggggaatcaccccgtgcatcgcgtggtcgtgcaccctgactacagacaaaatgagagccataacttcagcggagacatagcactgctggagctgcagcattccattcccttggggcctaacgtgctcccagtgtgtctcccggataatgagactctgtatagatcagggttgcttggttacgttagtgggtttggaatggagatggggtggctgacaactgaactgaagtactctcggctgccagtagccccaagggaagcgtgcaatgcatggttacagaagcgccagaggcccgaggtgttttccgataacatgttttgcgtgggggatgagacacagcggcattcagtatgccagggcgattctggatcagtctacgtcgtgtgggataaccacgcacaccactgggtagcgacagggatcgtgagctgggggatcgggtgtggagaaggatacgacttctatacaaaagtgctgagttatgtcgactggattaagggtgtgatgaatggcaaaaactag

SEQ ID NO: 191987 - DNA, 1317 bp, Artificial Sequence
  derived and/or modified sequence
atgcccggcccccgggtgtggggcaagtacctgtggcggagcccccacagcaaaggttgccccggtgctatgtggtggctgctgctctggggcgtcctccaagcatgccccacacgcggcagtgttctgctggctcaggagttgccacagcagcttacgagcccaggctatcctgaaccctacggcaagggtcaagaatcaagcactgacattaaggctcccgaagggttcgcagtcagactcgtgtttcaggatttcgacttggagcccagccaggattgtgccggtgatagtgttacgatctcttttgtagggagtgatcctagccagttttgcggccagcaaggcagcccattaggcaggccaccaggccagcgggagttcgtctcaagcggccgcagcctgcgcctgactttccggactcaacctagctctgaaaacaagaccgcgcatctgcacaaaggcttcctggccttgtatcagacagttgccgtgaactactcacagccaatctccgaggcgtcccggggctctgaagctattaacgctccaggcgacaaccccgcaaaggtccagaaccactgccaggagccctactaccaagctgccgcagccggggctctgacttgcgctactcctgggacatggaaggatagacaggacggggaagaggtgctccaatgcatgcctgtgtgtggacgccctgtcactccaattgcccagaatcagacgaccttgggcagtagtcgggctaagcttggtaatttcccttggcaagcattcacgagcatccacggtcggggaggcggcgcactcctgggcgaccgctggattctaaccgcagcccacacgatttatcctaaagacagcgtgagcctgagaaagaatcagtccgtaaatgtctttctagggcatacggctattgacgaaatgctgaaactgggaaaccacccagtgcatcgcgtggtggtccacccagactaccgccaaaatgagagccataatttctccggtgatatagccctgctggagctccaacacagcattcctctgggccccaacgtgttgcctgtgtgtctccctgataacgagaccctgtaccgcagtggtctactcgggtacgttagcgggttcgggatggagatggggtggctgacgacagaacttaaatattcgaggcttccagtggctccacgcgaagcctgcaatgcctggctccagaaacggcaaaggcccgaggtgttttccgacaacatgttctgcgtgggtgatgaggccggagagagtctggagcccggtaggaggcggcttcagtag

SEQ ID NO: 191988 - DNA, 1464 bp, Artificial Sequence
  derived and/or modified sequence
atgccaggcccaagggtttggggaaagtacttatggcgatctccccattctaagggatgtcccggtgccatgtggtggctgttactgtggggagtcctgcaggcctgccctacgagaggaagtgtccttcttgcacaagaactgccacagcagctcacttcgccaggatatcccgaaccctatgggaaaggccaggaatcgtccaccgacatcaaagccccagagggctttgccgtaaggctcgtcttccaggattttgacctggagccaagtcaggattgcgccggagacagcgtcactatctcttttgtggggagtgacccttctcaattctgtgggcaacaggggagccccctggggaggccaccagggcagcgcgaattcgtttcctccggtcggtccctgaggttgacattcagaactcagccatcttccgaaaataagacagcacacttgcataaaggatttttggctttgtaccagaccgtcgctgtgaactactcacagcccatttccgaagccagtaggggaagcgaggcaattaacgctccgggagacaatcctgctaaggtacagaatcactgtcaggagccttactaccaggctgctgcggcaggagcactcacctgtgcaacgcctggcacatggaaggacaggcaggacggtgaagaggtgctgcaatgcatgcctgtgtgcgggagaccagtgacccccattgcccaaaatcagactacccttggatcctccagggcaaaacttggaaactttccctggcaggcattcacctccatccacggccgaggcggtggggctctgttaggagatcggtggatcctgaccgccgctcatacaatataccctaaggacagcgtatctctgcggaagaatcagagcgtcaatgtcttcctcgggcacacagccatcgacgagatgttaaagctcggtaatcatccagtccatcgcgtggtggtacatccagattacagacagaacgaatcgcacaactttagtggagatattgctcttcttgagctccagcattcaataccgctggggccaaacgtcctgcccgtctgtcttcctgataatgaaacactctatagatcaggactgctcggctacgtctctggctttgggatggagatgggatggctcaccaccgagctgaaatatagcaggctgccagttgcaccgcgtgaggcatgtaacgcttggcttcagaagagacaaagaccggaagtgttttccgataatatgttctgcgtaggcgatgaaacgcagcgccattctgtttgccagggagactctggtagcgtatatgtcgtttgggacaaccacgcccatcactgggtggctaccggaattgtaagctggggcattggctgcggcgagggctatgatttttacactaaggtgctgagctacgtggactggataaagggcgtgatgaacgggaaaaactag

SEQ ID NO: 191989 - DNA, 1317 bp, Artificial Sequence
  derived and/or modified sequence
atgcccggtcccagggtttggggtaagtacctgtggaggtccccccacagcaaaggttgcccgggagccatgtggtggctcctgctatggggggttctgcaggcctgtcccacaaggggaagtgtactgcttgcccaggaactccctcagcagttgaccagtcccggttacccagaaccctacgggaaggggcaggagagctcaacagacattaaggctcccgaggggttcgcagtccggctggtgttccaggattttgacctggaaccttcccaggactgcgccggtgactccgtgacgatttcgtttgtggggtctgatccctcccagttttgcggacaacagggatccccactgggtaggccaccaggccaacgagaatttgtttcctcaggtcgctccctaaggctgaccttccgcactcaaccctcaagcgagaataaaacggcccacctgcacaagggattcctcgcgctgtatcagaccgtggctgtgaattattcacagcccattagcgaagctagtaggggctctgaagcaattaatgcccctggagacaatccggcaaaggttcaaaatcactgccaggagccatactaccaggcagccgcagcaggggcactgacctgcgccacaccaggaacatggaaagacaggcaggatggagaagaggtacttcagtgtatgccagtgtgcggcaggccagtgacaccaattgcccagaatcagactaccctggggtcctctagggccaagctcggcaacttcccctggcaagcatttacatccattcacgggcgtggcggtggcgctttgctgggagacaggtggattctcacagcagcccacacaatctatccaaaggactcagtgagcctgagaaagaatcagagcgtgaatgtctttctgggacacacggccatcgatgaaatgctgaagttaggaaaccatccggtgcatagggttgtggtgcacccagactatcggcagaacgagagccataacttttcaggcgacatagcactcctggaactgcagcatagcattcccctgggacctaacgtgctgccagtctgcctcccggataacgagaccctgtatagatcaggactactgggctacgtgagtggctttggaatggagatggggtggctgacgaccgaactcaagtacagtcgtctgcctgtggctcccagagaagcgtgcaacgcatggcttcagaagcgccagcgcccagaagttttctctgacaacatgttctgcgtgggggacgaagcgggtgagtcactggagcccggtaggaggcgtttgcagtag

SEQ ID NO: 191990 - DNA, 3394 bp, Artificial Sequence
  derived and/or modified sequence
atttccaggaacttcctcctcccccaccggccttcaccttttgttccctatcctgggccagttctctcgcaggtcccagatgtccagttccagatgcctggacccagagtgtgggggaaatatctctggagaagccctcactccaaaggctgtccaggcgcaatgtggtggctgcttctctggggagtcctccaggcttgcccaacccggggctccgtcctcttggcccaagagctaccccagcagctgacatcccccgggtacccagagccgtatggcaaaggccaagagagcagcacggacatcaaggctccagagggctttgctgtgaggctcgtcttccaggacttcgacctggagccgtcccaggactgtgcaggggactctgtcacaatctcattcgtcggttcggatccaagccagttctgtggtcagcaaggctcccctctgggcaggccccctggtcagagggagtttgtatcctcagggaggagtttgcggctgaccttccgcacacagccttcctcggagaacaagactgcccacctccacaagggcttcctggccctctaccaaaccgtggctgtgaactatagtcagcccatcagcgaggccagcaggggctctgaggccatcaacgcacctggagacaaccctgccaaggtccagaaccactgccaggagccctattatcaggccgcggcagcaggggcactcacctgtgcaaccccagggacctggaaagacagacaggatggggaggaggttcttcagtgtatgcctgtctgcggacggccagtcacccccattgcccagaatcagacgaccctcggttcttccagagccaagctgggcaacttcccctggcaagccttcaccagtatccacggccgtgggggcggggccctgctgggggacagatggatcctcactgctgcccacaccatctaccccaaggacagtgtttctctcaggaagaaccagagtgtgaatgtgttcttgggccacacagccatagatgagatgctgaaactggggaaccaccctgtccaccgtgtcgttgtgcaccccgactaccgtcagaatgagtcccataactttagcggggacatcgccctcctggagctgcagcacagcatccccctgggccccaacgtcctcccggtctgtctgcccgataatgagaccctctaccgcagcggcttgttgggctacgtcagtgggtttggcatggagatgggctggctaactactgagctgaagtactcgaggctgcctgtagctcccagggaggcctgcaacgcctggctccaaaagagacagagacccgaggtgttttctgacaatatgttctgtgttggggatgagacgcaaaggcacagtgtctgccagggggacagtggcagcgtctatgtggtatgggacaatcatgcccatcactgggtggccacgggcattgtgtcctggggcatagggtgtggcgaagggtatgacttctacaccaaggtgctcagctatgtggactggatcaagggagtgatgaatggcaagaattgaccctgggggcttgaacagggactgaccagcacagtggaggccccaggcaacagagggcctggagtgaggactgaacactggggtaggggttgggggtggggggttgggggaggcagggaaatcctattcacatcactgttgcaccaagccactgcaagagaaacccccacccggcaagcccgccccatcccagacaggaagcagagtcccacagaccgctcctcctcaccctctacctccctgtgctcatgcactaggccccgggaagcctgtacatctcaacaactttcgccttgaatgtccttagaaccgccttcccctacttcatctgttgacacagcttttatactcacctgtggaagagtcagctactcacccgctattagagtatggaggaaggggttttcattgcattgcatttctgaaacattcctaagaccctttagttgaccttcaaatattcaagctattctgcagctccaagatgcaattatagaaacagctccttttttattttatgtcctctatatgccaggtgcttcacctgttatttcacttaatcctcataccatatttgcaaaggatgtgttattatctatgtgtgacaaatgaggaaactgaggctcaggggataaagggacttgcccaagtcccacagctggtgtgtgactgcagagactgtgctcttcccagtgtgctgcaatacttctcaaccctcctctaacctgctgtgtcacccgctttccctcccagcccccacatccttaccattttccctccctgggaattcctgcttctgcgaaaatggtatcctctagctcacactttcctaatggccccatctcctgcagaagccaggtgagcccagcactggactgaagttcttgcagacaccccacctgtgcccctatcatcaggggaactgctccacctgagaggaccaactctttaatttttagtaaaacctggaggtgatgggccgggcgcagtggctcacgcctgtaatcccaacaccttaggagtccgaggtgggtggatcacgaggtcaggagatccagcccatcctggccaacatggtgaaaccccatctctactaaaaatacaaaaattagccgggcgtggtgacacgtgcctgtagtcccagctactcgggaggctgaggcaggagaatcacttgaacctgggaggcggaggttgcagtgagctaagatcacgccactgcactccagcctgcggacagaccaagacttcatcccccccaaaaaaaaaagattggaggtgatttacagtgaaagacacaaataaaatacaactgttcaatggaaatagaaaataaacaccataaaagagagaagagaggtaatttgttagcatcaagagtcaagttgctatatggtcaaaggttaaatttatctctaaaaaatggcaggattcaaagttgtacatacatgtgattacttctgttttttacacccacatacagtacaaaagattattaaaaatattcccaaaaggcaggtgcaatgatgcacacttatacccccagccactcaggaggctgatgcaagaggatcgcttgagcccaggagttgaagtccagcctaagcaacatagtgaaaccccatcgccaaaaatataataataattctctcaaaatactaaacagaggtggttttattgataagattttggctgtttggttttccactattctctattggctaaaatttgtttaatgagcatgaaatgtttttattttattttgcttatttttatgattgcaaaaaatgatatgagtttctccctgccaaggcaaaaaaatatatatatacctata

SEQ ID NO: 191991 - DNA, 1542 bp, Artificial Sequence
  derived and/or modified sequence
ctcctcccccaccggccttcaccttttgttccctatcctgggccagttctctcgcaggtcccagatgtccagttccagatgcctggacccagagtgtgggggaaatatctctggagaagccctcactccaaaggctgtccaggcgcaatgtggtggctgcttctctggggagtcctccaggcttgcccaacccggggctccgtcctcttggcccaagagctaccccagcagctgacatcccccgggtacccagagccgtatggcaaaggccaagagagcagcacggacatcaaggctccagagggctttgctgtgaggctcgtcttccaggacttcgacctggagccgtcccaggactgtgcaggggactctgtcacaatctcattcgtcggttcggatccaagccagttctgtggtcagcaaggctcccctctgggcaggccccctggtcagagggagtttgtatcctcagggaggagtttgcggctgaccttccgcacacagccttcctcggagaacaagactgcccacctccacaagggcttcctggccctctaccaaaccgtggctgtgaactatagtcagcccatcagcgaggccagcaggggctctgaggccatcaacgcacctggagacaaccctgccaaggtccagaaccactgccaggagccctattatcaggccgcggcagcaggggcactcacctgtgcaaccccagggacctggaaagacagacaggatggggaggaggttcttcagtgtatgcctgtctgcggacggccagtcacccccattgcccagaatcagacgaccctcggttcttccagagccaagctgggcaacttcccctggcaagccttcaccagtatccacggccgtgggggcggggccctgctgggggacagatggatcctcactgctgcccacaccatctaccccaaggacagtgtttctctcaggaagaaccagagtgtgaatgtgttcttgggccacacagccatagatgagatgctgaaactggggaaccaccctgtccaccgtgtcgttgtgcaccccgactaccgtcagaatgagtcccataactttagcggggacatcgccctcctggagctgcagcacagcatccccctgggccccaacgtcctcccggtctgtctgcccgataatgagaccctctaccgcagcggcttgttgggctacgtcagtgggtttggcatggagatgggctggctaactactgagctgaagtactcgaggctgcctgtagctcccagggaggcctgcaacgcctggctccaaaagagacagagacccgaggtgttttctgacaatatgttctgtgttggggatgaggcaggagaatcacttgaacctgggaggcggaggttgcagtgagctaagatcacgccactgcactccagcctgcggacagaccaagacttcatcccccccaaaaaaaaaagattggaggtgatttacagtgaaagacacaaataaaatacaactgttcaatggaaatagaaaataaacaccataaaagag

SEQ ID NO: 191992 - DNA, 1464 bp, Artificial Sequence
  derived and/or modified sequence
atgcccggccccagagtgtggggcaagtacctgtggagaagcccccacagcaagggctgccccggcgccatgtggtggctgctgctgtggggcgtgctgcaggcctgccccaccagaggcagcgtgctgctggcccaggagctgccccagcagctgaccagccccggctaccccgagccctacggcaagggccaggagagcagcaccgacatcaaggcccccgagggcttcgccgtgagactggtgttccaggacttcgacctggagcccagccaggactgcgccggcgacagcgtgaccatcagcttcgtgggcagcgaccccagccagttctgcggccagcagggcagccccctgggcagaccccccggccagagagagttcgtgagcagcggcagaagcctgagactgaccttcagaacccagcccagcagcgagaacaagaccgcccacctgcacaagggcttcctggccctgtaccagaccgtggccgtgaactacagccagcccatcagcgaggccagcagaggcagcgaggccatcaacgcccccggcgacaaccccgccaaggtgcagaaccactgccaggagccctactaccaggccgccgccgccggcgccctgacctgcgccacccccggcacctggaaggacagacaggacggcgaggaggtgctgcagtgcatgcccgtgtgcggcagacccgtgacccccatcgcccagaaccagaccaccctgggcagcagcagagccaagctgggcaacttcccctggcaggccttcaccagcatccacggcagaggcggcggcgccctgctgggcgacagatggatcctgaccgccgcccacaccatctaccccaaggacagcgtgagcctgagaaagaaccagagcgtgaacgtgttcctgggccacaccgccatcgacgagatgctgaagctgggcaaccaccccgtgcacagagtggtggtgcaccccgactacagacagaacgagagccacaacttcagcggcgacatcgccctgctggagctgcagcacagcatccccctgggccccaacgtgctgcccgtgtgcctgcccgacaacgagaccctgtacagaagcggcctgctgggctacgtgagcggcttcggcatggagatgggctggctgaccaccgagctgaagtacagcagactgcccgtggcccccagagaggcctgcaacgcctggctgcagaagagacagagacccgaggtgttcagcgacaacatgttctgcgtgggcgacgagacccagagacacagcgtgtgccagggcgacagcggcagcgtgtacgtggtgtgggacaaccacgcccaccactgggtggccaccggcatcgtgagctggggcatcggctgcggcgagggctacgacttctacaccaaggtgctgagctacgtggactggatcaagggcgtgatgaacggcaagaactag

SEQ ID NO: 191993 - DNA, 1317 bp, Artificial Sequence
  derived and/or modified sequence
atgcccggccccagagtgtggggcaagtacctgtggagaagcccccacagcaagggctgccccggcgccatgtggtggctgctgctgtggggcgtgctgcaggcctgccccaccagaggcagcgtgctgctggcccaggagctgccccagcagctgaccagccccggctaccccgagccctacggcaagggccaggagagcagcaccgacatcaaggcccccgagggcttcgccgtgagactggtgttccaggacttcgacctggagcccagccaggactgcgccggcgacagcgtgaccatcagcttcgtgggcagcgaccccagccagttctgcggccagcagggcagccccctgggcagaccccccggccagagagagttcgtgagcagcggcagaagcctgagactgaccttcagaacccagcccagcagcgagaacaagaccgcccacctgcacaagggcttcctggccctgtaccagaccgtggccgtgaactacagccagcccatcagcgaggccagcagaggcagcgaggccatcaacgcccccggcgacaaccccgccaaggtgcagaaccactgccaggagccctactaccaggccgccgccgccggcgccctgacctgcgccacccccggcacctggaaggacagacaggacggcgaggaggtgctgcagtgcatgcccgtgtgcggcagacccgtgacccccatcgcccagaaccagaccaccctgggcagcagcagagccaagctgggcaacttcccctggcaggccttcaccagcatccacggcagaggcggcggcgccctgctgggcgacagatggatcctgaccgccgcccacaccatctaccccaaggacagcgtgagcctgagaaagaaccagagcgtgaacgtgttcctgggccacaccgccatcgacgagatgctgaagctgggcaaccaccccgtgcacagagtggtggtgcaccccgactacagacagaacgagagccacaacttcagcggcgacatcgccctgctggagctgcagcacagcatccccctgggccccaacgtgctgcccgtgtgcctgcccgacaacgagaccctgtacagaagcggcctgctgggctacgtgagcggcttcggcatggagatgggctggctgaccaccgagctgaagtacagcagactgcccgtggcccccagagaggcctgcaacgcctggctgcagaagagacagagacccgaggtgttcagcgacaacatgttctgcgtgggcgacgaggccggcgagagcctggagcccggcagaagaagactgcagtag

SEQ ID NO: 191994 - DNA, 2826 bp, Artificial Sequence
  derived and/or modified sequence
atgtaccagggcgagttcggcctgaacatgaagctgggctacggcaagttcagctggcccaccggcgagagctaccacggccagttctacagagaccactgccacggcctgggcacctacatgtggcccgacggcagcagcttcaccggcaccttctacctgagccacagagagggctacggcaccatgtacatgaagaccagactgttccagggcctgtacaaggccgaccagagattcggccccggcgtggagacctaccccgacggcagccaggacgtgggcctgtggttcagagagcagctgatcaagctgtgcacccagatccccagcggcttcagcctgctgagataccccgagttcagcagcttcatcacccacagccccgccagaatcagcctgagcgaggaggagaagaccgagtggggcctgcaggagggccaggaccccttcttctacgactacaagagattcctgctgaacgacaacctgaccctgccccccgagatgtacgtgtacagcaccaacagcgaccacctgcccatgaccagcagcttcagaaaggagctggacgccagaatcttcctgaacgagatcccccccttcgtggaggacggcgagccctggttcatcatcaacgagacccccctgctggtgaagatccagaagcagacctacaagttcagaaacaagcccgcccacaccagctggaacatgggcgccatcctggagggcaagagaagcggcttcgccccctgcggccccaaggagcagctgagcatggagatgatcctgaaggccgaggagggcaaccacgagtggatctgcagaatcctgaaggacaacttcgccagcgccgacgtggccgacgccaagggctacaccgtgctggccgccgccgccacccactgccacaacgacatcgtgaacctgctgctggactgcggcgccgacgtgaacaagtgcagcgacgagggcctgaccgccctgagcatgtgcttcctgctgcactaccccgcccagagcttcaagcccaacgtggccgagagaaccatccccgagccccaggagccccccaagttccccgtggtgcccatcctgagcagcagcttcatggacaccaacctggagagcctgtactacgaggtgaacgtgcccagccagggcagctacgagctgagacccccccccgcccccctgctgctgcccagagtgagcggcagccacgagggcggccacttccaggacaccggccagtgcggcggcagcatcgaccacagaagcagcagcctgaagggcgacagccccctggtgaagggcagcctgggccacgtggagagcggcctggaggacgtgctgggcaacaccgacagaggcagcctgtgcagcgccgagaccaagttcgagagcaacgtgtgcgtgtgcgacttcagcatcgagctgagccaggccatgctggagagaagcgcccagagccacagcctgctgaagatggccagccccagcccctgcaccagcagcttcgacaagggcaccatgagaagaatggccctgagcatgatcgagagaagaaagagatggagaaccatcaagctgctgctgagaagaggcgccgaccccaacctgtgctgcgtgcccatgcaggtgctgttcctggccgtgaaggccggcgacgtggacggcgtgagactgctgctggagcacggcgccagaaccgacatctgcttccccccccagctgagcaccctgacccccctgcacatcgccgccgccctgcccggcgaggagggcgtgcagatcgtggagctgctgctgcacgccatcaccgacgtggacgccaaggccagcgacgaggacgacacctacaagcccggcaagctggacctgctgcccagcagcctgaagctgagcaacgagcccggccccccccaggcctactacagcaccgacaccgccctgcccgaggagggcggcagaaccgccctgcacatggcctgcgagagagaggacgacaacaagtgcgccagagacatcgtgagactgctgctgagccacggcgccaaccccaacctgctgtggagcggccacagccccctgagcctgagcatcgccagcggcaacgagctggtggtgaaggagctgctgacccagggcgccgaccccaacctgcccctgaccaagggcctgggcagcgccctgtgcgtggcctgcgacctgacctacgagcaccagagaaacatggacagcaagctggccctgatcgacagactgatcagccacggcgccgacatcctgaagcccgtgatgctgagacagggcgagaaggaggccgtgggcaccgccgtggactacggctacttcagattcttccaggacagaagaatcgccagatgccccttccacaccctgatgcccgccgagagagagaccttcctggccagaaagagactgctggagtacatgggcctgcagctgagacaggccgtgttcgccaaggagagccagtgggaccccacctggctgtacctgtgcaagagagccgagctgatccccagccacagaatgaagaagaagggccccagcctgcccagaggcctggacgtgaaggagcagggccagatccccttcttcaagttctgctaccagtgcggcagaagcatcggcgtgagactgctgccctgccccagatgctacggcatcctgacctgcagcaagtactgcaagaccaaggcctggaccgagttccacaagaaggactgcggcgacctggtggccatcgtgacccagctggagcaggtgagcagaagaagagaggagttccagtag

SEQ ID NO: 191995 - DNA, 2826 bp, Artificial Sequence
  derived and/or modified sequence
atgtatcaaggcgagtttggcctcaatatgaaactcggctacggcaaattcagttggcctactggcgagtcatatcatgggcagttttatagagaccattgccatgggctcggaacatacatgtggcctgacggttctagctttaccggcacattctatctctcacacagagaggggtacggaactatgtatatgaaaacccggctcttccagggcctgtataaggcggaccagagattcggccctggggtcgagacctaccctgacggctcccaagatgtcggtttgtggttccgagaacagttaatcaaactgtgtacacagatccctagcggcttctccctcctgcgttacccagaattctcttcctttattacccacagtcccgcgaggattagtctctctgaggaggaaaagacagagtggggcctccaggaaggccaggaccctttcttctacgattacaaacggttcttgcttaatgacaacctgactctgcccccagagatgtatgtgtacagtaccaactctgatcatctcccaatgacctccagctttcggaaagagttggatgctcgtatatttttaaacgaaatccctccattcgtcgaggacggggagccgtggttcattataaacgaaacacccctcctggtgaagatccagaagcaaacatataaatttcgtaataagcctgcccacacaagttggaacatgggcgctatcctggaaggcaaacgctccggcttcgccccgtgcggaccgaaggagcaactttctatggagatgatccttaaggcagaggaggggaaccacgagtggatctgtaggattctcaaggataacttcgcctctgctgacgttgcagatgccaaaggatacactgtgttagctgccgccgcaactcactgtcataatgatatcgtgaacttgttactggattgtggagccgatgttaacaagtgtagtgatgaaggcctgacagctctgtccatgtgtttcctgcttcactatcctgcccagtccttcaaaccaaatgtagcggagcggacaattccggaaccccaggagcccccaaagtttccagtggtgccaattctgtcatcatctttcatggacaccaacctggagtctctgtattatgaggtgaatgttccatctcaaggctcctacgaactgcgacccccacccgctcctctgttgttacccagggtgtctggcagtcatgagggaggacacttccaggatacaggccagtgtggcgggtccatcgaccatagatcatcttcccttaaaggagactctccactggttaaaggcagtctgggacacgttgaaagtggtctggaggatgtcctgggcaacactgatcgaggtagtctgtgttccgcagaaacgaagttcgaaagcaatgtttgtgtgtgcgatttctcgattgagttgtcacaggccatgctggagcgctccgcccagagccattcactgctgaaaatggcatctccttcaccctgcaccagctcctttgacaagggcaccatgcgccggatggcattaagtatgatagaacgtcgcaagaggtggcgcactattaaacttctactgcgaagaggggcagaccccaacctttgttgtgttccgatgcaagttctttttctagctgtgaaggcaggggacgttgacggagtccgattactcttagagcatggagcgcggacagatatctgcttcccacctcagctgtcaactcttacgcccttgcatatcgctgcggccctcccgggtgaagagggagttcagattgtcgaacttctgctccacgcaattaccgatgtggacgcaaaggcgtctgacgaggatgatacgtacaagccaggtaaactggacctgcttcccagcagccttaagttgagcaatgaaccagggcccccccaggcctattattccaccgacactgctctgcctgaggagggaggacgaacagcgctccacatggcttgtgaacgcgaagacgataacaaatgtgctcgtgacattgtcagactcctgctgtctcacggggccaatcctaacctgctgtggtcaggacatagcccattgagcctgagtatcgcctctggcaatgaactcgtagtgaaagaactgctaacgcaaggtgctgaccccaatttgcccctcaccaaagggctcgggtccgctctttgtgtagcttgcgatttaacctatgagcaccagcgcaatatggatagtaaactcgcgttgatcgaccgcttaatcagtcatggtgccgatatccttaagccagttatgcttcgccagggagagaaagaggcagttggcactgccgtggactacggctatttccgtttttttcaggaccgacgcatagcgcgctgtcctttccacactcttatgcctgccgagcgggaaacattcctagcaagaaagaggctgttggagtatatgggactgcagctgcgccaagcggtcttcgctaaggagagccagtgggatccaacatggctgtacttatgcaaacgcgccgaactcattccttctcacagaatgaaaaagaaaggccctagcctgcccaggggactagatgttaaggagcagggtcagattcccttttttaagttctgctaccagtgtggacggtcaataggcgtgaggctcttgccatgtcccagatgttacggcatcttgacatgctccaagtactgcaagaccaaggcctggacagagtttcataagaaagactgcggcgacctcgttgcgatcgtcacacagctggagcaggtgagcaggcgccgcgaagaatttcaatag

SEQ ID NO: 191996 - DNA, 2826 bp, Artificial Sequence
  derived and/or modified sequence
atgtatcaaggtgagtttggactaaatatgaaactcgggtacggtaagtttagctggcctacaggcgaaagctatcacggacagttttatagagatcactgtcacggactaggaacatatatgtggcccgacggatcctcttttacggggacgttctatttgagtcatagggaagggtatggaacaatgtatatgaagacccgcctgtttcagggcctttacaaggccgaccaacggttcggacctggcgtggagacctatcctgacggatcccaggacgtagggctttggttccgggagcaacttattaaactctgtacccagatcccgagcggatttagcctcttgagatatccagaattcagctctttcattacacacagccccgctaggatcagcctgtccgaggaagaaaaaacggaatgggggctacaggagggtcaggatccattcttttacgattacaagcgctttctactgaacgacaatttgacacttcctccagagatgtacgtatacagcacaaattccgaccacctgcccatgaccagctcatttcgtaaagagctggacgccagaatattcctaaatgaaattccaccatttgtcgaagacggcgagccttggtttattatcaacgagaccccactccttgttaagatccagaaacagacttataaatttagaaataagcccgctcatacatcatggaatatgggggctattctggaaggcaaacggtcgggcttcgccccctgcggtccaaaggaacaactatcaatggagatgatcctgaaggccgaggaggggaaccatgaatggatttgcagaatactcaaagacaactttgcatcagcggacgtggcagatgctaagggctacaccgtccttgctgccgccgccacccattgtcacaatgatatcgtgaatttattgcttgattgcggcgcagatgttaataagtgtagtgacgaaggactgacagccctgtcgatgtgcttcctgctgcactatccagcccagtcatttaaacctaatgttgcagaaagaacaatccctgaacctcaggagccccccaagttccctgtagtccctattctaagcagtagcttcatggacacaaacctagaatctctgtactacgaagtaaatgttcctagtcagggttcctacgaactcagaccgccccctgcccctttactgttgccaagggtgagcgggtcacacgagggggggcacttccaagacactggacagtgtggaggtagcatcgatcaccgctcttcgtcacttaaaggagattcccccctcgtaaaagggtctttagggcatgtcgaatccggcctggaggacgtattgggtaacaccgatagggggagcctatgcagcgccgagaccaagttcgagagcaatgtgtgcgtgtgcgatttcagcattgaactgtcccaggccatgctggaacgctccgcccaatcccactcactcctcaagatggcgtccccttctccatgcacaagctcctttgacaaaggcacaatgaggagaatggcattgagcatgattgagaggcgcaagcgctggcgcacaatcaaactgctgcttagacggggagcagatccaaacctgtgttgcgtgccgatgcaggttttgtttctggccgtcaaggctggcgacgtggacggggtgcgcctgctgctggagcacggagcacgtactgatatttgctttcctccccagctcagtactctgacccctcttcatattgccgcagccctgcctggggaggaaggggtgcagattgtggaactgctactccatgccattactgatgtggacgcaaaagcctcagatgaggacgatacctataaacccggcaagctcgacctcctgcccagctcattaaagttgtccaatgagccaggaccaccccaagcttattactccacagatacagccttgcccgaagagggtggccgcactgcactccatatggcttgcgaacgagaagacgataataaatgcgcccgggatattgtgaggctcctgctcagtcacggtgccaaccctaacctcttgtggagtggccactcccccctctcactcagtatcgccagtggtaacgagctagtggtgaaggaattgctcacgcagggtgccgacccgaacctgccgctgactaaaggcctgggaagtgccctgtgcgtggcctgcgacctgacatacgaacaccagagaaacatggactcaaaactggctcttatcgacaggctgatctcccatggcgctgatatcctgaagccggttatgttgcgtcaaggggaaaaggaggcagtggggacagccgtcgattacggatacttcagatttttccaggatcgccggattgctagatgtccattccataccctcatgcccgccgaaagggagactttcctcgcacggaagaggctgcttgagtacatggggcttcagttgcggcaggctgtgttcgctaaggaaagccagtgggatcctacatggctgtatctgtgtaaacgggcagagctgataccatcccatcggatgaaaaaaaagggaccctccttgcctagaggtttggatgttaaagaacaagggcagatccccttcttcaagttctgctaccagtgtgggcgatcgattggcgtgcgactgctgccatgccctagatgctatgggatattgacttgtagcaagtattgtaagacgaaggcatggaccgagtttcataagaaggattgcggtgatttggtggctattgttacgcagttggaacaggtgagtcgccgcagggaggaatttcagtag

SEQ ID NO: 191997 - DNA, 2826 bp, Artificial Sequence
  derived and/or modified sequence
atgtaccagggcgagtttggcctgaacatgaagctgggctacggcaagttctcctggcccactggagagagctaccacggccagttctacagagaccactgccacggcctgggcacctacatgtggccagatggcagcagcttcaccggcaccttctacctgagccaccgggagggctacggcaccatgtacatgaagaccaggctcttccagggcctgtacaaggctgaccagcgcttcggccctggggtggagacctacccagatggcagccaggatgtgggcctgtggttccgggagcagctgatcaagctgtgcacccagatccccagcggcttcagcctgctgcgctacccagagttcagcagcttcatcacccacagccctgcccgcatcagcctgtctgaggaggagaagacagagtggggcctgcaggagggccaggaccccttcttctatgactacaagcgcttcctgctgaatgacaacctgaccctgcccccagagatgtatgtgtacagcaccaacagcgaccacctgcccatgaccagcagcttcaggaaggagctggatgcccgcatcttcctgaatgagatccccccatttgtggaggatggagagccctggttcatcatcaatgagacccccctgctggtgaagatccagaagcagacctacaagttcaggaacaagccagcccacacctcctggaacatgggcgccatcctggagggcaagaggagcggctttgccccctgtggccccaaggagcagctgtccatggagatgatcctgaaggccgaggagggcaaccacgagtggatctgccgcatcctgaaggacaactttgccagcgcagatgtggctgatgccaagggctacacagtgctggccgccgccgccacccactgccacaatgacatcgtgaacctgctgctggactgtggggctgatgtgaacaagtgcagtgatgagggcctgacagccctgtccatgtgcttcctgctgcactacccagcccagagcttcaagcccaacgtggccgagaggaccatccctgagccccaggagccccccaagtttcctgtggtgcccatcctgagcagcagcttcatggacaccaacctggagagcctgtactatgaggtgaatgtgcccagccagggcagctatgagctgcggcccccaccagcccccctgctgctgccccgggtgtctggcagccatgaaggaggccacttccaggacaccggccagtgtggcggcagcattgaccacaggagcagcagcctgaagggggacagccccctggtgaagggcagcctgggccacgtggagagcggcctggaggatgtgctgggcaacacagaccggggcagcctgtgcagcgctgagaccaagtttgagagcaatgtgtgtgtgtgtgacttcagcattgagctgagccaggccatgctggagaggtctgcccagagccacagcctgctgaagatggccagccccagcccctgcaccagcagctttgacaagggcaccatgaggaggatggccctgtccatgattgaaagaaggaagcgctggaggaccatcaagctgctgctgcggagaggagctgaccccaacctgtgctgcgtgcccatgcaggtgctcttcctggccgtgaaggctggagatgtggatggagtgcggctgctgctggagcacggggccaggacagacatctgcttccccccccagctgagcaccctgacccccctgcacatcgccgccgccctgcctggagaggagggcgtgcagatcgtggagctgctgctgcacgccatcacagatgtggatgccaaggccagtgatgaagatgacacctacaagccaggcaagctggacctgctgcccagcagcctgaagctgagcaatgagcccggccccccccaggcctactacagcacagacacagccctgcctgaggagggcggccgcacagccctgcacatggcctgtgaaagagaagatgacaacaagtgtgcccgggacatcgtgcggctgctgctgagccatggagccaaccccaacctgctgtggagcggccacagccccctgagcctgagcatcgccagcggaaatgagctggtggtgaaggagctgctgacccagggcgctgaccccaacctgcccctgaccaagggcctgggcagcgccctgtgtgtggcctgtgacctgacctatgagcaccagaggaacatggacagcaagctggccctgattgacaggctcatcagccacggggctgacatcctgaagcctgtgatgctgcggcagggcgagaaggaggccgtgggcacagctgtggactatggctacttccgcttcttccaggacagaagaattgcccgctgccccttccacaccctgatgcctgctgagcgggagaccttcctggccaggaagaggctgctggagtacatgggcctgcagctgcggcaggccgtgtttgccaaggagagccagtgggaccccacctggctgtacctgtgcaagagagctgagctgatccccagccacaggatgaagaagaagggccccagcctgccccggggcctggatgtgaaggagcagggccagatccccttcttcaagttctgctaccagtgtggccgcagcattggagtgcggctgctgccctgcccccgctgctacggcatcctgacctgcagcaagtactgcaagaccaaggcctggacagagttccacaagaaggactgtggggacctggtggccatcgtgacccagctggagcaggtgtccagaagaagagaggagttccagtag

SEQ ID NO: 191998 - DNA, 2826 bp, Artificial Sequence
  derived and/or modified sequence
atgtaccagggcgagttcggcctgaacatgaagctgggctacggcaagttttcttggcctaccggagaaagttatcacgggcagttttaccgggaccactgtcacggactcgggacctatatgtggccggacggcagcagctttacagggaccttctatctgagtcacagagagggatacggcaccatgtacatgaagaccagactcttccagggattgtacaaggcagatcaacgcttcgggccgggcgtagaaacctacccagatggctcgcaggacgtgggattgtggtttcgggagcagttgattaagttatgcacacaaatcccatctggcttctccctgctgcgttaccctgagttcagcagcttcattactcatagcccagccagaatttctctttccgaggaggagaaaacggagtggggtctgcaggagggccaggacccatttttttacgactacaaacgcttcttactgaatgataatttaactttgccaccagaaatgtacgtatactcaaccaattcagatcacctgccaatgacttcttcgtttcggaaggagctggacgctagaatcttcctcaatgagatccccccattcgtcgaggacggagaaccttggtttataattaacgagacgccactgctagtcaaaatacagaagcagacctacaaattccgcaataagcccgctcacaccagttggaatatgggggccatcttggagggtaagcgcagtgggtttgcaccctgtggtcctaaggagcagctcagcatggaaatgattctgaaggcagaggagggaaatcatgaatggatctgccgtatcctcaaggataacttcgcctcggctgatgtggcagacgccaagggatacaccgtgttggccgccgctgccacacactgccacaatgatatcgtcaatctgctgctagattgtggggccgacgtgaacaaatgcagcgatgagggactgaccgccttaagcatgtgttttctcctgcactaccccgctcagtctttcaaaccgaacgtggccgagcgtactatacctgagcctcaggagccacctaagttccccgtggtgccaatcctgagttcctccttcatggatacaaaccttgagagcctatactatgaagttaatgtcccttcacaagggtcatacgagctacggcctccacctgcaccattattactgcctcgagtgtctggttcccatgaaggagggcatttccaggacacaggacagtgtggtgggtccatcgatcaccggagttcttcactgaaaggagactctccactggtgaagggaagcttgggacacgtagaaagcggactagaggatgtgctcggcaataccgatcgtgggagcctgtgtagtgccgagacgaagttcgaatctaacgtgtgtgtgtgcgatttctcaattgagctgtcgcaggctatgctagaaagatctgcccagtcccactccctcttgaaaatggcatctccatccccttgcaccagttcttttgacaaggggacgatgcgccggatggccttgagcatgattgagcgcagaaagcggtggcgcactattaagctgttgctccggaggggagcagatcccaacctgtgttgcgtgcctatgcaggtcctgttcctggcagttaaagcaggcgacgtggacggtgtgagactcctattggagcacggcgcacgcaccgatatttgttttccgccccagctgtcaaccctgacccctctgcacattgcagccgccctgccaggggaggaaggagtgcaaattgtggagctactgttgcatgctatcaccgatgtcgatgctaaagctagcgacgaagatgacacttacaagccaggaaaactagatctgctcccgtctagtcttaagctgagcaacgagcccgggccccctcaggcctattattcaaccgataccgccctgcccgaggagggaggtcgaaccgcgctccacatggcctgtgagcgcgaggatgataacaaatgcgctagagacatcgtgagactgttactgtcacatggtgcaaatcccaaccttctgtggtcaggacacagccctttatctttgtccattgcttccggcaacgagcttgtcgtgaaggaactcctgacccagggagcagatccaaacctgcctctgaccaagggtctgggctcagccctgtgtgttgcctgcgatctgacatacgagcatcaacgcaatatggacagcaaattagcgcttatagataggctcattagtcatggagctgacattctgaaacccgttatgctccgacagggggaaaaggaagccgtcggaacggccgtcgactacgggtactttcggtttttccaggaccgcaggatcgcccgatgtccattccacacactgatgcccgcagaacgggagacattcttggctcgtaaaaggcttttggaatatatgggattgcagctgaggcaagccgtgtttgccaaggaatcccagtgggatccgacatggctctacctctgcaagagggctgaactcattcccagtcacagaatgaagaagaagggacccagcttgccgcgtggactggatgtgaaagagcagggccagattccttttttcaagttctgctaccagtgtgggaggtccataggcgtgcgtttactgccttgcccccgctgctatggaatcctgacatgcagcaagtattgtaagacaaaagcatggaccgagttccacaaaaaggactgcggcgacctggtcgcaatcgtaacccagctagagcaggtctcacgccgccgggaagaattccaatag

SEQ ID NO: 191999 - DNA, 2826 bp, Artificial Sequence
  derived and/or modified sequence
atgtaccagggcgagttcggcctgaacatgaagctgggctacggcaaattttcctggcccactggagagagctaccatgggcagttctaccgggatcattgtcatgggttgggaacgtatatgtggccagatggtagctctttcacgggcaccttttatctcagtcaccgcgagggttatggcaccatgtacatgaagacccgccttttccagggtctttataaggctgatcagcggtttggacccggcgtggagacctaccctgatggctcacaggacgtcggactctggttcagggaacagctaataaagctgtgtacgcagatccccagtggattctccttactacggtatccagagttttcttcctttattactcatagcccagcccgcattagtctatcagaagaagaaaaaactgagtggggactgcaggaagggcaggatccatttttttacgactataaaaggttccttcttaacgacaatctgaccttgccccctgaaatgtatgtatacagtaccaactctgaccacttgccgatgacaagttccttcaggaaggaattggacgccagaattttccttaacgaaatccccccattcgtggaggatggggagccctggttcataattaatgaaaccccccttttggtcaaaatacagaaacaaacctataaattccgcaacaaacccgctcatacgtcttggaatatgggggcgatcttagagggcaagaggagcggttttgcgccctgcggcccaaaagagcagctgagcatggaaatgattcttaaagccgaggaagggaaccatgagtggatttgcaggattttgaaggacaatttcgcctccgctgacgtggcagacgccaaggggtacacagtcttggccgcagctgccacacactgccataatgacattgtgaatctgctgctggattgtggagccgatgtcaacaaatgctctgacgaagggctgacagcactgtctatgtgttttcttttgcattaccctgctcagagttttaaaccaaacgtggcagagaggaccattccagagccacaggaaccaccaaaattcccagtggtgccaatcctttctagttcatttatggacacaaatttagagtccctgtactatgaggttaatgtcccctcgcagggctcttacgaactcaggccaccccccgcccctttattactcccccgggtctccggaagccatgagggagggcattttcaggatacaggtcagtgtggtggcagtattgatcatcgttcctcaagcctgaaaggggattccccactggtcaaggggtcactcggccatgtggagtccggactggaggacgtactcggcaacacggaccgcgggtccctctgctcagccgaaaccaaatttgagagcaacgtgtgcgtgtgcgatttcagcatcgaactctcacaggctatgcttgaaagatctgcccagagccactccctactaaaaatggccagcccttctccctgcacgtcctcttttgacaaagggacgatgagacgtatggcccttagcatgatcgagcgccgaaagaggtggcggacaataaagctattactgagacgcggcgcagatcccaatctgtgctgtgtgcccatgcaggtcctatttctggccgtgaaagctggagacgtggacggcgtgcgactcttgttggagcacggtgctcggacagacatttgcttcccacctcagctgtcaactctcacccccctccacattgccgccgccctgcccggggaggaaggcgtacaaatagtggaactgctcctgcacgccataaccgacgtcgacgcaaaggcaagcgacgaagacgatacatacaagcccggtaaactcgacctgttaccgagttccttgaagctatctaatgaacccggccccccacaggcctattactccaccgacacagctctgcctgaggagggtggacgtacagccctgcacatggcctgcgagcgcgaggatgataacaagtgcgcccgcgacatcgtgcgcttactgctcagccacggagctaatcctaatctcctgtggtccggacactctccgctaagcctgtcaatagctagtgggaatgagttggtggttaaggaactcctcactcagggtgccgacccaaacctccctctcactaagggcctcgggtccgctttatgtgtcgcatgcgatttgacgtatgagcatcagcgcaatatggatagcaagctggccctcatcgaccgattgataagccatggcgcagacatcctcaaacccgtgatgctacggcagggcgagaaggaagccgtgggcaccgcagtggactacgggtacttccgattctttcaagatcgccgtatcgccagatgcccctttcacactctgatgcctgcagagcgggagacatttctcgccagaaaacgtctgctcgagtacatgggactgcagcttaggcaggcagtgtttgcaaaggagtcgcagtgggacccaacttggctgtacttgtgtaagcgggccgaactgattccctcccatcgaatgaagaaaaaggggcctagcctgccgagaggactggatgtgaaagagcaaggacagatcccttttttcaagttttgctaccagtgtggccgctcaattggtgtccgactccttccttgtccccgctgctatggcatcctgacttgttccaaatattgcaaaactaaggcctggacagagtttcacaagaaggactgtggggacctggtcgccatagtgacacagctggaacaggtgagtcgacggcgtgaggagtttcaatag

SEQ ID NO: 192000 - DNA, 2826 bp, Artificial Sequence
  derived and/or modified sequence
atgtatcagggtgagtttggcctaaacatgaaactgggctacggcaaattcagctggccaacaggtgaaagctaccacggacagttctatcgcgaccattgccacggtcttggtacctacatgtggcctgacgggagcagttttactgggacattttatctttctcatcgtgaagggtacgggactatgtacatgaagactcgcctcttccagggactttataaagccgatcagcgtttcggacctggagttgaaacttaccctgatggtagtcaggatgtgggcctctggtttagggaacaactgataaaactctgcacacagattccctccggcttctccctcctccgttaccctgaattttcgagtttcataacacacagccccgcacggatctcactgagcgaggaagagaagactgagtgggggttgcaggaaggtcaggatccctttttctatgactacaagcggtttctgctgaacgataacctcacactgcctccagaaatgtacgtatacagcactaatagtgaccatctgcctatgacctcatcgttcagaaaggaactggatgctcggatcttccttaacgaaatccccccattcgttgaggacggagaaccatggttcatcatcaacgagacacctctcctggtgaagatccagaagcaaacatacaagttcaggaacaagccagcccacacttcatggaacatgggggcaatacttgaaggcaagagaagtgggttcgcaccttgcggaccgaaagagcaattatcaatggagatgattctcaaggcggaagaaggaaaccatgagtggatttgcaggatcctgaaagacaatttcgcctccgccgacgtcgctgacgctaaaggctacacggtgctcgcagcagccgctacccactgtcacaatgatatcgtcaacttgctgcttgactgcggggcagatgttaacaaatgctccgatgagggattgaccgcattgagtatgtgtttccttctccattaccccgcacagtcatttaagcctaatgtggccgaacggaccatccccgaaccacaggagcctcccaagttcccagttgtacctatattgtcttcaagctttatggacaccaatcttgagagcttgtactatgaggtcaatgtgcccagccagggcagctacgagctgcgccctccccctgctccgctgctgttgccacgcgttagcggctcccatgaaggagggcactttcaggacaccgggcagtgcgggggaagcattgatcaccggtcttcctccttgaagggcgactctcccctcgtgaagggtagcctgggccatgtcgaatctggactcgaggacgtgttaggcaatactgaccgcggaagtctctgctctgcagagactaagtttgaaagtaacgtctgtgtctgtgatttttccatagaactgtctcaagctatgttggaaaggtcggcacagtcccatagcctgctaaaaatggccagtccatcaccttgcacatcgtctttcgacaagggtacaatgcgcagaatggctctgagtatgatcgagcgcaggaagagatggaggaccatcaagttgcttctgcgccgaggagctgatcctaatttgtgctgcgtccccatgcaggtcctttttctggccgtaaaggctggtgacgtcgacggcgtgaggcttctcctggaacacggggcaagaacggatatatgctttcctccgcagctttctacacttacaccgctgcatattgcggcagctctgcctggcgaggagggagttcaaatcgtggagttgctactgcacgccataacagacgtcgatgcaaaggccagcgatgaagacgacacgtataaacccggaaagttagacctgctgccatcctcccttaagctgagcaatgagcctggacccccacaagcttactacagcaccgatacagctttgcctgaggagggaggcaggaccgcactgcacatggcatgtgagcgtgaagacgataataagtgcgcacgtgatatagtccgcctgctgctgagtcacggggctaaccccaacctcctctggtcaggtcattcccccctgtctctctcaatcgcttcaggtaatgaactggtggttaaagagttgttaacacagggggcagacccaaaccttcccttgaccaaaggcctggggagtgctttgtgtgtagcatgtgatttgacgtacgagcatcagaggaacatggactctaagctagccctcattgaccgccttatctcccacggagctgacatcctgaaaccagtcatgctgagacaaggtgagaaggaagcagtggggaccgccgtggactatgggtatttccggtttttccaggatcggaggattgcccgttgccccttccacaccttaatgcctgccgagagggaaactttcctggccaggaaacgcctgctagaatacatgggcctccagctgcggcaggcagtgttcgccaaagagagtcaatgggatcctacttggctgtatctatgcaagcgagccgagcttatcccatctcatcgtatgaaaaagaaggggccatcactgccacgcggactggatgtgaaggaacagggtcagatacctttcttcaaattctgctaccagtgtggcaggagcatcggcgtgaggcttcttccttgtccaaggtgttatgggattcttacctgctcaaaatattgcaaaaccaaagcttggaccgaattccacaagaaggactgcggagatcttgttgccattgttactcagctggaacaggtgtcccgcaggcgcgaagagttccaatag

SEQ ID NO: 192001 - DNA, 2826 bp, Artificial Sequence
  derived and/or modified sequence
atgtaccagggggaattcggcttgaacatgaaactgggctatggtaagtttagttggcccactggggagtcctatcacggtcagttttaccgcgaccattgtcacggtttgggcacatatatgtggccggacgggtcatcctttaccggcactttttacctgtctcacagggagggctacggaaccatgtacatgaagacacgtctcttccaaggattgtataaagctgaccagagatttggtccgggagtagagacctaccctgacgggagccaggacgtgggcctttggtttagagaacagcttatcaaactttgtacccagatcccctccggattctccctgctgcgatatcctgaattctcaagttttattacccacagcccagcaagaatcagcctatcagaagaagaaaagacagaatggggcctccaggagggacaggaccccttcttctatgattataaacggttcctgctgaatgacaatttaacgctgccaccagagatgtacgtctattccacaaactcagaccacttgcccatgacatcatccttccgcaaggagctggatgcgcgaatattcctgaatgagatcccaccattcgtggaagatggtgagccatggtttattatcaacgagacccctctgctggtgaagattcagaaacaaacctacaagttccgcaataagcccgctcacacttcctggaacatgggcgcaattctggagggcaagaggtcaggatttgcaccttgcggacctaaagaacagttgtcaatggagatgatcctcaaagccgaagagggaaaccacgagtggatctgtcggatcttgaaggataattttgccagcgccgacgtggccgacgcaaagggatacaccgtgctggccgctgcggcaactcactgccacaacgacatcgtaaatctcctactggactgtggagcggatgtcaacaagtgttccgacgaggggctgaccgcactcagcatgtgcttcttgctgcattatcctgcacagtcatttaagcctaacgttgccgagaggaccatcccagagccgcaggagccacccaagttccccgtggttccgatcctctcttctagctttatggacacgaacttggagtccctctattacgaggtaaatgtgccctcccagggatcatacgagctgcgcccacccccagcgccactgctcctgcccagggtgtcaggcagtcatgaaggtggccatttccaagacaccggacaatgcgggggatccatcgatcatcgaagtagcagtctgaagggagatagccctttggtcaaaggaagtctgggccacgtcgagagtggattggaggatgtcctcggaaacaccgatagggggtccttatgttctgccgagacgaagttcgaatctaacgtttgtgtctgcgacttcagcatagagctgtcccaggctatgctcgagagatcagcccaatcacatagtcttctcaagatggcatcaccgagcccatgcacctcttcgttcgacaagggcaccatgagacgcatggccctgagtatgatagaacgaaggaagcgttggcggacgattaagcttttgctgcgacgtggcgcagatcctaacttgtgttgcgtgccaatgcaggtgctgttcctggctgtgaaggctggagacgtagatggtgtgcggctgctactggaacacggtgctcgaacagatatttgttttccaccccagctctcaacactcactcctctgcacatcgctgccgctctgcctggggaagagggagttcagatcgtggagttgttgctgcatgccataactgatgttgatgcaaaggcttccgatgaagacgatacatataaaccagggaaattggatttattaccatcaagtttgaagctgagcaatgagcctggaccaccccaggcctactatagcaccgacactgcccttcctgaagaaggcggacggacggctctgcacatggcctgcgaacgtgaggatgacaataagtgtgcccgagatatcgtccgcctgctgctgtcacatggcgcaaaccccaacctattgtggagtgggcactcccctttgagtcttagcatcgcgtcaggaaacgagctagtcgtaaaggagctcttaactcagggggctgaccccaacctgcctttaaccaaggggttgggcagtgccctttgtgtcgcctgcgatttgacatacgaacaccagcggaatatggattccaaactcgccctgattgataggttgatctcccatggcgctgatatcctaaaaccagttatgctcagacaaggtgagaaagaggcggtgggaacggccgtagattacggatatttccgattcttccaggataggcggattgcccgatgccctttccacaccctgatgccagctgaaagggagacatttctcgcaaggaaaaggctcttggagtatatgggcttgcagctgcgccaagctgtattcgccaaggaatcccagtgggatcccacctggctctatctatgtaagcgagccgagctcatccctagtcacaggatgaaaaaaaaggggccatctctccctcggggtctcgatgttaaggagcagggccagatacccttcttcaaattttgttatcaatgtggcagatcaatcggcgtgcggctactgccatgtccgaggtgctatggaattctgacatgtagcaagtattgcaagactaaagcctggaccgaattccacaaaaaggattgtggggatcttgtcgccatcgttactcagctggagcaggtgtctaggaggcgagaagagttccaatag

SEQ ID NO: 192002 - protein, 217 aa, Artificial Sequence
  derived and/or modified sequence
MSKGRAEAAAGAAGILLRYLQEQNRPYSSQDVFGNLQREHGLGKAVVVKTLEQLAQQGKIKEKMYGKQKIYFADQDQFDMVSDADLQVLDGKIVALTAKVQSLQQSCRYMEAELKELSSALTTPEMQKEIQELKKECAGYRERLKNIKAATNHVTPEEKEQVYRERQKYCKEWRKRKRMATELSDAILEGYPKSKKQFFEEVGIETDEDYNVTLPDP

SEQ ID NO: 192003 - protein, 154 aa, Artificial Sequence
  derived and/or modified sequence
MYGKQKIYFADQDQFDMVSDADLQVLDGKIVALTAKVQSLQQSCRYMEAELKELSSALTTPEMQKEIQELKKECAGYRERLKNIKAATNHVTPEEKEQVYRERQKYCKEWRKRKRMATELSDAILEGYPKSKKQFFEEVGIETDEDYNVTLPDP

SEQ ID NO: 192004 - DNA, 654 bp, Artificial Sequence
  derived and/or modified sequence
atgtctaaaggccgagccgaggcagccgctggagcggccggcatcctcctgaggtatttacaagagcagaatagaccctactctagccaagacgttttcgggaatttacagagggaacacggtcttggaaaggcagtggtggttaagaccctagaacagttggctcagcaaggaaagatcaaagagaaaatgtacggcaagcagaagatctattttgctgaccaggaccaattcgatatggtctctgatgctgacctgcaggtactggacggtaagattgtcgctctgacagcaaaggttcaatccctgcaacagagctgcagatacatggaggctgaacttaaggaactcagttctgctctgactacacccgaaatgcaaaaagaaatacaagaactaaagaaagagtgtgctgggtatagggaaagactgaagaatatcaaggctgctacgaaccacgtgacccctgaggagaaggagcaagtgtatcgagaacgccagaagtactgcaaagagtggaggaagcggaaacgtatggccaccgagctcagcgatgcgatcctcgaagggtaccccaaatccaaaaagcagttctttgaggaagtgggaattgagacagatgaggattacaacgttacactcccggacccctag

SEQ ID NO: 192005 - DNA, 654 bp, Artificial Sequence
  derived and/or modified sequence
atgagcaagggccgggcagaggccgccgccggggctgctggcatcctgctgcgctacctgcaggagcagaaccggccctacagcagccaggatgtgtttggaaacctgcagcgggagcacggcctgggcaaggctgtggtggtgaagaccctggagcagctggcccagcagggcaagatcaaggagaagatgtatggcaagcagaagatctactttgctgaccaggaccagtttgacatggtgtctgatgctgacctgcaggtgctggatggcaagatcgtggccctgacagccaaggtgcagagcctgcagcagagctgccgctacatggaggccgagctgaaggagctgagcagcgccctgaccaccccagagatgcagaaggagatccaggagctgaagaaggaatgtgccggctaccgggagcggctgaagaacatcaaggccgccaccaaccacgtgaccccagaggagaaggagcaggtgtaccgggagcggcagaagtactgcaaggagtggaggaagaggaagaggatggccacagagctgagtgatgccatcctggagggctaccccaagagcaagaagcagttctttgaggaggtgggcatcgagacagatgaggactacaacgtgaccctgcctgacccctag

SEQ ID NO: 192006 - DNA, 654 bp, Artificial Sequence
  derived and/or modified sequence
atgagcaagggccgggccgaggccgccgccggcgccgccggcatcctccttagatatctgcaggaacagaaccgaccctattcctcacaggatgtgttcgggaaccttcagcgggagcacggcctgggtaaggccgtggtcgtcaagaccttggagcaacttgcccagcagggtaaaataaaggagaaaatgtatggcaagcaaaagatttacttcgccgaccaggatcagttcgacatggtgagtgatgcagacctgcaagtgttggacggtaagatcgtggctctcaccgcaaaggttcagtcgctccaacaaagctgtcggtacatggaggctgaacttaaagagctttccagtgcacttaccacgccagaaatgcaaaaggagatccaggaactcaagaaagaatgtgcggggtacagggaaaggctcaagaatatcaaggctgctacgaaccatgtcaccccagaagaaaaggagcaagtttacagggagaggcagaaatactgcaaggagtggcggaagagaaaacgcatggctacggagctgagtgacgctatcctcgaaggttacccaaagtcaaagaaacagtttttcgaggaggtcggaatagagaccgatgaggattataacgttactctcccggatccatag

SEQ ID NO: 192007 - DNA, 654 bp, Artificial Sequence
  derived and/or modified sequence
atgtccaagggtagagctgaagcggcagccggtgccgctggcatccttctgcgctacctccaagagcagaacagaccctatagtagccaagacgtgttcggtaatctgcagcgagaacatgggctcggaaaggccgtcgtggtgaagaccttagagcaattggcacagcaggggaaaataaaagaaaaaatgtacgggaagcagaagatctacttcgcagatcaggaccagtttgacatggtctcagatgctgatcttcaggtgctggacggcaagatcgtggcgttgacagctaaggtccagtcattacagcagtcgtgtagatacatggaggctgagctgaaagagctttcctccgcactgactactccagaaatgcaaaaagaaatccaggaattgaagaaggagtgcgccggttatagggagcggctgaaaaatattaaggcagccaccaatcatgtgacacctgaggagaaagaacaggtctatcgggagagacagaagtattgcaaagagtggcgtaaaaggaagcggatggcaaccgaactctccgacgcaatcctcgagggttaccccaagtcgaagaagcaatttttcgaggaggtgggtattgagacagatgaggattacaacgtcacacttcccgacccgtag

SEQ ID NO: 192008 - DNA, 1354 bp, Artificial Sequence
  derived and/or modified sequence
aactacaacgtccggctttctgagttgggtggcgggaaaggcgatgagtaaaggccgggcagaagctgcggcgggagccgccgggatcctcctgaggtacctgcaggagcagaaccggccctacagctcccaggatgtgttcgggaacctacagcgggaacacggactgggcaaggcggtggtggtgaagacgctggagcagctggcgcaacaaggcaagatcaaagagaagatgtacggcaagcagaagatctattttgcggatcaggaccagtttgacatggtgagtgatgctgaccttcaagtcctagatggcaaaatcgtggccctcactgctaaggtgcagagcttgcagcagagctgccgctacatggaggctgagctcaaggaattatctagtgccctgaccacaccagagatgcagaaagaaatccaggagttaaagaaggaatgcgctggctacagagagagattgaagaacattaaagcagctaccaatcatgtgactccagaagagaaagagcaggtgtacagagagaggcagaagtactgtaaggagtggaggaagaggaagaggatggctacagagctgtctgatgcaatacttgaaggataccccaagagcaagaagcagttctttgaggaagttgggatagagacggatgaagattacaacgtcacactcccagacccctgaggggcccacggtcaggactggtggggactgcaggatgtcagaagagtgagatgtcttgcactggctaccttgtttttggttggcttttgttgttgttcctgctactttcacctttaagcagagcagtcaggagacaagcataaaccagagcactgggtagagaggatgagggctggtggctgggggtagacccagcccatttcattgtctaaattgcagtagcttgaggttaacatttagacttggaacaatgctaaaggaaagcatttggcaatatttattataatttaattttatataaaaatatttaatttcctctggatagtcaaacctgccagatatcaaacctgaggaaggcagaagtgaatttggagaactagggtagagagaggttgctataaaacgagcatttggagggcccacggcttcactcaggacctgctgggcttgtgtaccccaggagcccttttaagtatcttttgtacgcttttcaccccacccccaagtcctgggagaaatgcaggcaacactgagacatgggagaggccaagatatgcttgacagaaagggtgattttgaggctcagttaatatttcaaaattgtaaccgtagcaaaactgcattggtatttagaaaaataaaaaatttccaatatgt

SEQ ID NO: 192009 - DNA, 1381 bp, Artificial Sequence
  derived and/or modified sequence
cgggaaaggcgatgagtaaaggccgggcagaagctgcggcgggaggtaacggcgccgtgggcgcggggaagacccgggagggcagtgggtgaggaggtcggttgagtggccccctcccctgcctttctctccgtagccgccgggatcctcctgaggtacctgcaggagcagaaccggccctacagctcccaggatgtgttcgggaacctacagcgggaacacggactgggcaaggcggtggtggtgaagacgctggagcagctggcgcaacaaggcaagatcaaagagaagatgtacggcaagcagaagatctattttgcggatcaggaccagtttgacatggtgagtgatgctgaccttcaagtcctagatggcaaaatcgtggccctcactgctaaggtgcagagcttgcagcagagctgccgctacatggaggctgagctcaaggaattatctagtgccctgaccacaccagagatgcagaaagaaatccaggagttaaagaaggaatgcgctggctacagagagagattgaagaacattaaagcagctaccaatcatgtgactccagaagagaaagagcaggtgtacagagagaggcagaagtactgtaaggagtggaggaagaggaagaggatggctacagagctgtctgatgcaatacttgaaggataccccaagagcaagaagcagttctttgaggaagttgggatagagacggatgaagattacaacgtcacactcccagacccctgaggggcccacggtcaggactggtggggactgcaggatgtcagaagagtgagatgtcttgcactggctaccttgtttttggttggcttttgttgttgttcctgctactttcacctttaagcagagcagtcaggagacaagcataaaccagagcactgggtagagaggatgagggctggtggctgggggtagacccagcccatttcattgtctaaattgcagtagcttgaggttaacatttagacttggaacaatgctaaaggaaagcatttggcaatatttattataatttaattttatataaaaatatttaatttcctctggatagtcaaacctgccagatatcaaacctgaggaaggcagaagtgaatttggagaactagggtagagagaggttgctataaaacgagcatttggagggcccacggcttcactcaggacctgctgggcttgtgtaccccaggagcccttttaagtatcttttgtacgcttttcaccccacccccaagtcctgggagaaatgcaggcaacactgagacatgggagaggccaagatatgcttgacagaaagggtgattttgaggctcagttaatatttcaaaattgtaaccgtagcaaaactgcattg

SEQ ID NO: 192010 - DNA, 654 bp, Artificial Sequence
  derived and/or modified sequence
atgagcaagggcagagccgaggccgccgccggcgccgccggcatcctgctgagatacctgcaggagcagaacagaccctacagcagccaggacgtgttcggcaacctgcagagagagcacggcctgggcaaggccgtggtggtgaagaccctggagcagctggcccagcagggcaagatcaaggagaagatgtacggcaagcagaagatctacttcgccgaccaggaccagttcgacatggtgagcgacgccgacctgcaggtgctggacggcaagatcgtggccctgaccgccaaggtgcagagcctgcagcagagctgcagatacatggaggccgagctgaaggagctgagcagcgccctgaccacccccgagatgcagaaggagatccaggagctgaagaaggagtgcgccggctacagagagagactgaagaacatcaaggccgccaccaaccacgtgacccccgaggagaaggagcaggtgtacagagagagacagaagtactgcaaggagtggagaaagagaaagagaatggccaccgagctgagcgacgccatcctggagggctaccccaagagcaagaagcagttcttcgaggaggtgggcatcgagaccgacgaggactacaacgtgaccctgcccgacccctag

SEQ ID NO: 192011 - protein, 626 aa, Artificial Sequence
  derived and/or modified sequence
MYQGHMQKSKEQGYGKLSSDEDLEIIVDQKQGKGSRAADKAVAMVMKEIPREESAEEKPLLTMTSQLVNEQQESRPLLSPSIDDFLCETKSEAIARPVTSNTAVLTTGLDLLDLSEPVSQTQTKAKKSEPSSKTSSLKKKADGSDLISTDAEQRGQPLRVPETSSLDLDIQTQLEKWDDVKFHGDRNTKGHPMAERKSSSSRTGSKELLWSSEHRSQPELSGGKSALNSESASELELVAPTQARLTKEHRWGSALLSRNHSLEEEFERAKAAVESDTEFWDKMQAEWEEMARRNWISENQEAQNQVTISASEKGYYFHTENPFKDWPGAFEEGLKRLKEGDLPVTILFMEAAILQDPGDAEAWQFLGITQAENENEQAAIVALQRCLELQPNNLKALMALAVSYTNTGHQQDACDALKNWIKQNPKYKYLVKSKKGSPGLTRRMSKSPVDSSVLEGVKELYLEAAHQNGDMIDPDLQTGLGVLFHLSGEFNRAIDAFNAALTVRPEDYSLWNRLGATLANGDRSEEAVEAYTRALEIQPGFIRSRYNLGISCINLGAYREAVSNFLTALSLQRKSRNQQQVPHPAISGNIWAALRIALSLMDQPELFQAANLGDLDVLLRAFNLDP

SEQ ID NO: 192012 - DNA, 1881 bp, Artificial Sequence
  derived and/or modified sequence
atgtatcaggggcacatgcagaaatctaaggaacagggctacggtaagctgtcttcagacgaggacctggagatcattgtagatcagaaacaggggaagggtagtcgcgcagctgataaggccgtagcaatggtgatgaaagaaatcccccgggaggagagcgccgaagagaagccgctcctgaccatgacctctcaactcgttaatgagcagcaggagtcccgacccctgctgagcccttcaatcgacgatttcctttgcgaaacgaagtctgaggccattgcaagacctgtgacctctaacactgctgtgctgaccacaggtttagacctgctcgacctctcggaacctgtgagtcagacacagacaaaagctaagaagtccgagccttcatccaagactagttccctgaaaaaaaaggcggacggatcagacctgatctcaacagacgccgagcagcggggtcagccccttcgcgtgcccgaaacaagcagcttggatctggacatacagacacaactggagaagtgggatgacgtcaagttccatggagaccgcaatacaaagggccatccaatggccgaacggaagagcagctcaagccggaccggctccaaagagctcctgtggagttccgaacatcgttctcagccagagttgagcggtgggaagagcgctctcaacagcgagtccgcctccgaactggagcttgtagctcctactcaagctcgcttgaccaaggagcaccgctggggctcggccctgctgagcaggaaccattcattggaagaggagttcgaacgtgcgaaagcggccgtggagagcgatactgaattttgggacaaaatgcaggccgaatgggaggagatggcccgcagaaattggatctcagagaaccaggaagcccagaatcaggtgacgatatccgcttcggagaagggatactattttcataccgaaaatccctttaaggactggccgggagcttttgaggaaggactgaaaagacttaaagaaggagacctcccagtgacaatcctgtttatggaagccgctatcttgcaggatccaggcgatgctgaggcctggcagtttctggggattacgcaggctgagaacgaaaacgagcaagccgccatcgtggccctccagagatgtctggagctgcagccaaataatctcaaggccctaatggccttagctgtatcctataccaacacaggacaccaacaggacgcatgtgacgcactcaagaactggatcaagcagaatccaaagtataagtatttggtcaagtctaaaaaaggttcccctggcctgacaaggaggatgtcaaaatctcctgtggactccagtgtgctggagggagtgaaagagctgtaccttgaggcggctcatcagaatggagatatgatagacccagatcttcagacaggactcggggtcctctttcacttatccggcgaattcaatcgggccattgacgcattcaacgcagcccttaccgtgcgaccagaagattatagcctgtggaatagactcggcgctactctggctaatggagatcggagtgaagaggctgtcgaggcatacacgagggcgctggagatccagcccggctttatccggagcagatacaatctgggcatttcatgtattaaccttggagcctacagggaagctgttagtaattttctgactgccctctcacttcagagaaagagccgaaaccagcaacaggttccccatcctgctatttctggaaacatctgggccgctcttcggattgccctgtctcttatggatcagcccgagttattccaggccgctaaccttggcgatctagatgtgctcttaagagcctttaatctagacccttag

SEQ ID NO: 192013 - DNA, 1881 bp, Artificial Sequence
  derived and/or modified sequence
atgtaccagggccacatgcagaagagcaaggagcagggctacggcaagctgagcagtgatgaggacctggagatcatcgtggaccagaagcagggcaagggcagcagagctgctgacaaggctgtggccatggtgatgaaggagatcccccgggaggagagcgctgaggagaagcccctgctgaccatgaccagccagctggtgaatgagcagcaggagagccggcccctgctgagccccagcattgatgacttcctgtgtgagaccaagtctgaggccatcgcccggcctgtgaccagcaacacagctgtgctgaccaccggcctggacctgctggacctgtctgagcctgtgtcccagacccagaccaaggccaagaagtctgagcccagcagcaagaccagcagcctgaagaagaaggcagatggcagtgacctgatcagcacagatgctgagcagaggggccagcccctgcgggtgcctgagaccagcagcctggacctggacatccagacccagctggagaagtgggatgatgtgaagttccatggagacaggaacaccaagggccaccccatggccgagaggaagagcagcagcagcaggacaggcagcaaggagctgctgtggagcagcgagcacaggagccagcctgagctgagcggcggcaagagcgccctgaacagcgagagcgccagcgagctggagctggtggcccccacccaggcccggctgaccaaggagcaccgctggggcagcgccctgctgagcaggaaccacagcctggaggaggagtttgagcgggccaaggctgctgtggagagtgacacagagttctgggacaagatgcaggccgagtgggaggagatggcccggaggaactggatcagcgagaaccaggaggcccagaaccaggtgaccatcagcgccagcgagaagggctactacttccacacagagaaccccttcaaggactggccaggggcctttgaggagggcctgaagaggctgaaggagggggacctgcctgtgaccatcctcttcatggaggccgccatcctgcaggaccctggagatgctgaggcctggcagttcctgggcatcacccaggccgagaatgaaaatgagcaggccgccatcgtggccctgcagcgctgcctggagctgcagcccaacaacctgaaggccctgatggccctggccgtgtcctacaccaacacaggccaccagcaggatgcctgtgatgccctgaagaactggatcaagcagaaccccaagtacaagtacctggtgaagagcaagaagggcagccctggcctgaccaggaggatgagcaagagccctgtggacagctctgtgctggagggcgtgaaggagctgtacctggaggccgcccaccagaatggagacatgattgatcctgacctgcagacaggcctgggcgtgctcttccacctgtctggagagttcaacagagccattgatgccttcaatgctgccctgactgtgcggcctgaggactacagcctgtggaaccggctgggcgccaccctggccaacggggacagaagtgaggaggccgtggaggcctacacccgggccctggagatccagcccggcttcatccgcagccgctacaacctgggcatcagctgcatcaacctgggcgcctaccgggaggccgtgagcaacttcctgacagccctgagcctgcagaggaagagcaggaaccagcagcaggtgccccacccagccatcagcggcaacatctgggccgccctgcgcatcgccctgagcctgatggaccagcctgagctgttccaggccgccaacctgggggacctggatgtgctgctgcgggccttcaacctggacccctag

SEQ ID NO: 192014 - DNA, 1881 bp, Artificial Sequence
  derived and/or modified sequence
atgtaccagggccacatgcagaagagcaaggagcagggctacggcaagctatcttccgacgaagacttagagattattgtagaccagaaacaggggaaaggctccagagcagccgataaagctgtggccatggtcatgaaagagatccctagggaagaatcggctgaggagaaacctctgttaacaatgacgagccagctggtcaatgagcaacaggaatctcgcccactactgtccccttccatcgatgatttcctctgtgaaaccaaaagcgaggctatcgcaagacctgtaactagcaatacggccgtgttaacaacaggactggacctattggaccttagcgaacctgtatctcagacacagaccaaggccaaaaagtcagaaccctcttctaagacctcctccctcaagaaaaaggcagacgggtctgatcttattagcaccgatgccgagcagcggggacagccattgagagtgcccgaaacttcgtctctggacctggatattcagacgcaattagagaagtgggacgacgtgaaattccatggagaccggaacactaaggggcaccccatggcagagcggaagagcagctcaagccggacaggatctaaggaattgctgtggtccagcgaacaccgtagtcaaccggagctcagtggaggtaagagcgctcttaattccgaatcggcttcagagcttgagctcgtcgcccccacacaggcccgcctcactaaagagcaccgctgggggagtgcacttctatcccgaaatcactccctagaagaggaattcgaaagagctaaggccgccgtagagtcagatactgaattctgggataagatgcaggccgaatgggaggaaatggcacgaagaaactggatctctgagaaccaggaggctcagaatcaagtgactatttctgccagtgagaagggttactatttccacaccgaaaacccgtttaaggattggccaggcgcctttgaggagggcctgaagagactgaaagagggcgacctgcctgtgacgatcctgtttatggaggcagccattctacaggaccctggggacgctgaggcatggcaatttttgggtattacacaggctgaaaatgagaacgaacaggccgccatcgtggctcttcagaggtgcctagagctccagccgaacaatcttaaggcactcatggccctagcagtctcatacacgaacacggggcatcaacaggacgcttgtgacgcactgaaaaactggattaagcaaaatccaaaatacaagtacctggtcaagagtaagaaggggagccccggattgacgcggcggatgagtaagtccccggttgactcctccgtcctggagggtgtaaaggagttgtacctggaggctgcacatcaaaacggggatatgatagaccccgacctacagactgggctcggtgttttattccatttatcaggcgaattcaacagggccatcgatgcgtttaacgctgctctcactgtccggcccgaggactacagcttgtggaatcgcctcggagctacactggcaaatggagaccgctccgaggaagcagtggaagcttatactcgtgccctggaaattcagcccggcttcattcggtctcgttacaacctcggaatctcgtgtatcaacctcggcgcctaccgggaagcagtctcaaattttcttaccgctctaagtctgcagagaaagtccaggaatcaacagcaggtgccacatcccgccatcagtgggaatatctgggccgccctgagaatcgccctctcactgatggaccagccagaattgtttcaggccgccaaccttggtgacctggatgtactgttgcgcgccttcaacctagacccatag

SEQ ID NO: 192015 - DNA, 9082 bp, Artificial Sequence
  derived and/or modified sequence
gagaaagagttcggcgaagaaggagtgagttctagagacgccccgcgagcaggacccgcgcctgcaggagagcctggccgacccggctcctcgccttctctgcgcgctctcccgcgtccgctttcagcaccccgagcggagaacagttcccggcagcccgcagcgctgccgagtggccgccggccggccgagtacccggagctccagggggctcaggagcaccctctgagaacccgctgtgcacccaccttttcccctcttttggtgggcaagtaagcacgggggaaaagcatccggtggcctcagggagccctgaagaaaccgaagcagaatgtaccagggacacatgcagaaaagtaaagaacaaggatatggaaaactaagcagtgatgaagacctcgaaataattgttgatcaaaagcagggaaaaggctctagggcggcagataaggctgttgccatggtgatgaaggagataccgagggaggagtctgctgaagaaaagcccctccttactatgacatcacagctggtgaatgagcaacaagaaagcagacccctcctgagtccctccatcgatgactttctctgtgaaaccaaatcggaagcaatagcaaggccagtaacatccaatacagctgtattgaccactggcttagatctcctcgacctgagtgaaccagtctctcaaacccaaaccaaagccaagaagtcagagccctcatcaaaaacctcatccctcaagaaaaaggccgatggatctgacctcatcagcacggatgctgagcagagaggccagcctctcagagtcccggagacttcatccttagatctagacattcaaacacaactggaaaaatgggacgatgttaagtttcatggagatcgaaataccaagggacatccaatggcagagagaaaatcatcctcatctagaactggatcaaaagagctcttatggtcctcagaacacagatctcaaccagaactgagtggtggaaaaagcgccctcaactctgagtcggcttcagaattggaattagtggctccgactcaggctcgactgaccaaagaacatcgctggggaagcgcattactttctagaaaccactccttagaagaagagtttgaaagggcaaaagcagcagtggagtcagatacagagttttgggataagatgcaagcagaatgggaagaaatggctcggaggaactggatatctgagaaccaagaagcccagaaccaagtaaccatctcggctagtgagaagggatattactttcacactgaaaaccccttcaaggactggcctggagcatttgaagaaggcttaaaaaggctgaaggaaggggatctgccagtcaccatcctgttcatggaagcagcaattcttcaggaccctggagatgcagaggcatggcagttcctcgggataacccaggcggagaatgaaaatgaacaagcagctattgtcgccctccagaggtgcttagaattacagcccaacaacttaaaagctttgatggccttggctgtgagttatactaacactggccatcagcaggatgcctgtgacgctctgaagaattggattaagcaaaatccaaagtacaaataccttgtgaaaagcaagaagggatctccaggcctcacccggcggatgtctaagtccccagttgatagctctgttctggaaggggtgaaggaattatatctggaagctgcccaccaaaatggagatatgatcgacccagacctgcagacaggtctaggggttctgttccacctgagtggagaatttaatagagcaatagatgcatttaacgctgccttaactgttcggccagaggactattcactatggaaccgcctcggggcgaccttggcgaacggagaccgcagcgaggaagccgtggaggcctatacgcgagcactggagattcagccaggattcatccggtccagatacaacctaggaataagctgcatcaacctgggcgcctacagagaagcggtcagcaattttctcactgccctcagtttgcaaagaaagagcaggaatcagcagcaagttcctcatcctgcaatctctgggaatatctgggctgccctcagaattgcgctctctctgatggaccaaccagaactcttccaggcggctaatcttggtgacctggatgtcctcttaagagctttcaacttggatccttgaagaaagaataataccagtactaataatccctgatctgtgtgattgtactgaaaaatcaaaaactattttattatgaatttcaaaaggataaatcaaatattcaaaaggccatggtcatatagcccaaggaaattaattcctgtggacaatgcccagtctctgttcagatccaaaagcacaaaatgttgtatatagagtcaaagtcaggctcaaaagaagaattaagagactcaagacaaaccaagataaagtaactgtgtgttgaatactctttccacaagttgcaagcatattgcaacacatgttctttgggttttttgtctccccttgcagctgatgacacatctgaggaacttgttcatgggaaacatggaaaaagcactgcctcagattgggaaattctgactgtttctgaactgtcttcttttgcaagactgaacatagtttgggccattggtgcatgcacatatattaacttgtgactaaagacagacattgcttaaacctgttccaattttaacttttactgtagccctttgattccagagagggagctttgctggcaaaagcagtttttgcactagaaatttttgctgttcccaatctaaacttttctggtattgtatatatgcactttaatatcttatttatgccttgctggagttttgttttgttgctccaatttttaacttgggggtgaaagatttaagaactcagcctcactagatcaacggaccaaataaacaattcctgaagacagtttttcatagtgtaggattttgaagaagtgtttttcttaaagcagatacgatgacataaggcgtaaatatggcaaacagatcttttcattcacgtgctttctgggtctgtatgaacataagtaagacacaaggtactgtctcttcatgcattctctgcaggaagaaagtttgatggtatcgtgatttctattgagttcaaattaacttgcttaagtgtcatactttactggctttgccctgcacaccaatattccttttaaaccataaatattttaaataatatttcttaagagtgataaataacattttttcctaaaaattatgttttcttagtttcataataatctgcactgttcatccccttgcattctaagtgatagaagagcaacactttcaaaccaaatctcactgaatgccagtgatttcatatgaaagatgcatgcctctttggctctttgaacatttagcaagtattgggaattttctattagcagtggtgttttaattggttgaattccacttagttctccacagtgttttgtatgtgtttggggcttggtgattattttgaaagatacattttttaaagaattaggaacattttttgcaaaatgctaatcagaatataattttcccaatgtcaggtatagaagttatcccattcttctttacctggtctccttccttcgtctagaaccttccccacagtagctaatcctaacaactttttatttatgttctttgataataatagctcatcccgctcatgattatagctacccacaaaaaataaaacaacaacaacaaaaaagactccacagaattgggatcaaaacagtctaattggctggggaataagcttctactgaggagtaaatgtgcacacgtgcttatcaattgaatgcgaggtacaggaataaaatcctctcctctgttacatctgaagtccttgggttgtgagagggcctcaagttaacagaaaccacaagtccttgaggcttacatatgttataacctattctagtttataaagacaaaaagctgaggccactgtgaggagtgccaggttttgatagtcattgtcaaagttgacttgggccaggtggtagctccagctggtcagcagaaggcagaggcattcaggcactcatcatgggtagcagcgaccacccagtctcagaccgtgcttctctacagtctcagcagcaaagtaaagctcaacaatgctttcaagaatggtattgtaagaattgtagaattcgagaaacccagtctggtaaggactcttggggccagcctccaagccatggcagggcctgcttgaatatgcctgattaagcatcctttccttccctgctccttcctcctgccatctctgtaccttgaccagaaagtcggcatgaatagttcatggacaaaggattgaatagcctctgaacaaaggattcaaagcaaactttgtaagtgttctgtgatgccattctatactttgagcagcagctgaatctgcagcctggatttaaagcctgaaactagtataaatgtcaaataattaatttgttgctaaatggtggcaaattttgtggcccaagttttattttgctattggaacacaaactccaaggagctgttttagggaagactaaacaatcttccattcttaccattatttggcaatttgcagagcatttagtagtactttctctagtgtatgtagtatctgtcagatctaagatttttataggctgtcaagaagtccagaattacggcccaagaggaaaagagttgcatttttcaataatattttttataaaattaagttaaaaccattattaaaacatgagtgacaggccaggtgcggtggctcacgcctgtaatcctagcactttgggaggcagaggcgggcagaccacgaggtcaggagttcgagaccagcctgaccaacatggtgaaaccccgtctttattaagaatacaaaaattagccgggtgtagtggtatgcacctgtaataccagctactcaggaggctgaggcaggagaatcacttgaaccagggaggcggaggttgcagtgagccgagattgcaccgctgcactccagtctgggtgacagagcgagactccgtctcaaaaaaaacaaaaaagtgacagtttataggaatagagcaccaccaagaaatcagtagcaagactttagaacagtctttttgtataaatcatatacagtaaatgttttgtttcttagaagtgcatctactttattttttggcagaacaatttttggcatcttatcttcatggcatgaaattgtcatttaaattactctttccgtttgaaaggggagggtatccttatttcccttctgaggtactctgagaaggctttgagtttcctttttcatgtattaatgtataacagcctaacagctcctagaagagggtattcttactagaatggctacatacgggtgacttcagttacatacaggtgacttccagggactgacttcgcctgtagattggatgaaaataaagagaaagccagtgattattgctgagtttcaaaatataaccatttctagtaggctacttctacatgctgttgtaccttcctggtgaggaggagacagagggataggggagaggaggaggaataaaaatccctctcactgggccaatcatactgattcattccctttacttcctccaaaactcactccccatgactcctgaaaaatgggtagatctcgtccaccaggaaattttaatagaatactatgcaccgtgctttctcagtcaatctggattcctactagaacagaaaagtaaggaaacataactgggtaggaatgtccacttacgtttcacaaactcacttttagagtttcatgccactttcctcattcttctctttaagatactattatattgaacgtgggacccatgtctaaatacttgtatagataaatatttcttgtatattcttcccatacaagcaagacttgaatacagttgtagctagtcccacttttataataaaagcttccaaactctttatcataaactttgtctgtgagcttgggaatacagagaaagcaagttgatcattctgagacccttcctcatttgccctgaatcagttccccaagattggactgtactttaagctagttgttgtagcagtggtggttgttgttttatatcttgagatacttctagaacattctagaaacagggtattctaaaggcttactttatatgccatcctttttgaaccctcttattttagaaattattacacgtgcacacttatgatttcaaccttgtaaaataatttcaaattcatttcgtatccacattttactgcagtttccctatcatcatctcaatagttatagaactggttgaaattaaactgttttgaactaagaagtagatatatatatatatatatatatatatttttttttttttttttaaagagtgttcatagataaactctggcataaagtttgtaaaaaagcaattttttaaaagcaaaacgtataacctcaggtacaaaaatattgcatgcattagtattgcaaatttgcctactcaaatattaaccaaagcatgcaagataacttgactgaatttaaatttacacagtgcatgattaagtctcataggttagcctgttgttccttgcctctatacaagggagcatttttatgaactttgtgttacagtttttctatttgcttttcttatcctatccttgagattgttttcatgctatcacactgaactttacagatattcacacatctggtttctacagtgttaccagtgccaaactaatcctctgaagaatctgggacatctaaacactttttcaaaaaccagttgaggcacaacagatcccaaacttaaacaaatccaagtgtctgaatgctactaaactaaatcatgttgactgcctcagcacataaaggtttcgactttaaattcttaataatgcatttcaaaatttttctaaaagtttgggaataaattagaaaaactgatattctaaataaggcgaggaggttggggtaatgtcaggcacatcaaaatcatcacacaacgaagtagatatggggccttaattttcataaatgtcacatagcaagtgtgtggggtatcacaacattgttctgatacagccctgtttgtatggtagttgagctgcttgggctaaatgtcccttgagaaactggacttgatcaacaggtctaaaaacactgatatttagggagtgatgaggtgatttcacggtcactcagaaccaactctgaaatcttctcactgccttttcccataacccctattttatgaggagaccagaaagggagagagcaaagctcagtgagaccatgtggtcttacattagtaacagctttgttactcactccatataccccggtaccctcacacacataccatgaactcaaagacagaattctacacataacacacatagcaaagacgattgtggggaggcattaaacagttaagaggaaaaaaaaaaacacagaaaattaaactgtgaggtttaacaacctctcatgtggtattttgccttgaacgaagtttccactacctgcagcttctgcagaaataccaaaataacacagtctagagacaagtgtcccaatgtcagaactgttttctcaggaccttctctataagagaaaactaacttgcaatgctgcagaatgtcagagcaaaaccctgatgagctccgtgggatacttaatagaagcctgcactcaaaataatattaagatggaaacaacaacaacaattaggcagttctttgctcaactataaaatgtgtatcattcattgggggagggggaggggtcgtgttctttggatttcttggaaagggaaatggtataacacaaaaagactaagaggtatacacactcagctcggtaattcgagcatttggcattttcactgagatatatagcatttctgcatggataccatacaagaattctgccatgtgagaaatgtgttcatgatggactacattaccagtagttaagggaaatacagcaaacttaagtttttaccaacttcctttcatgttccctatatatcatctaacccaaactttcaatttacattgcccaaatttgtttacattggttgaaaaaaaactgattaatttattaaactttttacaaactgtaacaaacatttaactatttagaaaagacatttctacatattttatatatctatgaatattgcatctctaatctaatctaaaaatgttgttttgagacaattcttctgtgatgcttcctcctcatgctcataaatgtttaaagtcttgggatttcattttcaggctgaaatagataacaagaaaaaaatttaagtttaaatgtttacattgcgttactaaattaataccaattcaaattaagtgacctatagtaaattaatggcaatgggggggaggggattttaaagtgattggcatattatgtgatactgtatcagtgatttagtgaaataatatgtatcatagcacaactctgttgggtattaaggcttcatcttagtatttccctgcgttgctctttgaaataaaattactaccataaaaataacctcttatcatattgatgtgtttaatttactcagttggcttctaatttgcgtaacaagattaaggtagtatttttgtactattattggaagcatgccttccctttttcacattattaaattgtatttatatttgtgcaattttaaactatgttttcaaataaactttgtctgcggcttcgaggtcttttcaggaatctttcaaaatgggatttggggatcagaactccttctgatcaaatggaatccaatttgtactactggctaaaggtccttttattaaatattgaatatcactacatatgattttgcatgagctatctggaaatcaggaatgcatttttggatataaaacaaaactttaaaaatcttcctcctttgttaattttttaagactaaaatattatttaacctgaaattgaattttgtgattctttttagaataaaaatattaaaataaa

SEQ ID NO: 192016 - DNA, 2361 bp, Artificial Sequence
  derived and/or modified sequence
ctttggctactgtgaaagaccacgcagaagctgtggacttgctttttgtgcttgacaaaagtgcatagatagaagacagggattcccggctgggaggagggaggagagctgaagatccctgcctgggctggctgagctaagcaaagtgggaagctgagtgcttgaaagaggattatgctcgcactagaaataagcaaaaagtaaagaacaaggatatggaaaactaagcagtgatgaagacctcgaaataattgttgatcaaaagcagggaaaaggctctagggcggcagataaggctgttgccatggtgatgaaggagataccgagggaggagtctgctgaagaaaagcccctccttactatgacatcacagctggtgaatgagcaacaagaaagcagacccctcctgagtccctccatcgatgactttctctgtgaaaccaaatcggaagcaatagcaaggccagtaacatccaatacagctgtattgaccactggcttagatctcctcgacctgagtgaaccagtctctcaaacccaaaccaaagccaagaagtcagagccctcatcaaaaacctcatccctcaagaaaaaggccgatggatctgacctcatcagcacggatgctgagcagagaggccagcctctcagagtcccggagacttcatccttagatctagacattcaaacacaactggaaaaatgggacgatgttaagtttcatggagatcgaaataccaagggacatccaatggcagagagaaaatcatcctcatctagaactggatcaaaagagctcttatggtcctcagaacacagatctcaaccagaactgagtggtggaaaaagcgccctcaactctgagtcggcttcagaattggaattagtggctccgactcaggctcgactgaccaaagaacatcgctggggaagcgcattactttctagaaaccactccttagaagaagagtttgaaagggcaaaagcagcagtggagtcagatacagagttttgggataagatgcaagcagaatgggaagaaatggctcggaggaactggatatctgagaaccaagaagcccagaaccaagtaaccatctcggctagtgagaagggatattactttcacactgaaaaccccttcaaggactggcctggagcatttgaagaaggcttaaaaaggctgaaggaaggggatctgccagtcaccatcctgttcatggaagcagcaattcttcaggaccctggagatgcagaggcatggcagttcctcgggataacccaggcggagaatgaaaatgaacaagcagctattgtcgccctccagaggtgcttagaattacagcccaacaacttaaaagctttgatggccttggctgtgagttatactaacactggccatcagcaggatgcctgtgacgctctgaagaattggattaagcaaaatccaaagtacaaataccttgtgaaaagcaagaagggatctccaggcctcacccggcggatgtctaagtccccagttgatagctctgttctggaaggggtgaaggaattatatctggaagctgcccaccaaaatggagatatgatcgacccagacctgcagacaggtctaggggttctgttccacctgagtggagaatttaatagagcaatagatgcatttaacgctgccttaactgttcggccagaggactattcactatggaaccgcctcggggcgaccttggcgaacggagaccgcagcgaggaagccgtggaggcctatacgcgagcactggagattcagccaggattcatccggtccagatacaacctaggaataagctgcatcaacctgggcgcctacagagaagcggtcagcaattttctcactgccctcagtttgcaaagaaagagcaggaatcagcagcaagttcctcatcctgcaatctctgggaatatctgggctgccctcagaattgcgctctctctgatggaccaaccagaactcttccaggcggctaatcttggtgacctggatgtcctcttaagagctttcaacttggatccttgaagaaagaataataccagtactaataatccctgatctgtgtgattgtactgaaaaatcaaaaactattttattatgaatttcaaaaggataaatcaaatattcaaaaggccatggtcatatagcccaaggaaattaattcctgtggacaatgcccagtctctgttcagatccaaaagcacaaaatgttgtatatagagtcaaagtcaggctcaaaagaagaattaagagactcaagacaaaccaagataaagtaactgtgtgttgaatactctttccacaagttgcaagcatattgcaacacatgt

SEQ ID NO: 192017 - DNA, 1881 bp, Artificial Sequence
  derived and/or modified sequence
atgtaccaggggcacatgcagaagtctaaggagcaaggctatgggaaacttagttctgacgaagacctagaaatcatcgtcgaccagaaacaaggtaaggggagccgcgctgccgataaggctgtagccatggtgatgaaagagatcccgcgtgaggagtcagccgaagagaaacctctattaaccatgacttcccagcttgttaatgaacagcaggagtcccggcctctcctctctccttcaatagacgatttcttatgcgagacgaaatccgaagccattgcgaggcccgtgacctctaacactgcagtcctgactacagggcttgatctgcttgacttgagtgaacctgtgtcccagacgcagaccaaggccaaaaaaagcgagccctccagtaaaaccagctccctgaagaaaaaagcagatggcagcgacctgatcagtaccgatgcggagcaaaggggtcaaccactacgagtgccagaaacctccagcctggacctggacatacaaacacagctcgaaaagtgggacgacgtgaaattccatggggaccgcaacactaaggggcacccaatggccgagcggaagtcttccagctcgcgcaccggttccaaagagctcctgtggtcctccgagcatagatcgcagcctgaactgtccgggggtaaatccgcccttaacagcgaatccgctagtgagctcgagctggtcgcccctacgcaggccaggctgaccaaggagcatcggtggggctctgccctgctgtctcgaaatcactcccttgaggaagagtttgaacgcgcaaaggctgcagtggagagcgatacggaattctgggataagatgcaggctgaatgggaggagatggctcgcagaaactggattagcgagaaccaagaagcccagaatcaggttacgatttcagcttccgagaaggggtattattttcacacagaaaatccattcaaagactggccaggtgccttcgaggagggattgaaacgcctgaaagaaggagatctaccagtgacgatcctgtttatggaggccgcaatcctgcaggaccctggagatgccgaagcatggcagttcctcggtattacacaagctgagaacgaaaacgagcaggcggcaatcgtggccctgcagcgctgcctggaactccagccaaataacctgaaggctcttatggctctggccgtaagctacacaaacacaggccatcagcaggacgcatgcgacgcactcaaaaactggatcaagcagaaccccaagtacaagtatctagtcaaaagcaagaaagggagcccgggtttgactcgtaggatgtcaaaatctcccgtggatagcagtgttctagaaggcgtcaaagaactttacctggaagccgcacaccaaaacggtgatatgatcgatcccgacctgcagacgggcctaggcgtgttatttcacctcagcggggagttcaatagggccatcgacgccttcaatgctgctctgactgtaaggccggaagattactccttatggaacagactcggcgctactttggcgaacggcgataggtccgaggaagcagttgaggcttacacaagagccttggagatccagcccggattcatccgttcccggtacaacctgggcatttcctgcattaacctcggcgcttaccgcgaggccgttagtaattttttgaccgccttaagtcttcagcgcaagagtcgaaatcagcagcaggtgccacaccccgcaatcagtggcaacatttgggcagccctaagaatcgccctcagcctaatggaccaaccagagttgttccaagccgctaatctgggcgacctagacgtgctgcttagggcttttaacctggatccttag

SEQ ID NO: 192018 - DNA, 1881 bp, Artificial Sequence
  derived and/or modified sequence
atgtaccagggccacatgcagaagagcaaggagcagggctacggcaagctgagcagcgacgaggacctggagatcatcgtggaccagaagcagggcaagggcagcagagccgccgacaaggccgtggccatggtgatgaaggagatccccagagaggagagcgccgaggagaagcccctgctgaccatgaccagccagctggtgaacgagcagcaggagagcagacccctgctgagccccagcatcgacgacttcctgtgcgagaccaagagcgaggccatcgccagacccgtgaccagcaacaccgccgtgctgaccaccggcctggacctgctggacctgagcgagcccgtgagccagacccagaccaaggccaagaagagcgagcccagcagcaagaccagcagcctgaagaagaaggccgacggcagcgacctgatcagcaccgacgccgagcagagaggccagcccctgagagtgcccgagaccagcagcctggacctggacatccagacccagctggagaagtgggacgacgtgaagttccacggcgacagaaacaccaagggccaccccatggccgagagaaagagcagcagcagcagaaccggcagcaaggagctgctgtggagcagcgagcacagaagccagcccgagctgagcggcggcaagagcgccctgaacagcgagagcgccagcgagctggagctggtggcccccacccaggccagactgaccaaggagcacagatggggcagcgccctgctgagcagaaaccacagcctggaggaggagttcgagagagccaaggccgccgtggagagcgacaccgagttctgggacaagatgcaggccgagtgggaggagatggccagaagaaactggatcagcgagaaccaggaggcccagaaccaggtgaccatcagcgccagcgagaagggctactacttccacaccgagaaccccttcaaggactggcccggcgccttcgaggagggcctgaagagactgaaggagggcgacctgcccgtgaccatcctgttcatggaggccgccatcctgcaggaccccggcgacgccgaggcctggcagttcctgggcatcacccaggccgagaacgagaacgagcaggccgccatcgtggccctgcagagatgcctggagctgcagcccaacaacctgaaggccctgatggccctggccgtgagctacaccaacaccggccaccagcaggacgcctgcgacgccctgaagaactggatcaagcagaaccccaagtacaagtacctggtgaagagcaagaagggcagccccggcctgaccagaagaatgagcaagagccccgtggacagcagcgtgctggagggcgtgaaggagctgtacctggaggccgcccaccagaacggcgacatgatcgaccccgacctgcagaccggcctgggcgtgctgttccacctgagcggcgagttcaacagagccatcgacgccttcaacgccgccctgaccgtgagacccgaggactacagcctgtggaacagactgggcgccaccctggccaacggcgacagaagcgaggaggccgtggaggcctacaccagagccctggagatccagcccggcttcatcagaagcagatacaacctgggcatcagctgcatcaacctgggcgcctacagagaggccgtgagcaacttcctgaccgccctgagcctgcagagaaagagcagaaaccagcagcaggtgccccaccccgccatcagcggcaacatctgggccgccctgagaatcgccctgagcctgatggaccagcccgagctgttccaggccgccaacctgggcgacctggacgtgctgctgagagccttcaacctggacccctag

SEQ ID NO: 192019 - protein, 450 aa, Artificial Sequence
  derived and/or modified sequence
MEEPQKSYVNTMDLERDEPLKSTGPQISVSEFSCHCCYDILVNPTTLNCGHSFCRHCLALWWASSKKTECPECREKWEGFPKVSILLRDAIEKLFPDAIRLRFEDIQQNNDIVQSLAAFQKYGNDQIPLAPNTGRANQQMGGGFFSGVLTALTGVAVVLLVYHWSSRESEHDLLVHKAVAKWTAEEVVLWLEQLGPWASLYRERFLSERVNGRLLLTLTEEEFSKTPYTIENSSHRRAILMELERVKALGVKPPQNLWEYKAVNPGRSLFLLYALKSSPRLSLLYLYLFDYTDTFLPFIHTICPLQEDSSGEDIVTKLLDLKEPTWKQWREFLVKYSFLPYQLIAEFAWDWLEVHYWTSRFLIINAMLLSVLELFSFWRIWSRSELKTVPQRMWSHFWKVSTQGLFVAMFWPLIPQFVCNCLFYWALYFNPIINIDLVVKELRRLETQVL

SEQ ID NO: 192020 - DNA, 1353 bp, Artificial Sequence
  derived and/or modified sequence
atggaggaaccccagaagtcatacgtgaacactatggatctagaacgagacgagcccttgaagagcacgggcccgcagatctccgtgtctgaatttagttgccactgttgctatgatatacttgtcaacccaacaactcttaattgtggccactctttctgccgccactgtctggctctctggtgggcaagctccaagaaaaccgagtgcccagaatgccgggagaagtgggaggggttccctaaggtgtccatcctgctcagggatgcaatagagaagttgttccccgatgctatcagactgcgttttgaggacatccagcaaaataatgacattgtgcagagcctggctgcatttcagaaatatggcaacgaccagattcccctggcgcccaacaccggacgtgccaatcagcaaatgggtggggggtttttttctggtgtgttgaccgcacttaccggcgtggctgtggttctcctggtgtatcattggagttctcgagagtccgagcacgacctgctagtgcacaaggcggtcgccaaatggaccgccgaggaagtcgttctgtggctggagcaactcggtccatgggccagcctgtaccgagaaaggttcctttccgaacgcgtcaatggacggctgctgctgactctcacagaagaagagtttagcaagacaccctataccatagagaacagctcacaccgcagagccattctgatggagcttgagagagtaaaagctctgggcgtgaaaccaccgcagaacctttgggagtacaaggctgtcaatcctggacgcagtctttttctattgtatgccctgaagtccagtcccagactttcactcctatacttatacctgtttgactacaccgatacctttcttcccttcattcacacaatttgccctttacaggaggattcctccggagaagatatagttacaaagttgctcgaccttaaggagccaacctggaagcagtggagagaattcctagtgaaatattcattcctgccgtaccagctgatagcggagtttgcctgggactggctggaggttcattattggacaagtcgttttttgattattaacgccatgctgctgagtgtgctggaactgttctctttctggcggatttggtcaaggtcagagttgaagactgtcccacagcgtatgtggtcccacttctggaaagttagtactcagggccttttcgtcgctatgttctggcccttgatcccgcagttcgtgtgtaactgcctgttttactgggctctttacttcaatcctatcatcaatatagacctggtcgtaaaggaactgaggcgcctggagactcaagtcctgtag

SEQ ID NO: 192021 - DNA, 1353 bp, Artificial Sequence
  derived and/or modified sequence
atggaggagccccagaagagctatgtgaacaccatggacctggagagagatgagcccctgaagagcacaggcccccagatctctgtgtctgagttcagctgccactgctgctatgacatcctggtgaaccccaccaccctgaactgtggccacagcttctgccgccactgcctggccctgtggtgggccagcagcaagaagacagaatgtcctgagtgccgggagaagtgggagggcttccccaaggtgtccatcctgctgagagatgccatcgagaagctgttcccagatgccatccggctgcgctttgaggacatccagcagaacaatgacatcgtgcagagcctggccgccttccagaagtatggaaatgaccagatccccctggcccccaacacaggccgggccaaccagcagatgggcggcggcttcttcagcggcgtgctgacagccctgactggagtggccgtggtgctgctggtgtaccactggagcagccgggagagcgagcatgacctgctggtgcacaaggctgtggccaagtggacagctgaggaggtggtgctgtggctggagcagctgggcccctgggccagcctgtaccgggagcgcttcctgtctgagcgggtgaatggccgcctgctgctgaccctgacagaggaggagttcagcaagaccccctacaccatcgagaacagcagccaccggcgggccatcctgatggagctggagcgggtgaaggccctgggcgtgaagccaccccagaacctgtgggagtacaaggctgtgaaccctggccgcagcctcttcctgctgtatgccctgaagagcagcccccggctgagcctgctgtacctgtacctgtttgactacacagacaccttcctgcccttcatccacaccatctgccccctgcaggaggacagcagcggggaggacatcgtgaccaagctgctggacctgaaggagcccacctggaagcagtggagggagttcctggtgaagtacagcttcctgccctaccagctgattgctgagtttgcctgggactggctggaggtgcactactggaccagccgcttcctgatcatcaatgccatgctgctgtctgtgctggagctgttctccttctggaggatctggagccgctctgagctgaagacagtgccccagaggatgtggagccacttctggaaggtgtccacccagggcctgtttgtggccatgttctggcccctcatcccccagtttgtgtgcaactgcctcttctactgggccctgtacttcaaccccatcatcaacatcgacctggtggtgaaggagctgcggcggctggagacccaggtgctgtag

SEQ ID NO: 192022 - DNA, 1353 bp, Artificial Sequence
  derived and/or modified sequence
atggaggagccccagaagagctacgtgaacaccatggacctggagcgcgacgagcccttaaaatcaacaggcccgcagatttccgtctcagagtttagctgccactgctgttacgacatcctggtcaatcctaccaccctgaactgcggtcatagcttttgcagacactgcctcgccctgtggtgggcatctagtaaaaagaccgagtgccccgagtgtagggaaaagtgggaagggtttcccaaggtttctatactcctgcgtgatgcaattgaaaaattgttccctgacgccatcagactgagatttgaggacattcagcagaataatgacatcgttcaatctctggccgctttccaaaagtacggtaatgatcaaatcccacttgctcccaacacagggagagctaatcagcagatgggcggaggcttcttttcgggcgttcttaccgccctcactggagtggccgtggtgttgctggtgtaccactggtcaagtcgcgagtcagagcacgatctcttggttcataaggccgtggctaagtggacggccgaggaggtggtcttgtggctcgagcagctaggtccatgggcctccctgtaccgggagagatttttgtcagaacgagtgaatggtcggctgctgcttacgctgaccgaagaagagttctccaagacgccgtacacaatcgaaaatagttcccaccgcagggctattctaatggagctggaacgcgttaaagccttaggggttaaacctcctcagaacctgtgggagtacaaagcagtcaaccctggcaggagcctatttctgttgtatgccctcaagtcatcacccaggctaagtctgttatatttgtacttattcgattatacagatacatttttaccatttattcacactatatgtcctctgcaagaggacagctccggggaggatattgttaccaagcttctcgaccttaaagaaccgacctggaaacagtggcgtgagtttttggtcaagtattcattcttgccatatcagctgatcgctgagttcgcgtgggattggctggaagtgcactactggaccagccgtttccttatcatcaatgccatgcttctgtcagtgctcgagctgttcagcttctggcggatttggtcaagaagtgagctaaagacagtgcctcagcgcatgtggtcgcacttctggaaagtgtccacccagggtctgtttgttgcaatgttttggcccctcattccacagttcgtttgtaactgcctgttctattgggctttgtactttaaccctatcattaacattgacttagtcgttaaggagctccgtcgactggagactcaagtcctctag

SEQ ID NO: 192023 - DNA, 1353 bp, Artificial Sequence
  derived and/or modified sequence
atggaagagccacagaaatcttatgttaacacgatggatctggagagagatgagcctttgaaaagtaccggcccacagatttcggtgtccgagttttcctgtcattgctgttacgacattctggtgaaccccaccacactgaactgcggccattctttctgtagacattgtctggcattgtggtgggccagttcaaagaagactgaatgtcccgaatgcagagagaaatgggaaggttttcctaaggtctccattctccttcgcgacgctattgagaagttgtttcccgacgccatccggctgagatttgaggacatccagcaaaataatgacatcgtgcagtcgttggcagcgttccaaaagtacggcaatgatcaaatcccactggcccctaacaccggcagagccaaccagcaaatggggggaggtttcttcagtggtgtcttgacagctttgacaggcgtggccgtggtacttttggtctaccactggagttcgcgcgagagcgagcacgaccttttggtgcacaaggctgtggccaaatggaccgcagaggaggtcgtgctatggctcgaacagctggggccttgggctagcctctaccgcgagcggttcctaagcgagcgtgtgaatggccgtcttcttctcaccctaaccgaggaggagtttagtaaaactccgtacaccatcgaaaactctagccaccggcgagccattctgatggagctggaacgcgtcaaggcgctgggagtgaaacctcctcaaaacctttgggaatataaggccgttaaccctggccgatcactttttctcctgtatgcgttaaaatcatccccacggctctcccttctctatctctatctgttcgattacacagacacttttctgcccttcatccacacaatatgtccattacaggaggacagtagcggcgaggacatcgtcacgaagttgttggatctcaaggagcctacgtggaaacagtggcgggagttcctggtgaagtattcatttctgccgtaccagctgatagccgaatttgcctgggattggctggaagtccactactggacatcacgtttcctgataattaacgccatgttactttcagtactggaacttttctccttttggaggatatggagccgcagcgagctgaagaccgtcccacagaggatgtggagtcacttttggaaagttagcacccagggtctatttgtcgctatgttttggcccctcataccgcagttcgtatgcaattgcctgttttattgggccctctactttaatccaatcattaatatagatctcgtcgtgaaagagctgaggcgccttgagacccaggtattatag

SEQ ID NO: 192024 - DNA, 3039 bp, Artificial Sequence
  derived and/or modified sequence
gtggccgctctaggcagcggggaggtcgcggggttgaggggggttgtgaaaggagagcggcctctcctctatggtcacggggccggggcacgcttcccccactctgtcttgttacttccggtagcgaagcctctccctcttcctctgctcccgcggggtctgtgctgagaataatggcccggttggcccgggacgagtggaatgattaatgatgttttgcagcagttttctacgtctgaaattttttatgtctctggaacccagaatttgctaagagatggaggaacctcagaaaagctatgtgaacacaatggaccttgagagagatgaacctctcaaaagcaccggccctcagatttctgttagtgaattttcttgccactgctgctacgacatcctggttaaccccaccaccttgaactgtgggcacagcttctgccgtcactgccttgctttatggtgggcatcttcaaagaaaacagaatgtccagaatgcagagaaaaatgggaaggtttccccaaagtcagtattctcctcagggatgccattgaaaagttatttcctgatgccattagactgagatttgaagacattcagcagaataatgacatagtccaaagtcttgcagcctttcagaaatatgggaatgatcagattcctttagctcctaacacaggccgagcgaatcagcagatgggagggggattcttttccggtgtgctcacagctttaactggagtggcagtggtcctgctcgtctatcactggagcagcagggaatctgaacacgacctcctggtccacaaggctgtggccaaatggacggcggaagaagttgtcctctggctggagcagctgggcccttgggcatctctttacagggaaaggtttttatctgaacgagtaaatggaaggttgcttttaactttgacagaggaagaattttccaagacgccctataccatagaaaacagcagccacaggagagccatcctcatggagctagaacgtgtcaaagcattaggcgtgaagcccccccagaatctctgggaatataaggctgtgaacccaggcaggtccctgttcctgctatacgccctcaagagctcccccaggctgagtctgctctacctgtacctgtttgactacaccgacaccttcctacctttcatccacaccatctgccctctgcaagaagacagctctggggaggacatcgtcaccaagcttctggatcttaaggagcctacgtggaagcagtggagagagttcctggtcaaatactccttccttccataccagctgattgctgagtttgcttgggactggttggaggtccattactggacatcacggtttctcatcatcaatgctatgttactctcagttctggaattattctccttttggagaatctggtcgagaagtgaactgaagaccgtgcctcagaggatgtggagccatttctggaaagtatcaacgcaggggctttttgtggccatgttctggcccctcatccctcagtttgtttgcaactgtttgttttactgggccctgtactttaacccaattattaacattgatcttgtggtcaaggaactccggcggctggaaacccaggtgttgtgactggcactgcccaggctgagactcttcaagtcccgctgacgtctgagctttgatgcttaagaggggtgaggcagggagcggacttcctattttctaccctcagtaaaacaaggtgctgctttgtatatcaaaagctccaaccatgtcctctccccctcagcctgtgggtggcacgagcaaggactgacatccgcacagggaggattgtctgtttggctgacacagcagcagcccttcccacccagccaccttcctcacagggactaggaggctcagtccccaacggctggcaagactcagggtcctcagtggacatggtgtgggtgacatcagaagggtgccacatcagtcccctccccaacctcagtgactgacagaggatccggatctcagagcctgagaccaggtttattggggcctggcctgtcctctaagtcaagtttaggaaaacaaggataagattctgtcataggcatagagagttgcacataaaaaataccgaagaaaacccaaaattcaatcaacaattctgtcttattgaagagttgctaggattcagagtaaaactcaaaggattcagtttgagcctagaatgatggttagacttgtagtcactgggcttttgttttgctttatggaaatcattgaaggtctggatccctttctctgaatggagagattgagagggatgtcgggcagttcccattagatttagtggccttcatgttattcagaattgttttggtgatacctcacccctgtaatcccagcactttgggtgggtgaggcaggcggatcacttgaagccaggacttcaagaccagcttggccaacatggtgaaacctcatctctactaaaaatacaaaaattagccaagtgtgatggcacatacctgtaatcccagctacttggaattggaaatcgcctgaacccaggaggcggaggttgcagggagggagactgcaccactgcacttcagcctgggtgacagagggagactctgtcttaaaaaaaaaaaaaaaatcatctgtaaaataaattccgggatagtcgttttgttcaaggaaatgttttgtaaattgagctcacactatataatctttattgtcctatcctgatgtataatacagcaggtataattacaccaagcgctatagttataaatatggcatgaagtgaactatggccttttatttccttccagtgtgaacacagcaggtgtgagatgtcatcttggaagacaggccttgcagaaataggcctacatccaaaatattatcttgtgactccatgaaccattcattaaccctttgtatctttgagtgaaaattttactcaaaagttgcatctggaagttcgaagaaattacttgaaataaaaataaagatttctatatagataaaaccta

SEQ ID NO: 192025 - DNA, 1353 bp, Artificial Sequence
  derived and/or modified sequence
atggaggagccccagaagagctacgtgaacaccatggacctggagagagacgagcccctgaagagcaccggcccccagatcagcgtgagcgagttcagctgccactgctgctacgacatcctggtgaaccccaccaccctgaactgcggccacagcttctgcagacactgcctggccctgtggtgggccagcagcaagaagaccgagtgccccgagtgcagagagaagtgggagggcttccccaaggtgagcatcctgctgagagacgccatcgagaagctgttccccgacgccatcagactgagattcgaggacatccagcagaacaacgacatcgtgcagagcctggccgccttccagaagtacggcaacgaccagatccccctggcccccaacaccggcagagccaaccagcagatgggcggcggcttcttcagcggcgtgctgaccgccctgaccggcgtggccgtggtgctgctggtgtaccactggagcagcagagagagcgagcacgacctgctggtgcacaaggccgtggccaagtggaccgccgaggaggtggtgctgtggctggagcagctgggcccctgggccagcctgtacagagagagattcctgagcgagagagtgaacggcagactgctgctgaccctgaccgaggaggagttcagcaagaccccctacaccatcgagaacagcagccacagaagagccatcctgatggagctggagagagtgaaggccctgggcgtgaagcccccccagaacctgtgggagtacaaggccgtgaaccccggcagaagcctgttcctgctgtacgccctgaagagcagccccagactgagcctgctgtacctgtacctgttcgactacaccgacaccttcctgcccttcatccacaccatctgccccctgcaggaggacagcagcggcgaggacatcgtgaccaagctgctggacctgaaggagcccacctggaagcagtggagagagttcctggtgaagtacagcttcctgccctaccagctgatcgccgagttcgcctgggactggctggaggtgcactactggaccagcagattcctgatcatcaacgccatgctgctgagcgtgctggagctgttcagcttctggagaatctggagcagaagcgagctgaagaccgtgccccagagaatgtggagccacttctggaaggtgagcacccagggcctgttcgtggccatgttctggcccctgatcccccagttcgtgtgcaactgcctgttctactgggccctgtacttcaaccccatcatcaacatcgacctggtggtgaaggagctgagaagactggagacccaggtgctgtag

SEQ ID NO: 192026 - DNA, 88 bp, Artificial Sequence
  derived and/or modified sequence
agcaacttcagcaaagactcaggatacaaaatcaatgtgcaaaaatcacaagcattcttatacaccaataacagacagagagccaaat

SEQ ID NO: 192027 - protein, 1049 aa, Artificial Sequence
  derived and/or modified sequence
MVFPMWTLKRQILILFNIILISKLLGARWFPKTLPCDVTLDVPKNHVIVDCTDKHLTEIPGGIPTNTTNLTLTINHIPDISPASFHRLDHLVEIDFRCNCVPIPLGSKNNMCIKRLQIKPRSFSGLTYLKSLYLDGNQLLEIPQGLPPSLQLLSLEANNIFSIRKENLTELANIEILYLGQNCYYRNPCYVSYSIEKDAFLNLTKLKVLSLKDNNVTAVPTVLPSTLTELYLYNNMIAKIQEDDFNNLNQLQILDLSGNCPRCYNAPFPCAPCKNNSPLQIPVNAFDALTELKVLRLHSNSLQHVPPRWFKNINKLQELDLSQNFLAKEIGDAKFLHFLPSLIQLDLSFNFELQVYRASMNLSQAFSSLKSLKILRIRGYVFKELKSFNLSPLHNLQNLEVLDLGTNFIKIANLSMFKQFKRLKVIDLSVNKISPSGDSSEVGFCSNARTSVESYEPQVLEQLHYFRYDKYARSCRFKNKEASFMSVNESCYKYGQTLDLSKNSIFFVKSSDFQHLSFLKCLNLSGNLISQTLNGSEFQPLAELRYLDFSNNRLDLLHSTAFEELHKLEVLDISSNSHYFQSEGITHMLNFTKNLKVLQKLMMNDNDISSSTSRTMESESLRTLEFRGNHLDVLWREGDNRYLQLFKNLLKLEELDISKNSLSFLPSGVFDGMPPNLKNLSLAKNGLKSFSWKKLQCLKNLETLDLSHNQLTTVPERLSNCSRSLKNLILKNNQIRSLTKYFLQDAFQLRYLDLSSNKIQMIQKTSFPENVLNNLKMLLLHHNRFLCTCDAVWFVWWVNHTEVTIPYLATDVTCVGPGAHKGQSVISLDLYTCELDLTNLILFSLSISVSLFLMVMMTASHLYFWDVWYIYHFCKAKIKGYQRLISPDCCYDAFIVYDTKDPAVTEWVLAELVAKLEDPREKHFNLCLEERDWLPGQPVLENLSQSIQLSKKTVFVMTDKYAKTENFKIAFYLSHQRLMDEKVDVIILIFLEKPFQKSKFLQLRKRLCGSSVLEWPTNPQAHPYFWQCLKNALATDNHVAYSQVFKETV

SEQ ID NO: 192028 - DNA, 3150 bp, Artificial Sequence
  derived and/or modified sequence
atggtgttccccatgtggaccctgaagagacagatcctgatcctgttcaacatcatcctgatcagcaagctgctgggcgccagatggttccccaagaccctgccctgcgacgtgaccctggacgtgcccaagaaccacgtgatcgtggactgcaccgacaagcacctgaccgagatccccggcggcatccccaccaacaccaccaacctgaccctgaccatcaaccacatccccgacatcagccccgccagcttccacagactggaccacctggtggagatcgacttcagatgcaactgcgtgcccatccccctgggcagcaagaacaacatgtgcatcaagagactgcagatcaagcccagaagcttcagcggcctgacctacctgaagagcctgtacctggacggcaaccagctgctggagatcccccagggcctgccccccagcctgcagctgctgagcctggaggccaacaacatcttcagcatcagaaaggagaacctgaccgagctggccaacatcgagatcctgtacctgggccagaactgctactacagaaacccctgctacgtgagctacagcatcgagaaggacgccttcctgaacctgaccaagctgaaggtgctgagcctgaaggacaacaacgtgaccgccgtgcccaccgtgctgcccagcaccctgaccgagctgtacctgtacaacaacatgatcgccaagatccaggaggacgacttcaacaacctgaaccagctgcagatcctggacctgagcggcaactgccccagatgctacaacgcccccttcccctgcgccccctgcaagaacaacagccccctgcagatccccgtgaacgccttcgacgccctgaccgagctgaaggtgctgagactgcacagcaacagcctgcagcacgtgccccccagatggttcaagaacatcaacaagctgcaggagctggacctgagccagaacttcctggccaaggagatcggcgacgccaagttcctgcacttcctgcccagcctgatccagctggacctgagcttcaacttcgagctgcaggtgtacagagccagcatgaacctgagccaggccttcagcagcctgaagagcctgaagatcctgagaatcagaggctacgtgttcaaggagctgaagagcttcaacctgagccccctgcacaacctgcagaacctggaggtgctggacctgggcaccaacttcatcaagatcgccaacctgagcatgttcaagcagttcaagagactgaaggtgatcgacctgagcgtgaacaagatcagccccagcggcgacagcagcgaggtgggcttctgcagcaacgccagaaccagcgtggagagctacgagccccaggtgctggagcagctgcactacttcagatacgacaagtacgccagaagctgcagattcaagaacaaggaggccagcttcatgagcgtgaacgagagctgctacaagtacggccagaccctggacctgagcaagaacagcatcttcttcgtgaagagcagcgacttccagcacctgagcttcctgaagtgcctgaacctgagcggcaacctgatcagccagaccctgaacggcagcgagttccagcccctggccgagctgagatacctggacttcagcaacaacagactggacctgctgcacagcaccgccttcgaggagctgcacaagctggaggtgctggacatcagcagcaacagccactacttccagagcgagggcatcacccacatgctgaacttcaccaagaacctgaaggtgctgcagaagctgatgatgaacgacaacgacatcagcagcagcaccagcagaaccatggagagcgagagcctgagaaccctggagttcagaggcaaccacctggacgtgctgtggagagagggcgacaacagatacctgcagctgttcaagaacctgctgaagctggaggagctggacatcagcaagaacagcctgagcttcctgcccagcggcgtgttcgacggcatgccccccaacctgaagaacctgagcctggccaagaacggcctgaagagcttcagctggaagaagctgcagtgcctgaagaacctggagaccctggacctgagccacaaccagctgaccaccgtgcccgagagactgagcaactgcagcagaagcctgaagaacctgatcctgaagaacaaccagatcagaagcctgaccaagtacttcctgcaggacgccttccagctgagatacctggacctgagcagcaacaagatccagatgatccagaagaccagcttccccgagaacgtgctgaacaacctgaagatgctgctgctgcaccacaacagattcctgtgcacctgcgacgccgtgtggttcgtgtggtgggtgaaccacaccgaggtgaccatcccctacctggccaccgacgtgacctgcgtgggccccggcgcccacaagggccagagcgtgatcagcctggacctgtacacctgcgagctggacctgaccaacctgatcctgttcagcctgagcatcagcgtgagcctgttcctgatggtgatgatgaccgccagccacctgtacttctgggacgtgtggtacatctaccacttctgcaaggccaagatcaagggctaccagagactgatcagccccgactgctgctacgacgccttcatcgtgtacgacaccaaggaccccgccgtgaccgagtgggtgctggccgagctggtggccaagctggaggaccccagagagaagcacttcaacctgtgcctggaggagagagactggctgcccggccagcccgtgctggagaacctgagccagagcatccagctgagcaagaagaccgtgttcgtgatgaccgacaagtacgccaagaccgagaacttcaagatcgccttctacctgagccaccagagactgatggacgagaaggtggacgtgatcatcctgatcttcctggagaagcccttccagaagagcaagttcctgcagctgagaaagagactgtgcggcagcagcgtgctggagtggcccaccaacccccaggcccacccctacttctggcagtgcctgaagaacgccctggccaccgacaaccacgtggcctacagccaggtgttcaaggagaccgtgtag

SEQ ID NO: 192029 - DNA, 3150 bp, Artificial Sequence
  derived and/or modified sequence
atggttttcccaatgtggacgctgaaacgccagatcctcatactgttcaatatcattctcatctccaagctgctcggagcacgctggtttcctaaaactctcccatgtgatgtgactcttgacgtgcccaaaaatcacgtcatcgtggactgtacggacaaacacctaactgagataccgggcggcatacctactaacactaccaacctcactctcactatcaatcacatcccagacatctcacccgccagttttcataggctggaccatctagtcgaaatcgatttccgatgcaactgcgtgcctatcccactgggcagcaagaataacatgtgtattaaaaggttacagatcaaacctagaagcttttcaggtttgacatacctgaaatccctatatctggacggcaaccaattactggagattccccaggggcttcccccttcactgcagttgctgtcacttgaggccaacaacatttttagcatcaggaaggaaaacctgaccgagctggctaacattgaaattctgtaccttggacagaattgctactacagaaacccatgctatgttagttatagcattgagaaagatgccttcctgaacctgaccaaattaaaagtgttatccctgaaggacaataacgtgactgcagtccctaccgtactgcctagtacgctcaccgagctgtacctttataacaatatgattgccaagatccaggaggatgattttaacaacctgaaccagctgcagatcctggatcttagcggcaactgtcctcggtgctacaacgcacccttcccttgtgccccttgtaagaacaattctcccctccagatccccgtgaacgccttcgacgcattgacggaattaaaagtgcttcggttacatagtaatagtctacagcacgtgccccctaggtggtttaagaatataaataaactgcaggagctcgatctgtcacaaaacttcctggcaaaggagattggcgatgccaagtttctgcactttttgcctagtcttatacagcttgacctgtcattcaacttcgagctccaagtgtaccgagcaagtatgaatttgtcacaggctttctccagccttaagtctctcaaaattttgcggatccgcggatatgttttcaaagagctgaaatccttcaatctgtccccactgcacaatttgcaaaacctcgaagtgcttgacctcggcaccaactttatcaaaattgctaatctgtccatgtttaagcagttcaagcgcctcaaggtgatcgacctaagcgtgaataaaatttcccctagtggcgattcgtctgaggtgggtttctgttctaatgctagaacatccgtggaatcctatgaaccacaggtgctggagcaactgcattacttccgctacgacaagtatgcccggagttgccgatttaagaacaaggaggcaagcttcatgtctgtgaacgaatcctgctataagtacggacagacattggacctgagtaagaattccattttctttgtgaagtcctcagacttccagcacttgtcctttcttaagtgcctgaatttgagtggcaacctaatctctcagacgttgaacgggtccgaatttcagccactggcagaactcaggtatttggacttttcaaataaccgcctcgatctgctgcactccactgctttcgaggaactgcataagctggaagtcttggacatctcctctaattcccactacttccaatctgaagggataacccacatgcttaattttactaagaatctgaaagtgctacagaaacttatgatgaacgataacgacatcagttcttccaccagccggacaatggagtccgaaagcctgcgtacactggaatttcgaggcaaccaccttgacgtgctgtggagagagggcgacaaccgctatctacagcttttcaagaacttgctgaaactcgaagaactcgatattagcaagaactccctgagcttcctgccttccggagtgttcgacgggatgccacctaacctgaagaacctcagcctggcaaagaatggcctgaagtccttctcctggaaaaagctgcaatgtctgaagaatctagagaccttagacctttcacacaatcagctgacaacagtgcccgagaggctatcaaactgctccagaagcttaaaaaacctgatcctgaaaaacaaccagatccggtccctcaccaagtacttcttacaggatgcatttcagctgaggtacctcgatctcagcagcaacaagatacagatgatccagaaaacctccttccccgagaacgtgctcaataatctgaaaatgttgctcctccaccataaccgctttctttgtacctgtgatgcagtgtggtttgtgtggtgggtgaatcacacagaggtcaccatcccctatttggccacagacgtgacatgtgtgggccctggagctcacaaaggccagagtgtgatttccctggatctctacacttgtgaacttgacctgacgaatcttatactgttttcccttagcataagtgtaagtctgttccttatggtcatgatgaccgccagccatctctacttctgggatgtgtggtatatttaccatttctgtaaagccaaaataaagggctatcaacgtctgattagccccgattgttgctatgacgccttcatcgtttacgacaccaaggaccctgccgtcaccgaatgggtgctggcggagctcgtggcaaagttagaggacccacgcgagaaacactttaatctgtgcctggaagagagagactggcttcctggacagcctgtgctggaaaatctcagtcagagcattcagctgtctaaaaaaaccgtgttcgtgatgacagataagtacgcgaaaactgagaattttaagatcgcattctatttgagccaccagcgccttatggacgaaaaagttgatgtcatcatcctgatcttcctggaaaagcccttccagaagtctaaatttctccagctgcgcaaacggctgtgcggatcgtccgtactggaatggccaacaaatccccaggcgcacccctatttctggcagtgtctaaagaacgccttagctaccgacaaccatgttgcctattcccaggtattcaaggaaactgtgtag

SEQ ID NO: 192030 - DNA, 3150 bp, Artificial Sequence
  derived and/or modified sequence
atggtgttccccatgtggaccctgaagaggcagatcctgatcctcttcaacatcatcctgatcagcaagctgctgggcgcccgctggttccccaagaccctgccctgtgatgtgaccctggatgtgcccaagaaccacgtgattgtggactgcacagacaagcacctgacagagatccctgggggcatccccaccaacaccaccaacctgaccctgaccatcaaccacatcccagacatcagccctgccagcttccaccggctggaccacctggtggagattgacttccgctgcaactgtgtgcccatccccctgggcagcaagaacaacatgtgcatcaagaggctgcagatcaagcccaggagcttcagcggcctgacctacctgaagagcctgtacctggatggcaaccagctgctggagatcccccagggcctgccccccagcctgcagctgctgagcctggaggccaacaacatcttcagcatcaggaaggagaacctgacagagctggccaacatcgagatcctgtacctgggccagaactgctactacagaaacccctgctacgtgtcctacagcattgagaaggatgccttcctgaacctgaccaagctgaaggtgctgagcctgaaggacaacaacgtgacagctgtgcccaccgtgctgcccagcaccctgacagagctgtacctgtacaacaacatgattgccaagatccaggaggatgacttcaacaacctgaaccagctgcagatcctggacctgagcggcaactgcccccgctgctacaatgcccccttcccctgtgccccctgcaagaacaacagccccctgcagatccctgtgaatgcctttgatgccctgacagagctgaaggtgctgcggctgcacagcaacagcctgcagcacgtgcccccacgctggttcaagaacatcaacaagctgcaggagctggacctgagccagaacttcctggccaaggagattggagatgccaagttcctgcacttcctgcccagcctcatccagctggacctgtccttcaactttgagctgcaggtgtaccgggcctccatgaacctgagccaggccttcagcagcctgaagagcctgaagatcctgcgcatccggggctacgtgttcaaggagctgaagagcttcaacctgagccccctgcacaacctgcagaacctggaggtgctggacctgggcaccaacttcatcaagatcgccaacctgtccatgttcaagcagttcaagaggctgaaggtgattgacctgtctgtgaacaagatcagccccagcggggacagcagcgaggtgggcttctgcagcaatgcccggacctctgtggagagctatgagccccaggtgctggagcagctgcactacttccgctatgacaagtatgcccggagctgccgcttcaagaacaaggaggccagcttcatgtctgtgaatgaaagctgctacaagtatggccagaccctggacctgagcaagaacagcatcttctttgtgaagagcagtgacttccagcacctgtccttcctgaagtgcctgaacctgagcggcaacctgatcagccagaccctgaatggcagcgagttccagcccctggccgagctgcgctacctggacttcagcaacaaccggctggacctgctgcacagcacagcctttgaggagctgcacaagctggaggtgctggacatcagcagcaacagccactacttccagagcgagggcatcacccacatgctgaacttcaccaagaacctgaaggtgctgcagaagctgatgatgaatgacaatgacatcagcagcagcaccagcaggaccatggagagcgagagcctgcggaccctggagttccggggcaaccacctggatgtgctgtggagggagggggacaaccgctacctgcagctgttcaagaacctgctgaagctggaggagctggacatcagcaagaacagcctgtccttcctgcccagcggcgtgtttgatggcatgccacccaacctgaagaacctgagcctggccaagaatggcctgaagagcttctcctggaagaagctgcagtgcctgaagaacctggagaccctggacctgagccacaaccagctgaccaccgtgcctgagcggctgagcaactgcagccgcagcctgaagaacctgatcctgaagaacaaccagatccgcagcctgaccaagtacttcctgcaggatgccttccagctgcgctacctggacctgagcagcaacaagatccagatgatccagaagaccagcttcccagaaaatgtgctgaacaacctgaagatgctgctgctgcaccacaaccgcttcctgtgcacctgtgatgctgtgtggtttgtgtggtgggtgaaccacacagaggtgaccatcccctacctggccacagatgtgacctgtgtgggccctggggcccacaagggccagagcgtcatcagcctggacctgtacacctgtgagctggacctgaccaacctgatcctcttcagcctgagcatctctgtgtccctcttcctgatggtgatgatgacagccagccacctgtacttctgggatgtgtggtacatctaccacttctgcaaggccaagatcaagggctaccagaggctcatcagcccagactgctgctatgatgccttcatcgtgtatgacaccaaggaccctgctgtgacagagtgggtgctggccgagctggtggccaagctggaggacccccgggagaagcacttcaacctgtgcctggaggagcgggactggctgcccggccagcctgtgctggagaacctgagccagagcatccagctgagcaagaagacagtgtttgtgatgacagacaagtatgccaagacagagaacttcaagatcgccttctacctgagccaccagaggctgatggatgagaaggtggatgtgatcatcctgatcttcctggagaagcccttccagaagagcaagttcctgcagctgaggaagaggctgtgtggcagctctgtgctggagtggcccaccaacccccaggcccacccctacttctggcagtgcctgaagaatgccctggccacagacaaccacgtggcctacagccaggtgttcaaggagaccgtgtag

SEQ ID NO: 192031 - DNA, 3150 bp, Artificial Sequence
  derived and/or modified sequence
atggtgttccccatgtggaccctgaagcggcagatcctgatcctgttcaacatcatcctgatcagcaagctcctgggtgccagatggtttcctaagaccctgccctgcgatgtgaccctggatgtgcctaaaaatcatgtcatcgtggattgtacagataagcacctgactgaaatcccgggcggaattcccacaaacacaactaatctgactctgaccattaatcacataccagacattagtcccgcctcattccatcgactggaccacctggtcgaaatcgatttccggtgtaattgcgtcccaattcctctaggatccaaaaacaatatgtgtataaaacgcctacaaattaagccccgttcgttctcaggtctcacatacctcaaatctctttacctcgacgggaatcaactcctagagatcccccagggcctccctccctccctgcagttattaagccttgaggccaataatattttttcgatacggaaagaaaatttaaccgagctggcaaacatagagatcttgtacctagggcagaactgttactaccgtaacccctgctatgtgtcctacagcatagagaaggacgcatttcttaatctgaccaaattaaaagtactctccctcaaagacaataacgttaccgcagtccctactgttctcccgtcaactctcaccgagctatatttgtacaacaacatgatagctaaaatacaggaagatgattttaacaacctcaaccagctgcagattctcgacctttcaggcaactgccctaggtgctacaatgctcccttcccatgcgctccatgcaagaataatagccctctacagatccctgtgaacgctttcgatgcgctgacagagctcaaagtgctccggctgcactctaatagcctgcagcatgtgcctcctcgctggttcaagaatatcaataagctgcaagagctcgacctctcccaaaacttcttggccaaagagattggtgacgcaaagtttctgcatttcctacctagcttgatccagctggatctatctttcaattttgagctgcaggtgtacagggcaagtatgaatttgagtcaggccttctcttcattgaagtctctcaagatcctgcgcatacgcggatacgtgttcaaagagctcaaatccttcaatttaagtcctctgcataacctgcaaaatcttgaggtgctcgatttggggaccaactttatcaagatcgcaaacctgtccatgttcaagcagtttaagcggctgaaagtgatagacttgtcagtgaataaaatctcaccctccggtgattctagcgaggtcgggttttgcagcaacgccaggacctcagttgagtcatacgaacctcaggtcctggagcagctgcactatttccggtatgataaatatgcccgctcttgcaggtttaaaaacaaagaggccagtttcatgtcagttaacgagtcatgttacaaatacggccagactctagatctgtcgaagaactccatcttcttcgttaagagtagcgatttccagcacctcagctttttgaagtgcctcaatctgagcggcaatctaatctcacagaccttaaacggtagcgagttccaaccattggctgaattgagatacttagatttttcaaataacaggctggacctgttacatagcaccgccttcgaggaactgcataagctcgaagttctggacatctcctccaatagccactattttcaaagcgagggaattacgcatatgctgaatttcactaagaatctcaaggtcctccaaaagctgatgatgaatgataatgatattagttctagcacctcccgtacgatggaatccgagagcctccgaacactcgaatttaggggtaaccatctggacgtgctctggagagagggcgataacagatatctacagttattcaaaaatttgctcaaactggaggagctagacattagcaagaactcactgtcgtttctcccctcgggcgtgttcgacggcatgccacccaatctgaagaatcttagtttggccaagaacggcctgaagtcattcagctggaagaaacttcagtgcctgaaaaacctggagactctcgatttatcacacaaccaattaacgaccgtgcccgaacgactttctaactgttctcgctccctgaagaatctgattttgaaaaataatcagattaggagtctcaccaagtacttcctgcaggatgccttccagctgcgctacttagatttgtcatctaataagatccaaatgatccagaagacctcattccctgagaacgtgctgaataacttgaagatgttgttgctccatcacaaccgtttcctgtgcacatgcgacgccgtgtggtttgtgtggtgggtcaatcacaccgaagtaacaatcccttacctggcaacagacgttacctgtgtgggccccggcgcccataaaggccaatccgtgatctcactcgacttatatacttgtgagctggatctaacaaatcttattttgttttctctcagcataagcgttagcctgttcctgatggtgatgatgacagcatctcacctctacttctgggacgtctggtacatctatcacttctgcaaggctaaaataaaaggatatcaaaggcttatttcccctgattgctgctacgacgcctttatcgtgtacgacaccaaggatccagcagtcactgagtgggtactagccgaactggtcgcaaagctcgaggaccctagagagaagcactttaacctgtgtctcgaggagagggactggctgccaggccaaccagtcctggagaacctatcccagtccatccagctgagtaagaagacagtgttcgtgatgactgataagtatgcaaagaccgaaaacttcaagattgccttttatctttctcaccaaaggctgatggatgagaaagttgatgtcattatcctcatatttctcgaaaagcccttccagaagtctaaattccttcaactgcgtaaacgtctgtgcggatcctccgttctcgaatggccaactaatccacaggcacacccatacttttggcagtgtcttaagaacgccttggccaccgacaaccacgtggcttacagtcaggttttcaaggaaaccgtctag

SEQ ID NO: 192032 - DNA, 3150 bp, Artificial Sequence
  derived and/or modified sequence
atggttttccctatgtggactttgaagaggcagatcttgatactcttcaatatcatcttgattagtaagctcttgggtgcccgatggttcccaaagactttgccctgcgacgtgacgctcgacgtgccaaagaatcacgtgattgttgactgcacggataaacacttgaccgagatccccggagggatcccgaccaatacaacgaacctcacactgacaattaatcatatacccgacatctcgccagcctccttccatagactggatcacttagtggagatcgactttaggtgcaactgcgtacccatcccgttgggctcaaagaacaacatgtgtattaaacgcctccagattaaaccccgaagtttctcaggtcttacttatctgaaaagcctgtatctcgatggcaaccagctgctggagataccccaaggccttccgccatccctccagttgctaagtctggaagctaataatatcttcagtatccggaaagagaatctcaccgagttggccaatattgaaatcctttacctcggccagaactgttattacagaaatccctgctacgttagttactccatcgagaaggatgctttcctgaacttgacaaaacttaaggttctcagtctcaaagataacaacgtcactgccgttcccacagtccttccctctaccctcaccgagctgtacctgtataacaacatgatagcgaagatacaagaggacgatttcaataatttgaaccagctgcagatcctggatctgtctggcaactgccctcgatgttataacgcgccattcccctgtgcaccctgtaagaataactccccactgcaaatccccgtgaacgcgttcgacgcattaaccgaattaaaagtccttcggttgcactctaactccctccagcatgtaccacccagatggtttaagaacatcaataagcttcaggagctggacctttctcagaacttcctcgctaaagaaattggagatgcaaagttcctgcacttccttccgtcacttatacagctggatctctccttcaacttcgagctgcaggtgtatcgagcttccatgaacctgtcgcaagcgtttagttccctgaagagcctgaaaatcctccgaatccgcggttacgtcttcaaagagctgaagagctttaacctgtcacctctacacaacctgcagaacctggaagttcttgacctggggaccaactttataaaaatcgctaacctatctatgtttaaacaatttaaaaggttgaaggtgattgacctcagtgtcaataaaatttccccatccggtgacagttccgaagtaggcttttgcagcaacgcgagaacctctgtcgagtcctacgagcctcaggtacttgaacagctccattacttcagatatgacaaatatgcgaggagctgtaggtttaaaaataaggaagcttcctttatgtctgtgaatgagtcatgctacaagtatgggcagacgctggacctgtccaagaatagtatcttctttgttaaaagctcagacttccagcacttgtcatttctgaagtgtctgaacctcagcgggaatctgatctcccagacactaaatgggtccgagtttcagcctttagccgagttgcgttatttggatttttcgaacaacagactggatttgcttcactccaccgcatttgaggaactgcacaaactagaggtgttagacatcagcagtaactcgcactattttcaaagcgagggtattacacacatgttgaactttactaaaaatctaaaggttctgcaaaagctaatgatgaacgacaacgacatcagctcatcgaccagccgcaccatggagtccgagtctctgcggacactggagtttagaggcaaccatctggatgtattatggcgcgagggtgataatcggtacctacaattgttcaagaaccttctaaaattggaggagctggacatctcgaagaattccttgagctttttgccctccggggtcttcgatggtatgccgcctaatctcaagaacctctcactggcaaaaaacgggctcaaatcctttagctggaagaaactgcagtgcctaaagaacttggagaccctggacctgtctcacaatcagctgactactgtgcccgaacgcttgagcaattgctctagatcactgaagaatttgatcctgaaaaataaccagatcaggtctctgaccaagtatttcttgcaggatgcattccagcttcgctacttggatttatcttcaaacaaaattcaaatgattcaaaaaaccagttttccagagaatgtgttaaataaccttaaaatgttgttgctgcaccacaaccgcttcctgtgtacttgcgacgccgtttggtttgtttggtgggtgaatcacactgaagttaccattccctacctggcgaccgacgtcacttgcgttggaccaggcgcacataaaggacagagtgtgatatcacttgacttgtatacttgtgagctggacttaactaacctcatactcttcagtctcagtatttccgtgagcctgttccttatggtaatgatgaccgcatcacacctgtacttttgggatgtgtggtatatatatcatttttgtaaggcgaagatcaaggggtaccagcggctgattagccctgactgttgctatgatgcattcattgtgtacgataccaaagatcctgcagtaactgagtgggtcctggccgaattggtagccaagctggaggacccgagagagaagcattttaatctttgcttagaagagagggactggttacccggacaacccgtcctggagaatctttcccagagtattcaattaagtaagaagacagtgttcgttatgaccgataaatacgctaaaaccgagaactttaagatagccttctatttaagtcatcaacggctgatggacgagaaggtggacgtcatcatccttatctttctagagaagccctttcagaagagcaagttcctgcagctgcgtaaaagactgtgcggtagctctgtcttggagtggcccacgaaccctcaggcacatccctacttttggcagtgtcttaaaaacgctcttgctactgacaaccacgtggcctactctcaggttttcaaagagacagtgtag

SEQ ID NO: 192033 - DNA, 5011 bp, Artificial Sequence
  derived and/or modified sequence
gaagactccagatataggatcactccatgccatcaagaaagttgatgctattgggcccatctcaagctgatcttggcacctctcatgctctgctctcttcaaccagacctctacattccattttggaagaagactaaaaatggtgtttccaatgtggacactgaagagacaaattcttatcctttttaacataatcctaatttccaaactccttggggctagatggtttcctaaaactctgccctgtgatgtcactctggatgttccaaagaaccatgtgatcgtggactgcacagacaagcatttgacagaaattcctggaggtattcccacgaacaccacgaacctcaccctcaccattaaccacataccagacatctccccagcgtcctttcacagactggaccatctggtagagatcgatttcagatgcaactgtgtacctattccactggggtcaaaaaacaacatgtgcatcaagaggctgcagattaaacccagaagctttagtggactcacttatttaaaatccctttacctggatggaaaccagctactagagataccgcagggcctcccgcctagcttacagcttctcagccttgaggccaacaacatcttttccatcagaaaagagaatctaacagaactggccaacatagaaatactctacctgggccaaaactgttattatcgaaatccttgttatgtttcatattcaatagagaaagatgccttcctaaacttgacaaagttaaaagtgctctccctgaaagataacaatgtcacagccgtccctactgttttgccatctactttaacagaactatatctctacaacaacatgattgcaaaaatccaagaagatgattttaataacctcaaccaattacaaattcttgacctaagtggaaattgccctcgttgttataatgccccatttccttgtgcgccgtgtaaaaataattctcccctacagatccctgtaaatgcttttgatgcgctgacagaattaaaagttttacgtctacacagtaactctcttcagcatgtgcccccaagatggtttaagaacatcaacaaactccaggaactggatctgtcccaaaacttcttggccaaagaaattggggatgctaaatttctgcattttctccccagcctcatccaattggatctgtctttcaattttgaacttcaggtctatcgtgcatctatgaatctatcacaagcattttcttcactgaaaagcctgaaaattctgcggatcagaggatatgtctttaaagagttgaaaagctttaacctctcgccattacataatcttcaaaatcttgaagttcttgatcttggcactaactttataaaaattgctaacctcagcatgtttaaacaatttaaaagactgaaagtcatagatctttcagtgaataaaatatcaccttcaggagattcaagtgaagttggcttctgctcaaatgccagaacttctgtagaaagttatgaaccccaggtcctggaacaattacattatttcagatatgataagtatgcaaggagttgcagattcaaaaacaaagaggcttctttcatgtctgttaatgaaagctgctacaagtatgggcagaccttggatctaagtaaaaatagtatattttttgtcaagtcctctgattttcagcatctttctttcctcaaatgcctgaatctgtcaggaaatctcattagccaaactcttaatggcagtgaattccaacctttagcagagctgagatatttggacttctccaacaaccggcttgatttactccattcaacagcatttgaagagcttcacaaactggaagttctggatataagcagtaatagccattattttcaatcagaaggaattactcatatgctaaactttaccaagaacctaaaggttctgcagaaactgatgatgaacgacaatgacatctcttcctccaccagcaggaccatggagagtgagtctcttagaactctggaattcagaggaaatcacttagatgttttatggagagaaggtgataacagatacttacaattattcaagaatctgctaaaattagaggaattagacatctctaaaaattccctaagtttcttgccttctggagtttttgatggtatgcctccaaatctaaagaatctctctttggccaaaaatgggctcaaatctttcagttggaagaaactccagtgtctaaagaacctggaaactttggacctcagccacaaccaactgaccactgtccctgagagattatccaactgttccagaagcctcaagaatctgattcttaagaataatcaaatcaggagtctgacgaagtattttctacaagatgccttccagttgcgatatctggatctcagctcaaataaaatccagatgatccaaaagaccagcttcccagaaaatgtcctcaacaatctgaagatgttgcttttgcatcataatcggtttctgtgcacctgtgatgctgtgtggtttgtctggtgggttaaccatacggaggtgactattccttacctggccacagatgtgacttgtgtggggccaggagcacacaagggccaaagtgtgatctccctggatctgtacacctgtgagttagatctgactaacctgattctgttctcactttccatatctgtatctctctttctcatggtgatgatgacagcaagtcacctctatttctgggatgtgtggtatatttaccatttctgtaaggccaagataaaggggtatcagcgtctaatatcaccagactgttgctatgatgcttttattgtgtatgacactaaagacccagctgtgaccgagtgggttttggctgagctggtggccaaactggaagacccaagagagaaacattttaatttatgtctcgaggaaagggactggttaccagggcagccagttctggaaaacctttcccagagcatacagcttagcaaaaagacagtgtttgtgatgacagacaagtatgcaaagactgaaaattttaagatagcattttacttgtcccatcagaggctcatggatgaaaaagttgatgtgattatcttgatatttcttgagaagccctttcagaagtccaagttcctccagctccggaaaaggctctgtgggagttctgtccttgagtggccaacaaacccgcaagctcacccatacttctggcagtgtctaaagaacgccctggccacagacaatcatgtggcctatagtcaggtgttcaaggaaacggtctagcccttctttgcaaaacacaactgcctagtttaccaaggagaggcctggctgtttaaattgttttcatatatatcacaccaaaagcgtgttttgaaattcttcaagaaatgagattgcccatatttcaggggagccaccaacgtctgtcacaggagttggaaagatggggtttatataatgcatcaagtcttctttcttatctctctgtgtctctatttgcacttgagtctctcacctcagctcctgtaaaagagtggcaagtaaaaaacatggggctctgattctcctgtaattgtgataattaaatatacacacaatcatgacattgagaagaactgcatttctacccttaaaaagtactggtatatacagaaatagggttaaaaaaaactcaagctctctctatatgagaccaaaatgtactagagttagtttagtgaaataaaaaaccagtcagctggccgggcatggtggctcatgcttgtaatcccagcactttgggaggccgaggcaggtggatcacgaggtcaggagtttgagaccagtctggccaacatggtgaaaccccgtctgtactaaaaatacaaaaattagctgggcgtggtggtgggtgcctgtaatcccagctacttgggaggctgaggcaggagaatcgcttgaacccgggaggtggaggtggcagtgagccgagatcacgccactgcaatgcagcccgggcaacagagctagactgtctcaaaagaacaaaaaaaaaaaaacacaaaaaaactcagtcagcttcttaaccaattgcttccgtgtcatccagggccccattctgtgcagattgagtgtgggcaccacacaggtggttgctgcttcagtgcttcctgctctttttccttgggcctgcttctgggttccatagggaaacagtaagaaagaaagacacatccttaccataaatgcatatggtccacctacaaatagaaaaatatttaaatgatctgcctttatacaaagtgatattctctacctttgataatttacctgcttaaatgtttttatctgcactgcaaagtactgtatccaaagtaaaatttcctcatccaatatctttcaaactgttttgttaactaatgccatatatttgtaagtatctgcacacttgatacagcaacgttagatggttttgatggtaaaccctaaaggaggactccaagagtgtgtatttatttatagttttatcagagatgacaattatttgaatgccaattatatggattcctttcattttttgctggaggatgggagaagaaaccaaagtttatagaccttcacattgagaaagcttcagttttgaacttcagctatcagattcaaaaacaacagaaagaaccaagacattcttaagatgcctgtactttcagctgggtataaattcatgagttcaaagattgaaacctgaccaatttgctttatttcatggaagaagtgatctacaaaggtgtttgtgccatttggaaaacagcgtgcatgtgttcaagccttagattggcgatgtcgtattttcctcacgtgtggcaatgccaaaggctttactttacctgtgagtacacactatatgaattatttccaacgtacatttaatcaataagggtcacaaattcccaaatcaatctctggaataaatagagaggtaattaaattgctggagccaactatttcacaacttctgtaagc

SEQ ID NO: 192034 - protein, 266 aa, Artificial Sequence
  derived and/or modified sequence
MSSVFGKPRAGSGPQSAPLEVNLAILGRRGAGKSALTVKFLTKRFISEYDPNLEDTYSSEETVDHQPVHLRVMDTADLDTPRNCERYLNWAHAFLVVYSVDSRQSFDSSSSYLELLALHAKETQRSIPALLLGNKLDMAQYRQVTKAEGVALAGRFGCLFFEVSACLDFEHVQHVFHEAVREARRELEKSPLTRPLFISEERALPHQAPLTARHGLASCTFNTLSTINLKEMPTVAQAKLVTVKSSRAQSKRKAPTLTLLKGFKIF

SEQ ID NO: 192035 - protein, 255 aa, Artificial Sequence
  derived and/or modified sequence
MVIMGPELVGSWSDFKNEAADPRALTVKFLTKRFISEYDPNLEDTYSSEETVDHQPVHLRVMDTADLDTPRNCERYLNWAHAFLVVYSVDSRQSFDSSSSYLELLALHAKETQRSIPALLLGNKLDMAQYRQVTKAEGVALAGRFGCLFFEVSACLDFEHVQHVFHEAVREARRELEKSPLTRPLFISEERALPHQAPLTARHGLASCTFNTLSTINLKEMPTVAQAKLVTVKSSRAQSKRKAPTLTLLKGFKIF

SEQ ID NO: 192036 - DNA, 768 bp, Artificial Sequence
  derived and/or modified sequence
atggtgatcatgggccccgagctggtgggcagctggagcgacttcaagaacgaggccgccgaccccagagccctgaccgtgaagttcctgaccaagagattcatcagcgagtacgaccccaacctggaggacacctacagcagcgaggagaccgtggaccaccagcccgtgcacctgagagtgatggacaccgccgacctggacacccccagaaactgcgagagatacctgaactgggcccacgccttcctggtggtgtacagcgtggacagcagacagagcttcgacagcagcagcagctacctggagctgctggccctgcacgccaaggagacccagagaagcatccccgccctgctgctgggcaacaagctggacatggcccagtacagacaggtgaccaaggccgagggcgtggccctggccggcagattcggctgcctgttcttcgaggtgagcgcctgcctggacttcgagcacgtgcagcacgtgttccacgaggccgtgagagaggccagaagagagctggagaagagccccctgaccagacccctgttcatcagcgaggagagagccctgccccaccaggcccccctgaccgccagacacggcctggccagctgcaccttcaacaccctgagcaccatcaacctgaaggagatgcccaccgtggcccaggccaagctggtgaccgtgaagagcagcagagcccagagcaagagaaaggcccccaccctgaccctgctgaagggcttcaagatcttctag

SEQ ID NO: 192037 - DNA, 768 bp, Artificial Sequence
  derived and/or modified sequence
atggtaattatgggacccgaactggtgggaagttggtctgatttcaagaacgaagccgccgatcctcgcgccttaactgtaaaatttctcacaaagcgcttcatttccgaatatgacccaaacttagaagacacttattcctcggaagagactgtagatcaccagcctgtgcatctgcgcgtcatggacacagccgacttagacactcccaggaattgcgagaggtatctgaactgggctcacgctttcctcgttgtttactctgttgactctaggcaatctttcgactcctctagcagctacctggaactcctcgccctacacgcgaaagagacacagagatccatccccgccttacttctggggaataagctggacatggctcagtacaggcaggttacaaaggcggaaggtgttgccctcgcaggcagatttggatgtctcttctttgaggtaagtgcttgcctcgactttgagcacgtccagcacgtgttccatgaggcggttcgggaggcaagacgtgagctggagaaatctcctttgacaagacctctgtttattagcgaagaacgcgccctgccccatcaggctcccctgactgccaggcacggactggcttcatgcacctttaataccctgtcaactattaacctgaaagagatgccaacggtcgcacaagccaaactcgtgaccgtgaaaagtagccgggcccaatctaagagaaaggctccgaccttaacactcttgaaaggctttaaaattttttag

SEQ ID NO: 192038 - DNA, 768 bp, Artificial Sequence
  derived and/or modified sequence
atggtgatcatgggccctgagctggtgggctcctggagcgacttcaagaatgaagctgctgacccccgggccctgactgtgaagttcctgaccaagcgcttcatcagtgaatatgaccccaacctggaggacacctacagcagcgaggagaccgtggaccaccagcctgtgcacctgcgggtgatggacacagctgacctggacaccccaagaaactgtgagcgctacctgaactgggcccacgccttcctggtggtgtacagcgtggacagccggcagagctttgacagcagcagcagctacctggagctgctggccctgcacgccaaggagacccagaggagcatcccagccctgctgctgggcaacaagctggacatggcccagtaccggcaggtgaccaaggccgagggcgtggccctggccggccgcttcggctgcctcttctttgaggtgtctgcctgcctggactttgagcacgtgcagcacgtgttccacgaggccgtgcgggaggcccggcgggagctggagaagagccccctgacccggcccctcttcatcagcgaggagcgggccctgccccaccaggcccccctgacagcccggcacggcctggccagctgcaccttcaacaccctgagcaccatcaacctgaaggagatgcccaccgtggcccaggccaagctggtgacagtgaagagcagccgggcccagagcaagaggaaggcccccaccctgaccctgctgaagggcttcaagatcttctag

SEQ ID NO: 192039 - DNA, 768 bp, Artificial Sequence
  derived and/or modified sequence
atggtgatcatgggccccgagctggtgggcagctggagcgacttcaaaaacgaggccgcagatccgcgggcgctgaccgtgaagttccttaccaaacgatttatctcagaatatgatccgaatctggaagacacttattccagtgaagagacggtggaccatcagccggttcacttacgcgttatggatacagcagacctagatacacctagaaactgtgagcgctacctgaattgggcccatgccttcttggtagtctattcagtagactcacgtcaaagcttcgactctagctctagttacctcgaacttctggccctccacgcaaaagaaacgcagcggtctatccctgctttactcttaggcaacaaattagatatggctcagtaccggcaggtcacaaaagccgagggggtcgcactcgctggtagattcgggtgtctgttttttgaagtcagcgcctgtctggactttgaacatgtccaacatgttttccatgaagccgtgcgcgaggctcgccgggagctggaaaagtctcctctgactcgccccttatttatctctgaagagcgcgccctgcctcaccaggcgcccctaacagctcgacatggcctcgcaagttgcaccttcaatacactttccaccatcaacttgaaggaaatgcccactgtggcccaagctaagctggttacggtgaagtcttcgagagcacagtcaaaacgcaaagcccccaccttgacgctcctgaaggggttcaagatcttctag

SEQ ID NO: 192040 - DNA, 768 bp, Artificial Sequence
  derived and/or modified sequence
atggttattatggggcctgagttagtgggcagttggagcgatttcaagaatgaagcggcagatccgagggccttaacggttaagttcctgacgaagcgctttatcagcgaatacgatcccaacttagaggacacttatagttctgaggagacagtggatcatcaaccagtgcacctgcgggtcatggatacagccgatcttgatacacctcggaactgtgaacgctacctaaactgggcgcatgcttttctggtggtgtactcagtggacagcagacaaagctttgactcatccagctcctatttagagctgctcgcactccacgcgaaagaaacacagcggtcgatccccgctctcctcctggggaacaagttggatatggcacagtaccgccaggttaccaaggctgaaggagtcgcgttggctggcagatttgggtgccttttctttgaggtgagcgcctgcctcgattttgaacatgtgcagcatgtctttcacgaggccgtaagagaggcccgtagggagctggagaagtctccactgacaagaccacttttcatctccgaggagcgtgccctaccccatcaagcacccctgaccgcaagacacggcctggctagctgtacctttaatacactcagtactattaatttgaaagaaatgccaactgtagcacaggcaaagctcgtcacagtaaagagtagccgcgctcagtcgaagcggaaagctccaacattgaccctgctaaaggggttcaaaattttctag

SEQ ID NO: 192041 - DNA, 2636 bp, Artificial Sequence
  derived and/or modified sequence
gctccaggagccggctgagcgcgccccgcggggggctccgcagcccttacaaggaatttggtggcgcttggggtggccccgcccgccaggctccaccggcccctcctccccgcggggtggcagcccgctggacgcggggccgagggcgcggacgccgacgggtccggggccgcgcgctccagggaagcctgcatcccgctcccctgggccccgacgggcgggcgcactgcgcggggcccaccggccgcagacctgcgtggccgtccagggcgtcgccatgtcctcggtgtttggaaaaccccgcgcgggcagcgggcctcagagcgcgcccctcgaggtcaacctggccatcctggggcgccgcggggctggcaagtctgccctgaccgtgaagtttctgaccaagaggtttatcagtgaatatgaccccaacttggaggacacctacagctccgaggagactgtggaccaccagcctgtccacctgagggtcatggacactgcagacctggacacccccaggaactgcgagcgctacctgaactgggcccatgccttcctggtggtgtacagcgtcgacagccgccagagctttgatagcagcagcagctacctggagctgcttgccttgcacgcgaaggagacacagcgcagcatccctgccctgctgctgggcaacaagctggacatggctcagtacaggcaagtcaccaaggcagagggtgtggctttggcaggcaggtttgggtgcctgtttttcgaggtctctgcctgtctggactttgagcacgtgcagcatgtcttccacgaggcagtgcgagaggcacggcgggagctggagaagagccccctgacccggcccctcttcatctccgaggagagggccctgccccaccaggccccgctcaccgcgcggcatgggctggccagctgcaccttcaacacgctctccaccatcaacctgaaggagatgcccactgtggcccaggccaagctggtcaccgtgaagtcatcccgggcccagagcaagcgcaaggcgcctaccctgactctcctgaagggcttcaagatcttctgaggccccctccccaggaagcctaggctcggtggctggacaggactgcagcaggacagggactggcttctcaccaccagcctttccgtctgatggacagcagaccccgcctccagcaccaagcagtgtccctacactcaattcactgtgtgagctggagtggcaggcagggatgctgcttctgttccctccaggccttggtcttcatggtaaccaccgcgtctgtggccgtagagggaaacagccactgtgacaacccagagacctggggtcagccttaagtaggaagaaattgcagtgtctatcctgctgccatcagcccttcctgctccagctacagttgggccagctgtggccttagtggatggtctgggtggatggctctgtcaatgtcaggcccgagaacagcctgcggaatgacagcctggggtccttgtgccacctggtggacgggaaaggcagggcggctgcagtttcagaggccagagcctggccctcctgtcatctgctgacttcacagaaggcccaggctacaaaccccacagtttatccaaggaaaatctagttaaaataatccaatggacagaagccccaggaaggggtatttccaacacttggcgtctcaatgaggataaaagggagggactgtaggttgtccagcataaggagccccagagttctttcaccagcagacagattctccatgtgttttcccactgttaaggactctgtccaaagaacctcagcatcagctccctcaagcttaatgatccaggctgcagaagaaagttgtcactccagtgagttacccagggctccagggagcccacagcagcatcagacccatccaggggctacagggcctgcccccctgcaggtagaaacacagtatacccgtttgtcatctggtttggcaggacccaggaccctcagcaatgagtctgagtgttcaaagcccactttagaacctaaagcattttgggttaataaagcaaaattttgcttatgttatttggtggtgtcaccgcagcttataccaagacaccatggctcagacatgggatcaggacacacctttgagatcccactgttagcaagaaaaggctgtccaaggcaggcagtgtggtagttgtctgattttgtttaccacacgccaggtcccagggaagtcttgcacagactcttagcagacaagcagggaaaagagagggtcctggtgggtggaaggattgggaaggggattctgggcctggaagcctgctccttcccctctcagccgtctcaggactactgttggattgcaaacagcatctctgacccagtcttcggactcattctgtaaatggaggagctgaggtcagaggggggctgtgaactactcaagaccacatgcttgcagtcctacaggcttcccgacccacaggccagctacggattttgcacttttgctccaggccacttgtgtgtgtatgtgtgtgtgtaccactgccatctgaacaaactatgcaataccacctgctcccttccaggagcattttaataaaagattttttttaataac

SEQ ID NO: 192042 - DNA, 982 bp, Artificial Sequence
  derived and/or modified sequence
tggctcatgtgatgtggtggcccgcaggctgtatggctgcaggcccggagggcatctggagacctgtgtgatcactcatatccttagaagaaatggtaataatgggtccagaattggtgggttcttggtctgacttcaagaatgaagccgcggaccctcgagccctgaccgtgaagtttctgaccaagaggtttatcagtgaatatgaccccaacttggaggacacctacagctccgaggagactgtggaccaccagcctgtccacctgagggtcatggacactgcagacctggacacccccaggaactgcgagcgctacctgaactgggcccatgccttcctggtggtgtacagcgtcgacagccgccagagctttgatagcagcagcagctacctggagctgcttgccttgcacgcgaaggagacacagcgcagcatccctgccctgctgctgggcaacaagctggacatggctcagtacaggcaagtcaccaaggcagagggtgtggctttggcaggcaggtttgggtgcctgtttttcgaggtctctgcctgtctggactttgagcacgtgcagcatgtcttccacgaggcagtgcgagaggcacggcgggagctggagaagagccccctgacccggcccctcttcatctccgaggagagggccctgccccaccaggccccgctcaccgcgcggcatgggctggccagctgcaccttcaacacgctctccaccatcaacctgaaggagatgcccactgtggcccaggccaagctggtcaccgtgaagtcatcccgggcccagagcaagcgcaaggcgcctaccctgactctcctgaagggcttcaagatcttctgaggccccctccccaggaagcctaggctcggtggctggacaggactgcagcaggacagggactggcttctcaccaccagcctttccgtctgatggacagcagaccccgcctccagcaccaagca

SEQ ID NO: 192043 - DNA, 801 bp, Artificial Sequence
  derived and/or modified sequence
atgagctctgtctttggcaaacctcgtgccgggagtgggccccagtctgcaccattagaagtcaacctggccatactggggcgccgaggtgccggcaagtccgccttgacggtaaaatttctcaccaaaaggtttatctcagagtatgatccaaatcttgaagacacatacagtagcgaggagacagtcgaccaccagcccgtccatcttagagtgatggacacagccgatctggacacaccacggaactgcgagagatatctcaactgggcccacgctttcctggtggtgtacagcgtggattcaaggcaatccttcgacagcagctctagctacctcgagcttctggccctgcatgcaaaggagacccaacggagcattcccgcactgctgctaggaaacaagttggatatggcccaataccggcaggttaccaaagcagaaggggtcgcactggccgggagatttgggtgcttgttcttcgaggtgtcagcttgcctggactttgaacacgtccagcatgtgtttcacgaggccgtgcgggaggcccgtcgcgagcttgaaaaatccccactcacccgccccctgttcattagtgaggagagagctctcccacaccaggcaccgttaactgctaggcatggccttgcgagttgcacttttaacacccttagcacaatcaacctaaaggaaatgcctaccgtggcacaagctaaactggtgactgtcaaatccagtcgcgcccagtctaagaggaaagcccccacactcactttgctgaaagggttcaagatattctag

SEQ ID NO: 192044 - DNA, 801 bp, Artificial Sequence
  derived and/or modified sequence
atgagctctgtgtttgggaagccccgggccggcagcggcccccagagcgcccccctggaggtgaacctggccatcctgggcagaagaggagctgggaagagcgccctgactgtgaagttcctgaccaagcgcttcatcagtgaatatgaccccaacctggaggacacctacagcagcgaggagaccgtggaccaccagcctgtgcacctgcgggtgatggacacagctgacctggacacccccaggaactgtgagcgctacctgaactgggcccacgccttcctggtggtgtacagcgtggacagccggcagagctttgacagcagcagcagctacctggagctgctggccctgcacgccaaggagacccagaggagcatcccagccctgctgctgggcaacaagctggacatggcccagtaccggcaggtgaccaaggccgagggcgtggccctggccggccgcttcggctgcctcttctttgaggtgtctgcctgcctggactttgaacatgtgcagcacgtgttccatgaagctgtgcgggaggcccggcgggagctggagaagagccccctgacccggcccctcttcatcagcgaggagcgggccctgccccaccaggcccccctgacagcccggcacggcctggccagctgcaccttcaacaccctgagcaccatcaacctgaaggagatgcccaccgtggcccaggccaagctggtgacagtgaagagcagccgggcccagagcaagaggaaggcccccaccctgaccctgctgaagggcttcaagatcttctag

SEQ ID NO: 192045 - DNA, 801 bp, Artificial Sequence
  derived and/or modified sequence
atgagcagcgtgttcggcaagccccgggccggcagcggcccccagtctgcccctttggaggtcaacttggccattttagggcgcaggggagccgggaaaagtgctctcactgtcaagtttctcacgaagagattcatcagcgagtacgaccccaacctcgaagatacgtacagcagtgaggagactgtcgatcaccaaccagtccacctccgggtcatggatacagcagatctggacactcctcgaaactgtgaaagatacttaaattgggcccatgcttttctcgttgtatattctgtcgacagccgacagtccttcgactccagctcttcttacttggagctacttgccctgcacgccaaagagacacagaggagtattccagctctcctcctgggcaataagctggacatggcccagtacaggcaggtgacaaaagcggagggggtcgctttggctggtagatttggttgtctcttctttgaagtatctgcctgtttagatttcgagcacgtccagcatgtgttccatgaggctgtacgggaggcccgcagagagctggagaagagcccccttacccgacctttgtttataagcgaggagagggctctgccacatcaggcaccactcacagcaaggcatggactggcctcctgcaccttcaatacgcttagcaccataaatttgaaggaaatgcccactgtggcacaggctaaactcgtcaccgtaaaatccagcagagcacagtccaaaaggaaagcccccaccctgacgcttctcaaagggtttaagatcttctag

SEQ ID NO: 192046 - DNA, 801 bp, Artificial Sequence
  derived and/or modified sequence
atgagctccgtcttcgggaaacccagagccggttccgggccacagtctgcaccactcgaggtaaatttggcaattctgggccgacgcggtgccggaaaatccgcacttaccgtcaagtttcttacaaagcggttcattagcgagtacgatcccaacctggaagacacttactcgagtgaggagaccgtggaccaccagccagtgcacctgagagtgatggatactgctgatctggatacccctagaaactgcgaaaggtacctcaactgggctcacgcattcttagttgtttattcagttgatagccggcagagtttcgattcttccagctcatatttagagctgttggctcttcacgcaaaagagacccagcggtcgatacctgcgctgcttctgggcaacaaactcgacatggcccagtatcgacaggtgacaaaggccgaaggagtagccctggcaggtcgatttgggtgtctgttcttcgaggtgagcgcttgtctcgacttcgagcatgtgcagcacgtctttcacgaagcagtcagagaagcacggagggagcttgaaaaatctcccttaacacgacctttatttatctccgaggagagggcgctgccccaccaagcccctttaacagcgagacacggtcttgccagctgtacattcaatacactgtccacaataaatctgaaagagatgccaactgtggcccaggccaagttagtgaccgttaagtcctcccgcgcacagagtaagcggaaagcacctaccctgactctccttaaaggttttaagatcttttag

SEQ ID NO: 192047 - DNA, 801 bp, Artificial Sequence
  derived and/or modified sequence
atgagcagcgtgttcggcaagcccagagccggcagcggcccccagagcgcccccctggaggtgaacctggccatcctgggcagaagaggcgccggcaagagcgccctgaccgtgaagttcctgaccaagagattcatcagcgagtacgaccccaacctggaggacacctacagcagcgaggagaccgtggaccaccagcccgtgcacctgagagtgatggacaccgccgacctggacacccccagaaactgcgagagatacctgaactgggcccacgccttcctggtggtgtacagcgtggacagcagacagagcttcgacagcagcagcagctacctggagctgctggccctgcacgccaaggagacccagagaagcatccccgccctgctgctgggcaacaagctggacatggcccagtacagacaggtgaccaaggccgagggcgtggccctggccggcagattcggctgcctgttcttcgaggtgagcgcctgcctggacttcgagcacgtgcagcacgtgttccacgaggccgtgagagaggccagaagagagctggagaagagccccctgaccagacccctgttcatcagcgaggagagagccctgccccaccaggcccccctgaccgccagacacggcctggccagctgcaccttcaacaccctgagcaccatcaacctgaaggagatgcccaccgtggcccaggccaagctggtgaccgtgaagagcagcagagcccagagcaagagaaaggcccccaccctgaccctgctgaagggcttcaagatcttctag

SEQ ID NO: 192048 - protein, 149 aa, Artificial Sequence [sequence omitted]

SEQ ID NO: 192049 - DNA, 450 bp, Artificial Sequence
  derived and/or modified sequence
atggaaagtcgcgggaagtcagcttctagccctaaacctgataccaaggtacctcaggtgactactgaggccaaagttccaccagccgccgatggcaaggcccctctcaccaaaccctccaaaaaagaagctccagccgagaagcagcaacctcccgccgctcctactaccgcacccgcaaagaagacttctgctaaggccgaccccgcgttgctcaacaatcattctaaccttaaacctgctcccaccgtgccgagctccccagacgctacgccggagcctaaggggcccggagatggcgccgaggaggatgaagccgcgtcaggtggccccggcggacggggcccatggagctgcgaaaactttaaccctctgctggtggctggcggggttgcagtggccgcaattgcccttatacttggagtggccttcctggtccgcaaaaagtag

SEQ ID NO: 192050 - DNA, 450 bp, Artificial Sequence
  derived and/or modified sequence
atggagagccggggcaagagcgccagcagccccaagccagacaccaaggtgccccaggtgaccacagaggccaaggtgcccccagctgctgatggcaaggcccccctgaccaagcccagcaagaaggaggccccagctgagaagcagcagcccccagctgcccccaccacagccccagccaagaagaccagcgccaaggctgaccctgccctgctgaacaaccacagcaacctgaagccagcccccaccgtgcccagcagcccagatgccaccccagagcccaagggccctggagatggagcagaagaagatgaggccgccagcggcggccctgggggccggggcccctggagctgtgagaacttcaaccccctgctggtggccggcggcgtggccgtggccgccatcgccctgatcctgggcgtggccttcctggtgaggaagaagtag

SEQ ID NO: 192051 - DNA, 366 bp, Artificial Sequence
  derived and/or modified sequence
atggtgcccttcaatgacctgtacagcggccctgacaccttcagcgagttcatcagcgccagccacagcgctgtgcccttccggggcccccccctgctgctgccccccctgcgctggggccctgtgggcgcccggggcatccacggcagacatgagcccatccaccacccccagtgcaagaggccccgggcccggggcagaagagcccaccccttcggcgtgcgggcccggagccctgaggtggccctgagcctggccgcccgctgggtgctggatgtgggctttgaccacctggctgatggaaatggcctgagccagagcgcccccttcttctgcccccctcatgtgacagagatgctgctgtag

SEQ ID NO: 192052 - DNA, 450 bp, Artificial Sequence
  derived and/or modified sequence
atggagagccggggcaagagcgccagcagccccaagcccgacaccaaggtgccgcaggtaacaactgaggccaaagtgcccccggccgcagatgggaaggcccctctcaccaagccatctaaaaaggaggctcccgccgagaaacagcagcctcctgccgcccctaccacagcacctgcgaagaagacatccgctaaggctgatcctgctttgctgaataaccacagtaatttaaagcctgccccaaccgttccgtcttccccagacgcaacacctgagcctaaagggcccggagatggagccgaggaagatgaagccgcgtccggaggtcccggaggccggggtccctggagttgtgagaacttcaaccccctactcgtggccggcggggttgcagtcgcggccatcgctctaatactcggcgttgcttttctggtccgcaaaaagtag

SEQ ID NO: 192053 - DNA, 450 bp, Artificial Sequence
  derived and/or modified sequence
atggagtcgcggggtaagtcagctagttctccgaagcctgatacaaaggtcccccaggtgactacggaagcaaaggtgccacctgcagctgacggaaaggcacctcttacaaagccttctaagaaggaagcccctgccgaaaaacaacagcctcctgcagccccaaccacagcacccgcaaaaaagactagcgccaaggccgatcccgctctgttgaataaccactctaatctgaaaccagctcctaccgtgccctcctctccagatgccactcccgaaccaaaagggcctggtgacggcgcagaggaggacgaagcagcttctggaggaccgggaggcagaggaccgtggagctgcgagaactttaatcctcttctggtcgccggaggcgtggccgtcgccgctattgcactgatcctcggggtggctttccttgtgcgtaaaaagtag

SEQ ID NO: 192054 - DNA, 1649 bp, Artificial Sequence
  derived and/or modified sequence
agtgcattgtgggaaactcccgagctctcctccgcgttcgcagccgccgtcatcccgcggaggagcgcgcagccccggggaggccggaggacgcgcccatagaatgcccaggggcgacaaactgtcctgagcccctctggtgcagccacctgcctgtcccatacgccccgcccaccatggagtccagagggaagtcagccagcagccccaagcccgacaccaaggtgccccaggtcaccaccgaggccaaggtacccccggcagccgatgggaaagcccccttgaccaagccctcgaagaaggaggccccggccgagaagcagcagccgccagcagcccccaccacggcacctgccaagaagacctcggccaaggccgaccctgcccttctcaacaaccacagcaacctgaagccagcccccacggtccccagcagtcccgatgcaaccccggagcccaagggtcctggggacggggcggaggaagatgaggctgccagtggggggcctgggggccgaggtccctggtcctgtgagaacttcaaccccctgctggtggctgggggtgtggccgtggcagccatagccctgattctcggtgtggccttcctggtccggaaaaaataatacctgggggccaggcggggggcacggagccacttcctgtacagacccgaggaagccagtgcatgcagagttcacccttacctattcgtacacacgcacattcattacacacctacatacgcccccaacacacgcgcacggtgaagaggacgcccgagcccacccctgctgacccaggacttccccaacctccagggcagaaagagcccaggctccggggtccacagcacaggatgtggggcgagggcacagctggggaacggcaagaaaggaatggaccctgtgtgtggccccccccacccctggcggctgggtgatcctgggcccccagggctggtctgagtgcaggtgggggtgccgggatgggttgggcctgggcccggccctcgtggggacattaaagggcgcggtggctccactcgccccatttctgctctttgcgtaccccccgggggtctgcctgggcgaatgcagtgggacggacctggggtgggcactcacctcagcagagcctcaatgccacctccccacaccacccaagcctagctgggtgggaagacggagccctgaagcctgcgtgtggagggggtgctgcccaagggtcgccttccccagcttgtgctccaggggagccccgacgccggcggggaggcagggatgtcgagggcccctcacagctgtgcccgccctgccccgctagactgcccctccagcttgcacccagcaccacctgagtctaaccagcgtataatgcaataacaggtagagtagaactgcttttggcggcgaccgtcacacactgtcctcagcccactgcacctggggaagcccctcgtgcagcccctccttagcacatccagtcccagcgtggcccttggcgcgcagcagcaggcgaactcccagaaggtggtggtgggcactgtgagaacgtggcctgccctcactggccagtggccacaggaaccccgggcctgagtggaggctgagtctgaaataaactctgtcgtctgaaggctgctcttg

SEQ ID NO: 192055 - DNA, 450 bp, Artificial Sequence
  derived and/or modified sequence
atggagagcagaggcaagagcgccagcagccccaagcccgacaccaaggtgccccaggtgaccaccgaggccaaggtgccccccgccgccgacggcaaggcccccctgaccaagcccagcaagaaggaggcccccgccgagaagcagcagccccccgccgcccccaccaccgcccccgccaagaagaccagcgccaaggccgaccccgccctgctgaacaaccacagcaacctgaagcccgcccccaccgtgcccagcagccccgacgccacccccgagcccaagggccccggcgacggcgccgaggaggacgaggccgccagcggcggccccggcggcagaggcccctggagctgcgagaacttcaaccccctgctggtggccggcggcgtggccgtggccgccatcgccctgatcctgggcgtggccttcctggtgagaaagaagtag

SEQ ID NO: 192056 - protein, 322 aa, Artificial Sequence
  derived and/or modified sequence
MASRSKRRAVESGVPQPPDPPVQRDEEEEKEVENEDEDDDDSDKEKDEEDEVIDEEVNIEFEAYSLSDNDYDGIKKLLQQLFLKAPVNTAELTDLLIQQNHIGSVIKQTDVSEDSNDDMDEDEVFGFISLLNLTERKGTQCVEQIQELVLRFCEKNCEKSMVEQLDKFLNDTTKPVGLLLSERFINVPPQIALPMYQQLQKELAGAHRTNKPCGKCYFYLLISKTFVEAGKNNSKKKPSNKKKAALMFANAEEEFFYEEQGKPEVLGGPDTRRGLEPVPIQHNGGSRGQVTALVSLKAGLIQSRSTLSDFQGTFMTVGIALS

SEQ ID NO: 192057 - DNA, 969 bp, Artificial Sequence
  derived and/or modified sequence
atggcctctaggtcgaaacggagagctgtggagtccggagtaccccaaccccccgatccaccggtgcagcgggacgaggaggaagagaaagaagtcgagaatgaggacgaggatgatgatgactcggacaaggaaaaggacgaagaagatgaggtgatcgacgaggaggtgaatatcgaatttgaagcatactccctgtctgacaatgactacgatggtataaagaaactgctccaacaattatttttaaaggccccagtaaacactgcggaactgactgatcttcttatacagcagaatcacatcgggagtgtgattaagcaaacagatgtgagcgaagactccaatgacgacatggacgaggatgaggtattcggctttataagcttgctgaacctaacagagcgaaaggggacgcagtgcgtcgaacagattcaggagttagtgctgcgtttctgcgagaaaaactgcgagaaatctatggtggaacagttagataaattcctcaatgataccaccaaacctgttggcttactgctgtctgagagattcatcaatgtccccccacagattgcgctcccgatgtaccagcaactgcaaaaagaactggccggggcacatcggaccaacaagccctgtggcaagtgttatttttatttgctcatctccaagacatttgttgaagcaggcaagaataacagcaagaaaaagccatccaacaaaaaaaaagctgctctgatgttcgccaacgctgaagaggaattcttctacgaagagcaagggaagccggaagtactgggtgggccggacacccgccggggtctcgaacccgtcccaatccaacataacggaggaagccgaggccaggttacggctctcgtctctctgaaagccggactgattcagtcaagaagtaccctatccgacttccaggggaccttcatgacagttgggatcgctttaagctag

SEQ ID NO: 192058 - DNA, 969 bp, Artificial Sequence
  derived and/or modified sequence
atggccagccgcagcaagagaagagctgtggagagcggcgtgccccagcccccagacccccctgtgcagagagatgaggaggaggagaaggaggtggagaatgaagatgaagatgatgatgacagcgacaaggagaaggatgaagaagatgaggtgattgatgaggaggtgaacattgaatttgaggcctacagcctgagtgacaatgactatgatggcatcaagaagctgctgcagcagctgttcctgaaggcccctgtgaacacagctgagctgacagacctgctgatccagcagaaccacatcggcagcgtcatcaagcagacagatgtgtctgaggacagcaatgatgacatggatgaagatgaggtgtttggcttcatcagcctgctgaacctgacagagaggaagggcacccagtgtgtggagcagatccaggagctggtgctgcgcttctgtgagaagaactgtgagaagtccatggtggagcagctggacaagttcctgaatgacaccaccaagcctgtgggcctgctgctgtctgagcgcttcatcaacgtgcccccccagatcgccctgcccatgtaccagcagctgcagaaggagctggccggggcccacaggaccaacaagccctgtgggaagtgctacttctacctgctgatcagcaagacctttgtggaggccggcaagaacaacagcaagaagaagcccagcaacaagaagaaggccgccctgatgtttgccaatgctgaggaggagttcttctatgaggagcagggcaagccagaggtgctgggcggccctgacacccggcggggcctggagcctgtgcccatccagcacaatggaggcagccggggccaggtgacagccctggtgtccctgaaggccggcctcatccagagccgcagcaccctgagtgacttccagggcaccttcatgacagtgggcatcgccctgtcctag

SEQ ID NO: 192059 - DNA, 969 bp, Artificial Sequence
  derived and/or modified sequence
atggccagccggagcaagcggcgggccgtggagagcggcgtgccccagcctccagaccctcccgttcagagggacgaggaggaagagaaagaggtggagaacgaagatgaggacgacgacgatagcgataaagagaaggacgaggaggacgaggtcatcgatgaagaggtcaacatcgagttcgaggcctactctctgagcgacaatgactacgacggtataaagaaactgctgcagcagctctttctcaaggccccagttaatactgcagaacttaccgacctgttgatacagcagaaccacatcggtagcgttatcaaacagactgatgtttcagaagattctaatgacgacatggatgaggacgaggtttttgggtttatcagtttgctgaacctcacagaacgaaagggtactcagtgtgtggagcagatccaggagctggtcttgagattctgcgaaaagaattgcgagaaaagtatggtggagcaactcgacaaattcttaaacgataccaccaagcctgtcggactcttattaagtgaacgatttattaatgtcccacctcagattgccctccctatgtatcaacagcttcaaaaggagttagccggagcccatagaaccaataaaccatgtgggaaatgctatttctatctgctcataagcaaaacattcgtcgaagccggcaagaataactcgaagaagaaaccttctaacaagaaaaaggcggccctgatgtttgctaacgccgaggaggagttcttttacgaagagcagggaaagcccgaggtgctgggcggcccggacacgagacgaggcctagagcctgttcctatccagcataatggtggcagccgcggacaggtcaccgccttggtatccctaaaggcgggcctgatccagagtagatcgactttaagcgattttcaggggaccttcatgactgtgggtattgcactcagctag

SEQ ID NO: 192060 - DNA, 969 bp, Artificial Sequence
  derived and/or modified sequence
atggcatctcgaagcaaaaggagggccgtggaaagcggcgtgccccaaccccctgatccaccagtccagagagatgaggaggaggaaaaagaagtggagaacgaggacgaggatgatgatgattctgacaaggaaaaagatgaagaggatgaggttatcgatgaagaggtgaacatcgaattcgaagcctattcacttagcgacaacgactatgacggcattaagaagctgctccaacagctatttttgaaggctcccgtgaacacagccgaacttactgatctgctgatccaacagaatcatattggctccgtgatcaagcagaccgacgtgagcgaggacagtaatgacgatatggacgaggacgaggtttttgggtttatctctctgctaaatctaaccgaacgcaaaggaacacaatgtgtggagcagattcaggaactcgtgctgcgcttctgtgagaagaattgtgaaaagagtatggtcgaacaacttgacaagtttctcaacgataccacaaagccagtaggtctattactgtctgagcgatttatcaacgtacctcctcagatcgctctccctatgtaccagcagcttcagaaggagctggctggggctcacaggactaacaaaccatgcgggaaatgttacttttacttgctcattagcaagactttcgttgaagcaggtaaaaataatagtaaaaagaaaccttctaacaagaagaaagccgctctgatgtttgctaacgcagaagaagagtttttttacgaagagcaagggaagccagaggttctcgggggtcctgataccagacgtggcctggaaccagtgccaatccaacataatggaggctcacgtggccaagtcacggccctggtgagcttgaaggccggactaattcagtcacgtagcactctttccgactttcaaggaactttcatgaccgttggcattgctctctcatag

SEQ ID NO: 192061 - DNA, 1433 bp, Artificial Sequence
  derived and/or modified sequence
gtgagcggcaacatggcgtccaggtctaagcggcgtgccgtggaaagtggggttccgcagccgccggatcccccagtccagcgcgacgaggaagaggaaaaagaagtcgaaaatgaggatgaagacgatgatgacagtgacaaggaaaaggatgaagaggacgaggtcattgacgaggaagtgaatattgaatttgaagcttattccctatcagataatgattatgacggaattaagaaattactgcagcagctttttctaaaggctcctgtgaacactgcagaactaacagatctcttaattcaacagaaccatattgggagtgtgattaagcaaacggatgtttcagaagacagcaatgatgatatggatgaagatgaggtttttggtttcataagccttttaaatttaactgaaagaaagggtacccagtgtgttgaacaaattcaagagttggttctacgcttctgtgagaagaactgtgaaaagagcatggttgaacagctggacaagtttttaaatgacaccaccaagcctgtgggccttctcctaagtgaaagattcattaatgtccctccacagatcgctctgcccatgtaccagcagcttcagaaagaactggcgggggcacacagaaccaataagccatgtgggaagtgctacttttaccttctgattagtaagacatttgtggaagcaggaaaaaacaattccaaaaagaaacctagcaacaaaaagaaagctgcgttaatgtttgcaaatgcagaggaagaatttttctatgaggagcagggaaaacctgaggtgcttggaggtccagacacaagaagaggattggaaccagttccgatacagcacaatggtggttcacgggggcaagtgacagccctggtttctctgaaggctggactaattcaatcaagatcaactctaagtgatttccagggaaccttcatgactgttggaattgctctgtcataataagtcagggatatttaggaggctcatagtctcctggagggataaaacatctcggcacctagtaatggtaaattagtcaatatttgttagtttcgtttgagatctcaaatgttaggattttctgaagtctcagtgtctttcagagtttgagataccttgttttcattttttctaatttttaatttaaaagtaataaagaatattttgtaatgattaggatgaaaattttatcgtcaattataagccaaaatttgctaaaattaaagtcagtatacttgaaacaagtttctagtaagttctctggggtaagatactaattactctgataaaggggctatcaaaaaaatccagtaaattgttcataagaagagatcagtttaagagtcaaacaatttgctttgctagtaccttagctaaagaaaaaatactattaaagatgactatcaccttta

SEQ ID NO: 192062 - DNA, 969 bp, Artificial Sequence
  derived and/or modified sequence
atggccagcagaagcaagagaagagccgtggagagcggcgtgccccagccccccgacccccccgtgcagagagacgaggaggaggagaaggaggtggagaacgaggacgaggacgacgacgacagcgacaaggagaaggacgaggaggacgaggtgatcgacgaggaggtgaacatcgagttcgaggcctacagcctgagcgacaacgactacgacggcatcaagaagctgctgcagcagctgttcctgaaggcccccgtgaacaccgccgagctgaccgacctgctgatccagcagaaccacatcggcagcgtgatcaagcagaccgacgtgagcgaggacagcaacgacgacatggacgaggacgaggtgttcggcttcatcagcctgctgaacctgaccgagagaaagggcacccagtgcgtggagcagatccaggagctggtgctgagattctgcgagaagaactgcgagaagagcatggtggagcagctggacaagttcctgaacgacaccaccaagcccgtgggcctgctgctgagcgagagattcatcaacgtgcccccccagatcgccctgcccatgtaccagcagctgcagaaggagctggccggcgcccacagaaccaacaagccctgcggcaagtgctacttctacctgctgatcagcaagaccttcgtggaggccggcaagaacaacagcaagaagaagcccagcaacaagaagaaggccgccctgatgttcgccaacgccgaggaggagttcttctacgaggagcagggcaagcccgaggtgctgggcggccccgacaccagaagaggcctggagcccgtgcccatccagcacaacggcggcagcagaggccaggtgaccgccctggtgagcctgaaggccggcctgatccagagcagaagcaccctgagcgacttccagggcaccttcatgaccgtgggcatcgccctgagctag

SEQ ID NO: 192063 - protein, 469 aa, Artificial Sequence
  derived and/or modified sequence
MQMADAATIATMNKAAGGDKLAELFSLVPDLLEAANTSGNASLQLPDLWWELGLELPDGAPPGHPPGSGGAESADTEARVRILISVVYWVVCALGLAGNLLVLYLMKSMQGWRKSSINLFVTNLALTDFQFVLTLPFWAVENALDFKWPFGKAMCKIVSMVTSMNMYASVFFLTAMSVTRYHSVASALKSHRTRGHGRGDCCGRSLGDSCCFSAKALCVWIWALAALASLPSAIFSTTVKVMGEELCLVRFPDKLLGRDRQFWLGLYHSQKVLLGFVLPLGIIILCYLLLVRFIADRRAAGTKGGAAVAGGRPTGASARRLSKVTKSVTIVVLSFFLCWLPNQALTTWSILIKFNAVPFSQEYFLCQVYAFPVSVCLAHSNSCLNPVLYCLVRREFRKALKSLLWRIASPSITSMRPFTATTKPEHEDQGLQAPAPPHAAAEPDLLYYPPGVVVYSGGRYDLLPSSSAY

SEQ ID NO: 192064 - DNA, 1410 bp, Artificial Sequence
  derived and/or modified sequence
atgcagatggccgacgccgccaccatcgccaccatgaacaaggccgccggcggcgacaagctggccgagctgttcagcctggtgcccgacctgctggaggccgccaacaccagcggcaacgccagcctgcagctgcccgacctgtggtgggagctgggcctggagctgcccgacggcgccccccccggccacccccccggcagcggcggcgccgagagcgccgacaccgaggccagagtgagaatcctgatcagcgtggtgtactgggtggtgtgcgccctgggcctggccggcaacctgctggtgctgtacctgatgaagagcatgcagggctggagaaagagcagcatcaacctgttcgtgaccaacctggccctgaccgacttccagttcgtgctgaccctgcccttctgggccgtggagaacgccctggacttcaagtggcccttcggcaaggccatgtgcaagatcgtgagcatggtgaccagcatgaacatgtacgccagcgtgttcttcctgaccgccatgagcgtgaccagataccacagcgtggccagcgccctgaagagccacagaaccagaggccacggcagaggcgactgctgcggcagaagcctgggcgacagctgctgcttcagcgccaaggccctgtgcgtgtggatctgggccctggccgccctggccagcctgcccagcgccatcttcagcaccaccgtgaaggtgatgggcgaggagctgtgcctggtgagattccccgacaagctgctgggcagagacagacagttctggctgggcctgtaccacagccagaaggtgctgctgggcttcgtgctgcccctgggcatcatcatcctgtgctacctgctgctggtgagattcatcgccgacagaagagccgccggcaccaagggcggcgccgccgtggccggcggcagacccaccggcgccagcgccagaagactgagcaaggtgaccaagagcgtgaccatcgtggtgctgagcttcttcctgtgctggctgcccaaccaggccctgaccacctggagcatcctgatcaagttcaacgccgtgcccttcagccaggagtacttcctgtgccaggtgtacgccttccccgtgagcgtgtgcctggcccacagcaacagctgcctgaaccccgtgctgtactgcctggtgagaagagagttcagaaaggccctgaagagcctgctgtggagaatcgccagccccagcatcaccagcatgagacccttcaccgccaccaccaagcccgagcacgaggaccagggcctgcaggcccccgcccccccccacgccgccgccgagcccgacctgctgtactacccccccggcgtggtggtgtacagcggcggcagatacgacctgctgcccagcagcagcgcctactag

SEQ ID NO: 192065 - DNA, 1410 bp, Artificial Sequence
  derived and/or modified sequence
atgcagatggccgatgcagccaccattgcaacgatgaataaggccgcaggcggagacaaactagcggagcttttttctctggttcctgacttactggaagcagccaatacctcaggaaacgccagcctgcaattgcccgacctgtggtgggaactgggactggagttgccggacggtgcccctcctggacaccctcctggaagcggtggagcagagagtgcggatacagaggctcgggttcggattttgattagtgtggtgtattgggtcgtttgtgccttaggactcgctggaaatctgctcgtcctctatttgatgaaatcaatgcaagggtggagaaaatcctcaataaatctgttcgtgactaacttagcacttaccgattttcaatttgtcctcaccctccccttctgggcagtggagaatgcgcttgactttaagtggccattcgggaaggcaatgtgtaaaattgtatccatggttacctctatgaacatgtatgcatcagtgttcttcctgactgctatgtcggtgaccagataccattccgttgcttccgcactgaaaagtcatagaacacggggtcacggtagaggcgactgctgtggtagaagtctgggtgacagctgctgttttagcgccaaggcattatgtgtatggatctgggctctggcagctttggcctcactgcccagcgccatcttcagtaccaccgttaaggtgatgggcgaagagctttgtctcgttcggttccccgacaaactccttgggcgcgaccggcaattctggctggggctctatcattcacagaaagttttgctcggctttgtcctccccttaggtataataatactgtgttatctgctgcttgttcgattcatcgccgacagacgcgcagcgggaacaaaaggcggcgcagcagtggctggtggtcggcccactggggcctccgcaaggagattgtcaaaagtgacaaaaagcgtgaccatcgtggtgttgtcttttttcttgtgctggctgcccaaccaggcgctgacaacttggagtatcctaattaagtttaacgccgtaccattcagccaggaatactttctatgccaagtgtacgcattccccgtctccgtgtgtctggctcacagcaatagttgcttaaaccctgtcctgtactgtcttgtcagacgggaattccgcaaagcgctgaagtctttgttgtggcgtatcgctagcccctcgattacgagtatgagacccttcactgccaccactaaacccgaacacgaggaccagggtctacaggcacccgcacccccccacgcagctgccgaaccagacttactctactatcccccaggcgtggttgtctactccggaggcaggtatgacttgttgccatcctcctccgcatattag

SEQ ID NO: 192066 - DNA, 1410 bp, Artificial Sequence
  derived and/or modified sequence
atgcagatggctgatgctgccaccatcgccaccatgaacaaggccgccggcggggacaagctggccgagctgttcagcctggtgcctgacctgctggaggccgccaacaccagcggaaatgccagcctgcagctgcctgacctgtggtgggagctgggcctggagctgcctgatggagcccctcctggccaccccccaggcagcggcggcgctgagagcgctgacacagaggcccgggtgcgcatcctgatctctgtggtgtactgggtggtgtgtgccctgggcctggccggcaacctgctggtgctgtacctgatgaagtccatgcagggctggaggaagagcagcatcaacctgtttgtgaccaacctggccctgacagacttccagtttgtgctgaccctgcccttctgggccgtggagaatgccctggacttcaagtggccctttgggaaggccatgtgcaagatcgtgtccatggtgacctccatgaacatgtatgcctctgtgttcttcctgacagccatgtctgtgacccgctaccacagcgtggccagcgccctgaagagccacaggacccggggccacggccgcggggactgctgcggccgcagcctgggggacagctgctgcttcagcgccaaggccctgtgtgtgtggatctgggccctggccgccctggccagcctgcccagcgccatcttcagcaccaccgtgaaggtgatgggagaggagctgtgcctggtgcgcttcccagacaagctgctgggccgggaccggcagttctggctgggcctgtaccacagccagaaggtgctgctgggctttgtgctgcccctgggcatcatcatcctgtgctacctgctgctggtgcgcttcatcgctgacagaagagctgctggcaccaagggcggcgctgctgtggccggcggccggcccaccggggccagcgcccggcggctgagcaaggtgaccaagtctgtgaccatcgtggtgctgtccttcttcctgtgctggctgcccaaccaggccctgaccacctggagcatcctgatcaagttcaatgctgtgcccttcagccaggagtacttcctgtgccaggtgtatgccttccctgtgtctgtgtgcctggcccacagcaacagctgcctgaaccctgtgctgtactgcctggtgagaagagagttcaggaaggccctgaagagcctgctgtggagaattgccagccccagcatcacctccatgaggcccttcaccgccaccaccaagccagagcacgaggaccagggcctgcaggccccagcccctcctcatgctgctgctgagccagacctgctgtactacccacctggggtggtggtgtacagcggcggccgctatgacctgctgcccagcagcagcgcctactag

SEQ ID NO: 192067 - DNA, 1410 bp, Artificial Sequence
  derived and/or modified sequence
atgcagatggccgacgccgccaccatcgccaccatgaacaaggccgccggtggagacaaattagccgagttattctccctggtgcctgatctactggaggctgccaacacgtcaggtaatgctagtctccaattaccggatctctggtgggagctaggcctggagctgcccgacggagcaccgcccgggcatccccccggctccggcggggccgagagcgcagatacagaggcgcgggtgaggatcctcatttccgtcgtatactgggtcgtatgcgccctgggactcgcgggcaacctgcttgtcctctacttgatgaagagcatgcagggctggcgcaagtcaagcataaatctattcgtgacgaacctggctctgaccgactttcagtttgttcttaccctgcccttctgggcagtagaaaacgccctcgacttcaagtggccattcggcaaggcaatgtgcaaaatcgtctccatggtgaccagcatgaatatgtacgccagtgttttctttctcacggccatgtcggttacacggtaccacagcgttgcctccgcactgaaatcccaccggactagaggccatggccgcggtgactgctgcggtagatccttgggcgatagctgctgcttctccgctaaagccttgtgcgtgtggatttgggccctggccgctctcgccagcctcccttccgccatctttagcacgacggtgaaagtcatgggagaggagctctgtctggttcgattcccagacaaattgttgggccgggacagacagttctggttgggcctgtaccattcccagaaagtgcttttgggattcgtactcccactggggatcatcattttatgctacctgctactggtgcgctttatcgctgatcgcagggcagccggcacaaagggaggtgccgctgtcgccggtgggcgcccaacaggtgctagcgcccgaaggttgtctaaagttactaagtctgtgacaatcgtagtgctgtccttcttcctctgttggctgcccaaccaggccctgaccacttggtcgatcctcatcaagtttaacgcggtcccttttagtcaggaatactttctctgtcaagtctacgccttccccgtcagtgtgtgtctagcacactctaactcctgtctcaatcccgtgctgtactgcctcgttcgccgggaatttcggaaggccctcaagagtttgttatggagaattgcttccccttcgatcaccagtatgcgaccctttacagctacaacaaaacccgagcacgaagatcagggactccaagcgcccgctcctccccatgcggccgccgagcccgacttgttatattaccccccaggggtcgtggtgtactcagggggacgatatgatctcctgcctagtagttctgcatactag

SEQ ID NO: 192068 - DNA, 1410 bp, Artificial Sequence
  derived and/or modified sequence
atgcagatggcagacgctgcaaccattgccacaatgaataaagctgcaggaggcgataagctggctgaactgtttagtctcgtgcctgatctgcttgaggcggcaaatacatccggaaatgcttccttgcagctgcccgacttgtggtgggaattaggcctcgagcttcctgacggtgccccacccggacaccctccgggaagcggaggagccgagtccgcggacactgaggctcgtgtccgtatcctcatcagtgttgtatattgggtggtctgtgccttaggactcgccggaaaccttctggttttatacttaatgaagtctatgcaggggtggcgtaagtccagtatcaatctctttgtaaccaaccttgctcttaccgacttccagttcgtgctcacacttcccttctgggccgtagaaaacgcgctcgattttaagtggcctttcgggaaggcaatgtgtaagattgtgtctatggtgaccagcatgaatatgtatgccagcgtcttctttctgacagccatgtccgtaacaaggtaccatagcgtggcgagtgcgctgaaatcccacaggacaagaggccacgggagaggcgattgttgtggcaggtcccttggggacagctgctgcttctccgccaaggccctatgcgtgtggatatgggccctggccgcactggcgtcattacctagtgccatcttcagtaccaccgtaaaggtcatgggcgaggagctctgcctcgtgcgtttccccgacaagctgcttggtcgagaccgtcagttctggcttggactgtatcatagccagaaggtgctgctcggctttgtcctcccactggggattatcattctctgttacctactgctggtgcgattcatcgcagatcgcagggcagccggaacgaagggcggagctgccgtggccggaggacggcctactggtgcgagcgcgaggcggctgagcaaagttaccaaatcagttacaattgtagtgctgagtttttttctgtgttggctgcccaatcaggcgctcacgacgtggtcgattcttatcaagttcaacgccgtaccctttagtcaggaatacttcctgtgccaggtatacgcctttccggtttcagtgtgcttagcacacagtaacagctgccttaatccagtactctattgcctggtgcggagggagtttagaaaggcacttaaatctctgctttggagaatcgcctcgccatcaataacttctatgcggccattcacagcaaccacaaagcctgagcatgaagaccagggtttgcaggcaccggctccacctcatgcagccgcagagcccgatctgctctactatccacccggagtggttgtatattccgggggacgctatgatttacttccttccagcagcgcttactag

SEQ ID NO: 192069 - DNA, 2533 bp, Artificial Sequence
  derived and/or modified sequence
ggggagttatgcgccagtgccccagtgaccgcgggacacggagaggggaagtctgcgttgtacataaggacctagggactccgagcttggcctgagaacccttggacgccgagtgcttgccttacgggctgcactcctcaactctgctccaaagcagccgctgagctcaactcctgcgtccagggcgttcgctgcgcgccaggacgcgcttagtacccagttcctgggctctctcttcagtagctgctttgaaagctcccacgcacgtcccgcaggctagcctggcaacaaaactggggtaaaccgtgttatcttaggtcttgtcccccagaacatgacctagaggtacctgcgcatgcagatggccgatgcagccacgatagccaccatgaataaggcagcaggcggggacaagctagcagaactcttcagtctggtcccggaccttctggaggcggccaacacgagtggtaacgcgtcgctgcagcttccggacttgtggtgggagctggggctggagttgccggacggcgcgccgccaggacatcccccgggcagcggcggggcagagagcgcggacacagaggcccgggtgcggattctcatcagcgtggtgtactgggtggtgtgcgccctggggttggcgggcaacctgctggttctctacctgatgaagagcatgcagggctggcgcaagtcctctatcaacctcttcgtcaccaacctggcgctgacggactttcagtttgtgctcaccctgcccttctgggcggtggagaacgctcttgacttcaaatggcccttcggcaaggccatgtgtaagatcgtgtccatggtgacgtccatgaacatgtacgccagcgtgttcttcctcactgccatgagtgtgacgcgctaccattcggtggcctcggctctgaagagccaccggacccgaggacacggccggggcgactgctgcggccggagcctgggggacagctgctgcttctcggccaaggcgctgtgtgtgtggatctgggctttggccgcgctggcctcgctgcccagtgccattttctccaccacggtcaaggtgatgggcgaggagctgtgcctggtgcgtttcccggacaagttgctgggccgcgacaggcagttctggctgggcctctaccactcgcagaaggtgctgctgggcttcgtgctgccgctgggcatcattatcttgtgctacctgctgctggtgcgcttcatcgccgaccgccgcgcggcggggaccaaaggaggggccgcggtagccggaggacgcccgaccggagccagcgcccggagactgtcgaaggtcaccaaatcagtgaccatcgttgtcctgtccttcttcctgtgttggctgcccaaccaggcgctcaccacctggagcatcctcatcaagttcaacgcggtgcccttcagccaggagtatttcctgtgccaggtatacgcgttccctgtgagcgtgtgcctagcgcactccaacagctgcctcaaccccgtcctctactgcctcgtgcgccgcgagttccgcaaggcgctcaagagcctgctgtggcgcatcgcgtctccttcgatcaccagcatgcgccccttcaccgccactaccaagccggagcacgaggatcaggggctgcaggccccggcgccgccccacgcggccgcggagccggacctgctctactacccacctggcgtcgtggtctacagcggggggcgctacgacctgctgcccagcagctctgcctactgacgcaggcctcaggcccagggcgcgccgtcggggcaaggtggccttccccgggcggtaaagaggtgaaaggatgaaggagggctggggggggccccatttaagaagtaggtgggaggaggatgggcagagcatggaggaggagcctgtggataggccgaggaccttctctggagaggagatgcttcgaaatcgggtggagagaggaaattggcaaagggatagagacgagccccacgggccagacagccaacctccgctccgcaccccacagcctctccttactcttcccacgctgagtagtgtgggggcgcccagaagcgaagacaagcagcaaaaatgtagagaaattggcacggggagcggggcttagccaaatgatgcacagacaattgtgcccgtttattccagcgacttctgcggagagggcagccgtcggcacaaacactcctttgcgtcttggcaaacgagactgcagcagcgccaaggtcctacttgctgcggggctgccccaggaatctagagctggtaggcaagaaacgcttttggagttaagaaaaagaactgaccatcctggtccgcccacaggagaaacggcaaaggaaagccacctccaatggagtcattatgacaattatcattccggactgggccagcgggaacaccctgagcccgacctagctgcacagccccggagctcagacgttagcagggggataacacctgtcaccagcttgggagagccattctctggggagtgtcgtcgctgcg

SEQ ID NO: 192070 - protein, 743 aa, Artificial Sequence
  derived and/or modified sequence
MSLSMRDPVIPGTSMAYHPFLPHRAPDFAMSAVLGHQPPFFPALTLPPNGAAALSLPGALAKPIMDQLVGAAETGIPFSSLGPQAHLRPLKTMEPEEEVEDDPKVHLEAKELWDQFHKRGTEMVITKSGRRMFPPFKVRCSGLDKKAKYILLMDIIAADDCRYKFHNSRWMVAGKADPEMPKRMYIHPDSPATGEQWMSKVVTFHKLKLTNNISDKHGFTLAFPSDHATWQGNYSFGTQTILNSMHKYQPRFHIVRANDILKLPYSTFRTYLFPETEFIAVTAYQNDKITQLKIDNNPFAKGFRDTGNGRREKRKQLTLQSMRVFDERHKKENGTSDESSSEQAAFNCFAQASSPAASTVGTSNLKDLCPSEGESDAEAESKEEHGPEACDAAKISTTTSEEPCRDKGSPAVKAHLFAAERPRDSGRLDKASPDSRHSPATISSSTRGLGAEERRSPVREGTAPAKVEEARALPGKEAFAPLTVQTDAAAAHLAQGPLPGLGFAPGLAGQQFFNGHPLFLHPSQFAMGGAFSSMAAAGMGPLLATVSGASTGVSGLDSTAMASAAAAQGLSGASAATLPFHLQQHVLASQGLAMSPFGSLFPYPYTYMAAAAAASSAAASSSVHRHPFLNLNTMRPRLRYSPYSIPVPVPDGSSLLTTALPSMAAAAGPLDGKVAALAASPASVAVDSGSELNSRSSTLSSSSMSLSPKLCAEKEAATSELQSIQRLVSGLEAKPDRSRSASP

SEQ ID NO: 192071 - protein, 600 aa, Artificial Sequence
  derived and/or modified sequence
MSLSMRDPVIPGTSMAYHPFLPHRAPDFAMSAVLGHQPPFFPALTLPPNGAAALSLPGALAKPIMDQLVGAAETGIPFSSLGPQAHLRPLKTMEPEEEVEDDPKVHLEAKELWDQFHKRGTEMVITKSGRRMFPPFKVRCSGLDKKAKYILLMDIIAADDCRYKFHNSRWMVAGKADPEMPKRMYIHPDSPATGEQWMSKVVTFHKLKLTNNISDKHGFTLAFPSDHATWQGNYSFGTQTILNSMHKYQPRFHIVRANDILKLPYSTFRTYLFPETEFIAVTAYQNDKITQLKIDNNPFAKGFRDTGNGRREKRKQLTLQSMRVFDERHKKENGTSDESSSEQAAFNCFAQASSPAASTVGTSNLKDLCPSEGESDAEAESKEEHGPEACDAAKISTTTSEEPCRDKGSPAVKAHLFAAERPRDSGRLDKASPDSRHSPATISSSTRGLGAEERRSPVREGTAPAKVEEARALPGKEAFAPLTVQTDAAAAAASSSVHRHPFLNLNTMRPRLRYSPYSIPVPVPDGSSLLTTALAASPASVAVDSGSELNSRSSTLSSSSMSLSPKLCAEKEAATSELQSIQRLVSGLEAKPDRSRSASP

SEQ ID NO: 192072 - DNA, 2232 bp, Artificial Sequence
  derived and/or modified sequence
atgagcctgagcatgagagaccccgtgatccccggcaccagcatggcctaccaccccttcctgccccacagagcccccgacttcgccatgagcgccgtgctgggccaccagccccccttcttccccgccctgaccctgccccccaacggcgccgccgccctgagcctgcccggcgccctggccaagcccatcatggaccagctggtgggcgccgccgagaccggcatccccttcagcagcctgggcccccaggcccacctgagacccctgaagaccatggagcccgaggaggaggtggaggacgaccccaaggtgcacctggaggccaaggagctgtgggaccagttccacaagagaggcaccgagatggtgatcaccaagagcggcagaagaatgttcccccccttcaaggtgagatgcagcggcctggacaagaaggccaagtacatcctgctgatggacatcatcgccgccgacgactgcagatacaagttccacaacagcagatggatggtggccggcaaggccgaccccgagatgcccaagagaatgtacatccaccccgacagccccgccaccggcgagcagtggatgagcaaggtggtgaccttccacaagctgaagctgaccaacaacatcagcgacaagcacggcttcaccctggccttccccagcgaccacgccacctggcagggcaactacagcttcggcacccagaccatcctgaacagcatgcacaagtaccagcccagattccacatcgtgagagccaacgacatcctgaagctgccctacagcaccttcagaacctacctgttccccgagaccgagttcatcgccgtgaccgcctaccagaacgacaagatcacccagctgaagatcgacaacaaccccttcgccaagggcttcagagacaccggcaacggcagaagagagaagagaaagcagctgaccctgcagagcatgagagtgttcgacgagagacacaagaaggagaacggcaccagcgacgagagcagcagcgagcaggccgccttcaactgcttcgcccaggccagcagccccgccgccagcaccgtgggcaccagcaacctgaaggacctgtgccccagcgagggcgagagcgacgccgaggccgagagcaaggaggagcacggccccgaggcctgcgacgccgccaagatcagcaccaccaccagcgaggagccctgcagagacaagggcagccccgccgtgaaggcccacctgttcgccgccgagagacccagagacagcggcagactggacaaggccagccccgacagcagacacagccccgccaccatcagcagcagcaccagaggcctgggcgccgaggagagaagaagccccgtgagagagggcaccgcccccgccaaggtggaggaggccagagccctgcccggcaaggaggccttcgcccccctgaccgtgcagaccgacgccgccgccgcccacctggcccagggccccctgcccggcctgggcttcgcccccggcctggccggccagcagttcttcaacggccaccccctgttcctgcaccccagccagttcgccatgggcggcgccttcagcagcatggccgccgccggcatgggccccctgctggccaccgtgagcggcgccagcaccggcgtgagcggcctggacagcaccgccatggccagcgccgccgccgcccagggcctgagcggcgccagcgccgccaccctgcccttccacctgcagcagcacgtgctggccagccagggcctggccatgagccccttcggcagcctgttcccctacccctacacctacatggccgccgccgccgccgccagcagcgccgccgccagcagcagcgtgcacagacaccccttcctgaacctgaacaccatgagacccagactgagatacagcccctacagcatccccgtgcccgtgcccgacggcagcagcctgctgaccaccgccctgcccagcatggccgccgccgccggccccctggacggcaaggtggccgccctggccgccagccccgccagcgtggccgtggacagcggcagcgagctgaacagcagaagcagcaccctgagcagcagcagcatgagcctgagccccaagctgtgcgccgagaaggaggccgccaccagcgagctgcagagcatccagagactggtgagcggcctggaggccaagcccgacagaagcagaagcgccagcccctag

SEQ ID NO: 192073 - DNA, 1803 bp, Artificial Sequence
  derived and/or modified sequence
atgagcctgagcatgagagaccccgtgatccccggcaccagcatggcctaccaccccttcctgccccacagagcccccgacttcgccatgagcgccgtgctgggccaccagccccccttcttccccgccctgaccctgccccccaacggcgccgccgccctgagcctgcccggcgccctggccaagcccatcatggaccagctggtgggcgccgccgagaccggcatccccttcagcagcctgggcccccaggcccacctgagacccctgaagaccatggagcccgaggaggaggtggaggacgaccccaaggtgcacctggaggccaaggagctgtgggaccagttccacaagagaggcaccgagatggtgatcaccaagagcggcagaagaatgttcccccccttcaaggtgagatgcagcggcctggacaagaaggccaagtacatcctgctgatggacatcatcgccgccgacgactgcagatacaagttccacaacagcagatggatggtggccggcaaggccgaccccgagatgcccaagagaatgtacatccaccccgacagccccgccaccggcgagcagtggatgagcaaggtggtgaccttccacaagctgaagctgaccaacaacatcagcgacaagcacggcttcaccctggccttccccagcgaccacgccacctggcagggcaactacagcttcggcacccagaccatcctgaacagcatgcacaagtaccagcccagattccacatcgtgagagccaacgacatcctgaagctgccctacagcaccttcagaacctacctgttccccgagaccgagttcatcgccgtgaccgcctaccagaacgacaagatcacccagctgaagatcgacaacaaccccttcgccaagggcttcagagacaccggcaacggcagaagagagaagagaaagcagctgaccctgcagagcatgagagtgttcgacgagagacacaagaaggagaacggcaccagcgacgagagcagcagcgagcaggccgccttcaactgcttcgcccaggccagcagccccgccgccagcaccgtgggcaccagcaacctgaaggacctgtgccccagcgagggcgagagcgacgccgaggccgagagcaaggaggagcacggccccgaggcctgcgacgccgccaagatcagcaccaccaccagcgaggagccctgcagagacaagggcagccccgccgtgaaggcccacctgttcgccgccgagagacccagagacagcggcagactggacaaggccagccccgacagcagacacagccccgccaccatcagcagcagcaccagaggcctgggcgccgaggagagaagaagccccgtgagagagggcaccgcccccgccaaggtggaggaggccagagccctgcccggcaaggaggccttcgcccccctgaccgtgcagaccgacgccgccgccgccgccgccagcagcagcgtgcacagacaccccttcctgaacctgaacaccatgagacccagactgagatacagcccctacagcatccccgtgcccgtgcccgacggcagcagcctgctgaccaccgccctggccgccagccccgccagcgtggccgtggacagcggcagcgagctgaacagcagaagcagcaccctgagcagcagcagcatgagcctgagccccaagctgtgcgccgagaaggaggccgccaccagcgagctgcagagcatccagagactggtgagcggcctggaggccaagcccgacagaagcagaagcgccagcccctag

SEQ ID NO: 192074 - DNA, 2232 bp, Artificial Sequence
  derived and/or modified sequence
atgagcttatcaatgcgcgaccccgttatccccgggacaagcatggcgtatcacccatttctcccacaccgagcacccgatttcgccatgtctgcggtgctcggacaccagccaccctttttcccagctttgaccctgcctccaaacggagcagcagccctgagtttacctggcgctctcgccaagcctatcatggatcagctagtcggcgctgctgagactggtattcctttttcaagcctgggtcctcaggcccatctgaggcctctgaagacaatggagccagaggaagaggtcgaagatgatcctaaggtccatttagaggccaaggagctgtgggatcagttccataaacgagggaccgagatggtgattacgaaatctggtcgcaggatgtttccaccattcaaagtgcgctgttcaggtcttgataaaaaagctaaatacatactcctgatggacattattgcggcggatgattgcaggtacaaattccataactccagatggatggtggccggcaaggccgaccctgagatgcctaagcgcatgtacatccacccagactcaccagccaccggagagcagtggatgtctaaggtggtgacattccataagctcaaactgacaaataatataagtgacaaacacggctttaccttggcctttccctcagatcatgctacttggcagggtaactacagttttggcacacagaccattcttaacagcatgcacaaataccaaccacgcttccacattgtgagggctaatgatattttaaagttgccatattccacatttcggacctatctcttcccggagacagagttcatcgcggttacagcgtatcaaaatgataaaataactcaacttaaaattgataacaatccctttgcaaaagggttccgggataccgggaatggcaggagagaaaagcgaaagcaactcactctgcagtctatgagggtgttcgacgagcggcataagaaggagaatggcacaagcgatgaatcttcttccgagcaagccgctttcaactgcttcgcccaagcaagcagtcccgccgccagtactgtgggcacttccaatttgaaggacctatgtccgagcgaaggcgaatctgacgcagaagcagaatccaaggaagagcacgggcctgaggcctgtgacgcagccaagattagcaccaccacctcagaagagccatgtcgtgacaaaggctcaccagctgtgaaggcgcacttgtttgctgccgagcggccccgggacagcggtcgcctggataaggcctccccagacagcagacattcccctgcgaccatctcgtcctctaccagggggctaggagccgaggaaaggcgcagtcctgtgagagagggcactgcccctgcaaaagtcgaggaggcacgggccttgcccggaaaagaagcgtttgccccactcacggttcagactgatgctgctgcagctcacctcgcgcaaggtcctttgccggggctgggcttcgcccccggtcttgccggtcagcaattctttaatggccatcccctgttcctccaccctagccaatttgcaatgggcggtgcttttagttctatggcagccgcaggcatgggcccactcctggctaccgtcagcggagcaagcactggggtgagtggtctcgactccacagcaatggccagtgccgctgccgctcagggccttagtggcgcctccgcagcaacactgccatttcacttgcagcaacacgtgcttgctagccagggcctggccatgtcaccctttggatcactgtttccttacccttatacttatatggctgctgcagctgccgcgtcctctgccgccgcctcatcttcagtgcaccgccatcctttccttaatctgaatacgatgaggccccgccttaggtattctccgtattcaataccagttccggtgcccgacgggtcatctcttctaactactgcgctgccatctatggcggcagctgcaggcccactcgacggtaaagtcgctgcattagccgcaagtcccgcttcagtcgctgttgacagcggctcggagcttaactcacgcagcagcaccttgtcctccagcagcatgtctctgagtccgaaactatgtgccgaaaaggaagccgcaacttctgagcttcagtccattcagaggctcgtgtcaggccttgaggcaaaacccgatcgttctagatccgcttccccttag

SEQ ID NO: 192075 - DNA, 1803 bp, Artificial Sequence
  derived and/or modified sequence
atgagtttatccatgagagatccagtcattcctggcacaagcatggcttatcatcccttccttccacatcgcgcacctgacttcgccatgtcagctgtactggggcatcagccaccctttttcccggccttaactctgcccccaaatggagctgcggccctttccctgcccggagcactggcaaaacctattatggaccagctggtgggagcagcagagacagggatacccttttcttctctgggaccgcaagctcatttgcgtcctctcaagaccatggagcccgaagaagaggtggaggatgatcccaaagttcatctggaagctaaagagctctgggaccagttccacaagaggggaaccgagatggtgatcacgaagagcggaaggcgcatgtttcctcccttcaaggtgagatgttccgggttggacaaaaaagccaaatatatactcctgatggatatcattgctgcagacgattgtcgctataaattccacaattcaagatggatggttgcaggtaaagccgacccagagatgccgaagaggatgtacattcaccctgattcccctgccacaggggaacaatggatgagtaaagtggtgacgtttcacaagctaaagctgacaaataatatttccgataaacacggctttaccctcgcctttccgagcgaccacgctacttggcagggcaactactccttcggcacacagactatcttgaattctatgcataaataccagcctcggtttcacattgtcagggctaacgatatccttaagttaccttacagtactttcagaacttatctgtttccagagactgagttcattgctgtgaccgcgtaccagaacgataagattacccagttaaaaatcgacaataatcccttcgcaaaggggttcagggataccggtaacggaagacgggagaagcggaagcagctcacgctccagagcatgcgtgtttttgacgaacgtcataaaaaagagaatggcaccagcgacgagagcagtagcgagcaagcagcttttaactgtttcgcccaggcgagttccccggcggccagtacagtaggaacttcgaaccttaaggacctctgtccctcagagggagaaagtgacgcagaggctgagagcaaggaagaacatggccccgaagcgtgcgacgcagcgaagatcagcacaactacgtccgaagaaccctgccgcgacaagggatcaccggcagtgaaagcgcatctcttcgcggccgaaagacccagggactccggccgcctggataaggctagccctgacagccggcatagcccagccacaatcagctcctccacacgggggctgggcgccgaggagcggaggagcccagtaagggaggggaccgccccagccaaggttgaggaagctagagctctgcccgggaaagaggctttcgcccccttaaccgtgcagacagacgccgcggccgccgctgcgagctccagtgtgcaccgacatccatttttgaatctgaatactatgcgaccccggctgagatactctccatacagcatacccgtgcccgtgccggatggctcaagcttgcttactacagcgctagctgcttccccggcgtctgtggccgttgactcaggttcggagctcaactctcgttcttccacactgtcttcatcctctatgagtttgtccccaaaattgtgcgccgagaaagaagctgccacttccgagcttcagtctatccagcggctggtttcaggcctagaagcaaaacctgaccggtctagatctgcctccccatag

SEQ ID NO: 192076 - DNA, 2232 bp, Artificial Sequence
  derived and/or modified sequence
atgagcctgtccatgagggaccccgtcatccctggcacctccatggcctaccaccccttcctgccccaccgggccccagactttgccatgtctgctgtgctgggccaccagccccccttcttccctgccctgaccctgcccccaaatggagctgctgccctgagcctgcccggggccctggccaagcccatcatggaccagctggtgggcgctgctgagaccggcatccccttcagcagcctgggcccccaggcccacctgcggcccctgaagaccatggagcctgaggaggaggtggaggatgaccccaaggtgcacctggaggccaaggagctgtgggaccagttccacaagaggggcacagagatggtgatcaccaagagcggccgcaggatgttcccccccttcaaggtgcgctgcagcggcctggacaagaaggccaagtacatcctgctgatggacatcatcgccgcagatgactgccgctacaagttccacaacagccgctggatggtggccggcaaggctgaccctgagatgcccaagaggatgtacatccacccagacagccctgccactggagagcagtggatgagcaaggtggtgaccttccacaagctgaagctgaccaacaacatcagtgacaagcacggcttcaccctggccttccccagcgaccacgccacctggcagggcaactacagctttggcacccagaccatcctgaacagcatgcacaagtaccagccccgcttccacatcgtgcgggccaatgacatcctgaagctgccctacagcaccttccgcacctacctgtttcctgagacagagttcatcgctgtgacagcctaccagaatgacaagatcacccagctgaagattgacaacaacccctttgccaagggcttccgggacacaggaaatggccggcgggagaagaggaagcagctgaccctgcagagcatgagggtgtttgatgagcggcacaagaaggaaaatggcaccagtgatgagagcagcagcgagcaggccgccttcaactgctttgcccaggccagcagccctgctgccagcacagtgggcaccagcaacctgaaggacctgtgccccagcgagggggagagtgatgctgaggccgagagcaaggaggagcacggccctgaggcctgtgatgctgccaagatcagcaccaccaccagcgaggagccctgccgggacaagggcagccctgctgtgaaggcccacctgtttgctgctgagcggccccgggacagcggccgcctggacaaggccagcccagacagccgccacagccctgccaccatcagcagcagcacccggggcctgggcgctgaggagcggcgcagccctgtgcgggagggcacagccccagccaaggtggaggaggcccgggccctgcccgggaaggaggcctttgcccccctgactgtgcagacagatgctgctgctgcccacctggcccagggccccctgcccggcctgggctttgcccctggcctggccggccagcagttcttcaacggccaccccctcttcctgcaccccagccagtttgccatgggcggggccttcagctccatggctgctgctggcatgggccccctgctggccaccgtgtctggggccagcactggagtgtctggcctggacagcacagccatggccagcgctgctgctgcccagggcctgagcggggccagcgctgccaccctgcccttccacctgcagcagcacgtgctggccagccagggcctggccatgagccccttcggcagcctcttcccctacccctacacctacatggctgctgctgctgctgccagcagcgctgctgccagcagctctgtgcaccgccaccccttcctgaacctgaacaccatgaggccccggctgcgctacagcccctacagcatccctgtgcctgtgcctgatggcagcagcctgctgaccacagccctgcccagcatggctgctgctgctggccccctggatggcaaggtggccgccctggccgccagccctgcctctgtggccgtggacagcggcagcgagctgaacagccgcagcagcaccctgagcagcagctccatgagcctgagccccaagctgtgtgccgagaaggaggccgccaccagcgagctgcagagcatccagaggctggtgtctggcctggaggccaagccagacaggagccgcagcgccagcccctag

SEQ ID NO: 192077 - DNA, 1803 bp, Artificial Sequence
  derived and/or modified sequence
atgagcctgtccatgagggaccccgtcatccctggcacctccatggcctaccaccccttcctgccccaccgggccccagactttgccatgtctgctgtgctgggccaccagccccccttcttccctgccctgaccctgcccccaaatggagctgctgccctgagcctgcccggggccctggccaagcccatcatggaccagctggtgggcgctgctgagaccggcatccccttcagcagcctgggcccccaggcccacctgcggcccctgaagaccatggagcctgaggaggaggtggaggatgaccccaaggtgcacctggaggccaaggagctgtgggaccagttccacaagaggggcacagagatggtgatcaccaagagcggccgcaggatgttcccccccttcaaggtgcgctgcagcggcctggacaagaaggccaagtacatcctgctgatggacatcatcgccgcagatgactgccgctacaagttccacaacagccgctggatggtggccggcaaggctgaccctgagatgcccaagaggatgtacatccacccagacagccctgccactggagagcagtggatgagcaaggtggtgaccttccacaagctgaagctgaccaacaacatcagtgacaagcacggcttcaccctggccttccccagcgaccacgccacctggcagggcaactacagctttggcacccagaccatcctgaacagcatgcacaagtaccagccccgcttccacatcgtgcgggccaatgacatcctgaagctgccctacagcaccttccgcacctacctgtttcctgagacagagttcatcgctgtgacagcctaccagaatgacaagatcacccagctgaagattgacaacaacccctttgccaagggcttccgggacacaggaaatggccggcgggagaagaggaagcagctgaccctgcagagcatgagggtgtttgatgagcggcacaagaaggaaaatggcaccagtgatgagagcagcagcgagcaggccgccttcaactgctttgcccaggccagcagccctgctgccagcacagtgggcaccagcaacctgaaggacctgtgccccagcgagggggagagtgatgctgaggccgagagcaaggaggagcacggccctgaggcctgtgatgctgccaagatcagcaccaccaccagcgaggagccctgccgggacaagggcagccctgctgtgaaggcccacctgtttgctgctgagcggccccgggacagcggccgcctggacaaggccagcccagacagccgccacagccctgccaccatcagcagcagcacccggggcctgggcgctgaggagcggcgcagccctgtgcgggagggcacagccccagccaaggtggaggaggcccgggccctgcccgggaaggaggcctttgcccccctgactgtgcagacagatgctgctgctgctgctgccagcagctctgtgcaccgccaccccttcctgaacctgaacaccatgaggccccggctgcgctacagcccctacagcatccctgtgcctgtgcctgatggcagcagcctgctgaccacagccctggccgccagccctgcctctgtggccgtggacagcggcagcgagctgaacagccgcagcagcaccctgagcagcagctccatgagcctgagccccaagctgtgtgccgagaaggaggccgccaccagcgagctgcagagcatccagaggctggtgtctggcctggaggccaagccagacaggagccgcagcgccagcccctag

SEQ ID NO: 192078 - DNA, 2232 bp, Artificial Sequence
  derived and/or modified sequence
atgagcctgagcatgcgggaccccgtgatccccggcaccagcatggcctaccatccgtttctgccccatcgcgcaccagacttcgcgatgagcgccgttctgggccaccagcctcccttctttccagcactcaccctcccgcctaatggggcagccgcattgagcttgcctggcgcccttgctaagcccattatggatcaactggtgggcgcagcggagacaggcattccattttccagtctgggtccacaggctcacctgcgccctttgaagactatggagcccgaagaggaggtggaggatgaccctaaagtacaccttgaggcaaaggagctttgggatcagttccacaaaaggggcaccgaaatggtgattactaaatcagggcgacgcatgttccccccgtttaaagtccgctgctctggattggataagaaggccaaatatatactgctgatggatatcatcgctgccgatgactgtagatacaaatttcacaactctcgttggatggtggctggaaaggctgatcccgagatgcccaaacgaatgtacatccatcccgacagcccggcaacgggagagcagtggatgagtaaggtcgtcacttttcacaagctgaagctcacaaataacatctcagacaagcacggattcaccttggccttcccttctgatcacgctacttggcagggaaattacagcttcggaactcagactattctcaactccatgcacaagtatcaacccagatttcacatcgtgcgtgctaatgacattctcaagctcccctatagcaccttccggacatacctgtttccagagaccgaattcatcgcagtcacagcctaccaaaacgacaaaatcacacagctgaaaatagacaacaacccctttgcaaagggtttccgggacaccggaaatgggcgccgcgaaaagcggaagcagttaactctgcagtctatgagggtcttcgacgaaaggcataaaaaggagaacgggacttctgacgaaagcagttccgaacaggcagccttcaattgcttcgcacaggcgagctctcctgcagcctcaaccgtgggaaccagtaatctgaaagatctgtgtcccagcgagggcgagtctgatgccgaggccgaatcaaaggaggagcatggcccagaggcttgtgacgctgccaaaatcagcactacaacgagcgaggagccttgtcgggataaaggctcacccgcagtgaaggcacaccttttcgcggcagaacgacctagagatagtggccgcctggacaaggcttcacctgactctcgccacagccctgcaacaatctcttcctctaccagagggctgggcgcagaggagaggaggtcacccgtgagggaggggaccgctcccgcaaaagtggaggaggcacgggcattaccggggaaagaggcctttgcacccctgaccgtacagacagatgctgctgcagcccacctcgcccagggacccttgccagggctcggattcgccccaggtctggccggacagcagttcttcaatgggcatcctctgttcctgcatcccagccaattcgccatgggaggagcattcagctcaatggctgccgccggtatgggacccctactcgccacagtcagtggggcctccaccggtgttagcggcctcgactcaactgcaatggcctctgctgcagccgctcagggtttgtccggtgcctcagccgctaccctgccgtttcacctgcagcaacacgttctcgcgagtcaaggcctggcgatgtccccctttggaagccttttcccatacccctacacctatatggccgcagccgcagcagcatcgagtgctgccgcctcttcgtcagtgcacagacacccttttctgaacttaaataccatgaggccgagacttagatactccccgtattctattcctgtgccggtgcctgacggcagttcattgttgaccacagctctcccgtcaatggccgccgcagcaggaccccttgatgggaaagtcgccgccctggccgcttcacccgcctccgtggccgtggacagcgggtctgagcttaatagtaggtcctcgaccttatccagcagttccatgagcctcagtccgaagttatgcgcggagaaggaagcggcaacgtctgagcttcagagtatccagaggctggtgtcgggactggaagcaaaacctgatcgttctcgatctgccagtccctag

SEQ ID NO: 192079 - DNA, 1803 bp, Artificial Sequence
  derived and/or modified sequence
atgagcctgagcatgcgggaccccgtgatccccggcaccagcatggcctatcacccctttctgcctcacagggcccccgatttcgcaatgtccgctgtgctgggccaccaaccaccgtttttccccgccttgacacttcccccaaacggggctgccgcactgtccctgccgggtgcgttggcgaagccaattatggaccagctggtgggtgccgccgagaccggaatccctttctccagcctcggccctcaggcccacttgcgacccttaaagaccatggagccagaggaggaagtggaggacgaccctaaagtacacctggaagccaaagaactatgggatcagttccacaaacgaggcacagagatggtgattactaaatccggtcgaagaatgttccccccttttaaagtgcgctgttccgggctagacaagaaggctaaatacattctgctaatggacataatcgctgctgatgactgccgttacaaattccacaactcacgttggatggtcgctggaaaggccgacccagagatgccgaaacggatgtacatccacccagacagcccggccactggagaacagtggatgagcaaggtcgtgacctttcataagcttaagcttacaaataacatcagtgataaacacggctttaccctggcatttccttccgaccacgctacttggcaggggaactactccttcggaactcagacaattttgaactccatgcacaaataccagccccggttccatatcgtgagggccaatgacatccttaagctgccatattcaacctttcgaacctaccttttcccagaaacagagtttatcgcagttacagcttaccagaatgataagatcactcagttgaagattgataacaacccttttgccaagggtttccgcgatactggcaacgggcggcgcgaaaagcgaaagcaattaactctgcagagcatgcgagtcttcgacgagcggcacaagaaagagaacggaacctccgacgaaagcagctccgagcaggccgccttcaattgtttcgctcaagcatccagccctgcagctagcacagtcggcacatcaaacctgaaggatttatgtccaagcgaaggggagagcgatgcagaagccgaaagtaaggaggagcatgggcccgaagcctgtgacgctgccaagattagcacgaccacatcggaagaaccttgccgggacaagggctcacccgccgtgaaagctcacctatttgctgcagaaaggccaagggactcaggaagactggacaaggcttcacccgacagtaggcattccccggctacaatctcatcgagcactcggggattgggcgcggaggaacgtaggtcccccgtccgagagggcactgcgccggctaaagtcgaggaggcgagagccctccccggcaaagaagccttcgcacccctgacagtccaaacggatgcggctgcggctgcagcttcatcttctgtgcacaggcatccgttccttaacctgaataccatgcggccccggcttcggtattcaccttattctattcccgtacccgtgccagacggctccagcctgcttaccacagcccttgccgcttcaccggcctccgtggctgtcgatagcggaagtgaactcaactccagatcctctacactgagcagctcatccatgagcctgtctcccaagttgtgcgcagagaaagaagcagccacaagcgaattacagagtattcagcgcctagtgtctgggctggaagctaagcctgatcgcagtcggtccgcatctccttag

SEQ ID NO: 192080 - DNA, 2232 bp, Artificial Sequence
  derived and/or modified sequence
atgagtctgagcatgagagaccctgtgatccctggcacctccatggcctatcatccctttctccctcaccgggctccagacttcgccatgagcgccgtgctcggccatcagccacccttttttccggctctgactttgccgcctaacggagccgcagctctgtcgctccccggtgctctggctaaacccattatggatcagttagtgggggctgccgaaactggaatcccctttagtagccttggaccacaggcccacctgcgccctctaaaaacaatggagcctgaagaggaagttgaggatgacccgaaggtgcacctcgaagctaaggaactgtgggaccaattccataaaagggggaccgagatggtgatcaccaaaagcgggaggaggatgttccctcctttcaaggtgagatgcagtggcctagataagaaagccaaatacatccttctaatggatattatcgccgcagacgattgccgttataagttccataattctagatggatggtggcaggcaaggccgaccccgaaatgcccaaacgaatgtatatccatcctgactcccccgctactggcgagcagtggatgtccaaggtcgtgacctttcacaaactcaagctgaccaacaatatatcggacaagcacggattcacgctcgccttcccctccgaccatgccacttggcagggtaactactcatttggcacgcagactattctgaacagtatgcacaagtatcagccgaggttccacatcgtcagggcaaatgacattttgaagctaccatactcaacctttaggacgtatctattccccgaaactgaatttatcgccgtgacagcctatcagaacgataagatcacccagctcaaaatcgacaacaaccctttcgccaaagggtttcgcgataccggaaacggccgacgggagaaaaggaagcaacttacactccagagtatgcgcgtgttcgatgaaagacataagaaggaaaacggtacctctgacgagagtagttccgagcaggcggctttcaattgcttcgcccaagctagttcccccgcagcaagtacggtgggaacgtcaaatctgaaggacctgtgcccgagtgagggcgaaagtgacgccgaggcagagtccaaggaagaacacggaccagaagcttgcgatgccgcaaagatttccactacgacatcggaagagccttgcagagataaaggcagcccagctgtgaaggcccacctgttcgcagctgaaaggccgcgagacagcggccgactggataaagcgagtccggacagtagacatagccccgcaaccattagtagcagcaccaggggcctgggagccgaagaaaggaggtcccccgtgcgggagggcaccgcaccagccaaggtggaagaggccagagctctgcccggaaaggaggcctttgccccactaactgtccagactgatgccgcagctgctcacctggcccaaggccctctgcctggtctcgggtttgccccaggtctggctggtcagcagttcttcaatggccacccactctttctgcacccctcccagttcgccatgggtggagctttcagctccatggctgctgccggaatgggacccctgctcgcaactgtgagcggggcaagcaccggagtgtcaggtcttgattctaccgctatggcctcggctgcggcagcccagggcctatctggggcatccgcagccacgttgccgttccatttgcagcaacatgtgttggcctctcagggactcgctatgagccctttcggcagtctcttcccctacccttacacatacatggcggctgccgcagccgctagttccgctgctgcctcttcatctgtgcacaggcatccatttctgaatctcaataccatgcgcccacgcctgaggtactccccttacagtatccccgtgccagtccccgatggtagtagtctgttgaccaccgctctcccttctatggcagcggcagctggacccctggacggaaaggtggcggcattagctgcgtctccagcttctgtggccgtggactctggtagtgaactgaactcaagatcttcaactctgtcgtcaagctcgatgagcctttcacctaagctctgtgccgagaaggaggctgctaccagtgagctgcaaagcattcagagactggtctccggcctggaggcaaaaccagataggagtcgaagcgcctccccatag

SEQ ID NO: 192081 - DNA, 1803 bp, Artificial Sequence
  derived and/or modified sequence
atgtccctgtcaatgcgtgaccccgtcatccccggaacctccatggcgtatcacccgtttcttccccacagagctcctgactttgcaatgagtgctgtcctgggtcatcagccacccttctttcccgctctgacactgcctcccaatggcgctgccgctctctcattaccaggcgctcttgcaaagcctattatggatcagttggtcggtgcagccgagaccggcatccctttttccagtttggggcctcaggcccacttgcgcccattgaagaccatggaacccgaggaggaggttgaggatgatccaaaagtgcacttggaggccaaggaactctgggatcaattccacaaaaggggcaccgaaatggtgataaccaaatccggacgaagaatgttcccccctttcaaagtgagatgtagtggtttggacaagaaggcaaagtatattctgctgatggacattatagcggcagacgactgtcgatataagttccacaacagccgctggatggtggcaggtaaggcagaccccgaaatgcctaagcgaatgtacatccatcccgattctccagccactggagaacagtggatgagtaaggttgtcacctttcacaagctgaaactgacaaacaatatttctgataagcatggattcaccctggcttttcctagtgaccatgctacttggcaaggaaattacagctttggaacacagactatattgaacagcatgcataaatatcagccgagatttcacattgtcagggccaacgacatactgaagctcccgtactcaacatttaggacataccttttcccagagaccgaatttatcgccgtgacagcttatcaaaacgacaagattacccagctgaagatcgataacaatcctttcgccaaaggctttcgcgataccggcaatggccgacgggagaagagaaagcagctcacccttcagagcatgcgggtgttcgatgaaaggcataaaaaggagaatggtacctctgatgagagctctagcgagcaggctgcattcaactgttttgcccaggcaagctctccagccgcttccacagtaggcacttcaaacctgaaggatctctgtccttccgagggcgaatccgatgcagaggcggaaagtaaagaggaacacggcccagaggcctgtgacgccgcaaagatttctaccacaacgagcgaagagccatgccgcgacaaaggtagtccagcagtgaaggctcatctctttgccgctgagcggcctcgtgactcaggaaggcttgacaaggccagtcccgactcaaggcacagccctgctacaatatccagttctaccagggggctaggcgcagaagagagacgatcaccagttcgtgagggcacagcacccgctaaggtggaagaggcacgagccctccccggaaaggaggccttcgctcccctgactgtgcagacagacgccgcagctgccgcagcctcaagtagcgtccacaggcatccattcttgaatctcaatacgatgaggcccagactgcgctattcaccgtactcaatcccagtgcccgtgcccgatggaagttctctgctgactaccgcactggccgcaagcccggcttccgtcgccgttgacagcgggtcagaactgaatagcaggtcttcaacactctcttcctcttctatgagcttgagcccgaagctttgtgcagagaaggaagctgctacctctgaactccagtctatccagcgactagttagtggtctggaagccaaaccagacaggtcacggagtgccagcccatag

SEQ ID NO: 192082 - DNA, 4208 bp, Artificial Sequence
  derived and/or modified sequence
gcagggctggagtgtctatttcgagctcagcggcagggctcgggcgcgagtcgagaccctgctcgctcctctcgcttctgaaaccgacgttcaggagcggctttttaaaaacgcaaggcacaaggacggtcacccgcgcgactatgtttgctgatttttcgccttgccctctttaaaagcggcctcccattctccaaaagacacttcccctcctccctttgaagtgcattagttgtgatttctgcctccttttcttttttctttcttttttgttttgctttttccccccttttgaattatgtgctgctgttaaacaacaacaaaaaaacaacaaaacacagcagctgcggacttgtccccggctggagcccagcgccccgcctggagtggatgagcctctccatgagagatccggtcattcctgggacaagcatggcctaccatccgttcctacctcaccgggcgccggacttcgccatgagcgcggtgctgggtcaccagccgccgttcttccccgcgctgacgctgcctcccaacggcgcggcggcgctctcgctgccgggcgccctggccaagccgatcatggatcaattggtgggggcggccgagaccggcatcccgttctcctccctggggccccaggcgcatctgaggcctttgaagaccatggagcccgaagaagaggtggaggacgaccccaaggtgcacctggaggctaaagaactttgggatcagtttcacaagcggggcaccgagatggtcattaccaagtcgggaaggcgaatgtttcctccatttaaagtgagatgttctgggctggataaaaaagccaaatacattttattgatggacattatagctgctgatgactgtcgttataaatttcacaattctcggtggatggtggctggtaaggccgaccccgaaatgccaaagaggatgtacattcacccggacagccccgctactggggaacagtggatgtccaaagtcgtcactttccacaaactgaaactcaccaacaacatttcagacaaacatggatttactttggccttcccaagtgatcacgctacgtggcaggggaattatagttttggtactcagactatattgaactccatgcacaaataccagccccggttccacattgtaagagccaatgacatcttgaaactcccttatagtacatttcggacatacttgttccccgaaactgaattcatcgctgtgactgcataccagaatgataagataacccagttaaaaatagacaacaacccttttgcaaaaggtttccgggacactggaaatggccgaagagaaaaaagaaaacagctcaccctgcagtccatgagggtgtttgatgaaagacacaaaaaggagaatgggacctctgatgagtcctccagtgaacaagcagctttcaactgcttcgcccaggcttcttctccagccgcctccactgtagggacatcgaacctcaaagatttatgtcccagcgagggtgagagcgacgccgaggccgagagcaaagaggagcatggccccgaggcctgcgacgcggccaagatctccaccaccacgtcggaggagccctgccgtgacaagggcagccccgcggtcaaggctcaccttttcgctgctgagcggccccgggacagcgggcggctggacaaagcgtcgcccgactcacgccatagccccgccaccatctcgtccagcactcgcggcctgggcgcggaggagcgcaggagcccggttcgcgagggcacagcgccggccaaggtggaagaggcgcgcgcgctcccgggcaaggaggccttcgcgccgctcacggtgcagacggacgcggccgccgcgcacctggcccagggccccctgcctggcctcggcttcgccccgggcctggcgggccaacagttcttcaacgggcacccgctcttcctgcaccccagccagtttgccatggggggcgccttctccagcatggcggccgctggcatgggtcccctcctggccacggtttctggggcctccaccggtgtctcgggcctggattccacggccatggcctctgccgctgcggcgcagggactgtccggggcgtccgcggccaccctgcccttccacctccagcagcacgtcctggcctctcagggcctggccatgtcccctttcggaagcctgttcccttacccctacacgtacatggccgcagcggcggccgcctcctctgcggcagcctccagctcggtgcaccgccaccccttcctcaatctgaacaccatgcgcccgcggctgcgctacagcccctactccatcccggtgccggtcccggacggcagcagtctgctcaccaccgccctgccctccatggcggcggccgcggggcccctggacggcaaagtcgccgccctggccgccagcccggcctcggtggcagtggactcgggctctgaactcaacagccgctcctccacgctctcctccagctccatgtccttgtcgcccaaactctgcgcggagaaagaggcggccaccagcgaactgcagagcatccagcggttggttagcggcttggaagccaagccggacaggtcccgcagcgcgtccccgtagacccgtcccagacacgtcttttcattccagtccagttcaggctgccgtgcactttgtcggatataaaataaaccacgggcccgccatggcgttagcccttccttttgcagttgcgtctgggaaggggccccggactccctcgagagaatgtgctagagacagcccctgtcttcttggcgtggtttatatgtccgggatctggatcagattctgggggctcagaaacgtcggttgcattgagctactgggggtaggagttccaacatttatgtccagagcaacttccagcaaggctggtctgggtctctgcccaccaggcggggaggtgttcaaagacatctccctcagtgcggatttatatatatatttttccttcactgtgtcaagtggaaacaaaaacaaaatctttcaaaaaaaaaatcgggacaagtgaacacattaacatgattctgtttgtgcagattaaaaactttatagggacttgcattatcggttctcaataaattactgagcagctttgtttggggagggaagtccctaccatccttgtttagtctatattaagaaaatctgtgtctttttaatattcttgtgatgttttcagagccgctgtaggtctcttcttgcatgtccacagtaatgtatttgtggtttttattttgaacgcttgcttttagagagaaaacaatatagccccctacccttttcccaatcctttgccctcaaatcagtgacccaagggagggggggatttaaagggaaggagtgggcaaaacacataaaatgaatttattatatctaagctctgtagcaggattcatgtcgttctttgacagttctttctctttcctgtatatgcaataacaaggttttaaaaaaataataaagaagtgagactattagacaaagtatttatgtaattatttgataactcttgtaaataggtggaatatgaatgcttggaaaattaaactttaatttattgacattgtacatagctctgtgtaaatagaattgcaactgtcaggttttgtgttcttgttttcctttagttgggtttatttccaggtcacagaattgctgttaacactagaaaacacacttcctgcaccaacaccaataccctttcaaaagagttgtctgcaacatttttgttttcttttttaatgtccaaaagtgggggaaagtgctatttcctattttcaccaaaattggggaaggagtgccactttccagctccacttcaaattccttaaaatataactgagattgctgtggggagggaggagggcagaggctgcggtttgactttttaatttttcttttgttatttgtatttgctagtctctgatttcctcaaaacgaagtggaatttactactgttgtcagtatcggtgttttgaattggtgcctgcctatagagatatattcacagttcaaaagtcaggtgctgagagatggtttaaagacaaattcatgaaggtatattttgtgttatagttgttgatgagttctttggttttctgtatttttccccctctctttaaaacatcactgaaatttcaataaatttttattgaaatgtc

SEQ ID NO: 192083 - DNA, 2767 bp, Artificial Sequence
  derived and/or modified sequence
gaattctagaggcggcggagggtggcgaggagctctcgctttctctcgctccctccctctccgactccgtctctctctctctctctctctctcccctccctctctttccctctgttccattttttccccctctaaatcctccctgccctgcgcgcctggacacagatttaggaagcgaattcgctcacgttttaggacaaggaagagagagaggcacgggagaagagcccagcaagatttggattgaaaccgagacaccctccggaggctcggagcagaggaaggaggaggagggcggcgaacggaagccagtttgcaattcaagttttgatagcgctggtagaagggggtttaaatcagatttttttttttttaaaggagagagactttttccgctctctcgctccctgttaaagccgggtctagcacagctgcagacgccaccagcgagaaagagggagaggaagacagatagggggcgggggaagaagaaaaagaaaggtaaaaagtcttctaggagaacctttcacatttgcaacaaaagacctaggggctggagagagattcctgggacgcagggctggagtgtctatttcgagctcagcggcagggctcgggcgcgagtcgagaccctgctcgctcctctcgcttctgaaaccgacgttcaggagcggctttttaaaaacgcaaggcacaaggacggtcacccgcgcgactatgtttgctgatttttcgccttgccctctttaaaagcggcctcccattctccaaaagacacttcccctcctccctttgaagtgcattagttgtgatttctgcctccttttcttttttctttcttttttgttttgctttttccccccttttgaattatgtgctgctgttaaacaacaacaaaaaaacaacaaaacacagcagctgcggacttgtccccggctggagcccagcgccccgcctggagtggatgagcctctccatgagagatccggtcattcctgggacaagcatggcctaccatccgttcctacctcaccgggcgccggacttcgccatgagcgcggtgctgggtcaccagccgccgttcttccccgcgctgacgctgcctcccaacggcgcggcggcgctctcgctgccgggcgccctggccaagccgatcatggatcaattggtgggggcggccgagaccggcatcccgttctcctccctggggccccaggcgcatctgaggcctttgaagaccatggagcccgaagaagaggtggaggacgaccccaaggtgcacctggaggctaaagaactttgggatcagtttcacaagcggggcaccgagatggtcattaccaagtcgggaaggcgaatgtttcctccatttaaagtgagatgttctgggctggataaaaaagccaaatacattttattgatggacattatagctgctgatgactgtcgttataaatttcacaattctcggtggatggtggctggtaaggccgaccccgaaatgccaaagaggatgtacattcacccggacagccccgctactggggaacagtggatgtccaaagtcgtcactttccacaaactgaaactcaccaacaacatttcagacaaacatggatttactttggccttcccaagtgatcacgctacgtggcaggggaattatagttttggtactcagactatattgaactccatgcacaaataccagccccggttccacattgtaagagccaatgacatcttgaaactcccttatagtacatttcggacatacttgttccccgaaactgaattcatcgctgtgactgcataccagaatgataagataacccagttaaaaatagacaacaacccttttgcaaaaggtttccgggacactggaaatggccgaagagaaaaaagaaaacagctcaccctgcagtccatgagggtgtttgatgaaagacacaaaaaggagaatgggacctctgatgagtcctccagtgaacaagcagctttcaactgcttcgcccaggcttcttctccagccgcctccactgtagggacatcgaacctcaaagatttatgtcccagcgagggtgagagcgacgccgaggccgagagcaaagaggagcatggccccgaggcctgcgacgcggccaagatctccaccaccacgtcggaggagccctgccgtgacaagggcagccccgcggtcaaggctcaccttttcgctgctgagcggccccgggacagcgggcggctggacaaagcgtcgcccgactcacgccatagccccgccaccatctcgtccagcactcgcggcctgggcgcggaggagcgcaggagcccggttcgcgagggcacagcgccggccaaggtggaagaggcgcgcgcgctcccgggcaaggaggccttcgcgccgctcacggtgcagacggacgcggccgccgcggcagcctccagctcggtgcaccgccaccccttcctcaatctgaacaccatgcgcccgcggctgcgctacagcccctactccatcccggtgccggtcccggacggcagcagtctgctcaccaccgccctggccgccagcccggcctcggtggcagtggactcgggctctgaactcaacagccgctcctccacgctctcctccagctccatgtccttgtcgcccaaactctgcgcggagaaagaggcggccaccagcgaactgcagagcatccagcggttggttagcggcttggaagccaagccggacaggtcccgcagcgcgtccccgtag

SEQ ID NO: 192084 - protein, 385 aa, Artificial Sequence
  derived and/or modified sequence
MKEEEGFPEDEATESETLSLVKELDAFPKVPESYVETSASGGTVSLIAFTTMALLTIMEFSVYQDTWMKYEYEVDKDFSSKLRINIDITVAMKCQYVGADVLDLAETMVASADGLVYEPTVFDLSPQQKEWQRMLQLIQSRLQEEHSLQDVIFKSAFKSTSTALPPREDDSSQSPNACRIHGHLYVNKVAGNFHITVGKAIPHPRGHAHLAALVNHESYNFSHRIDHLSFGELVPAIINPLDGTEKIAIDHNQMFQYFITVVPTKLHTYKISADTHQFSVTERERIINHAAGSHGVSGIFMKYDLSSLMVTVTEEHMPFWQFFVRLCGIVGGIFSTTGMLHGIGKFIVEIICCRFRLGSYKPVNSVPFEDGHTDNHLPLLENNTH

SEQ ID NO: 192085 - protein, 377 aa, Artificial Sequence
  derived and/or modified sequence
MRRLNRKKTLSLVKELDAFPKVPESYVETSASGGTVSLIAFTTMALLTIMEFSVYQDTWMKYEYEVDKDFSSKLRINIDITVAMKCQYVGADVLDLAETMVASADGLVYEPTVFDLSPQQKEWQRMLQLIQSRLQEEHSLQDVIFKSAFKSTSTALPPREDDSSQSPNACRIHGHLYVNKVAGNFHITVGKAIPHPRGHAHLAALVNHESYNFSHRIDHLSFGELVPAIINPLDGTEKIAIDHNQMFQYFITVVPTKLHTYKISADTHQFSVTERERIINHAAGSHGVSGIFMKYDLSSLMVTVTEEHMPFWQFFVRLCGIVGGIFSTTGMLHGIGKFIVEIICCRFRLGSYKPVNSVPFEDGHTDNHLPLLENNTH

SEQ ID NO: 192086 - protein, 220 aa, Artificial Sequence
  derived and/or modified sequence
MRRLNRKKTLSLVKELDAFPKVPESYVETSASGGTVSLIAFTTMALLTIMEFSVYQDTWMKYEYEVDKDFSSKLRINIDITVAMKCQYVGADVLDLAETMVASADGLVYEPTVFDLSPQQKEWQRMLQLIQSRLQEEHSLQDVIFKSAFKSTSTALPPREDDSSQSPNACRIHGHLYVNKVAGNFHITVGKAIPHPRGHAHLAALVNHESYNFSHRIDHL

SEQ ID NO: 192087 - protein, 71 aa, Artificial Sequence
  derived and/or modified sequence
MRRLNRKKTLSLVKELDAFPKVPESYVETSASGGTVSLIAFTTMALLTIMEFSVYQDTWMKYEYEVDKDFS

SEQ ID NO: 192088 - protein, 175 aa, Artificial Sequence
  derived and/or modified sequence
MRRLNRKKTLSLVKELDAFPKVPESYVETSASGGTVSLIAFTTMALLTIMEFSVYQDTWMKYEYEVDKDFSSKLRINIDITVAMKCQYVGADVLDLAETMVASADGLVYEPTVFDLSPQQKEWQRMLQLIQSRLQEEHSLQDVIFKSAFKSTSTALPPREDDSSQSPNACRIHGH

SEQ ID NO: 192089 - DNA, 1781 bp, Artificial Sequence
  derived and/or modified sequence
agtcgcttttgttctcgcgatatttccgggtacgcgggagccccggcgacccgggcttctgtgaaacatggcggtaggctgggaccataacacaagcatgactatatgaaggaagaggaaggttttcctgaagatgaggcgactgaatcggaaaaaaactttaagtttggtaaaagagttggatgcctttccgaaggttcctgagagctatgtagagacttcagccagtggaggtacagtttctctaatagcatttacaactatggctttattaaccataatggaattctcagtatatcaagatacatggatgaagtatgaatacgaagtagacaaggatttttctagcaaattaagaattaatatagatattactgttgccatgaagtgtcaatatgttggagcggatgtattggatttagcagaaacaatggttgcatctgcagatggtttagtttatgaaccaacagtatttgatctttcaccacagcagaaagagtggcagaggatgctgcagctgattcagagtaggctacaagaagagcattcacttcaagatgtgatatttaaaagtgcttttaaaagtacatcaacagctcttccaccaagagaagatgattcatcacagtctccaaatgcatgcagaattcatggccatctatatgtcaataaagtagcagggaattttcacataacagtgggcaaggcaattccacatcctcgtggtcatgcacatttggcagcacttgtcaaccatgaatcttacaatttttctcatagaatagatcatttgtcttttggagagcttgttccagcaattattaatcctttagatggaactgaaaaaattgctatagatcacaaccagatgttccaatattttattacagttgtgccaacaaaactacatacatataaaatatcagcagacacccatcagttttctgtgacagaaagggaacgtatcattaaccatgctgcaggcagccatggagtctctgggatatttatgaaatatgatctcagttctcttatggtgacagttactgaggagcacatgccattctggcagttttttgtaagactctgtggtattgttggaggaatcttttcaacaacaggcatgttacatggaattggaaaatttatagttgaaataatttgctgtcgtttcagacttggatcctataaacctgtcaattctgttccttttgaggatggccacacagacaaccacttacctcttttagaaaataatacacattaacacctcccgattgaaggagaaaaactttttgcctgagacataaaacctttttttaataataaaatattgtgcaatatattcaaagaaaagaaaacacaaataagcagaaaacatacttattttaaaaaagaaaaaaaaggataaaaaaacccaaactgaaattctatatacgttgtgtctgttacaaatgtcgtagaagaaatcatgcagctaaacgatgaagaagcccaactggagtgttgctttgaagatgacgccttcttatattttcatagcaaatgggtggtatcaaaatcagacattgcttcttgctgataaaaagcctgaaggaaataagtgaaactacatctatgggaaaaaaaaaaacattgagaagtgcaaatgttcgcatccttttgtttttaaaagatatgatgtcagaataaaatgtggaaaacatacggaaaactagtctagactttaaagaattgtgatcaggtcacattgttaataaaaaaaaaaaacgggctaaaaa

SEQ ID NO: 192090 - DNA, 1158 bp, Artificial Sequence
  derived and/or modified sequence
atgaaagaggaagagggctttcccgaggatgaggcgactgaaagtgagacactgtccctggtcaaggagttggatgcatttcctaaggtgcctgagtcgtatgtcgaaaccagtgcctcgggcggaacagtcagcctgattgcctttacaacaatggcccttttaacaataatggagttttccgtgtaccaagacacctggatgaaatatgagtatgaagtagataaggatttttcttctaaactcagaattaatattgacatcactgtcgcaatgaagtgtcaatatgtcggggctgacgtactggacctggccgagaccatggtggcctctgcggacgggctagtgtatgaacccactgtctttgacctgagccctcagcagaaggaatggcagaggatgctgcaactgatccagtcccgattgcaagaagagcattctctgcaagatgttattttcaaatccgcgttcaaatcaacgtccaccgccctccccccacgcgaggatgacagttctcaatctccaaacgcttgcaggatacacggccacctgtacgtgaacaaagtagcgggaaatttccatattacagtgggtaaggccattccccaccctagggggcatgcacatctggccgctctggtcaatcatgagtcatacaatttttctcacaggatcgatcatcttagtttcggagaactcgtacctgccattattaatccgctggatgggaccgaaaaaatcgccattgaccacaatcaaatgttccaatatttcatcacggtggtgccaacaaagttacacacatacaaaataagcgcggatactcatcaattctccgttaccgaaagagagaggattatcaatcatgctgcaggtagccatggagtgagcggtattttcatgaagtatgacttatcctcattaatggtcacagtgaccgaagaacatatgccgttttggcagtttttcgtgcgtctatgcggcattgttggaggaatcttctcaactactggaatgctgcatgggatcggaaagttcatcgtcgaaattatatgctgtaggttcagattgggctcgtacaagcccgtgaatagcgtcccctttgaggatgggcacacagataaccacctgccattactagagaacaacacacactag

SEQ ID NO: 192091 - DNA, 1134 bp, Artificial Sequence
  derived and/or modified sequence
atgagacggctgaatcgtaaaaagaccctaagtctcgttaaggaattagacgcctttccaaaggttcctgaaagctacgtggaaacaagtgcctctggtggaacagtaagcttaatcgcttttacaaccatggctctcttaacaatcatggaatttagtgtctatcaggacacatggatgaagtacgagtatgaagtggataaggatttttcttcaaagctcaggattaacattgacattaccgtggctatgaagtgccagtatgttggagcggacgttctcgatcttgcagagacaatggtggccagtgccgatggtctggtgtacgagcccactgtatttgatctgagtccccagcagaaagaatggcaacggatgctccagcttatacagagcaggttgcaagaagagcacagcctccaggatgtcatcttcaagtcagccttcaaatcaacaagtacagcactgccgcctcgcgaggacgacagcagtcagtcacccaacgcttgtagaattcatggccacctctacgtcaacaaagtggccggcaatttccacatcaccgttgggaaagctatcccacacccccggggacacgcacatctcgctgctctggttaaccatgagagttacaatttttcccaccgcatcgaccacctctcttttggcgaactggtgccggctatcatcaatcctctggacggcaccgagaagattgcgattgaccataaccaaatgtttcagtactttattacagtggtccccaccaagttgcacacctacaagatcagtgccgatacgcaccaattttcagtcacggaacgtgaacgcataatcaaccacgccgcgggctcccacggagtgtcggggatattcatgaagtatgatctgtccagcctcatggtgactgtaaccgaagagcatatgccattttggcagttcttcgtgaggctgtgcggcattgttggcggaatcttttccaccactggaatgctccacggtataggcaagttcattgttgaaattatttgttgcagattcagactggggtcttacaagcctgttaactcagtcccattcgaagatggccacacggacaatcatctgccactgttggagaacaacacccactag

SEQ ID NO: 192092 - DNA, 663 bp, Artificial Sequence
  derived and/or modified sequence
atgcgtcggcttaatcggaagaagacactgagtctggtgaaggagctagacgcatttccaaaggtgccagaatcttatgtagaaacttccgcatccggcggaacagtcagcctgatcgctttcacaacaatggcactactgacaattatggagttctccgtttatcaggatacctggatgaagtacgagtacgaagtcgataaagattttagcagtaaactgagaattaacatcgacataaccgtcgctatgaaatgtcagtacgtaggtgcagatgtgctggatctggccgaaactatggtggcatctgcagacggactggtatatgaaccaaccgtgttcgatctgtctcctcagcagaaagaatggcagaggatgctccaactcattcaaagcaggctccaagaggagcatagtctgcaggacgttatctttaaaagtgctttcaaatctacctcaactgccctgcccccgagggaagacgacagcagccagagccctaacgcttgcagaatccatgggcatctctacgtcaataaggttgcgggaaactttcacatcactgtggggaaagctatcccccatcctagaggccacgcccacctcgccgctctggtgaatcacgagtcttataacttttcacatcggatcgatcatctatag

SEQ ID NO: 192093 - DNA, 216 bp, Artificial Sequence
  derived and/or modified sequence
atgaggcgcctgaaccgcaagaaaaccttaagtttggtcaaagaactggacgcattccctaaggtgccggagtcttacgtagagacttcggcatccggtggcacagtgagcttgattgccttcaccactatggcattgctaaccatcatggaattttccgtttaccaggatacatggatgaaatacgagtatgaggtggacaaggatttcagctag

SEQ ID NO: 192094 - DNA, 528 bp, Artificial Sequence
  derived and/or modified sequence
atgaggagactcaaccggaaaaagactctgtccctcgtcaaagagctggacgccttccccaaggtgcccgagtcctatgtggagacctctgccagcggtggaacagtgtcccttattgcatttaccacaatggctcttcttacaattatggagttcagcgtataccaggacacatggatgaagtacgagtacgaggtagacaaagattttagctcaaagctgcgcattaatattgacattactgtggccatgaaatgccagtacgtcggagccgatgtgttggaccttgcggagactatggttgcatctgcagacggactcgtctacgagcccactgtttttgacctatctccacagcaaaaggaatggcaacgtatgctgcagctgatccaatcccgtctgcaagaggaacactctttgcaggacgtcattttcaagagcgcttttaaatcaaccagcaccgctctcccccctcgggaggacgattcaagccaaagtcctaatgcttgccgcatacacggccactag

SEQ ID NO: 192095 - DNA, 1158 bp, Artificial Sequence
  derived and/or modified sequence
atgaaggaggaggagggcttcccagaagatgaggccacagaaagtgagaccctgagcctggtgaaggagctggatgccttccccaaggtgcctgagagctatgtggagaccagcgccagcggcggcaccgtgtccctgattgccttcaccaccatggccctgctgaccatcatggagttctctgtgtaccaggacacctggatgaagtatgaatatgaggtggacaaggacttcagcagcaagctgcgcatcaacatcgacatcaccgtggccatgaagtgccagtatgtgggcgcagatgtgctggacctggccgagaccatggtggccagcgcagatggcctggtgtatgagcccaccgtgtttgacctgagcccccagcagaaggagtggcagaggatgctgcagctgatccagagccggctgcaggaggagcacagcctgcaggacgtcatcttcaagagcgccttcaagagcaccagcacagccctgcccccccgggaggatgacagcagccagagccccaatgcctgccgcatccacggccacctgtatgtgaacaaggtggccggcaacttccacatcaccgtgggcaaggccatcccccacccccggggccacgcccacctggccgccctggtgaaccacgagagctacaacttcagccacagaattgaccacctgagctttggagagctggtgcctgccatcatcaaccccctggatggaacagagaagatcgccatcgaccacaaccagatgttccagtacttcatcaccgtggtgcccaccaagctgcacacctacaagatctctgctgacacccaccagttctctgtgacagagcgggagcgcatcatcaaccacgccgccggcagccacggcgtgtctggcatcttcatgaagtatgacctgagcagcctgatggtgacagtgacagaggagcacatgcccttctggcagttctttgtgcggctgtgtggcatcgtgggcggcatcttcagcaccaccggcatgctgcatggaattggcaagttcatcgtggagatcatctgctgccgcttccggctgggcagctacaagcctgtgaacagcgtgccctttgaagatggccacacagacaaccacctgcccctgctggagaacaacacccactag

SEQ ID NO: 192096 - DNA, 1134 bp, Artificial Sequence
  derived and/or modified sequence
atgaggcggctgaacaggaagaagaccctgagcctggtgaaggagctggatgccttccccaaggtgcctgagagctatgtggagaccagcgccagcggcggcaccgtgtccctgattgccttcaccaccatggccctgctgaccatcatggagttctctgtgtaccaggacacctggatgaagtatgaatatgaggtggacaaggacttcagcagcaagctgcgcatcaacatcgacatcaccgtggccatgaagtgccagtatgtgggcgcagatgtgctggacctggccgagaccatggtggccagcgcagatggcctggtgtatgagcccaccgtgtttgacctgagcccccagcagaaggagtggcagaggatgctgcagctgatccagagccggctgcaggaggagcacagcctgcaggacgtcatcttcaagagcgccttcaagagcaccagcacagccctgcccccccgggaggatgacagcagccagagccccaatgcctgccgcatccacggccacctgtatgtgaacaaggtggccggcaacttccacatcaccgtgggcaaggccatcccccacccccggggccacgcccacctggccgccctggtgaaccacgagagctacaacttcagccacagaattgaccacctgagctttggagagctggtgcctgccatcatcaaccccctggatggaacagagaagatcgccatcgaccacaaccagatgttccagtacttcatcaccgtggtgcccaccaagctgcacacctacaagatctctgctgacacccaccagttctctgtgacagagcgggagcgcatcatcaaccacgccgccggcagccacggcgtgtctggcatcttcatgaagtatgacctgagcagcctgatggtgacagtgacagaggagcacatgcccttctggcagttctttgtgcggctgtgtggcatcgtgggcggcatcttcagcaccaccggcatgctgcatggaattggcaagttcatcgtggagatcatctgctgccgcttccggctgggcagctacaagcctgtgaacagcgtgccctttgaagatggccacacagacaaccacctgcccctgctggagaacaacacccactag

SEQ ID NO: 192097 - DNA, 663 bp, Artificial Sequence
  derived and/or modified sequence
atgaggcggctgaacaggaagaagaccctgagcctggtgaaggagctggatgccttccccaaggtgcctgagagctatgtggagaccagcgccagcggcggcaccgtgtccctgattgccttcaccaccatggccctgctgaccatcatggagttctctgtgtaccaggacacctggatgaagtatgaatatgaggtggacaaggacttcagcagcaagctgcgcatcaacatcgacatcaccgtggccatgaagtgccagtatgtgggcgcagatgtgctggacctggccgagaccatggtggccagcgcagatggcctggtgtatgagcccaccgtgtttgacctgagcccccagcagaaggagtggcagaggatgctgcagctgatccagagccggctgcaggaggagcacagcctgcaggacgtcatcttcaagagcgccttcaagagcaccagcacagccctgcccccccgggaggatgacagcagccagagccccaatgcctgccgcatccacggccacctgtatgtgaacaaggtggccggcaacttccacatcaccgtgggcaaggccatcccccacccccggggccacgcccacctggccgccctggtgaaccacgagagctacaacttcagccacagaattgaccacctgtag

SEQ ID NO: 192098 - DNA, 216 bp, Artificial Sequence
  derived and/or modified sequence
atgaggcggctgaacaggaagaagaccctgagcctggtgaaggagctggatgccttccccaaggtgcctgagagctatgtggagaccagcgccagcggcggcaccgtgtccctgattgccttcaccaccatggccctgctgaccatcatggagttctctgtgtaccaggacacctggatgaagtatgaatatgaggtggacaaggacttctcctag

SEQ ID NO: 192099 - DNA, 528 bp, Artificial Sequence
  derived and/or modified sequence
atgaggcggctgaacaggaagaagaccctgagcctggtgaaggagctggatgccttccccaaggtgcctgagagctatgtggagaccagcgccagcggcggcaccgtgtccctgattgccttcaccaccatggccctgctgaccatcatggagttctctgtgtaccaggacacctggatgaagtatgaatatgaggtggacaaggacttcagcagcaagctgcgcatcaacatcgacatcaccgtggccatgaagtgccagtatgtgggcgcagatgtgctggacctggccgagaccatggtggccagcgcagatggcctggtgtatgagcccaccgtgtttgacctgagcccccagcagaaggagtggcagaggatgctgcagctgatccagagccggctgcaggaggagcacagcctgcaggacgtcatcttcaagagcgccttcaagagcaccagcacagccctgcccccccgggaggatgacagcagccagagccccaatgcctgccgcatccacggccactag

SEQ ID NO: 192100 - DNA, 1158 bp, Artificial Sequence
  derived and/or modified sequence
atgaaggaggaggagggcttccccgaggacgaggccaccgagagcgaaaccctgagtctggttaaggaactcgacgccttccccaaagtaccagagtcctatgtagaaaccagtgcctcggggggaaccgtgtctcttatcgcctttacaaccatggccctcctgaccatcatggagttctccgtctatcaagacacctggatgaaatacgagtatgaggtggacaaggatttcagctccaagttgcgcatcaatatcgacatcaccgttgcaatgaagtgccagtacgtgggcgcggacgtcctggatttagctgagacaatggtggctagcgctgacgggttggtctacgagcccacggtttttgacttgagcccccagcaaaaggaatggcagaggatgttacagctgatccagtcccgactgcaggaagagcattccctccaggacgtcattttcaaaagcgccttcaaatctaccagcaccgccctgcctccgagagaagacgacagctcacagtcaccaaacgcatgccgcattcacggtcacctgtacgtgaacaaggtggcagggaactttcatatcacggtgggaaaggcaatcccccatccaagggggcacgctcacctagctgccctggtgaaccatgaaagctataacttctcccaccggattgatcacttgtcctttggggagctcgtgcctgctatcatcaatcccctggatggcaccgaaaaaattgcaatcgatcataatcagatgttccaatatttcattacggtcgtgcccacgaaattgcatacctacaaaatatctgcggatacgcatcaattttccgtcaccgagcgggagaggattattaatcacgccgccgggtcccacggcgtgagcggtatttttatgaagtatgatctcagctcactgatggtcaccgtgactgaggagcatatgcccttttggcagttttttgttaggttgtgcggcatcgtgggaggtatcttttctaccaccggaatgctgcatggcatcggaaaattcattgtcgaaatcatctgctgtcgctttcggctcggctcatacaaacctgtgaacagcgttcccttcgaggatggccataccgacaaccatctgccgctacttgagaataacacccactag

SEQ ID NO: 192101 - DNA, 1134 bp, Artificial Sequence
  derived and/or modified sequence
atgcggcggctgaaccggaagaagaccctgagcctggtgaaggagctggacgcgtttccaaaggttccagagtcttacgtcgagacatccgccagcggaggcactgtgtccctgattgcatttaccacaatggcattgctcactataatggagttttctgtgtatcaagacacttggatgaagtatgagtacgaagtggacaaggacttttcgtcgaagctgcgcatcaacattgatattactgtggcaatgaaatgccagtatgtcggggccgatgtgctggatctcgcggaaactatggtggcgagtgctgacggactcgtgtatgaaccaaccgtgttcgacctgtctccccagcagaaggaatggcagagaatgcttcagctgatccagtctagactgcaggaggagcacagtctgcaggacgtgatctttaagtctgcttttaaatccacctcgacggcattgccaccgcgggaggacgacagcagtcagagcccaaacgcttgcagaattcatggacatctgtacgtgaacaaagtggcaggcaattttcacataaccgtaggaaaggctatcccccacccacggggacatgcccatttggccgccctcgtcaaccatgagagttataactttagccacagaattgaccaccttagctttggagagttggtgcctgccattatcaaccccctcgatggaaccgagaagatcgccatagatcacaaccaaatgtttcagtactttattaccgtggtgcctacgaagctgcacacctacaagattagcgccgacacacaccagttctctgtgaccgagagggagagaatcattaatcacgccgctggctcgcatggtgtgagcggaatctttatgaaatacgatctgagctccctgatggtgaccgtgaccgaggagcatatgcccttctggcagttctttgttagactatgcggaatagtaggtggcattttctctactaccggtatgctccacggaattggaaagtttattgtcgaaatcatctgctgtcggttccggctgggaagttacaaacctgttaattcagtgcccttcgaggacgggcacaccgacaatcacctgcctttgctcgaaaataatactcattag

SEQ ID NO: 192102 - DNA, 663 bp, Artificial Sequence
  derived and/or modified sequence
atgcggcggctgaaccggaagaagaccctgagcctggtgaaggagctggacgcattccctaaggtgcctgagagctacgtggagacatctgcaagcggcggaactgtttcactgattgcattcactacaatggccctgttaaccataatggaattctccgtatatcaagacacctggatgaaatatgagtacgaggtggacaaggacttcagtagcaagcttcggatcaacatcgacataactgttgccatgaagtgccagtacgtgggcgccgatgtcttagatttagccgagactatggttgcctcagccgacgggttggtgtatgagccgaccgtgttcgacctgtcccctcagcagaaggaatggcaacgcatgctgcaactcatacagtctcgcttgcaggaggaacattctctacaggacgtgatatttaaatcggcctttaaatctaccagtaccgctttgcccccccgcgaagatgatagctcccagagccccaatgcgtgccgcattcacggccacctgtatgttaacaaagtggccggaaactttcatattactgtggggaaagccattcctcatccacgaggtcacgcacacctggcagcattagtgaatcacgagtcctataacttttcacaccggatagatcacctatag

SEQ ID NO: 192103 - DNA, 216 bp, Artificial Sequence
  derived and/or modified sequence
atgcggcggctgaaccggaagaagaccctgagcctggtgaaggagctagacgcctttccaaaagttcctgaatcttatgtggagacatccgctagtggtgggactgtatcccttattgcatttaccaccatggcgctcctgaccataatggagttttcagtgtatcaggacacttggatgaagtatgagtacgaggtggataaagacttttcctag

SEQ ID NO: 192104 - DNA, 528 bp, Artificial Sequence
  derived and/or modified sequence
atgcggcggctgaaccggaagaagaccctgagcctggtgaaggagttggatgccttccctaaggtgccggagtcgtacgtggaaacatccgcatcgggtggcacagttagcctcatcgctttcactacgatggcacttttaactatcatggaatttagtgtataccaggatacatggatgaagtatgagtatgaggtggacaaggacttctcctcaaaactgcggattaacattgacatcaccgtggctatgaagtgtcagtatgtaggcgcagatgtacttgatctggcagaaacaatggtggccagtgccgacggtttagtgtatgaacctaccgtgtttgatctctcaccacaacagaaagaatggcagaggatgttacaattgatccagtcccgccttcaggaggagcactcgctgcaagacgtgatattcaagtcagccttcaagagtacttcgacagctctgcctccaagagaagacgacagctcacaatctcctaacgcctgccgtattcacggacattag

SEQ ID NO: 192105 - DNA, 1158 bp, Artificial Sequence
  derived and/or modified sequence
atgaaggaggaagagggattcccggaggatgaggccacggaatcggaaaccctatcccttgtgaaggagctagacgccttccctaaggttcctgaatcctatgtcgaaacttctgcatcagggggtaccgtgtccctgatagcatttaccaccatggcattgcttacaattatggaattctcagtgtatcaagacacctggatgaaatacgaatatgaggtcgacaaggactttagtagcaagctgcgaataaacatagacatcacagtggcgatgaaatgccagtacgtgggcgcagacgtgttggatctcgctgagaccatggtggcctctgccgatgggctcgtgtatgagccaacagtgttcgatttgagtccacagcaaaaagagtggcagagaatgctgcagctgatccagtctcgcttgcaggaagaacacagcctgcaggatgtgatcttcaaaagtgcgttcaagtcaacctctacagcactgcctcccagagaggacgactctagccagtcccctaacgcttgccggattcatgggcatctatatgtcaacaaggttgccggaaacttccacataaccgtgggcaaggcaatacctcacccccgaggacatgcacatttagccgctctagtgaaccacgagtcatacaacttcagtcacagaattgaccacctgtcctttggcgaacttgtgcctgcgataattaaccccctggatggaaccgaaaagattgctatcgaccataaccagatgttccagtactttattactgtcgttcccaccaaactgcacacctataagatctcagccgacacccatcaattttctgtcactgaacgagagcgcattatcaatcatgcggcagggagtcacggggtaagcggcattttcatgaagtacgacttgtcatccctgatggtcacggtcaccgaggaacacatgcctttttggcagttcttcgtgcgactgtgcggaatcgtgggtggcattttcagcactaccgggatgctgcacggcatcggaaaattcatcgtagagatcatctgctgtcggttccgactgggaagttacaaaccagttaatagcgtgccctttgaggacggtcatacagacaaccatctgcccttacttgaaaacaatacccactag

SEQ ID NO: 192106 - DNA, 1134 bp, Artificial Sequence
  derived and/or modified sequence
atgaggagactgaaccggaaaaagactctcagcctcgtgaaggaacttgatgctttccctaaggtgccggagagctatgtcgaaacgagtgcgtccggcggaacagtgtcccttatcgcgttcactacaatggcactcttaaccatcatggaattctcagtgtaccaggacacctggatgaaatacgaatatgaggtggacaaggacttctctagcaaactgaggattaacatcgatatcacagtcgcaatgaaatgccaatatgtgggcgctgatgtgctggacctcgccgagacaatggtagcaagcgccgatgggttggtctatgaaccaacggtgtttgatctttccccccagcagaaagagtggcagcggatgctgcaattgattcagagtcgactgcaggaagagcattctcttcaggacgtgatcttcaagtccgcttttaagagcacttccactgccctgccccctagagaggacgacagcagtcagagccctaatgcgtgcaggatacacggccatctatatgtcaacaaggtggctgggaactttcacatcaccgtgggtaaagcaatcccccaccctcgcggacacgctcatcttgcagcactggtcaatcatgagtcatataacttttctcacagaatcgatcacctgagtttcggagagctcgttcccgcaatcataaatccacttgatgggacggagaaaatagccattgaccataatcagatgttccagtacttcattaccgtggtgcctacaaagctgcatacctacaagatctctgcggatactcatcagttcagtgtgactgagcgcgagcgaatcatcaatcacgctgccggtagtcatggagtatcaggtatcttcatgaagtatgatctttcctccctgatggtgacagtcactgaggagcacatgcctttctggcaatttttcgtcaggctttgtgggatagttgggggaatctttagcaccactggaatgctccatggtattggcaagttcatcgtcgagataatttgttgcagattccgactgggtagttacaaaccagtgaatagtgtcccctttgaggacggacataccgacaatcaccttcccttacttgaaaacaatacacactag

SEQ ID NO: 192107 - DNA, 663 bp, Artificial Sequence
  derived and/or modified sequence
atgcggcgactgaatcggaagaagacactgtccctggtgaaagagctggatgctttcccaaaggtacctgagtcttatgttgagacctcagccagcggaggcaccgtaagccttatagccttcaccaccatggccctgctgacaatcatggagttctccgtgtaccaggatacatggatgaaatatgagtatgaggttgataaagactttagtagcaagctgcgtatcaatattgacattacagtcgccatgaagtgtcagtacgtcggcgctgacgttttagacttagccgaaacgatggtagccagtgccgacggactggtatatgaacctactgttttcgatctatctccacagcagaaagaatggcagcggatgctgcaactaatacaatctaggctgcaggaggaacactcgctgcaggacgtgatctttaagagtgcattcaagtcaacttcgactgccctgcccccacgtgaagacgactctagccagagtccaaacgcgtgcagaatccacggccacttatatgtgaacaaagtcgccggaaacttccatattacagtgggaaaggccattccacaccctcggggacatgcccatctggccgctttagtaaatcatgagtcttacaatttctcccatcgtatagaccacctgtag

SEQ ID NO: 192108 - DNA, 216 bp, Artificial Sequence
  derived and/or modified sequence
atgcgccgactgaataggaagaagacactgagcttggtgaaggaactcgatgccttccccaaggtgcctgagtcttacgtcgagaccagcgctagcgggggaactgtgtctctgatagcttttaccaccatggcactgctgacaatcatggaattctcagtgtatcaggacacttggatgaaatacgaatatgaggtggataaggatttcagctag

SEQ ID NO: 192109 - DNA, 528 bp, Artificial Sequence
  derived and/or modified sequence
atgagaaggctcaatcggaagaaaactctcagtctggttaaggaactggatgcatttcccaaggttcctgagagctatgtcgagacatccgcttccggcggaactgtgagccttatcgccttcactaccatggctcttctgaccattatggaattttccgtgtaccaggatacctggatgaagtacgagtacgaggtagataaggatttctcctctaagctacgcattaatatcgacatcacagtggccatgaagtgccaatatgtcggggctgatgtgctagacctagccgagaccatggtggctagcgccgatggtttggtgtacgagcccacagtgttcgatctgtcaccccagcagaaagagtggcaaaggatgttgcagctgatccaaagccgcctccaagaagaacactctctgcaagatgtcatcttcaaatccgcttttaaatccacctcgactgccttaccaccgagggaagatgactcatctcagtcccccaacgcctgccgcatacacggccattag

SEQ ID NO: 192110 - DNA, 1158 bp, Artificial Sequence
  derived and/or modified sequence
atgaaggaggaggagggcttccccgaggacgaggccaccgagagcgagaccctgagcctggtgaaggagctggacgccttccccaaggtgcccgagagctacgtggagaccagcgccagcggcggcaccgtgagcctgatcgccttcaccaccatggccctgctgaccatcatggagttcagcgtgtaccaggacacctggatgaagtacgagtacgaggtggacaaggacttcagcagcaagctgagaatcaacatcgacatcaccgtggccatgaagtgccagtacgtgggcgccgacgtgctggacctggccgagaccatggtggccagcgccgacggcctggtgtacgagcccaccgtgttcgacctgagcccccagcagaaggagtggcagagaatgctgcagctgatccagagcagactgcaggaggagcacagcctgcaggacgtgatcttcaagagcgccttcaagagcaccagcaccgccctgccccccagagaggacgacagcagccagagccccaacgcctgcagaatccacggccacctgtacgtgaacaaggtggccggcaacttccacatcaccgtgggcaaggccatcccccaccccagaggccacgcccacctggccgccctggtgaaccacgagagctacaacttcagccacagaatcgaccacctgagcttcggcgagctggtgcccgccatcatcaaccccctggacggcaccgagaagatcgccatcgaccacaaccagatgttccagtacttcatcaccgtggtgcccaccaagctgcacacctacaagatcagcgccgacacccaccagttcagcgtgaccgagagagagagaatcatcaaccacgccgccggcagccacggcgtgagcggcatcttcatgaagtacgacctgagcagcctgatggtgaccgtgaccgaggagcacatgcccttctggcagttcttcgtgagactgtgcggcatcgtgggcggcatcttcagcaccaccggcatgctgcacggcatcggcaagttcatcgtggagatcatctgctgcagattcagactgggcagctacaagcccgtgaacagcgtgcccttcgaggacggccacaccgacaaccacctgcccctgctggagaacaacacccactag

SEQ ID NO: 192111 - DNA, 1134 bp, Artificial Sequence
  derived and/or modified sequence
atgagaagactgaacagaaagaagaccctgagcctggtgaaggagctggacgccttccccaaggtgcccgagagctacgtggagaccagcgccagcggcggcaccgtgagcctgatcgccttcaccaccatggccctgctgaccatcatggagttcagcgtgtaccaggacacctggatgaagtacgagtacgaggtggacaaggacttcagcagcaagctgagaatcaacatcgacatcaccgtggccatgaagtgccagtacgtgggcgccgacgtgctggacctggccgagaccatggtggccagcgccgacggcctggtgtacgagcccaccgtgttcgacctgagcccccagcagaaggagtggcagagaatgctgcagctgatccagagcagactgcaggaggagcacagcctgcaggacgtgatcttcaagagcgccttcaagagcaccagcaccgccctgccccccagagaggacgacagcagccagagccccaacgcctgcagaatccacggccacctgtacgtgaacaaggtggccggcaacttccacatcaccgtgggcaaggccatcccccaccccagaggccacgcccacctggccgccctggtgaaccacgagagctacaacttcagccacagaatcgaccacctgagcttcggcgagctggtgcccgccatcatcaaccccctggacggcaccgagaagatcgccatcgaccacaaccagatgttccagtacttcatcaccgtggtgcccaccaagctgcacacctacaagatcagcgccgacacccaccagttcagcgtgaccgagagagagagaatcatcaaccacgccgccggcagccacggcgtgagcggcatcttcatgaagtacgacctgagcagcctgatggtgaccgtgaccgaggagcacatgcccttctggcagttcttcgtgagactgtgcggcatcgtgggcggcatcttcagcaccaccggcatgctgcacggcatcggcaagttcatcgtggagatcatctgctgcagattcagactgggcagctacaagcccgtgaacagcgtgcccttcgaggacggccacaccgacaaccacctgcccctgctggagaacaacacccactag

SEQ ID NO: 192112 - DNA, 663 bp, Artificial Sequence
  derived and/or modified sequence
atgagaagactgaacagaaagaagaccctgagcctggtgaaggagctggacgccttccccaaggtgcccgagagctacgtggagaccagcgccagcggcggcaccgtgagcctgatcgccttcaccaccatggccctgctgaccatcatggagttcagcgtgtaccaggacacctggatgaagtacgagtacgaggtggacaaggacttcagcagcaagctgagaatcaacatcgacatcaccgtggccatgaagtgccagtacgtgggcgccgacgtgctggacctggccgagaccatggtggccagcgccgacggcctggtgtacgagcccaccgtgttcgacctgagcccccagcagaaggagtggcagagaatgctgcagctgatccagagcagactgcaggaggagcacagcctgcaggacgtgatcttcaagagcgccttcaagagcaccagcaccgccctgccccccagagaggacgacagcagccagagccccaacgcctgcagaatccacggccacctgtacgtgaacaaggtggccggcaacttccacatcaccgtgggcaaggccatcccccaccccagaggccacgcccacctggccgccctggtgaaccacgagagctacaacttcagccacagaatcgaccacctgtag

SEQ ID NO: 192113 - DNA, 216 bp, Artificial Sequence
  derived and/or modified sequence
atgagaagactgaacagaaagaagaccctgagcctggtgaaggagctggacgccttccccaaggtgcccgagagctacgtggagaccagcgccagcggcggcaccgtgagcctgatcgccttcaccaccatggccctgctgaccatcatggagttcagcgtgtaccaggacacctggatgaagtacgagtacgaggtggacaaggacttcagctag

SEQ ID NO: 192114 - DNA, 528 bp, Artificial Sequence
  derived and/or modified sequence
atgagaagactgaacagaaagaagaccctgagcctggtgaaggagctggacgccttccccaaggtgcccgagagctacgtggagaccagcgccagcggcggcaccgtgagcctgatcgccttcaccaccatggccctgctgaccatcatggagttcagcgtgtaccaggacacctggatgaagtacgagtacgaggtggacaaggacttcagcagcaagctgagaatcaacatcgacatcaccgtggccatgaagtgccagtacgtgggcgccgacgtgctggacctggccgagaccatggtggccagcgccgacggcctggtgtacgagcccaccgtgttcgacctgagcccccagcagaaggagtggcagagaatgctgcagctgatccagagcagactgcaggaggagcacagcctgcaggacgtgatcttcaagagcgccttcaagagcaccagcaccgccctgccccccagagaggacgacagcagccagagccccaacgcctgcagaatccacggccactag

SEQ ID NO: 192115 - DNA, 1281 bp, Artificial Sequence
  derived and/or modified sequence
atgaaggaagaggaaggttttcctgaagatgaggcgactgaatcggaaactttaagtttggtaaaagagttggatgcctttccgaaggttcctgagagctatgtagagacttcagccagtggaggtacagtttctctaatagcatttacaactatggctttattaaccataatggaattctcagtatatcaagatacatggatgaagtatgaatacgaagtagacaaggatttttctagcaaattaagaattaatatagatattactgttgccatgaagtgtcaatatgttggagcggatgtattggatttagcagaaacaatggttgcatctgcagatggtttagtttatgaaccaacagtatttgatctttcaccacagcagaaagagtggcagaggatgctgcagctgattcagagtaggctacaagaagagcattcacttcaagatgtgatatttaaaagtgcttttaaaagtacatcaacagctcttccaccaagagaagatgattcatcacagtctccaaatgcatgcagaattcatggccatctatatgtcaataaagtagcagggaattttcacataacagtgggcaaggcaattccacatcctcgtggtcatgcacatttggcagcacttgtcaaccatgaatcttacaatttttctcatagaatagatcatttgtcttttggagagcttgttccagcaattattaatcctttagatggaactgaaaaaattgctatagatcacaaccagatgttccaatattttattacagttgtgccaacaaaactacatacatataaaatatcagcagacacccatcagttttctgtgacagaaagggaacgtatcattaaccatgctgcaggcagccatggagtctctgggatatttatgaaatatgatctcagttctcttatggtgacagttactgaggagcacatgccattctggcagttttttgtaagactctgtggtattgttggaggaatcttttcaacaacaggcatgttacatggaattggaaaatttatagttgaaataatttgctgtcgtttcagacttggatcctataaacctgtcaattctgttccttttgaggatggccacacagacaaccacttacctcttttagaaaataatacacattaacacctcccgattgaaggagaaaaactttttgcctgagacataaaacctttttttaataataaaatattgtgcaatatattcaaagaaaagaaaacacaaataagcagaaaacatacttatttt

SEQ ID NO: 192116 - DNA, 5014 bp, Artificial Sequence
  derived and/or modified sequence
tctgtgaaacatggcggtaggctgggaccataacacaagcatgactatatgaaggaagaggaaggttttcctgaagatgaggcgactgaatcggaaaaaaactttaagtttggtaaaagagttggatgcctttccgaaggttcctgagagctatgtagagacttcagccagtggaggtacagtttctctaatagcatttacaactatggctttattaaccataatggaattctcagtatatcaagatacatggatgaagtatgaatacgaagtagacaaggatttttctagcaaattaagaattaatatagatattactgttgccatgaagtgtcaatatgttggagcggatgtattggatttagcagaaacaatggttgcatctgcagatggtttagtttatgaaccaacagtatttgatctttcaccacagcagaaagagtggcagaggatgctgcagctgattcagagtaggctacaagaagagcattcacttcaagatgtgatatttaaaagtgcttttaaaagtacatcaacagctcttccaccaagagaagatgattcatcacagtctccaaatgcatgcagaattcatggccatctatatgtcaataaagtagcagggaattttcacataacagtgggcaaggcaattccacatcctcgtggtcatgcacatttggcagcacttgtcaaccatgaatcttacaatttttctcatagaatagatcatttgtcttttggagagcttgttccagcaattattaatcctttagatggaactgaaaaaattgctatagatcacaaccagatgttccaatattttattacagttgtgccaacaaaactacatacatataaaatatcagcagacacccatcagttttctgtgacagaaagggaacgtatcattaaccatgctgcaggcagccatggagtctctgggatatttatgaaatatgatctcagttctcttatggtgacagttactgaggagcacatgccattctggcagttttttgtaagactctgtggtattgttggaggaatcttttcaacaacaggcatgttacatggaattggaaaatttatagttgaaataatttgctgtcgtttcagacttggatcctataaacctgtcaattctgttccttttgaggatggccacacagacaaccacttacctcttttagaaaataatacacattaacacctcccgattgaaggagaaaaactttttgcctgagacataaaacctttttttaataataaaatattgtgcaatatattcaaagaaaagaaaacacaaataagcagaaaacatacttattttaaaaaagaaaaaaaaggataaaaaaacccaaactgaaattctatatacgttgtgtctgttacaaatgtcgtagaagaaatcatgcagctaaacgatgaagaagcccaactggagtgttgctttgaagatgacgccttcttatattttcatagcaaatgggtggtatcaaaatcagacattgcttcttgctgataaaaagcctgaaggaaataagtgaaactacatctatgggaaaaaaaaaaacattgagaagtgcaaatgttcgcatccttttgtttttaaaagatatgatgtcagaataaaatgtggaaaacatacggaaaactagtctagactttaaagaattgtgatcaggtcacattgttaataaaaaaaaaaaacgggctagtccctatgttatagccatattaatgttaagccatattgacaagaccagttatccaataatttggtcttaaaaagtaactacttttctttgaactctggttattgacttatctaactgttgaagatagagtcttagaagactaaggtaaattctcacaggggcagatatgtaggtgttatgtaactagggtgtcattcacaaatggtatagtagaatcttatacacggaaaagaaagcacatttttttaaaaaagatgccaagttttttaatctaatcattatattattggtgtattttgggcaacatagggtgagttataaaaagatccgctactgatagtgaaaattaccggtttgtaaaacattaagagaaaaaataggatattttatacatgtggtgagtggagaacagggtaactttaaatgaaagtgtaaggcaaattgtaagcaccacaagatatatcagatttgagaggtgccatgttaaacattgtccattaaactataaaactgtattatgaagtatttgcattcagggtgtcctgaatatgattgattctgtattagattgtgttctaactttcttactatttaaggattggttctaaatcttcacattataaaagattaaaaacagtgagagggagctatcacacaggtactattaaaagctgtatttggaatatgtgtaccaatatcagttttccttttgtagtactgaatggcagtagaagaatcagcagccaatcctcaaagtttaaatcatttaaggaaatggggaaacaaaattccaggtaaataacaagactgaaaaactagatttaaaatagtggttttagaaaacaggatatcacaagtaacagtttttcaaatggatttttttaaagataaatttatgaaaacaggataaacaatataatggagagaaggagaaatagtgatgggtctgttttgcagtaaagtttatgcagaatgacgttttgcagaaaataacagaagcatcactttaaaaaatatatcattaagagccatgacgttaactgatgaaaataagtgatataacatactttgaaagatttttaaacagaaaattctgaatcgtgaatgagccttctctaggttttaattttttttcttcaaattatttccaacaaagtttggctataaactaacaccatctatccacaggaattttaataggaaaggattagaattgtagactgattgttggtcctttaagtatgcttggaagaaaattcaatcgagtttcaaggctttttctaaatgggagggagaacaatattgatttaggattattttctttcatttaggattagaacagttaagtgcctttaaaaaggactttaaaaattattttgatacttatatatgatttttaattgttttcgtattttccaaataccatattaaaattttaatgaaatttatctcctatgaaaggaatttctttaaagcaaaattctgctttgcctttgatttccattttaaaagttaaaggcttccatctgaaactcctcaaatagagtcagatttttggcaatggaagtattaaaattccgatcagccctttggacgatgaagtttacctgcatattaggatttgttaggagtttttggcctcaccaagtgattcttttctattgcagagagcactttactcacctacctgttatgcaactttccctatgcctggaggtgcctccagccaggataccctactttgttacccaattctcctttttgttttacaagagtattcataatatctatatgtttatattccagactacatatttaaaaatgagatctcaaattatatgaaatggatttttaaatactgtgtttgcatacattgacctataaagaagattaaatatttaggtgaataattccctgctgcagtatttgtacacttcagactacctcttaggaaaagcttaacttagtattgcaaaattccctttctctttttttttttaagagatggggtctcgcactgttgcccaggctgaagtgcagtggcatgattgtaactcactgcatcctcgaactcctgggttcaagcaatcctcctgcttccatctgctgagtaggtaggactacagccatgcaccaacaaacctggctaattctttttcatttatatagttagtatcttgctgtgttgttcaagctggactccaactcccggactcaagtaatcctcccaccttagtctcctgcattgctggaattataggcacgagccactgcacctggcacccaaattacttctagttctcaagttagatgattaatatcacacttttctcatgtatgttttatgatagcattgaatttttataattaaaaatttactaatgcaaacaagatttacagtctttaatacaatcttaattttggaattcatgaaggaatgactaagttctaatttttttttttttttttttgaaactgagtctcgctctgtcgcctaggctggagtgcagtggtgcaatctcagctcactgcaacctccgtctcccgggttcaagtgattctcctgcctcagcctgttgagtagctgggactacaggtgcgtaccaccaagcccagctaatttttttatatttttagtagagacggggtttcactgtgttagccaggatggtctcaatctcctgacctcatgatccgcccaccttggcctcccaaagtgttgggattacaggcatgagccactgcccctggacagatctaattttttaatagtgtaagagagatacactgtgcattccatctatgtcctgagttagtaattcaagtaccaaaaagtaatttaatatgaaactccttgaaaattcagagcttacacttgaattcaaaatgcctatttttgattgtttaaaagttacttaaacctgagctttaggacctttaaaatctcagcatgccttttaagctagtacttttcctgttttgagctctagcaaaccttcagcaagccaaggtggtagccctttttcaacacaatcaaaatagagaggtcaccagttgtttactaccttatggtaaaatgcccggatcaagatccatgtatcccccccatattgtgatgatgcaatcaaagcatagtttttttctactttctgaaatattactgatgaaatcactttacatttaagaggagaaaacagactgccttggattttttttttgtcttgagagaaaaaacaaaatatttagtattgcaagcataaacatttggactcaataaatgacaaattatgaaa

SEQ ID NO: 192117 - DNA, 1274 bp, Artificial Sequence
  derived and/or modified sequence
gtgaaacatggcggtaggctgggaccataacacaaggtaaaatactgaaacaccgctgggtgctgttccctcggttgttccagggctgtttagggcgtaaatgcaattgagggaactgggagcctgtcatgggcttggcttcctgtcttcattgatctctagagagccggtcggacggagaagccgctccacctcccacgggggcgttactggcaggaccctaggcaacgatgctactgggagcttccctttgccaggtccgggtgcttgtgtgctatcctgcaactcgaaggagttcaggtgcttcctcgatcgcacctgattctgaccctttgcttgtcacagtgcccggttcccaggtggtttctccagtccgcaggcgagtaggatcccaatcggtcgagtcccagtcctcccggatgtcagactccctacccccattcagacaaatgccacattcgtggcagcacgttgccctctgtctctttaagagtcttggccttgcccggaaggagtttcgcacagtgcttcggaaaatgagaagggggcgggggagggcgagatgctgagagacagcatgactatatgaaggaagaggaaggttttcctgaagatgaggcgactgaatcggaaaaaaactttaagtttggtaaaagagttggatgcctttccgaaggttcctgagagctatgtagagacttcagccagtggaggtacagtttctctaatagcatttacaactatggctttattaaccataatggaattctcagtatatcaagatacatggatgaagtatgaatacgaagtagacaaggatttttctagcaaattaagaattaatatagatattactgttgccatgaagtgtcaatatgttggagcggatgtattggatttagcagaaacaatggttgcatctgcagatggtttagtttatgaaccaacagtatttgatctttcaccacagcagaaagagtggcagaggatgctgcagctgattcagagtaggctacaagaagagcattcacttcaagatgtgatatttaaaagtgcttttaaaagtacatcaacagctcttccaccaagagaagatgattcatcacagtctccaaatgcatgcagaattcatggccatctatatgtcaataaagtagcagggaattttcacataacagtgggcaaggcaattccacatcctcgtggtcatgcacatttggcagcacttgtcaaccatgaatcttacaatttttctcatagaatagatcatttgt

SEQ ID NO: 192118 - DNA, 432 bp, Artificial Sequence
  derived and/or modified sequence
gtacgcgggagccccggcgacccgggcttctgtgaaacatggcggtaggctgggaccataacacaagagtttcaggccaggtgtggtggttcacatctataatcccagcactttttttgagaggccgaggtgggtggaaggcttcagcccaggagtttgagacccagcctgggcaacaagcatgactatatgaaggaagaggaaggttttcctgaagatgaggcgactgaatcggaaaaaaactttaagtttggtaaaagagttggatgcctttccgaaggttcctgagagctatgtagagacttcagccagtggaggtacagtttctctaatagcatttacaactatggctttattaaccataatggaattctcagtatatcaagatacatggatgaagtatgaatacgaagtagacaaggatttttctag

SEQ ID NO: 192119 - DNA, 695 bp, Artificial Sequence
  derived and/or modified sequence
atttccgggtacgcgggagccccggcgacccgggcttctgtgaaacatggcggtaggctgggaccataacacaaggttattgtcataggataaattcctcaatgggcatttacttagaagaggagtggtgtgcatgactatatgaaggaagaggaaggttttcctgaagatgaggcgactgaatcggaaaaaaactttaagtttggtaaaagagttggatgcctttccgaaggttcctgagagctatgtagagacttcagccagtggaggtacagtttctctaatagcatttacaactatggctttattaaccataatggaattctcagtatatcaagatacatggatgaagtatgaatacgaagtagacaaggatttttctagcaaattaagaattaatatagatattactgttgccatgaagtgtcaatatgttggagcggatgtattggatttagcagaaacaatggttgcatctgcagatggtttagtttatgaaccaacagtatttgatctttcaccacagcagaaagagtggcagaggatgctgcagctgattcagagtaggctacaagaagagcattcacttcaagatgtgatatttaaaagtgcttttaaaagtacatcaacagctcttccaccaagagaagatgattcatcacagtctccaaatgcatgcagaattcatggccatc

SEQ ID NO: 192120 - protein, 509 aa, Artificial Sequence
  derived and/or modified sequence
MNNEEDLLQEDSTRDEGNETEANSMNTLRRTRKKVTKPYVCSTEVGETDMSNSNDCMRDSSQILTPPQLSSRMKHIRQAMAKNRLQFVRFEATDLHGVSRSKTIPAHFFQEKVSHGVCMPRGYLEVIPNPKDNEMNNIRATCFNSDIVLMPELSTFRVLPWADRTARVICDTFTVTGEPLLTSPRYIAKRQLSHLQASGFSLLSAFIYDFCIFGVPEILNSKIISFPALTFLNNHDQPFMQELVDGLYHTGANVESFSSSTRPGQMEISFLPEFGISSADNAFTLRTGVKEVARKYNYIASFFIETGFCDSGILSHSLWDVDRKKNMFCSTSGTEQLTITGKKWLAGLLKHSAALSCLMAPSVSCRKRYSKDRKDLKKSVPTTWGYNDNSCIFNIKCHGEKGTRIENKLGSATANPYLVLAATVAAGLDGLHSSNEVLAGPDESTDFYQVEPSEIPLKLEDALVALEEDQCLRQALGETFIRYFVAMKKYELENEEIAAERNKFLEYFI

SEQ ID NO: 192121 - DNA, 1530 bp, Artificial Sequence
  derived and/or modified sequence
atgaacaacgaggaggacctgctgcaggaggacagcaccagagacgagggcaacgagaccgaggccaacagcatgaacaccctgagaagaaccagaaagaaggtgaccaagccctacgtgtgcagcaccgaggtgggcgagaccgacatgagcaacagcaacgactgcatgagagacagcagccagatcctgacccccccccagctgagcagcagaatgaagcacatcagacaggccatggccaagaacagactgcagttcgtgagattcgaggccaccgacctgcacggcgtgagcagaagcaagaccatccccgcccacttcttccaggagaaggtgagccacggcgtgtgcatgcccagaggctacctggaggtgatccccaaccccaaggacaacgagatgaacaacatcagagccacctgcttcaacagcgacatcgtgctgatgcccgagctgagcaccttcagagtgctgccctgggccgacagaaccgccagagtgatctgcgacaccttcaccgtgaccggcgagcccctgctgaccagccccagatacatcgccaagagacagctgagccacctgcaggccagcggcttcagcctgctgagcgccttcatctacgacttctgcatcttcggcgtgcccgagatcctgaacagcaagatcatcagcttccccgccctgaccttcctgaacaaccacgaccagcccttcatgcaggagctggtggacggcctgtaccacaccggcgccaacgtggagagcttcagcagcagcaccagacccggccagatggagatcagcttcctgcccgagttcggcatcagcagcgccgacaacgccttcaccctgagaaccggcgtgaaggaggtggccagaaagtacaactacatcgccagcttcttcatcgagaccggcttctgcgacagcggcatcctgagccacagcctgtgggacgtggacagaaagaagaacatgttctgcagcaccagcggcaccgagcagctgaccatcaccggcaagaagtggctggccggcctgctgaagcacagcgccgccctgagctgcctgatggcccccagcgtgagctgcagaaagagatacagcaaggacagaaaggacctgaagaagagcgtgcccaccacctggggctacaacgacaacagctgcatcttcaacatcaagtgccacggcgagaagggcaccagaatcgagaacaagctgggcagcgccaccgccaacccctacctggtgctggccgccaccgtggccgccggcctggacggcctgcacagcagcaacgaggtgctggccggccccgacgagagcaccgacttctaccaggtggagcccagcgagatccccctgaagctggaggacgccctggtggccctggaggaggaccagtgcctgagacaggccctgggcgagaccttcatcagatacttcgtggccatgaagaagtacgagctggagaacgaggagatcgccgccgagagaaacaagttcctggagtacttcatctag

SEQ ID NO: 192122 - DNA, 1530 bp, Artificial Sequence
  derived and/or modified sequence
atgaacaacgaagaagacctcctgcaggaagacagtaccagagatgaaggcaacgagaccgaggctaattccatgaacactctccgccgaacccgtaaaaaagtgaccaagccttacgtctgttccacagaagtgggtgaaaccgatatgtcaaactctaatgattgcatgcgcgactcaagtcagattctcacaccaccccagctgtccagccgcatgaagcacattcggcaggctatggcgaaaaacaggctgcagtttgtgaggtttgaggccacggacctccacggggtctctagaagtaagacaatcccggctcattttttccaggagaaggtgtcccatggtgtttgtatgcctcgtggttacctcgaagtaatccccaatcctaaggataatgagatgaacaacattcgggcgacctgttttaatagcgatatcgttctgatgccagaattgagtacattccgggtcttgccttgggcggaccgaaccgccagggtcatctgtgacacctttacagtgacgggtgagcctctgttgacctctccaagatacattgcgaagcggcagttgtcccacctgcaggcgtctggcttctcattactgtccgctttcatctatgacttttgtatctttggggtgcccgagatccttaatagcaaaattataagcttccccgcccttacatttctaaataatcacgatcaaccatttatgcaggagttggtcgatgggctatatcataccggggctaacgtagaaagcttctctagttcgactcgacctggccagatggagatttctttcctccctgagttcgggatatcaagtgcagacaatgcgtttacgctgcgcactggagtcaaggaggtggcacggaaatacaattacatcgcctcattttttatcgagacgggattttgcgatagcggcatcctcagtcacagcctttgggatgtggacagaaagaagaacatgttttgcagtacaagcggcaccgagcagttgactattacgggaaaaaagtggttggccgggctcctgaagcactccgcagctttgagctgcctcatggcaccatctgttagttgccgaaagagatactctaaggaccgcaaagatctgaaaaaaagcgttccaaccacctgggggtacaatgacaattcatgtatcttcaacatcaagtgccatggcgaaaagggtactaggattgagaataaacttgggtctgccacagccaatccttacctcgtgctcgctgctaccgtggcagccggactcgatggtctacattcttccaatgaggtcctcgccgggcccgatgaatcaaccgacttctatcaggtagaaccaagcgagattccgctgaaattggaggacgctctcgtcgccctggaagaagaccaatgccttcggcaggcgctgggcgaaacctttattaggtatttcgttgctatgaaaaagtacgaactcgaaaacgaggagattgccgctgagaggaataaattcctcgagtactttatctag

SEQ ID NO: 192123 - DNA, 1530 bp, Artificial Sequence
  derived and/or modified sequence
atgaacaatgaggaggacctgctgcaggaggacagcaccagagatgagggcaatgaaacagaggccaacagcatgaacaccctgcggaggaccaggaagaaggtgaccaagccctacgtgtgcagcacagaggtgggggagacagacatgagcaacagcaatgactgcatgagggacagcagccagatcctgaccccaccccagctgagcagcaggatgaagcacatccggcaggccatggccaagaaccggctgcagtttgtgcgctttgaggccacagacctgcacggcgtgagccgcagcaagaccatcccagcccacttcttccaggagaaggtgtcccatggagtgtgcatgccccggggctacctggaggtgatccccaaccccaaggacaatgagatgaacaacatccgggccacctgcttcaacagcgacatcgtgctgatgcctgagctgagcaccttccgggtgctgccctgggccgacagaacagcccgggtcatctgtgacaccttcaccgtgactggagagcccctgctgaccagcccccgctacatcgccaagaggcagctgagccacctgcaggccagcggcttcagcctgctgagcgccttcatctatgacttctgcatctttggagtgcctgagatcctgaacagcaagatcatctccttccctgccctgaccttcctgaacaaccacgaccagcccttcatgcaggagctggtggatggcctgtaccacactggagccaacgtggagagcttcagcagcagcaccaggcctggccagatggagatctccttcctgcctgagtttggcatcagcagcgctgacaatgccttcaccctgaggactggagtgaaggaggtggccaggaagtacaactacatcgccagcttcttcatcgagaccggcttctgtgacagcggcatcctgagccacagcctgtgggatgtggacaggaagaagaacatgttctgcagcaccagcggcacagagcagctgaccatcaccgggaagaagtggctggccggcctgctgaagcacagcgctgccctgagctgcctgatggcccccagcgtgtcctgcaggaagcgctacagcaaggacaggaaggacctgaagaagtctgtgcccaccacctggggctacaatgacaacagctgcatcttcaacatcaagtgccacggggagaagggcaccagaattgagaacaagctgggcagcgccacagccaacccctacctggtgctggccgccaccgtggccgccggcctggatggcctgcacagcagcaatgaggtgctggccggcccagatgagagcacagacttctaccaggtggagcccagcgagatccccctgaagctggaggatgccctggtggccctggaggaggaccagtgcctgcggcaggccctgggggagaccttcatccgctactttgtggccatgaagaagtatgagctggagaatgaggagattgctgctgagaggaacaagttcctggagtacttcatctag

SEQ ID NO: 192124 - DNA, 1949 bp, Artificial Sequence
  derived and/or modified sequence
gtggtttctaacgctgaacttaaaaagtgttgagatgaataatgaagaggaccttctgcaggaggactcaacaagagatgaaggcaatgagactgaagccaacagcatgaacacattaagaaggacaaggaagaaagtcactaaaccatatgtttgttcaactgaagtgggagaaacggatatgtccaattcaaatgattgcatgagggacagcagtcaaattttgaccccacctcaactctcttctagaatgaaacacattagacaagccatggccaaaaatcgcctccagtttgtacgatttgaagcaacagacctccacggcgtgtccaggtctaagactatccctgcacacttttttcaagagaaagtgagccatggtgtttgcatgccccgaggttatcttgaagtgataccaaatccaaaggacaatgaaatgaataacataagagccacatgttttaatagcgacatagtcctaatgccagagttatcaacctttagagttttgccatgggctgacagaactgcaagagtgatatgtgataccttcactgtgactggtgagcctcttttgacttccccaaggtacattgcaaagaggcagctgagccatctgcaggcctctggcttttccctgctttctgctttcatctatgatttttgcatttttggtgtgcccgaaattttaaattcaaagattatatcttttcctgctttaacatttttaaataaccatgatcagcccttcatgcaggaacttgttgatggcttgtatcacactggagccaatgtcgagagtttttcctcctctaccaggcctggtcagatggaaatctctttcctgcctgaatttggcattagctcagctgataatgcatttaccctcagaacaggtgtcaaagaagtggcaaggaaatataattacattgccagcttcttcattgagactggattttgtgattcagggattttgtctcatagtctctgggatgtcgataggaagaaaaacatgttctgcagcacttctggaactgagcagctcacgatcactgggaaaaaatggttggcaggactcttgaagcactctgctgcgctcagctgcctgatggcgccttctgttagctgccgaaagcgttattccaaggacaggaaagacctgaagaagagtgtgcctacaacatggggatacaatgacaacagctgtatatttaatatcaaatgtcatggagagaaaggcacccggatagaaaataaactaggctcagcaacagcaaacccttacttggtgctggctgcaactgttgctgccggcttagatggacttcatagcagtaatgaggtcttggctggtccagatgagagcacagacttttaccaagtggaaccttctgagatccctttaaaactagaagatgcccttgtggcactggaagaagatcaatgcctgagacaggctctaggagaaacctttattcgatattttgttgccatgaagaaatatgagttggagaatgaagaaatagctgcagagagaaataaattcttagagtattttatttagaatagagctcacaactactcctttagacatgtaattgttacttaaagctaatctaccaaaacaaaaagactgaacttttgtaattaacaacagcaacaataacaagattacgaatgcttttgacttttttttttgtccatggaatatttgacagatgaagtaggactgctgagaagattctgataacagaaacaaacaacaaagttgtggtgaagctataatatgcaaacttaccagatcttgtcagtcatttcctatgtgtatgttgacctggataagaatatccaattttgggtggcaataaatatattcgcacattaagaaaaaaaagacttaagcattagaaagcaaaatttaaatgactaaaaaagaaaaaaaagaaaag

SEQ ID NO: 192125 - DNA, 1530 bp, Artificial Sequence
  derived and/or modified sequence
atgaacaacgaggaggacctgctgcaggaggacagcacccgggacgagggaaatgaaacggaagcgaactcaatgaacacacttcgacggacaaggaagaaggtcacgaaaccctacgtgtgctcgacagaggtgggagaaacggatatgagcaattcaaacgattgtatgcgcgattccagtcagatcctcacgcctcctcagctgtcttcccggatgaagcatattagacaggccatggcaaagaatcgattgcaattcgttcgattcgaggcaacggatttgcacggagtcagtcggagtaagacaattccagcccactttttccaagagaaggtatcccatggcgtctgtatgccgcgaggatacctagaagtcatcccaaaccccaaggacaatgaaatgaacaatatcagggcaacttgctttaatagtgatatcgtcctgatgcctgagctcagtaccttccgggtactgccatgggcggatcggaccgctcgtgtgatatgcgacacgttcacagtcactggcgagcccttgctaacttcaccccgctatattgcaaagcgacagttaagtcatctgcaggccagtggtttttctctcctgagtgccttcatttacgacttctgcatcttcggcgtacccgagatcttgaacagtaagataatttcttttcccgcccttaccttcttgaataaccacgaccagccgtttatgcaagagctcgttgacggcctttaccacacgggcgcaaacgtcgagagtttttctagcagcacccgtccgggacagatggagatttcatttttacccgagtttgggattagttctgctgataatgccttcaccttaagaacaggcgttaaagaggtggctaggaagtacaactatattgcctcctttttcatagagaccgggttctgcgacagtggcatactgtcacactctctgtgggatgtagaccgcaaaaaaaacatgttttgctcaactagcggcaccgaacagctgacaattacaggtaagaaatggctcgctgggttacttaagcatagtgccgctctgagctgtctgatggctccctctgtttcatgcaggaaacgctacagcaaagatcggaaagaccttaagaaaagcgtccccactacttggggctacaatgataattcctgcattttcaacataaagtgtcatggcgagaagggaacccgtattgagaacaagttggggagcgcaaccgcaaatccttatctcgttctggcggccacagtggctgctgggctggatgggttgcatagttcaaacgaggttctggcgggcccagacgagagcactgacttttaccaagtagaaccttccgagatcccattgaagcttgaggatgctctggtggccttggaggaagatcagtgcctgagacaagcgcttggagagactttcattagatactttgtggcgatgaaaaagtatgagctcgagaatgaagaaatcgctgcggagcgcaataaattcttggaatatttcatctag

SEQ ID NO: 192126 - DNA, 1530 bp, Artificial Sequence
  derived and/or modified sequence
atgaacaacgaagaagacctgttgcaggaggacagcacacgcgatgaagggaatgagactgaagccaatagtatgaatacattacgaaggacacgcaaaaaagtcacaaaaccctacgtctgttctacagaggtgggcgaaacagacatgagtaatagtaatgactgcatgagagatagttcccaaatacttactcccccacaactgagtagccgaatgaagcacatacgacaggcaatggccaaaaatcggctccaattcgtgcgatttgaggccacagatttacatggagtttcacggagcaagacaatcccagctcactttttccaagagaaagtctcccacggcgtttgcatgcccaggggctacctggaggtgatacccaaccctaaggacaacgagatgaacaacatacgcgctacctgttttaacagtgatatcgtgctgatgcctgagctgtccacctttagggtattaccctgggccgaccggaccgcccgagtcatttgtgatacctttacagtgactggggagcccttgctcacctccccaaggtatatcgcaaagagacagctgagccacctgcaggcttcaggctttagtttgttgtcagccttcatctacgatttctgcatcttcggtgtacccgagattttaaacagcaagattatttcattcccggcactgacattcttgaacaatcacgatcagccctttatgcaagagcttgtcgatgggctctatcatacaggggcaaacgttgaatctttcagctctagtactaggcccggtcagatggagatttcatttcttccagagttcgggattagctcagccgataatgcatttactctcaggaccggcgttaaggaggttgcaagaaagtacaattacattgcttctttctttatcgaaacgggattttgcgattcagggatcctgagccactcactctgggatgtggaccggaaaaaaaacatgttctgcagcacaagcggcacagagcagttaacgattactggaaaaaaatggctggcgggtttgctcaaacattcggcagcattaagttgtctgatggctccttcagtttcatgcaggaagagatactccaaggatcggaaggacctcaagaagagcgtgcccactacatggggatataatgataacagctgtatttttaacatcaaatgtcacggtgagaagggaacaaggattgagaataaactcgggagcgctacggcaaatccctatctcgtgctggctgctacggtggcagctgggctggacgggctgcatagtagcaacgaagtactggcgggtccggatgaatctaccgacttctaccaggttgagccgtccgaaatccccctgaaactggaagacgctctcgtggctctagaagaggatcagtgtctgcggcaggcgctgggggaaacatttatccgctactttgtggcaatgaagaagtacgagttagagaatgaggagatcgccgctgaaagaaataagtttctggaatacttcatctag

SEQ ID NO: 192127 - protein, 970 aa, Artificial Sequence
  derived and/or modified sequence
MDAAEPGLPPGPEGRKRYSDIFRSLDNLEISLGNVTLEMLAGDPLLSEDPEPDKTPTATVTNEASCWSGPSPEGPVPLTGEELDLRLIRTKGGVDAALEYAKTWSRYAKELLAWTEKRASYELEFAKSTMKIAEAGKVSIQQQSHMPLQYIYTLFLEHDLSLGTLAMETVAQQKRDYYQPLAAKRTEIEKWRKEFKEQWMKEQKRMNEAVQALRRAQLQYVQRSEDLRARSQGSPEDSAPQASPGPSKQQERRRRSREEAQAKAQEAEALYQACVREANARQQDLEIAKQRIVSHVRKLVFQGDEVLRRVTLSLFGLRGAQAERGPRAFAALAECCAPFEPGQRYQEFVRALRPEAPPPPPPAFSFQEFLPSLNSSPLDIRKKLSGPLPPRLDENSAEPGPWEDPGTGWRWQGTPGPTPGSDVDSVGGGSESRSLDSPTSSPGAGTRQLVKASSTGTESSDDFEERDPDLGDGLENGLGSPFGKWTLSSAAQTHQLRRLRGPAKCRECEAFMVSGTECEECFLTCHKRCLETLLILCGHRRLPARTPLFGVDFLQLPRDFPEEVPFVVTKCTAEIEHRALDVQGIYRVSGSRVRVERLCQAFENGRALVELSGNSPHDVSSVLKRFLQELTEPVIPFHLYDAFISLAKTLHADPGDDPGTPSPSPEVIRSLKTLLVQLPDSNYNTLRHLVAHLFRVAARFMENKMSANNLGIVFGPTLLRPPDGPRAASAIPVTCLLDSGHQAQLVEFLIVHYEQIFGMDELPQATEPPPQDSSPAPGPLTTSSQPPPPHLDPDSQPPVLASDPGPDPQHHSTLEQHPTATPTEIPTPQSDQREDVAEDTKDGGGEVSSQGPEDSLLGTQSRGHFSRQPVKYPRGGVRPVTHQLSSLALVASKLCEETPITSVPRGSLRGRGPSPAAASPEGSPLRRTPLPKHFEITQETARLLSKLDSEAVPRATCCPDVQPEEAEDHL

SEQ ID NO: 192128 - DNA, 2913 bp, Artificial Sequence
  derived and/or modified sequence
atggacgccgcagaaccgggcctccccccaggacccgaaggcaggaaacgatactcggatatcttccgctctctggataacctggaaatttcattgggtaacgtgacccttgagatgctggcaggtgacccgctcctctcggaggacccagagcccgacaagactccaacggccaccgtgacaaatgaagcctcttgctggtctggaccatcccccgaaggccccgtgccattgaccggtgaagaactggacctgcgcctcatccgaaccaaagggggtgtcgacgcggccttagagtacgccaaaacttggtcccgatatgccaaggagctactggcatggacggagaagcgggcctcttacgagctcgaatttgccaaatcaacaatgaaaatcgccgaggcaggtaaagtgagcatacagcagcagtcgcacatgccacttcaatatatctacactctgtttctggagcacgacctcagcctaggcaccctggcgatggaaaccgtggcacagcagaaaagagactactatcagccactggctgcaaagaggaccgagatagaaaaatggcgcaaagaatttaaggagcagtggatgaaagagcagaagcggatgaacgaagcggtacaggccctgaggagggctcagttgcagtacgtccagcgctcagaggatctgagagcgcgcagccagggatcccccgaagatagtgctcctcaagcatcccctggtcccagcaagcagcaggaacgacgcaggcggtccagagaggaggcacaagccaaagctcaggaagcggaagccttgtaccaagcatgtgtaagggaagcaaacgctcgtcaacaggatctagaaattgctaagcagcggatcgtctcccacgtccgaaaactcgtgtttcagggagatgaagtgctgcggcgggttactttatcgctcttcgggctgcgcggcgctcaggccgagcgcggcccgcgggccttcgccgcactggctgaatgttgtgctccctttgaacctgggcaacgttatcaggaattcgtacgagcgctccggcctgaggcacctcctccaccgccccccgccttttcgtttcaggaatttctgccgagtctgaactccagtcctctggacattaggaagaaactctcaggacccctgcctcccagactggacgagaactcagccgagccgggtccttgggaggaccctgggactggctggagatggcaggggacacctggtccaactcctggtagcgacgtggactccgtgggcggaggctctgaatcacggtccttggattcccccacaagcagccccggagcaggcactaggcaattagttaaggctagctctacaggcactgaatctagcgacgacttcgaggaacgtgaccccgatttaggcgatggtctggagaacggattaggatcccctttcgggaagtggactctgtccagcgcagcacagacccaccagcttcgcagactacgaggtccagccaagtgccgcgaatgcgaggcttttatggtgtcaggaaccgagtgtgaggaatgttttctgacctgccacaaacgttgcttagagactcttcttattctgtgcggccatcggcggctgcctgcacgcactccactgtttggggtggacttcctccaactcccacgagactttccagaggaggttccctttgttgtgactaagtgtactgctgagatagagcatagagccctcgatgtacaaggcatttaccgcgtctccggctcacgcgtgcgggtggaacgcctgtgccaagcttttgagaacgggcgtgcgttggtggaactgtctgggaacagccctcatgatgtctcctcagtgctcaagagatttctacaggagctgaccgagcccgtgataccattccacctgtacgatgcattcatctcgttagctaagactttgcatgccgatcccggagatgatccgggcacgccctccccttcacctgaagtaatcaggagcctaaaaactttgcttgtccagttaccagattctaactacaacacactaaggcacctggtagcacatctgtttcgagtggccgcccggtttatggagaacaagatgtccgccaacaaccttggtattgtttttggcccaacgctactgcgtcctcctgatggacctcgcgcagcctcagccatccccgtgacctgcctcttagattcaggacaccaggcgcagctggtggaatttcttatcgtgcattacgaacagatatttggcatggacgaattacctcaagccaccgaacctcctccccaggactccagccctgcccctggccctctcacaaccagttctcagccaccccctccacatctcgacccggattcacaaccacctgtacttgcctctgatccggggccagaccctcaacaccactcgacactagagcagcatcccaccgcgaccccaaccgaaatacctacgccacagtctgatcaacgagaagatgtcgccgaggatactaaagacggagggggtgaggttagctcgcaaggcccagaggactctctcctgggcacacagagccgcggccactttagccgccagccagtgaaatatcctagggggggagtccgccccgtcacacaccagttgagtagcctcgcactcgttgccagcaagttgtgcgaagagacacctataaccagcgtcccaagaggaagtttaagaggccgggggccttcacccgctgcggcttctcccgagggttcacccctgaggcgcacgcccctgcccaagcattttgaaataacacaggaaaccgcccgactcctgtcaaagcttgactcggaggcagttccccgggccacttgttgtccagacgtgcagccagaagaggcggaggaccatctatag

SEQ ID NO: 192129 - DNA, 3514 bp, Artificial Sequence
  derived and/or modified sequence
cgacgcggaaccgaggcggcggcggcggctgcggcggcaggaaatcggggctcggccccgccggcgcgcgaccccatccccatcccggtccctgcagagcgatccccgggcccagatatggacgcagcagagccgggactccccccaggtcctgagggcaggaagaggtacagtgacatcttccggagcctggacaacctcgaaatctcactggggaacgtgacccttgagatgctggctggagaccctctactctcagaagacccagaacctgacaagacccctacagccactgttaccaacgaagccagctgttggagcggcccctccccagagggtcctgtacccctcacaggggaggaactggacttgcggctcattcggacaaaggggggtgtggacgcagccctggaatatgccaagacctggagccgctatgccaaggaactgcttgcctggactgaaaagagagccagctatgagctggagtttgctaagagcaccatgaagatcgctgaagctggcaaggtgtccattcaacagcagagccacatgcctctgcagtacatctacaccctgtttctggagcacgatctcagcctgggaaccctggccatggagacagtggcccagcagaaaagagactactaccagcccctcgccgccaaacggactgagattgagaagtggcggaaggagttcaaggagcagtggatgaaggagcagaagcggatgaatgaggcggtgcaggcactgcggcgcgcccagctgcagtatgtgcaacgcagcgaggacctgcgggcacgctcccaggggtcccctgaggactcggccccccaggcctcgccgggacctagcaagcagcaggagcggcggcggcgctcgcgagaggaggcccaggccaaggcgcaggaggccgaggcgctgtaccaggcctgtgtccgcgaggccaacgcgcggcagcaggacctggagatcgccaagcagcgaatcgtgtcgcacgtgcgcaagctggtgtttcagggggatgaagtgctgaggcgggtgacgctgagtctcttcgggctgcggggggcgcaggcagagcgtggcccccgcgccttcgccgccctggccgagtgctgtgcgccctttgagccgggccagcgctaccaggagtttgtacgggcgctgcggcccgaggccccgccgcccccgccgcccgccttctccttccaggagttccttccctccttgaacagctcccctctggacatcagaaagaagctctctgggcctcttcctccaaggctggatgagaattcagctgagccaggcccttgggaggatccgggcacaggctggcgctggcaagggactccaggccccactccgggcagcgatgtggacagcgtgggtggcggcagcgagtctcggtccctggactcacccacttccagcccaggcgctggcacgaggcagctggtgaaggcttcgtccacaggcactgagtcctcagatgactttgaggagcgagaccctgacctgggagacgggctggagaatgggctgggcagccccttcgggaagtggacactgtccagcgcggctcagacccaccagctgcggcgactgcggggcccagccaagtgccgcgagtgcgaagccttcatggtcagcgggacggagtgtgaggagtgctttctgacctgccacaagcgctgcctggagactctcctgatcctctgtggacacaggcggctcccagcccggacacccctttttggggttgacttcctgcagctacccagggacttcccggaggaggtaccctttgtggtcacgaagtgcacggctgagatagaacaccgtgccctggatgtgcagggcatttaccgggtcagcgggtcccgggtccgtgtggagcggctgtgccaggctttcgagaatggccgagcgttggtggagctgtcggggaactcgcctcatgacgtctcgagtgtcctcaagcgatttcttcaggagctcaccgagcccgtgatccccttccacctctacgacgccttcatctctctggctaagaccttgcatgcagaccctggggacgaccctgggacccccagccccagccctgaggttatccgctcgctgaagaccctcttggtacagctgcctgactctaactacaacaccctgcggcacctggtggcccatctgttcagggtggctgcacgatttatggaaaacaagatgtctgccaacaacctgggcattgtgtttgggccgacactgctgcggccgccggacggcccgcgggcagccagcgccatccctgtcacctgcctgctggactctgggcatcaggcccagcttgtggagttcctcatcgtgcactacgagcagatctttgggatggatgagctcccccaggccactgagcccccgccccaagactccagcccagcccctgggcccctcacaaccagctcccaaccgccacccccgcaccttgacccagactcccagcccccagtcctagcctcagaccccggcccagacccccagcaccacagtaccctggagcagcatcccacggccacacctaccgagattccaactccacagagtgaccagagagaggacgtggctgaagacaccaaagatgggggaggggaagtgtccagccaaggcccagaggactcactcctggggacacagtctcgtggccacttcagccgccagccagtgaagtatccccggggcggtgtgaggcctgtaacccaccagctgtccagtctggccctggtggcttccaagctgtgcgaggagacccccatcacatcagtgcccagagggagtttgcgggggcgggggcccagccctgcagctgcctcccctgagggcagccccctgcgccgcaccccgctgcccaagcattttgagattacccaggagacagcccggctactctcgaaattggacagcgaggctgtgcccagggccacctgctgcccggacgtccagcctgaggaagccgaggaccatctctgaccaccctggcaccttaaataaggaagaggcccagattgtgaagacggacccatatatccctacctcccaccacctagtggccaaacaccccgccaggagttcaatgctgggagaggtccagagggttcctataaggaaaaactatttaatacatgacctaggggaggcctaaaacccttttggggataatgtcccagagtccccccactagacacaggtcactgccaagcatcagggccactcgggctcagaggtcactcagggtcaatactcagggtcagtgcaggttatgagatccttggggtccaccctagtctctgacacctgggacaggggtgcttttgctactttggttgtggtcactcccccacacctgcctgcctccttcacggactcgaagtgaccttcctggaggaggtgggcagctcagactccacatgctggtggtgcctgaggtctgatggcctctaataaactgtgtcct

SEQ ID NO: 192130 - DNA, 2913 bp, Artificial Sequence
  derived and/or modified sequence
atggatgctgctgagcccggcctgcccccaggccctgagggcaggaagcgctacagcgacatcttccgcagcctggacaacctggagatcagcctgggcaatgtgaccctggagatgctggccggggaccccctgctgtctgaggaccctgagccagacaagacccccacagccaccgtgaccaatgaggccagctgctggagcggccccagccctgagggccctgtgcccctgactggagaggagctggacctgcggctcatccgcaccaagggcggcgtggatgctgccctggagtatgccaagacctggagccgctatgccaaggagctgctggcctggacagagaagagggccagctatgagctggagtttgccaagagcaccatgaagattgctgaggccggcaaggtgtccatccagcagcagagccacatgcccctgcagtacatctacaccctcttcctggagcatgacctgagcctgggcaccctggccatggagaccgtggcccagcagaagagggactactaccagcccctggccgccaagaggacagaaattgagaagtggaggaaggagttcaaggagcagtggatgaaggagcagaagaggatgaatgaagctgtgcaggccctgcggcgggcccagctgcagtatgtgcagaggtctgaggacctgcgggcccggagccagggcagccctgaggacagcgccccccaggccagccctggccccagcaagcagcaggagaggagaagaagaagccgggaggaggcccaggccaaggcccaggaggccgaggccctgtaccaggcctgtgtgcgggaggccaatgcccggcagcaggacctggagatcgccaagcagagaattgtgagccacgtgaggaagctggtgttccagggagatgaggtgctgcggcgggtgaccctgagcctgtttggcctgcggggggcccaggccgagcggggcccccgggcctttgctgccctggccgagtgctgtgccccctttgagcccggccagcgctaccaggagtttgtgcgggccctgcggcctgaggcccctcctcctcctcctccagccttctccttccaggagttcctgcccagcctgaacagcagccccctggacatcaggaagaagctgagcggccccctgcccccccggctggatgagaacagcgctgagcccggcccctgggaggaccccggcaccggctggcgctggcagggcaccccaggccccaccccaggcagtgatgtggacagcgtgggcggcggcagcgagagccgcagcctggacagccccaccagcagccctggggccggcacccggcagctggtgaaggccagcagcactggaacagagagcagtgatgactttgaggagcgggaccctgacctgggagatggcctggagaatggcctgggcagcccctttgggaagtggaccctgagcagcgctgcccagacccaccagctgcggcggctgcggggccctgccaagtgcagagaatgtgaggccttcatggtgtctggaacagaatgtgaggagtgcttcctgacctgccacaagcgctgcctggagaccctgctgatcctgtgtggccaccggcggctgcctgcccggacccccctgtttggagtggacttcctgcagctgccccgggacttccctgaggaggtgccctttgtggtgaccaagtgcacagctgagattgagcaccgggccctggatgtgcagggcatctacagagtgtctggcagccgggtgcgggtggagcggctgtgccaggcctttgaaaatggccgggccctggtggagctgagcggcaacagcccccatgatgtgtcctctgtgctgaagcgcttcctgcaggagctgacagagcctgtgatccccttccacctgtatgatgccttcatcagcctggccaagaccctgcacgccgaccctggagatgaccccggcacccccagccccagccctgaggtgatccgcagcctgaagaccctgctggtgcagctgcctgacagcaactacaacaccctgcggcacctggtggcccacctgttccgggtggccgcccgcttcatggagaacaagatgtctgccaacaacctgggcatcgtgtttggccccaccctgctgcggcccccagatggccccagggctgccagcgccatccctgtgacctgcctgctggacagcggccaccaggcccagctggtggagttcctgattgtgcactatgagcagatcttcggcatggatgagctgccccaggccacagagcccccaccccaggacagcagccctgcccctggccccctgaccaccagcagccagcccccaccaccccacctggaccctgacagccagccccctgtgctggccagtgaccccggccctgacccccagcaccacagcaccctggagcagcaccccacagccacccccacagagatccccaccccccagagcgaccagcgggaggatgtggccgaggacaccaaggatggcggcggggaggtgagcagccagggccctgaggacagcctgctgggcacccagagccggggccacttcagccggcagcctgtgaagtacccccggggcggcgtgcggcctgtgacccaccagctgagcagcctggccctggtggccagcaagctgtgtgaggagacccccatcacctctgtgccccggggcagcctgcggggccggggccccagccctgctgctgccagccctgagggcagccccctgcggaggacccccctgcccaagcactttgagatcacccaggagacagcccggctgctgagcaagctggacagcgaggccgtgccccgggccacctgctgcccagatgtgcagcctgaggaggccgaggaccacctgtag

SEQ ID NO: 192131 - DNA, 2913 bp, Artificial Sequence
  derived and/or modified sequence
atggacgccgccgagcccggcctgccccccggccccgagggccggaaaaggtattcagatatttttaggtctcttgacaacctggaaatttcattgggcaatgtcacactcgaaatgctggcgggcgatcctctcttatcagaagatccagaacccgacaagactcctacagccactgtgaccaatgaagcgtcttgctggtcaggccccagccctgaggggcccgtccctctcactggagaagagctcgatctgagactcatccggaccaaaggtggcgtcgacgctgctttggagtacgcaaagacctggtctcggtatgcaaaagagctcctagcttggacagagaagcgggcctcctacgagctggagttcgcaaaatcaaccatgaaaattgctgaagccgggaaggtgtccatccagcaacaatctcacatgccgctgcagtacatatatacattgttcctggaacacgatctctctctgggaaccctggccatggaaacagtggctcaacagaaacgagactactaccaacctctggccgctaaacgcaccgagatcgaaaagtggagaaaggagtttaaggagcagtggatgaaggaacaaaaaaggatgaatgaggctgtgcaggctctgagaagggctcagcttcagtacgtgcagcggtctgaggacctgagagccaggtcgcagggaagccctgaagattccgcccctcaggctagcccgggccctagcaaacagcaggaaaggcggcggcgctcaagagaagaggcccaggccaaagctcaggaggctgaagcactgtaccaagcctgcgtgagggaagctaacgcccgacaacaggacctcgagatagcaaagcagcgaattgtatctcacgtgcggaagctggtgtttcaaggtgatgaggtgttgagacgcgtcacactgtctttgttcggcctcaggggcgcccaagccgagcggggccccagagccttcgccgcattagcggaatgttgtgccccatttgaaccaggtcagagataccaagagtttgtccgggcccttcggcccgaggccccacccccacccccaccagcttttagtttccaggaatttctgccatcacttaattcgtcccctctggacattagaaaaaagctgtcaggcccacttccgcccaggctcgatgaaaatagcgcggagcccgggccttgggaggatcccggcactggctggcgttggcagggcacgcccggccctactcccggatccgatgtggattctgttggcggcggtagtgaaagccgatccctggattcccccacttcatcaccgggagctgggactcgacaattggttaaagcctcttctactggaacagaatcgtcagatgactttgaggagagagatcccgacctaggtgacgggctcgaaaatggccttggcagtccgttcgggaaatggacactctccagcgcggcgcaaacacaccagctaagacgtttgaggggccctgccaagtgtcgagagtgtgaggcattcatggtctccgggaccgaatgcgaagaatgttttctgacctgccacaagcgctgtctggagaccctcctaatcctgtgtggacaccgcaggctgccagccagaacaccactgtttggagtggattttctgcagctcccccgcgatttcccggaggaggtacctttcgtcgtgacaaaatgcaccgctgaaatcgaacaccgcgcattagacgtgcagggtatctaccgggttagcgggagtcgcgtgagagtcgaacgattgtgtcaagctttcgagaatggccgcgcgctggtcgaactctccgggaactccccccacgacgtgagttcagtcctgaagcggttcctgcaggaactcaccgagccagtcattcccttccatttatacgacgcttttatttcactagctaaaaccctgcacgctgacccaggagacgacccaggaactccatccccctccccagaggttattcgctccttaaaaaccctgcttgttcagctgcctgacagcaactataacacccttagacacctcgtggctcatctctttagggtggccgcgcggttcatggagaacaaaatgtctgctaacaaccttgggatcgtcttcggaccgactctgctgcggccacccgacggtcctagagcagccagcgccattcccgtgacttgtttgcttgatagcgggcatcaggcacagctggttgagtttctcattgttcactatgagcaaatcttcggcatggatgagctgccccaggccaccgaacctcctccgcaagactccagccctgccccgggcccccttaccaccagttctcagcctcccccgcctcacctcgatcccgattcacagccacctgtgctggcttctgatcctggacccgacccccagcaccactcgaccctggaacagcaccctacagcaacacctaccgagattccaaccccacagagtgaccagcgggaggacgtggccgaagacactaaagatggcgggggcgaagtctcatcccagggtccggaggatagtctgctgggtacccaaagccgaggccacttttcccgccagcccgtgaaatatccgaggggcggagtcaggccggtgactcaccagctgtcttcactcgctctggtggcctccaagctatgcgaagagacccccatcacgtccgtcccgagaggatctctgagaggtcgtggaccatcacccgcggcggcatcacctgaaggcagtcctttgaggcgaacaccactacccaagcacttcgagatcacccaagaaactgccaggctgctgagtaagcttgattccgaggcggtaccacgtgctacctgttgtccggacgtccagccagaagaggcggaggaccacttgtag

SEQ ID NO: 192132 - DNA, 2913 bp, Artificial Sequence
  derived and/or modified sequence
atggacgccgcagaacctggactcccccctggacccgaaggtcggaaacgatatagcgatattttccggagcctcgacaatttggagatcagtcttggaaacgtgacgctggaaatgttggctggtgatccgctgttgtccgaggatccagagcccgataagactcccacagccacagtgactaatgaagcttcttgctggtcgggtccctctccggaagggccagtgccactgactggcgaggagctggatctaaggcttattaggaccaagggcggtgtggacgctgctctcgagtacgctaaaacctggtctcggtatgccaaagagctattggcctggacggagaagagggcctcttacgagttggaattcgccaagagtactatgaagattgcagaggcaggcaaggtgtctatccagcagcagagccacatgccgctgcagtacatttatacattgtttctagagcatgacctttccctgggaacacttgccatggaaacagtagcacagcaaaaaagggattactatcaacctctggcggctaaacgcaccgaaatcgaaaaatggaggaaagaatttaaggaacaatggatgaaagagcaaaaacggatgaatgaggctgtacaggccttacgacgagcccagttgcagtatgtgcagcggtctgaagatttgcgagcacgctcccagggcagtcccgaggactccgcaccgcaggcatcacccggaccctcaaagcagcaggagaggcgtcggcgatcaagagaggaagctcaagcgaaggcgcaggaggctgaggcactttatcaggcttgcgtgcgcgaggctaatgcgcgacagcaggacttggagatcgccaaacagcgcattgtttcccacgtccgcaagctggtcttccaaggcgatgaagtgctgaggcgagtcaccctgagtctgttcggcctgcgaggagcccaggcagagcgagggccaagagcctttgctgcactggctgagtgttgtgctccatttgagcctggtcagagataccaggagttcgtacgtgctctcagaccggaggctccacctccgcctccacctgctttcagcttccaagaattcttgcccagtctgaacagctcccctcttgacattcgcaagaagctctccggaccgctccccccacgccttgacgagaattcagcagagcctgggccttgggaggatcccggaactggctggcgctggcagggcacgcccggaccgacccccggatcagatgtggattcagttggagggggatccgaatcacgtagcctcgacagtcctactagttcccccggtgcaggcaccagacaacttgtgaaggcttcttcgaccggtaccgagtccagtgatgatttcgaggagcgcgaccctgacctgggtgacggtctggaaaatggactcggctctcccttcggtaagtggacactgtcctccgctgcacaaacccaccaactgagacgccttcgcggaccagccaagtgtcgggagtgcgaagctttcatggtctcaggaacggaatgcgaggagtgtttcctcacatgccacaaaaggtgcctggagactctcctgatcttatgcggacaccgacgtctgcccgctagaacccctctattcggagtcgactttcttcagctgcctagggactttcctgaagaagtcccttttgtagtgaccaagtgcactgctgagatcgagcaccgcgcactggacgtgcaaggcatctaccgggtgagtggttccagggtgcgcgtggaaagactctgccaggccttcgagaatggacgggctttggttgagctttccggcaacagcccgcacgacgtcagctcagtgttaaagcgcttcctgcaggagcttacggagcctgtgataccattccatctctacgatgcctttatctctttggcaaagactctccacgccgacccgggagatgatccaggtaccccctcaccctcccccgaggtgatccgcagtctcaaaaccctcctggtgcaactgccagactctaactataataccctgaggcatctggttgcccatttgttccgtgtagctgctaggttcatggaaaacaagatgtctgcgaacaatctgggcattgtgttcggtcctaccctcctccgccctccggacggtcctcgggcagcctctgctatccctgttacatgtctgcttgattccggtcatcaagcccagcttgtggaattcctgatcgttcactatgagcagatcttcggaatggacgagctgccccaagccaccgagccaccccctcaggatagctcacctgcaccgggtcctctcacgacttccagtcaacctccccctccccatttggaccctgactcccagcctcccgtgcttgcttcggatccgggtcccgacccgcagcaccactcaaccctggagcagcatcctactgcgacccctaccgaaattcccacccctcagtcagaccagcgcgaggatgtggctgaagacactaaagacggcggaggggaggtctcttcccaaggccctgaggactcgttgctgggcactcaatcacgcggacatttttcgaggcagccggttaagtatcctcggggtggtgtccgtcctgtcacgcaccagctaagtagcctggcacttgttgctagtaagctgtgcgaggagacccccatcacttctgtccctagggggtcgcttagggggaggggacccagccccgcagccgcatccccagaggggtcccctctgcgcagaacgcctctgcctaaacacttcgagataactcaggaaacggctcgcctcctcagcaagttagacagcgaagctgtaccgagggctacctgctgcccagacgtgcagccggaagaggccgaagatcatctgtag

SEQ ID NO: 192133 - DNA, 2913 bp, Artificial Sequence
  derived and/or modified sequence
atggacgccgccgagcccggcctgccccccggccccgagggcagaaagagatacagcgacatcttcagaagcctggacaacctggagatcagcctgggcaacgtgaccctggagatgctggccggcgaccccctgctgagcgaggaccccgagcccgacaagacccccaccgccaccgtgaccaacgaggccagctgctggagcggccccagccccgagggccccgtgcccctgaccggcgaggagctggacctgagactgatcagaaccaagggcggcgtggacgccgccctggagtacgccaagacctggagcagatacgccaaggagctgctggcctggaccgagaagagagccagctacgagctggagttcgccaagagcaccatgaagatcgccgaggccggcaaggtgagcatccagcagcagagccacatgcccctgcagtacatctacaccctgttcctggagcacgacctgagcctgggcaccctggccatggagaccgtggcccagcagaagagagactactaccagcccctggccgccaagagaaccgagatcgagaagtggagaaaggagttcaaggagcagtggatgaaggagcagaagagaatgaacgaggccgtgcaggccctgagaagagcccagctgcagtacgtgcagagaagcgaggacctgagagccagaagccagggcagccccgaggacagcgccccccaggccagccccggccccagcaagcagcaggagagaagaagaagaagcagagaggaggcccaggccaaggcccaggaggccgaggccctgtaccaggcctgcgtgagagaggccaacgccagacagcaggacctggagatcgccaagcagagaatcgtgagccacgtgagaaagctggtgttccagggcgacgaggtgctgagaagagtgaccctgagcctgttcggcctgagaggcgcccaggccgagagaggccccagagccttcgccgccctggccgagtgctgcgcccccttcgagcccggccagagataccaggagttcgtgagagccctgagacccgaggccccccccccccccccccccgccttcagcttccaggagttcctgcccagcctgaacagcagccccctggacatcagaaagaagctgagcggccccctgccccccagactggacgagaacagcgccgagcccggcccctgggaggaccccggcaccggctggagatggcagggcacccccggccccacccccggcagcgacgtggacagcgtgggcggcggcagcgagagcagaagcctggacagccccaccagcagccccggcgccggcaccagacagctggtgaaggccagcagcaccggcaccgagagcagcgacgacttcgaggagagagaccccgacctgggcgacggcctggagaacggcctgggcagccccttcggcaagtggaccctgagcagcgccgcccagacccaccagctgagaagactgagaggccccgccaagtgcagagagtgcgaggccttcatggtgagcggcaccgagtgcgaggagtgcttcctgacctgccacaagagatgcctggagaccctgctgatcctgtgcggccacagaagactgcccgccagaacccccctgttcggcgtggacttcctgcagctgcccagagacttccccgaggaggtgcccttcgtggtgaccaagtgcaccgccgagatcgagcacagagccctggacgtgcagggcatctacagagtgagcggcagcagagtgagagtggagagactgtgccaggccttcgagaacggcagagccctggtggagctgagcggcaacagcccccacgacgtgagcagcgtgctgaagagattcctgcaggagctgaccgagcccgtgatccccttccacctgtacgacgccttcatcagcctggccaagaccctgcacgccgaccccggcgacgaccccggcacccccagccccagccccgaggtgatcagaagcctgaagaccctgctggtgcagctgcccgacagcaactacaacaccctgagacacctggtggcccacctgttcagagtggccgccagattcatggagaacaagatgagcgccaacaacctgggcatcgtgttcggccccaccctgctgagaccccccgacggccccagagccgccagcgccatccccgtgacctgcctgctggacagcggccaccaggcccagctggtggagttcctgatcgtgcactacgagcagatcttcggcatggacgagctgccccaggccaccgagccccccccccaggacagcagccccgcccccggccccctgaccaccagcagccagcccccccccccccacctggaccccgacagccagccccccgtgctggccagcgaccccggccccgacccccagcaccacagcaccctggagcagcaccccaccgccacccccaccgagatccccaccccccagagcgaccagagagaggacgtggccgaggacaccaaggacggcggcggcgaggtgagcagccagggccccgaggacagcctgctgggcacccagagcagaggccacttcagcagacagcccgtgaagtaccccagaggcggcgtgagacccgtgacccaccagctgagcagcctggccctggtggccagcaagctgtgcgaggagacccccatcaccagcgtgcccagaggcagcctgagaggcagaggccccagccccgccgccgccagccccgagggcagccccctgagaagaacccccctgcccaagcacttcgagatcacccaggagaccgccagactgctgagcaagctggacagcgaggccgtgcccagagccacctgctgccccgacgtgcagcccgaggaggccgaggaccacctgtag

SEQ ID NO: 192134 - protein, 414 aa, Artificial Sequence
  derived and/or modified sequence
MDPLNLSWYDDDLERQNWSRPFNGSDGKADRPHYNYYATLLTLLIAVIVFGNVLVCMAVSREKALQTTTNYLIVSLAVADLLVATLVMPWVVYLEVVGEWKFSRIHCDIFVTLDVMMCTASILNLCAISIDRYTAVAMPMLYNTRYSSKRRVTVMISIVWVLSFTISCPLLFGLNNADQNECIIANPAFVVYSSIVSFYVPFIVTLLVYIKIYIVLRRRRKRVNTKRSSRAFRAHLRAPLKEAARRAQELEMEMLSSTSPPERTRYSPIPPSHHQLTLPDPSHHGLHSTPDSPAKPEKNGHAKDHPKIAKIFEIQTMPNGKTRTSLKTMSRRKLSQQKEKKATQMLAIVLGVFIICWLPFFITHILNIHCDCNIPPVLYSAFTWLGYVNSAVNPIIYTTFNIEFRKAFLKILHC

SEQ ID NO: 192135 - protein, 177 aa, Artificial Sequence
  derived and/or modified sequence
MDPLNLSWYDDDLERQNWSRPFNGSDGKADRPHYNYYATLLTLLIAVIVFGNVLVCMAVSREKALQTTTNYLIVSLAVADLLVATLVMPWVVYLEVVGEWKFSRIHCDIFVTLDVMMCTASILNLCAISIDRYTAVAMPMLYNTRYSSKRRVTVMISIVWVLSFTISCPLLFGLNNA

SEQ ID NO: 192136 - protein, 63 aa, Artificial Sequence
  derived and/or modified sequence
MHLCRGCQCPAVRDLTSGAETREAPRRIQELTMPALLRTNPPEHPRHLPQPRRVDRVPLWSSQ

SEQ ID NO: 192137 - DNA, 1245 bp, Artificial Sequence
  derived and/or modified sequence
atggatcctctgaatcttagctggtacgatgatgatctggagcgacagaattggagccgcccattcaatgggtccgacggaaaagctgaccgaccacattataactactacgcaaccctcctgacactactgattgccgtgattgtctttggaaatgtcctcgtgtgtatggccgtgagcagggagaaggcgctccagacaaccacgaactatctgattgtatctctggccgtagctgatttacttgtggccactctggtcatgccttgggtagtgtatttggaggtcgttggggagtggaaattcagccgaatccactgcgatatctttgtgactcttgatgtgatgatgtgcactgccagtatcctgaatctgtgcgctatcagcattgaccgctatacagctgttgccatgccgatgctctataacacaaggtactcctccaagcggagggttaccgtgatgatttcgatcgtctgggtactgtcatttacaatctcatgtcccctgctgttcgggctgaataacgcagatcagaatgaatgcattatcgctaatccagcgttcgtcgtctacagtagtatcgtcagtttttacgtgccattcattgtgacacttctcgtgtacatcaaaatttacatcgtgttgagacggagacgcaaacgggtcaacacaaagagaagttcaagggccttcagagcacacttaagagctccccttaaagaagcagcccggcgtgctcaagagctggagatggaaatgctgagttccacatcaccaccagaaagaactcgctactctccaatccccccttcccaccaccagttaacactgcctgacccatctcaccacggattacattctactcctgactcccccgctaagcctgagaaaaacgggcatgccaaggatcatcctaaaattgccaagattttcgagatccagacaatgcccaacggcaaaacaagaacatctctgaagaccatgagccggcgtaagttgtcacaacagaaggaaaagaaagcaactcagatgctggccatagtactgggcgtgtttataatatgttggctgcccttcttcattacccacattctcaacatccactgcgactgtaacatccctccggttctgtattcagcctttacctggctcgggtatgtgaattcagccgtgaacccgattatatacaccacatttaatatcgaatttaggaaggcattcctgaaaatcttgcattgctag

SEQ ID NO: 192138 - DNA, 534 bp, Artificial Sequence
  derived and/or modified sequence
atggatcctctcaatttgtcttggtatgatgacgacctagagaggcagaattggtccagaccgtttaatgggagcgacgggaaggctgacagaccacactataactactacgccaccttgctcacgctgctcattgcagttattgtgtttgggaatgtcctggtatgcatggctgttagtcgtgagaaggccctccagacgacaacgaattacctgatcgtaagtttggcagtggctgatctgcttgttgctacactggtgatgccctgggtagtgtacctcgaagtcgttggagagtggaagttctccaggatacactgcgacatctttgtgacattggacgtgatgatgtgcacagcctcaatcctgaatctgtgtgcgatcagcatcgaccgatacactgccgttgctatgccaatgctctataatacccgctatagctctaaacgacgtgtcacagtcatgatctctattgtctgggtcctgtcttttacaatcagctgcccactgctgtttggcctgaacaatgcatag

SEQ ID NO: 192139 - DNA, 192 bp, Artificial Sequence
  derived and/or modified sequence
atgcacttgtgccggggctgtcaatgtccagccgtcagggacctgacatcaggcgctgagacccgggaggcgcccaggagaattcaggagctaaccatgcctgccctcctgcgtacaaaccctcccgagcatccccgacacctcccacagcccaggagggtggatagggtgccactgtggagttctcagtag

SEQ ID NO: 192140 - DNA, 1245 bp, Artificial Sequence
  derived and/or modified sequence
atggaccccctgaacctgtcctggtatgatgatgacctggagcggcagaactggagccggcccttcaatggaagtgatggcaaggctgaccggccccactacaactactatgccaccctgctgaccctgctgattgctgtgattgtgtttggaaatgtgctggtgtgcatggctgtgtcccgggagaaggccctgcagaccaccaccaactacctgattgtgtccctggccgtggccgacctgctggtggccaccctggtgatgccctgggtggtgtacctggaggtggtgggggagtggaagttcagccgcatccactgtgacatctttgtgaccctggatgtgatgatgtgcacagccagcatcctgaacctgtgtgccatcagcattgaccgctacacagctgtggccatgcccatgctgtacaacacccgctacagcagcaagagaagagtgacagtgatgatcagcatcgtgtgggtgctgtccttcaccatcagctgccccctgctgtttggcctgaacaatgctgaccagaatgaatgcatcatcgccaacccagcctttgtggtgtacagcagcatcgtgtccttctacgtgcccttcatcgtgaccctgctggtgtacatcaagatctacatcgtgctgcggcggcggaggaagagggtgaacaccaagaggagcagccgggccttccgggcccacctgcgggcccccctgaaggaggccgcccggcgggcccaggagctggagatggagatgctgagcagcaccagccccccagagaggacccgctacagccccatcccccccagccaccaccagctgaccctgcctgaccccagccaccacggcctgcacagcaccccagacagccctgccaagccagagaagaatggacatgccaaggaccaccccaagatcgccaagatctttgagatccagaccatgcccaacgggaagaccaggaccagcctgaagaccatgagcaggaggaagctgagccagcagaaggagaagaaggccacccagatgctggccatcgtgctgggcgtcttcatcatctgctggctgcccttcttcatcacccacatcctgaacatccactgtgactgcaacatcccccctgtgctgtacagcgccttcacctggctgggctacgtgaacagcgctgtgaaccccatcatctacaccaccttcaacatcgagttcaggaaggccttcctgaagatcctgcactgctag

SEQ ID NO: 192141 - DNA, 534 bp, Artificial Sequence
  derived and/or modified sequence
atggaccccctgaacctgtcctggtatgatgatgacctggagcggcagaactggagccggcccttcaatggaagtgatggcaaggctgaccggccccactacaactactatgccaccctgctgaccctgctgattgctgtgattgtgtttggaaatgtgctggtgtgcatggctgtgtcccgggagaaggccctgcagaccaccaccaactacctgattgtgtccctggccgtggccgacctgctggtggccaccctggtgatgccctgggtggtgtacctggaggtggtgggggagtggaagttcagccgcatccactgtgacatctttgtgaccctggatgtgatgatgtgcacagccagcatcctgaacctgtgtgccatcagcattgaccgctacacagctgtggccatgcccatgctgtacaacacccgctacagcagcaagagaagagtgacagtgatgatcagcatcgtgtgggtgctgtccttcaccatcagctgccccctgctgtttggcctgaacaatgcctag

SEQ ID NO: 192142 - DNA, 192 bp, Artificial Sequence
  derived and/or modified sequence
atgcacctgtgccggggctgccagtgcccagctgtgcgggacctgaccagcggggctgagacccgggaggccccccggcgcatccaggagctgaccatgcctgccctgctgcggaccaaccccccagagcaccccaggcacctgccccagccccggcgggtggacagagtgcccctgtggagcagccagtag

SEQ ID NO: 192143 - DNA, 1245 bp, Artificial Sequence
  derived and/or modified sequence
atggaccccctgaacctgagctggtacgacgacgacctggagcggcagaattggagccgaccttttaacggcagcgacggtaaggctgaccggccacactacaactattacgcgacgctcctgactctgctgatcgccgtcatcgtcttcggtaacgtgctcgtgtgtatggccgtgtctagggagaaggccctgcagaccactactaactatctcattgtgagccttgccgtggcggacctactggtggctacgttggtcatgccctgggtagtttatcttgaggtcgttggcgaatggaaatttagccggattcattgtgatatctttgtgacgctggatgtgatgatgtgtacagcgagtattctgaatttgtgcgccatcagtattgatagatacaccgctgtggctatgccaatgctgtataacacccggtactcctcaaaaagacgggtgaccgtgatgataagcatagtgtgggtcctcagctttaccatctcctgccctttgctgttcggccttaataatgcggaccaaaatgagtgtatcattgccaaccctgcttttgtggtttacagtagtattgtgagtttttacgttccgttcatagtgactctgttggtatacatcaaaatctatattgtgctgagaaggaggcgtaaaagggtcaacaccaagcgttcttcacgtgcttttcgtgcacatttgcgggcccccctgaaagaggccgcccggcgagctcaagaactcgaaatggagatgctatccagtacctcgcccccagaaaggaccaggtattcccccattcctccctcccatcatcagctgacactgccggacccttcccaccatgggttacattccactcccgactcacccgcaaaacccgaaaagaacggacatgctaaagaccaccctaaaatcgccaaaatcttcgagatccagacgatgcccaacggcaaaacacgaacctccttgaagactatgagccgacgcaagctgtcccagcagaaggagaaaaaagccacccagatgttggctattgtgctcggcgtattcataatctgttggttgccattcttcattactcatattctcaacatccactgcgattgcaacatcccccctgtactgtatagtgcctttacttggcttggatacgtgaactcagcagtaaatccaattatttacaccacttttaacatcgagttcagaaaagcctttctgaagattcttcactgttag

SEQ ID NO: 192144 - DNA, 534 bp, Artificial Sequence
  derived and/or modified sequence
atggaccccctgaacctgagctggtacgacgacgacctggagcggcagaactggagcagaccattcaacggctctgatggtaaggccgacaggccacactataactactacgctacgctgcttactttgctcatagcggttatcgtttttggaaacgtactggtatgcatggccgtgtcccgtgagaaggcattgcagaccaccacaaattacttgatcgtttctttggctgtggcggacctgctcgtggcgacattggttatgccttgggttgtgtatctggaggtcgtaggggaatggaagttttctaggatccattgcgacatcttcgtgactctagatgtcatgatgtgtactgcatccatcctgaacctatgcgcaatctctatagaccgctatacagccgtggctatgccaatgctttataacactagatactcatctaaacgaagggtcaccgtgatgattagcatcgtgtgggtgttgagttttacaattagttgcccacttctctttggactgaacaacgcctag

SEQ ID NO: 192145 - DNA, 192 bp, Artificial Sequence
  derived and/or modified sequence
atgcacctgtgccggggctgccagtgccccgccgtgcgggacctgacttctggggcggaaacccgcgaagcgcctcgtagaattcaggagttaaccatgcctgccctccttcgcacaaatcctcccgaacatcctaggcacctgcctcagccgaggcgtgtagaccgagtgcctctctggagctcacagtag

SEQ ID NO: 192146 - DNA, 1245 bp, Artificial Sequence
  derived and/or modified sequence
atggaccctttgaatttgtcttggtatgacgatgatcttgagaggcaaaattggtccaggccatttaacgggtccgacggcaaagccgataggccgcactataattactacgccacactcctcacacttttaatcgcggttatcgttttcggcaatgttttagtgtgcatggcggtcagtcgggagaaagcactgcagaccaccactaattacctgatcgtgtccctggcggtggcggacctgctcgtggcaactctggtgatgccctgggtcgtctacctggaggtagtgggagaatggaagttctcaaggattcactgcgatatctttgtaaccttggatgtaatgatgtgtacagcatcaattttgaatctctgtgcaataagcatcgataggtacacagcagtcgcaatgcctatgctttacaacactcgctatagttccaaacggcgagtcacagtgatgatctctattgtctgggttttgtcttttactattagttgtcccttactgttcgggctaaacaatgccgatcagaacgaatgcatcattgccaatcctgcctttgtggtgtatagttccattgtaagcttctatgttccattcatcgtgaccctgctggtctatataaaaatttatatcgtgctaaggagaagaagaaagcgtgtgaacactaaacggtcctctagagcattccgtgcgcacctccgggcacctctaaaagaggctgctagaagggcccaggagcttgaaatggagatgctatcctctacctcaccgcctgaaagaaccaggtactcccctatacctccctcccatcaccagctcacactgccggacccctcccatcatggcctccactccaccccggatagtcccgctaaacccgagaagaacgggcacgccaaggaccaccccaagatcgccaaaatctttgaaattcagaccatgcctaacggcaaaacaaggacaagcttaaaaacaatgtcccgtcgtaagcttagccagcagaaagagaagaaggccacacaaatgcttgccatcgtcctgggcgtgtttatcatctgctggctgcccttttttattacgcacatactgaatatccactgtgactgcaatatacccccagtcctgtattccgctttcacctggctgggctacgtgaattctgcggtgaatccaatcatctacacgacgttcaatatcgagttccgcaaggccttcctaaagatcttacactgctag

SEQ ID NO: 192147 - DNA, 534 bp, Artificial Sequence
  derived and/or modified sequence
atggacccgttgaacctgagctggtacgacgacgacttggaaaggcaaaactggtcccggccatttaacggtagcgacggcaaggccgatcggccacactataattactatgccaccctgctcacactgctgattgcagtgattgtcttcgggaacgtgttggtgtgtatggcggtgagtcgagagaaagccttgcagacaaccaccaactacctgattgtgagcctcgcagtggcagatctccttgttgctactctggtgatgccatgggtcgtgtaccttgaggtcgtgggtgaatggaaatttagcagaatacactgcgatattttcgtaactttggatgtcatgatgtgtactgcttccatcctaaacctatgcgccatttcgattgacagatataccgctgttgcaatgcctatgttatacaacacccgttactcctcaaaaagacgcgtgacagtgatgatttcaattgtctgggtgctttcattcacaatctcttgccctctcctatttggactgaacaacgcctag

SEQ ID NO: 192148 - DNA, 192 bp, Artificial Sequence
  derived and/or modified sequence
atgcacctttgtcgagggtgccaatgtcctgctgtgcgggatctaacctctggtgccgaaaccagggaagcccctcggaggattcaggagttgactatgccagctctgttacggaccaatccaccagaacacccaagacacctgcctcaaccgcgaagggtagatcgagttcccttatggagtagccagtag

SEQ ID NO: 192149 - DNA, 1245 bp, Artificial Sequence
  derived and/or modified sequence
atggaccccctgaacctgagctggtacgacgacgacctggagagacagaactggagcagacccttcaacggcagcgacggcaaggccgacagaccccactacaactactacgccaccctgctgaccctgctgatcgccgtgatcgtgttcggcaacgtgctggtgtgcatggccgtgagcagagagaaggccctgcagaccaccaccaactacctgatcgtgagcctggccgtggccgacctgctggtggccaccctggtgatgccctgggtggtgtacctggaggtggtgggcgagtggaagttcagcagaatccactgcgacatcttcgtgaccctggacgtgatgatgtgcaccgccagcatcctgaacctgtgcgccatcagcatcgacagatacaccgccgtggccatgcccatgctgtacaacaccagatacagcagcaagagaagagtgaccgtgatgatcagcatcgtgtgggtgctgagcttcaccatcagctgccccctgctgttcggcctgaacaacgccgaccagaacgagtgcatcatcgccaaccccgccttcgtggtgtacagcagcatcgtgagcttctacgtgcccttcatcgtgaccctgctggtgtacatcaagatctacatcgtgctgagaagaagaagaaagagagtgaacaccaagagaagcagcagagccttcagagcccacctgagagcccccctgaaggaggccgccagaagagcccaggagctggagatggagatgctgagcagcaccagcccccccgagagaaccagatacagccccatcccccccagccaccaccagctgaccctgcccgaccccagccaccacggcctgcacagcacccccgacagccccgccaagcccgagaagaacggccacgccaaggaccaccccaagatcgccaagatcttcgagatccagaccatgcccaacggcaagaccagaaccagcctgaagaccatgagcagaagaaagctgagccagcagaaggagaagaaggccacccagatgctggccatcgtgctgggcgtgttcatcatctgctggctgcccttcttcatcacccacatcctgaacatccactgcgactgcaacatcccccccgtgctgtacagcgccttcacctggctgggctacgtgaacagcgccgtgaaccccatcatctacaccaccttcaacatcgagttcagaaaggccttcctgaagatcctgcactgctag

SEQ ID NO: 192150 - DNA, 534 bp, Artificial Sequence
  derived and/or modified sequence
atggaccccctgaacctgagctggtacgacgacgacctggagagacagaactggagcagacccttcaacggcagcgacggcaaggccgacagaccccactacaactactacgccaccctgctgaccctgctgatcgccgtgatcgtgttcggcaacgtgctggtgtgcatggccgtgagcagagagaaggccctgcagaccaccaccaactacctgatcgtgagcctggccgtggccgacctgctggtggccaccctggtgatgccctgggtggtgtacctggaggtggtgggcgagtggaagttcagcagaatccactgcgacatcttcgtgaccctggacgtgatgatgtgcaccgccagcatcctgaacctgtgcgccatcagcatcgacagatacaccgccgtggccatgcccatgctgtacaacaccagatacagcagcaagagaagagtgaccgtgatgatcagcatcgtgtgggtgctgagcttcaccatcagctgccccctgctgttcggcctgaacaacgcctag

SEQ ID NO: 192151 - DNA, 192 bp, Artificial Sequence
  derived and/or modified sequence
atgcacctgtgcagaggctgccagtgccccgccgtgagagacctgaccagcggcgccgagaccagagaggcccccagaagaatccaggagctgaccatgcccgccctgctgagaaccaacccccccgagcaccccagacacctgccccagcccagaagagtggacagagtgcccctgtggagcagccagtag

SEQ ID NO: 192152 - DNA, 2433 bp, Artificial Sequence
  derived and/or modified sequence
agcagccggcgccgtctctgcccccgggcgccctatggcttgaagagcctggccacccagtggctccaccgccctgatggatccactgaatctgtcctggtatgatgatgatctggagaggcagaactggagccggcccttcaacgggtcagacgggaaggcggacagaccccactacaactactatgccacactgctcaccctgctcatcgctgtcatcgtcttcggcaacgtgctggtgtgcatggctgtgtcccgcgagaaggcgctgcagaccaccaccaactacctgatcgtcagcctcgcagtggccgacctcctcgtcgccacactggtcatgccctgggttgtctacctggaggtggtaggtgagtggaaattcagcaggattcactgtgacatcttcgtcactctggacgtcatgatgtgcacggcgagcatcctgaacttgtgtgccatcagcatcgacaggtacacagctgtggccatgcccatgctgtacaatacgcgctacagctccaagcgccgggtcaccgtcatgatctccatcgtctgggtcctgtccttcaccatctcctgcccactcctcttcggactcaataacgcagaccagaacgagtgcatcattgccaacccggccttcgtggtctactcctccatcgtctccttctacgtgcccttcattgtcaccctgctggtctacatcaagatctacattgtcctccgcagacgccgcaagcgagtcaacaccaaacgcagcagccgagctttcagggcccacctgagggctccactaaaggaggctgcccggcgagcccaggagctggagatggagatgctctccagcaccagcccacccgagaggacccggtacagccccatcccacccagccaccaccagctgactctccccgacccgtcccaccatggtctccacagcactcccgacagccccgccaaaccagagaagaatgggcatgccaaagaccaccccaagattgccaagatctttgagatccagaccatgcccaatggcaaaacccggacctccctcaagaccatgagccgtaggaagctctcccagcagaaggagaagaaagccactcagatgctcgccattgttctcggcgtgttcatcatctgctggctgcccttcttcatcacacacatcctgaacatacactgtgactgcaacatcccgcctgtcctgtacagcgccttcacgtggctgggctatgtcaacagcgccgtgaaccccatcatctacaccaccttcaacattgagttccgcaaggccttcctgaagatcctccactgctgactctgctgcctgcccgcacagcagcctgcttcccacctccctgcccaggccggccagcctcacccttgcgaaccgtgagcaggaaggcctgggtggatcggcctcctcttcaccccggcaggccctgcagtgttcgcttggctccatgctcctcactgcccgcacaccctcactctgccagggcagtgctagtgagctgggcatggtaccagccctggggctgggccccccagctcaggggcagctcatagagtcccccctcccacctccagtccccctatccttggcaccaaagatgcagccgccttccttgaccttcctctggggctctagggttgctggagcctgagtcagggcccagaggctgagttttctctttgtggggcttggcgtggagcaggcggtggggagagatggacagttcacaccctgcaaggcccacaggaggcaagcaagctctcttgccgaggagccaggcaacttcagtcctgggagacccatgtaaataccagactgcaggttggaccccagagattcccaagccaaaaaccttagctccctcccgcaccccgatgtggacctctactttccaggctagtccggacccacctcaccccgttacagctccccaagtggtttccacatgctctgagaagaggagccctcatcttgaagggcccaggagggtctatggggagaggaactccttggcctagcccaccctgctgccttctgacggccctgcaatgtatcccttctcacagcacatgctggccagcctggggcctggcagggaggtcaggccctggaactctatctgggcctgggctaggggacatcagaggttctttgagggactgcctctgccacactctgacgcaaaaccactttccttttctattccttctggcctttcctctctcctgtttcccttcccttccactgcctctgccttagaggagcccacggctaagaggctgctgaaaaccatctggcctggcctggccctgccctgaggaaggaggggaagctgcagcttgggagagcccctggggcctagactctgtaacatcactatccatgcaccaaactaataaaactttgacgagtca

SEQ ID NO: 192153 - DNA, 714 bp, Artificial Sequence
  derived and/or modified sequence
gccagatgctgactgcctgtcagaattcagtccctacacaccccgccccatgtctgtctgtcttgcttcatggaccactcacaccccagagttccgcctgccttctctgttgcccaccaaacccgtgtgtgtttgttcgttcatatgcaagagcctggccacccagtggctccaccgccctgatggatccactgaatctgtcctggtatgatgatgatctggagaggcagaactggagccggcccttcaacgggtcagacgggaaggcggacagaccccactacaactactatgccacactgctcaccctgctcatcgctgtcatcgtcttcggcaacgtgctggtgtgcatggctgtgtcccgcgagaaggcgctgcagaccaccaccaactacctgatcgtcagcctcgcagtggccgacctcctcgtcgccacactggtcatgccctgggttgtctacctggaggtggtaggtgagtggaaattcagcaggattcactgtgacatcttcgtcactctggacgtcatgatgtgcacggcgagcatcctgaacttgtgtgccatcagcatcgacaggtacacagctgtggccatgcccatgctgtacaatacgcgctacagctccaagcgccgggtcaccgtcatgatctccatcgtctgggtcctgtccttcaccatctcctgcccactcctcttcggactcaataacgcag

SEQ ID NO: 192154 - protein, 348 aa, Artificial Sequence
  derived and/or modified sequence
MPHIDNDVKLDFKDVLLRPKRSTLKSRSEVDLTRSFSFRNSKQTYSGVPIIAANMDTVGTFEMAKVLCKFSLFTAVHKHYSLVQWQEFAGQNPDCLEHLAASSGTGSSDFEQLEQILEAIPQVKYICLDVANGYSEHFVEFVKDVRKRFPQHTIMAGNVVTGEMVEELILSGADIIKVGIGPGSVCTTRKKTGVGYPQLSAVMECADAAHGLKGHIISDGGCSCPGDVAKAFGAGADFVMLGGMLAGHSESGGELIERDGKKYKLFYGMSSEMAMKKYAGGVAEYRASEGKTVEVPFKGDVEHTIRDILGGIRSTCTYVGAAKLKELSRRTTFIRVTQQVNPIFSEAC

SEQ ID NO: 192155 - protein, 366 aa, Artificial Sequence
  derived and/or modified sequence
MTSCLPALRFIATPRLSAMPHIDNDVKLDFKDVLLRPKRSTLKSRSEVDLTRSFSFRNSKQTYSGVPIIAANMDTVGTFEMAKVLCKFSLFTAVHKHYSLVQWQEFAGQNPDCLEHLAASSGTGSSDFEQLEQILEAIPQVKYICLDVANGYSEHFVEFVKDVRKRFPQHTIMAGNVVTGEMVEELILSGADIIKVGIGPGSVCTTRKKTGVGYPQLSAVMECADAAHGLKGHIISDGGCSCPGDVAKAFGAGADFVMLGGMLAGHSESGGELIERDGKKYKLFYGMSSEMAMKKYAGGVAEYRASEGKTVEVPFKGDVEHTIRDILGGIRSTCTYVGAAKLKELSRRTTFIRVTQQVNPIFSEAC

SEQ ID NO: 192156 - DNA, 1101 bp, Artificial Sequence
  derived and/or modified sequence
atgacttcctgcttacccgcgcttcggttcattgccactcctcggctgtctgccatgcctcatatcgacaatgatgtgaaactggattttaaagacgtgctgctccgccctaaacggagcacactgaaaagcagatccgaggtcgacttaacccggagcttttcattcagaaacagcaagcagacctactccggagtcccaatcattgcagccaacatggatactgtgggtacctttgagatggcaaaagtgctctgcaaatttagtctttttactgcggtgcacaagcactatagcttggtccagtggcaagagttcgcgggccagaatcccgactgcctggagcacctggcggcctcctctggcaccggaagttccgattttgagcagctcgagcagatcctggaggctatcccccaagtcaagtatatttgcctcgatgtagcaaacggctactctgagcattttgtggaattcgttaaagatgtcagaaagaggttccctcagcatactattatggccggtaatgttgtaaccggggagatggtagaggagctgatattaagcggtgctgacataattaaggtgggaatagggcctgggtctgtgtgtactacacggaagaagactggtgtgggctacccccaacttagcgctgtgatggaatgtgccgacgccgcgcacggtttaaaggggcacataatcagcgatggaggttgctcctgtcctggggatgtggcaaaagccttcggtgcaggggccgatttcgtaatgttgggtggcatgctggccgggcactcagagtctgggggggagttaattgaacgagatggcaaaaagtacaaactcttttacggcatgtcttccgagatggccatgaagaaatacgcgggcggagttgccgagtaccgggccagtgagggcaaaaccgtggaggtgcctttcaaaggtgacgttgagcatacaattcgcgacattcttgggggaattaggtccacatgcacctacgtcggggccgcaaagctgaaggaactgtcaaggcggactaccttcattcgtgtaacccagcaagtgaatcctatttttagtgaggcctgctag

SEQ ID NO: 192157 - DNA, 1972 bp, Artificial Sequence
  derived and/or modified sequence
aaaggctcagggttgctcccgcgtttcggttcagtgacgtcgtaaattggaatgaggcatccagtttagcaacagcagagatgacgactctgcgattctgagagtccctggcgagcccgggctagcgaaaagtgggggcagaacgaactacatctcccatcgtgccaggaggcggtcccgcccgtttccccctgggagttgtagtctaaccccctcggatccaacagcaacctcagtgcgtgaactctgttatccagaaggcctcgccctgccgccgccgaagctggaattcgtcggctagtagttctcgccggcaactagaggaacctgttggcgtggcccagaaggcttagcgggattgcacgaggttagttgctaagcaaggtggtctttggtcaactgccgcctggaccaaggcaacaggaaccctcagattcatcgctaccccgaggctaagcgccatgcctcatattgacaacgatgtgaaactggacttcaaggatgtccttttgaggcccaaacgcagtacccttaagtctcgaagtgaggtggatctcacaagatccttttcatttcggaactcaaagcagacatactctggggttcccatcattgctgccaatatggatactgtgggcacctttgagatggccaaggttctctgtaagttctctctcttcactgctgtccataagcactatagcctcgttcagtggcaagagtttgctggccagaatcctgactgtcttgagcatctggctgccagctcaggcacaggctcttctgactttgagcagctggaacagatcctggaagctattccccaggtgaagtatatatgcctggatgtggcaaatggctactctgaacactttgttgaatttgtaaaagatgtacggaagcgcttcccccagcacaccatcatggcagggaatgtggtaacaggagagatggtagaagagctcatcctttctggggctgacatcatcaaagtgggaattgggccaggctctgtgtgtactactcggaagaaaactggagtggggtatccacagctcagcgcagtgatggagtgtgcagatgctgctcatggcctcaaaggccacatcatttcagatggaggttgcagctgtcctggggatgtggccaaggcttttggggcaggagctgacttcgtgatgctgggtggcatgctggctgggcacagtgagtcaggtggtgagctcatcgagagggatggcaagaagtacaagctcttctatggaatgagttctgaaatggccatgaagaagtatgctgggggcgtggctgagtacagagcctcagagggaaagacagtggaagttccttttaaaggagatgtggaacataccatccgagacatcctaggagggatccgctctacgtgtacctatgtgggagcagctaagctcaaagagttgagcaggagaactaccttcatccgagtcacccagcaggtgaatccaatcttcagtgaggcgtgctagacctgagcagttctaccctcccaaggcaccagtactctaccatggggcatcccaagtggggtcctcacccatcccagctactgcagctctgtattactttgtcatttcctgttgtctcactcctgagggctcctgcagtaactctgtacttctctatctgcacacacaaaatgcccaaggcactcactggggaggaagcaaggaagcaaacagtctgagaaaatgatgcaagaaaatcaaatgggaatctggggacccaacacaacatcctgaagattattaaaaggaaaagatgctgattggtacataaatcttttacatggccttggtctagaggaggcaggcttttagaatcatgttttgttaatccgcttcactaaattggaccttcacatatctaaaaagctctgaagtgtttgtatatttgaaatacctcaataaagagagagctcattgactgtaaa

SEQ ID NO: 192158 - DNA, 1652 bp, Artificial Sequence
  derived and/or modified sequence
agttatgaaccctccccgccccccgtcgccaacattccttcgttcccctaaatcagcctcttgccccattgctctttgcaggggtagaagaaggaagtgtagcgggccctcagattcatcgctaccccgaggctaagcgccatgcctcatattgacaacgatgtgaaactggacttcaaggatgtccttttgaggcccaaacgcagtacccttaagtctcgaagtgaggtggatctcacaagatccttttcatttcggaactcaaagcagacatactctggggttcccatcattgctgccaatatggatactgtgggcacctttgagatggccaaggttctctgtaagttctctctcttcactgctgtccataagcactatagcctcgttcagtggcaagagtttgctggccagaatcctgactgtcttgagcatctggctgccagctcaggcacaggctcttctgactttgagcagctggaacagatcctggaagctattccccaggtgaagtatatatgcctggatgtggcaaatggctactctgaacactttgttgaatttgtaaaagatgtacggaagcgcttcccccagcacaccatcatggcagggaatgtggtaacaggagagatggtagaagagctcatcctttctggggctgacatcatcaaagtgggaattgggccaggctctgtgtgtactactcggaagaaaactggagtggggtatccacagctcagcgcagtgatggagtgtgcagatgctgctcatggcctcaaaggccacatcatttcagatggaggttgcagctgtcctggggatgtggccaaggcttttggggcaggagctgacttcgtgatgctgggtggcatgctggctgggcacagtgagtcaggtggtgagctcatcgagagggatggcaagaagtacaagctcttctatggaatgagttctgaaatggccatgaagaagtatgctgggggcgtggctgagtacagagcctcagagggaaagacagtggaagttccttttaaaggagatgtggaacataccatccgagacatcctaggagggatccgctctacgtgtacctatgtgggagcagctaagctcaaagagttgagcaggagaactaccttcatccgagtcacccagcaggtgaatccaatcttcagtgaggcgtgctagacctgagcagttctaccctcccaaggcaccagtactctaccatggggcatcccaagtggggtcctcacccatcccagctactgcagctctgtattactttgtcatttcctgttgtctcactcctgagggctcctgcagtaactctgtacttctctatctgcacacacaaaatgcccaaggcactcactggggaggaagcaaggaagcaaacagtctgagaaaatgatgcaagaaaatcaaatgggaatctggggacccaacacaacatcctgaagattattaaaaggaaaagatgctgattggtacataaatcttttacatggccttggtctagaggaggcaggcttttagaatcatgttttgttaatccgcttcactaaattggaccttcacatatctaaaaagctctgaagtgtttgtatatttgaaatacctcaataaagagagagctcattgactgtaaa

SEQ ID NO: 192159 - DNA, 1864 bp, Artificial Sequence
  derived and/or modified sequence
caacattccttcgttcccctaaatcagcctcttgccccattgctctttgcaggggtagaagaaggaagtgtagcggggtaaggaatgcaccgtcagggtctctcacaaccctttcccagctctcctccccaacaaacagtacctgggatggagccctagggtaatcgcagccacgggatgggtcgaggtgacaggcttcagggaccacacttcggcctttgcccgaccttccacaacttaagcgaagagaggccaccagccgtaacagggcgttaaagcccaggggaagattggtccttatgacttcctgccttccagccctcagattcatcgctaccccgaggctaagcgccatgcctcatattgacaacgatgtgaaactggacttcaaggatgtccttttgaggcccaaacgcagtacccttaagtctcgaagtgaggtggatctcacaagatccttttcatttcggaactcaaagcagacatactctggggttcccatcattgctgccaatatggatactgtgggcacctttgagatggccaaggttctctgtaagttctctctcttcactgctgtccataagcactatagcctcgttcagtggcaagagtttgctggccagaatcctgactgtcttgagcatctggctgccagctcaggcacaggctcttctgactttgagcagctggaacagatcctggaagctattccccaggtgaagtatatatgcctggatgtggcaaatggctactctgaacactttgttgaatttgtaaaagatgtacggaagcgcttcccccagcacaccatcatggcagggaatgtggtaacaggagagatggtagaagagctcatcctttctggggctgacatcatcaaagtgggaattgggccaggctctgtgtgtactactcggaagaaaactggagtggggtatccacagctcagcgcagtgatggagtgtgcagatgctgctcatggcctcaaaggccacatcatttcagatggaggttgcagctgtcctggggatgtggccaaggcttttggggcaggagctgacttcgtgatgctgggtggcatgctggctgggcacagtgagtcaggtggtgagctcatcgagagggatggcaagaagtacaagctcttctatggaatgagttctgaaatggccatgaagaagtatgctgggggcgtggctgagtacagagcctcagagggaaagacagtggaagttccttttaaaggagatgtggaacataccatccgagacatcctaggagggatccgctctacgtgtacctatgtgggagcagctaagctcaaagagttgagcaggagaactaccttcatccgagtcacccagcaggtgaatccaatcttcagtgaggcgtgctagacctgagcagttctaccctcccaaggcaccagtactctaccatggggcatcccaagtggggtcctcacccatcccagctactgcagctctgtattactttgtcatttcctgttgtctcactcctgagggctcctgcagtaactctgtacttctctatctgcacacacaaaatgcccaaggcactcactggggaggaagcaaggaagcaaacagtctgagaaaatgatgcaagaaaatcaaatgggaatctggggacccaacacaacatcctgaagattattaaaaggaaaagatgctgattggtacataaatcttttacatggccttggtctagaggaggcaggcttttagaatcatgttttgttaatccgcttcactaaattggaccttcacatatctaaaaagctctgaagtgtttgtatatttgaaatacctcaataaagagagagctcattgactgtaaa

SEQ ID NO: 192160 - DNA, 1855 bp, Artificial Sequence
  derived and/or modified sequence
ggcatccagtttagcaacagcagagatgacgactctgcgattctgagagtccctggcgagcccgggctagcgaaaagtgggggcagaacgaactacatctcccatcgtgccaggaggcggtcccgcccgtttccccctgggagttgtagtctaaccccctcggatccaacagcaacctcagtgcgtgaactctgttatccagaaggcctcgccctgccgccgccgaagctggaattcgtcggctagtagttctcgccggcaactagaggaacctgttggcgtggcccagaaggcttagcgggattgcacgagccctcagattcatcgctaccccgaggctaagcgccatgcctcatattgacaacgatgtgaaactggacttcaaggatgtccttttgaggcccaaacgcagtacccttaagtctcgaagtgaggtggatctcacaagatccttttcatttcggaactcaaagcagacatactctggggttcccatcattgctgccaatatggatactgtgggcacctttgagatggccaaggttctctgtaagttctctctcttcactgctgtccataagcactatagcctcgttcagtggcaagagtttgctggccagaatcctgactgtcttgagagcatctggctgccagctcaggcacaggctcttctgactttgagcagctggaacagatcctggaagctattccccaggaagtatatatgcctggatgtggcaaatggctactctgaacactttgttgaatttgtaaaagatgtacggaagcgcttcccccagcacaccatcatggcagggaatgtggtaacaggagagatggtagaagagctcatcctttctggggctgacatcatcaaagtgggaattgggccaggctctgtgtgtactactcggaagaaaactggagtggggtatccacagctcagcgcagtgatggagtgtgcagatgctgctcatggcctcaaaggccacatcatttcagatggaggttgcagctgtcctggggatgtggccaaggcttttggggcaggagctgacttcgtgatgctgggtggcatgctggctgggcacagtgagtcaggtggtgagctcatcgagagggatggcaagaagtacaagctcttctatggaatgagttctgaaatggccatgaagaagtatgctgggggcgtggctgagtacagagcctcagagggaaagacagtggaagttccttttaaaggagatgtggaacataccatccgagacatcctaggagggatccgctctacgtgtacctatgtgggagcagctaagctcaaagagttgagcaggagaactaccttcatccgagtcacccagcaggtgaatccaatcttcagtgaggcgtgctagacctgagcagttctaccctcccaaggcaccagtactctaccatggggcatcccaagtggggtcctcacccatcccagctactgcagctctgtattactttgtcatttcctgttgtctcactcctgagggctcctgcagtaactctgtacttctctatctgcacacacaaaatgcccaaggcactcactggggaggaagcaaggaagcaaacagtctgagaaaatgatgcaagaaaatcaaatgggaatctggggacccaacacaacatcctgaagattattaaaaggaaaagatgctgattggtacataaatcttttacatggccttggtctagaggaggcaggcttttagaatcatgttttgttaatccgcttcactaaattggaccttcacatatctaaaaagctctgaagtgtttgtatatttgaaatacctcaataaagagagagctcattgactgt

SEQ ID NO: 192161 - DNA, 1893 bp, Artificial Sequence
  derived and/or modified sequence
gcgtttcggttcagtgacgtcgtaaattggaatgaggcatccagtttagcaacagcagagatgacgactctgcgattctgagagtccctggcgagcccgggctagcgaaaagtgggggcagaacgaactacatctcccatcgtgccaggaggcggtcccgcccgtttccccctgggagttgtagtctaaccccctcggatccaacagcaacctcagtgcgtgaactctgttatccagaaggcctcgccctgccgccgccgaagctggaattcgtcggctagtagttctcgccggcaactagaggaacctgttggcgtggcccagaaggcttagcgggattgcacgagccctcagattcatcgctaccccgaggctaagcgccatgcctcatattgacaacgatgtgaaactggacttcaaggatgtccttttgaggcccaaacgcagtacccttaagtctcgaagtgaggtggatctcacaagatccttttcatttcggaactcaaagcagacatactctggggttcccatcattgctgccaatatggatactgtgggcacctttgagatggccaaggttctctgtaagttctctctcttcactgctgtccataagcactatagcctcgttcagtggcaagagtttgctggccagaatcctgactgtcttgagcatctggctgccagctcaggcacaggctcttctgactttgagcagctggaacagatcctggaagctattccccaggtgaagtatatatgcctggatgtggcaaatggctactctgaacactttgttgaatttgtaaaagatgtacggaagcgcttcccccagcacaccatcatggcagggaatgtggtaacaggagagatggtagaagagctcatcctttctggggctgacatcatcaaagtgggaattgggccaggctctgtgtgtactactcggaagaaaactggagtggggtatccacagctcagcgcagtgatggagtgtgcagatgctgctcatggcctcaaaggccacatcatttcagatggaggttgcagctgtcctggggatgtggccaaggcttttggggcaggagctgacttcgtgatgctgggtggcatgctggctgggcacagtgagtcaggtggtgagctcatcgagagggatggcaagaagtacaagctcttctatggaatgagttctgaaatggccatgaagaagtatgctgggggcgtggctgagtacagagcctcagagggaaagacagtggaagttccttttaaaggagatgtggaacataccatccgagacatcctaggagggatccgctctacgtgtacctatgtgggagcagctaagctcaaagagttgagcaggagaactaccttcatccgagtcacccagcaggtgaatccaatcttcagtgaggcgtgctagacctgagcagttctaccctcccaaggcaccagtactctaccatggggcatcccaagtggggtcctcacccatcccagctactgcagctctgtattactttgtcatttcctgttgtctcactcctgagggctcctgcagtaactctgtacttctctatctgcacacacaaaatgcccaaggcactcactggggaggaagcaaggaagcaaacagtctgagaaaatgatgcaagaaaatcaaatgggaatctggggacccaacacaacatcctgaagattattaaaaggaaaagatgctgattggtacataaatcttttacatggccttggtctagaggaggcaggcttttagaatcatgttttgttaatccgcttcactaaattggaccttcacatatctaaaaagctctgaagtgtttgtatatttgaaatacctcaataaagagagagctcattgactgtaaa

SEQ ID NO: 192162 - DNA, 1101 bp, Artificial Sequence
  derived and/or modified sequence
atgaccagctgcctgcctgccctgcgcttcatcgccaccccccggctgagcgccatgccccacatcgacaatgatgtgaagctggacttcaaggatgtgctgctgcggcccaagaggagcaccctgaagagccgctctgaggtggacctgaccaggagcttctccttcaggaacagcaagcagacctacagcggcgtgcccatcatcgccgccaacatggacacagtgggcacctttgagatggccaaggtgctgtgcaagttcagcctcttcaccgctgtgcacaagcactacagcctggtgcagtggcaggagtttgctggccagaacccagactgcctggagcacctggccgccagcagcggcaccggcagcagtgactttgagcagctggagcagatcctggaggccatcccccaggtgaagtacatctgcctggatgtggccaacggctacagcgagcactttgtggagtttgtgaaggatgtgaggaagcgcttcccccagcacaccatcatggctggaaatgtggtgactggagagatggtggaggagctgatcctgtctggagctgacatcatcaaggtgggcatcggccctggctctgtgtgcaccaccaggaagaagacaggagtgggctacccccagctgtctgctgtgatggagtgtgctgatgctgcccacggcctgaagggccacatcatcagtgatggcggctgcagctgccctggagatgtggccaaggccttcggggccggggctgactttgtgatgctgggcggcatgctggccggccacagcgagagcggcggggagctgattgaaagagatggcaagaagtacaagctgttctacggcatgagcagcgagatggccatgaagaagtatgctgggggcgtggccgagtaccgggccagcgagggcaagacagtggaggtgcccttcaagggagatgtggagcacaccatccgggacatcctgggcggcatccgcagcacctgcacctacgtgggcgccgccaagctgaaggagctgagcaggaggaccaccttcatccgggtgacccagcaggtgaaccccatcttcagcgaggcctgctag

SEQ ID NO: 192163 - DNA, 1101 bp, Artificial Sequence
  derived and/or modified sequence
atgaccagctgcctgcccgccctgcggttcatcgccaccccccggttgagtgccatgccacatatagataacgacgttaagctcgacttcaaggatgttctgctgcgtccaaagcggtctacactgaagtcacgttctgaagttgatcttacccgcagcttttctttccgcaacagcaaacaaacttatagcggggtgcctattatcgcagccaacatggatactgtaggtacatttgaaatggccaaggtcctgtgcaagttttctctgtttacagccgtccacaaacattactccctcgtccaatggcaggaatttgcgggccagaacccagactgtcttgaacacctggccgcaagttcaggtaccgggtcttccgattttgaacaactggagcaaattctcgaagccattccccaggtgaagtatatttgcctcgacgtcgctaacggctacagcgagcatttcgtcgaatttgtcaaagacgttcgtaagaggttccctcagcacactataatggccgggaacgtggtgaccggagaaatggttgaagaactcattctgagtggagctgatattatcaaagtgggtattgggcccggcagcgtatgtaccacccggaagaaaaccggggtgggttacccacagctcagtgcagtaatggaatgtgccgatgccgcccatgggctcaaggggcacataatcagtgatggtggatgctcatgtcccggtgacgtggccaaagcattcggcgcaggcgccgattttgtgatgctcggcggcatgctcgctgggcactccgagtcaggcggagagctgatcgagagggatggaaagaaatacaaactgttctacggaatgtccagtgaaatggccatgaaaaagtatgccggcggtgttgcagagtaccgagctagcgagggaaaaacagtggaagtgcccttcaagggggacgttgaacatacaatcagggatatactgggaggaatacggagcacctgcacgtatgtgggcgcagccaaattgaaggaactatcccgccggactacattcattagagtcacacagcaggtcaatcctatattttcagaagcgtgctag

SEQ ID NO: 192164 - DNA, 1101 bp, Artificial Sequence
  derived and/or modified sequence
atgacatcgtgtctccctgctctgcggttcatcgcaactccacgcctttccgccatgccccacatagataacgatgtaaagctggacttcaaggacgttctcctcaggccaaagcgatcgacgcttaagtccagatcagaagtcgaccttactcgtagcttttccttccggaactccaagcagacttacagcggcgttccaattatcgctgccaacatggacacagtgggtacttttgagatggccaaagtgctgtgtaagttttcactctttaccgcggtccataagcactatagtctggttcagtggcaagaattcgctgggcagaatcccgattgcttggagcatttggccgcatcctcgggcacagggagctccgactttgaacagctggaacaaatcttggaggctattccccaggttaagtacatttgcttggatgttgccaacgggtacagtgagcactttgtggaatttgtaaaagatgtgcggaaaagatttccacagcataccatcatggctggcaacgttgtgaccggcgagatggtggaggagcttatcctgtccggcgctgacattatcaaggttggaatcggcccaggctcagtctgcactacccgcaagaagacgggcgtcggatacccgcagctgagtgcagtgatggaatgtgcagacgcggctcatggactgaagggccatatcatctctgacgggggatgctcatgccccggagacgttgccaaagcattcggggctggggctgatttcgtgatgctgggaggaatgttggccggacattctgaatctggcggtgagctaatcgagcgggacggtaagaagtataagctgttttatggaatgagttccgaaatggccatgaagaaatacgcgggaggagtggcagagtaccgggcatcagaaggaaaaaccgtcgaggtccccttcaaaggtgacgtagagcacacaatccgcgatatcctgggcggtattagaagtacctgcacctacgtgggtgctgcaaagcttaaggagctttcacggcgaactacatttattagggtgacccaacaggtgaatcccattttcagcgaagcatgctag

SEQ ID NO: 192165 - DNA, 1101 bp, Artificial Sequence
  derived and/or modified sequence
atgaccagctgcctgcccgccctgagattcatcgccacccccagactgagcgccatgccccacatcgacaacgacgtgaagctggacttcaaggacgtgctgctgagacccaagagaagcaccctgaagagcagaagcgaggtggacctgaccagaagcttcagcttcagaaacagcaagcagacctacagcggcgtgcccatcatcgccgccaacatggacaccgtgggcaccttcgagatggccaaggtgctgtgcaagttcagcctgttcaccgccgtgcacaagcactacagcctggtgcagtggcaggagttcgccggccagaaccccgactgcctggagcacctggccgccagcagcggcaccggcagcagcgacttcgagcagctggagcagatcctggaggccatcccccaggtgaagtacatctgcctggacgtggccaacggctacagcgagcacttcgtggagttcgtgaaggacgtgagaaagagattcccccagcacaccatcatggccggcaacgtggtgaccggcgagatggtggaggagctgatcctgagcggcgccgacatcatcaaggtgggcatcggccccggcagcgtgtgcaccaccagaaagaagaccggcgtgggctacccccagctgagcgccgtgatggagtgcgccgacgccgcccacggcctgaagggccacatcatcagcgacggcggctgcagctgccccggcgacgtggccaaggccttcggcgccggcgccgacttcgtgatgctgggcggcatgctggccggccacagcgagagcggcggcgagctgatcgagagagacggcaagaagtacaagctgttctacggcatgagcagcgagatggccatgaagaagtacgccggcggcgtggccgagtacagagccagcgagggcaagaccgtggaggtgcccttcaagggcgacgtggagcacaccatcagagacatcctgggcggcatcagaagcacctgcacctacgtgggcgccgccaagctgaaggagctgagcagaagaaccaccttcatcagagtgacccagcaggtgaaccccatcttcagcgaggcctgctag

SEQ ID NO: 192166 - protein, 208 aa, Artificial Sequence
  derived and/or modified sequence
MSAGGDFGNPLRKFKLVFLGEQSVGKTSLITRFMYDSFDNTYQATIGIDFLSKTMYLEDRTVRLQLWDTAGQERFRSLIPSYIRDSTVAVVVYDITNLNSFQQTSKWIDDVRTERGSDVIIMLVGNKTDLADKRQITIEEGEQRAKELSVMFIETSAKTGYNVKQLFRRVASALPGMENVQEKSKEGMIDIKLDKPQEPPASEGGCSC

SEQ ID NO: 192167 - DNA, 627 bp, Artificial Sequence
  derived and/or modified sequence
atgtccgcaggtggtgatttcggcaaccccctgcgaaaattcaaactggtttttctgggagaacaatccgtcggaaagacttctcttataaccaggtttatgtatgacagcttcgacaacacttatcaggccactattggaatagatttcctgtcaaagaccatgtacctcgaagatcgaacagtgcgcctgcagctttgggacaccgcaggacaggagcggttcaggtctctgataccgtcctacatcagagactctaccgtggctgtggtagtgtacgatattactaacttgaactcttttcagcagacatccaaatggatcgatgacgtacgaactgagcgcggcagtgacgtgattattatgctcgtgggtaataaaacagacctggcagacaagaggcaaataactatcgaggaaggtgaacaaagggccaaagagctcagcgtcatgttcatcgagacctctgccaagaccggctataacgtaaagcagctgttccgaagagtcgcaagtgcattacccggcatggagaacgtgcaagaaaaatctaaggagggtatgatcgatatcaagttggataaaccccaagagccccccgctagtgaagggggttgcagttgctag

SEQ ID NO: 192168 - DNA, 627 bp, Artificial Sequence
  derived and/or modified sequence
atgtctgcaggcggagattttggcaacccccttagaaagtttaagctggtgtttctcggcgaacagagtgtcggaaagacatcactgattacgagatttatgtacgactcattcgacaacacatatcaggccaccatcgggatcgactttttgtctaaaacaatgtaccttgaggacagaacagtcaggctacagctgtgggatactgctgggcaagagagatttagatccctcattcccagctatataagagattctacagtggcagtggtcgtgtacgatataacaaacttaaatagctttcaacaaacaagcaagtggattgatgatgtgagaacggagcgtggtagcgacgtgataatcatgttagtgggaaacaagaccgacctggcagataaacgccagatcacaatcgaggagggcgaacaaagagccaaagagttatccgtcatgttcattgagacatctgccaaaaccggctacaacgtcaagcagctttttagacgggtagcgtccgcactacccgggatggaaaatgtacaggaaaagtccaaagaggggatgattgatatcaaactggacaagcctcaggaacctccagcaagcgagggaggctgttcttgctag

SEQ ID NO: 192169 - DNA, 627 bp, Artificial Sequence
  derived and/or modified sequence
atgtctgctggaggagactttggaaaccccctgaggaagttcaagctggtgttcctgggggagcagagcgtgggcaagaccagcctcatcacccgcttcatgtatgacagctttgacaacacctaccaggccaccatcggcatcgacttcctgagcaagaccatgtacctggaggacagaacagtgcggctgcagctgtgggacacagctggccaggagcgcttccgcagcctcatccccagctacatccgggacagcacagtggccgtggtggtgtatgacatcaccaacctgaacagcttccagcagaccagcaagtggattgatgatgtgaggacagagcggggcagtgatgtgatcatcatgctggtgggcaacaagacagacctggccgacaagaggcagatcaccatcgaggagggggagcagagggccaaggagctgtctgtgatgtttattgagaccagcgccaagacaggctacaacgtgaagcagctgttccggcgggtggccagcgccctgcccggcatggagaatgtgcaggagaagagcaaggagggcatgattgacatcaagctggacaagccccaggagcccccagccagcgagggcggctgcagctgctag

SEQ ID NO: 192170 - DNA, 627 bp, Artificial Sequence
  derived and/or modified sequence
atgagcgccggcggcgacttcggcaaccccctgcggaagttcaagttggtcttccttggcgagcagtctgtcggaaaaacctccctgataacccgcttcatgtatgactctttcgacaatacataccaagcaaccattggtatcgactttctatccaagaccatgtaccttgaagatcgcaccgttaggctgcagctgtgggacaccgctggccaggagagattcaggtctctgattcccagttatatacgggacagtaccgttgctgttgtggtgtacgacatcacaaacctgaacagctttcagcagactagcaaatggatcgacgacgtgcgaactgagcgtggctccgacgtgatcattatgttggtgggcaacaagactgatctcgctgacaagagacaaattaccattgaagaaggagaacaacgcgcaaaagaactgtctgtgatgttcatcgaaacctccgctaagactgggtataacgtgaagcagctatttcgaagggtggcctccgctctgcctggcatggagaacgtccaggagaaatccaaggaaggaatgatcgatataaagcttgacaaaccccaagagccacctgcctccgaagggggctgctcctgttag

SEQ ID NO: 192171 - DNA, 627 bp, Artificial Sequence
  derived and/or modified sequence
atgagcgccggcggcgacttcggcaaccccctgcggaagttcaagctggtgttcttaggcgagcagagcgtcggcaagacctctctgattaccaggttcatgtatgactcatttgacaacacttaccaggctactattggtatagactttctgagtaagaccatgtacctagaggacagaactgtccgcctgcagctatgggatacagcaggccaagagagatttagaagcctgatcccatcatacatccgtgattcaaccgtcgcggtcgtcgtgtatgatataaccaatctgaactccttccagcagactagtaagtggatcgacgacgtgaggaccgagcggggctcagacgtcattataatgcttgtcggaaataagactgacctggcggacaaacgccagatcacaatcgaagagggcgagcagcgggcgaaggaactctctgtgatgtttattgaaactagtgccaaaactggatacaatgtcaaacagctctttcgcagggtggcctctgctctacctgggatggaaaacgtgcaggagaaaagcaaagagggcatgattgatattaaacttgataagcctcaggagcctcctgcttccgagggtgggtgttcgtgctag

SEQ ID NO: 192172 - DNA, 627 bp, Artificial Sequence
  derived and/or modified sequence
atgtcagccggaggcgatttcggcaatcccttgaggaagtttaaacttgtgtttctgggcgaacagtccgttgggaaaacaagtctcatcacacgtttcatgtacgatagcttcgacaacacctatcaggccacaattggcatcgacttcttgtccaaaaccatgtacctggaggaccgcaccgttcgtctccagctttgggatactgcaggacaggagaggttcagatctctgatcccctcttatatcagagattccacagtagcagtagtggtttatgacattactaacctgaatagtttccagcaaacctctaaatggatcgatgacgtgaggactgagagggggagcgatgtgattataatgctggtggggaataaaaccgacctggccgataagaggcagatcaccatagaggagggagaacaaagggccaaggagctttccgtgatgttcattgaaacctcggcaaaaactggatacaatgtaaagcaattattccgccgagtggcatctgccctgccgggaatggagaatgtgcaggagaaatccaaagagggcatgatagatatcaagctggacaagccacaggagccgccagctagcgaagggggatgtagctgctag

SEQ ID NO: 192173 - DNA, 627 bp, Artificial Sequence
  derived and/or modified sequence
atgagcgcaggcggtgacttcggaaacccgctcagaaaattcaagctcgtgttcctgggcgagcaatccgtgggcaagacttccttgattacaagattcatgtatgactccttcgacaatacgtatcaagctactatcgggatcgacttcctgtctaaaacgatgtatctcgaagatcgcacagtccgcctgcagctgtgggacacagcagggcaggagagatttaggagcctcattccttcatatatccgggatagcactgtcgctgtcgtggtctatgacattacaaatctcaactcattccaacagacctctaaatggattgacgatgttcgcactgagagagggagcgacgtaataatcatgttggtcgggaacaagacagacctggctgacaaaaggcagattaccatagaggaaggagagcagagagccaaggagctgtctgtaatgtttatcgagacctcggctaagacaggatataatgtgaaacaactgtttaggagagttgctagcgcactgcctggcatggagaacgtgcaggagaaatccaaggagggcatgatcgatatcaaactggacaagccccaggaaccccctgcctccgagggaggatgctcttgttag

SEQ ID NO: 192174 - DNA, 5219 bp, Artificial Sequence
  derived and/or modified sequence
acgcgcgcagccagcccttccccctccggctcccgcaccgccggccgcctcccctcgccctcctactctcccctccctgctccttcgctttttcctcctcctcctctcccggccccggctgccagcaccatgtccgcagggggagattttgggaatccactgagaaaattcaagttggtgttcttgggggagcagagcgtcgggaagacgtctctgattacgaggttcatgtacgacagcttcgacaacacataccaggcaaccattgggattgacttcttgtcaaaaaccatgtacttggaggaccgcacggtgcgactgcagctctgggacacagctggtcaggagaggttccgcagcctgatccccagctacatccgggactccacggtggctgtggtggtgtacgacatcacaaatctcaactccttccaacagacctctaagtggatcgacgacgtcaggacagagaggggcagtgatgttatcatcatgctggtgggcaacaagacggacctggctgataagaggcagataaccatcgaggagggggagcagcgcgccaaagaactgagcgtcatgttcattgagaccagtgcgaagactggctacaacgtgaagcagctttttcgacgtgtggcgtcggctctacccggaatggagaatgtccaggagaaaagcaaagaagggatgatcgacatcaagctggacaaaccccaggagcccccggccagcgagggcggctgctcctgctaatgcagagccgacctgtggcttcccatgacactccttgcttgttgtgttgcttcctattggctagcttcctaaggggggagggaaccgagttatcaagatgggaggatttttcttttctctctgtctttaggagtagggtgggatggggagggaggctgggcatcagggatcacatcactcttaacggctgttacttaaacaactattttttggtttggttgtaatatattgtactttattaagattgccaaaaactgttaaaatttaaaaaaaatttaaatcatgtgtatacaattttttgccagataaaaatgtagtcatttttatttgaaagatgtgctttttgtttttgtatatttgtaaacttatagagaaccttttccacacacctcctccttcctgttctctttgaaccattcatcacctctgccttcctcctatccccagcccaataaattaaaacaattaactgagcaaattaattaggcttcagtctggggccatctggccccactctctaggccctactccagttaaatcaaacattggttgaacacatcagcctctgaaaaggtagctctgactcttgtctttccatggccagagtgggtcgtcaacctcgtgtggagctgagaccaaggtctgtgggctctaggcagcccggcagcagcccccagaggaactgctcccacctctccttctctttccctgaaaagccttgaagggggttgagggtacaggcaaccttgtgttctctgtgccctcagggactggcagagcaagaggccatcagaaggacgaggtgctgttggcaattgcagctgcgtggtgcgtggtttatagactggggtgccatgtgtacttctgaaaatattttaaccagcccacccagcagtcagtacacatgcctgggccaagtctaagaaactcagtgtgtgatgttgggcagtgtgccatcctgaagccttcctcctggatgtcagggaagctggaccacctggagttgatcctctgtgatggggaggcgggggggggggggggtgttgtctgcagaaccaccaccttgaaagatccatgttcttagagcctcagctgctaatattgttgagtgctttctggaaaagctgatttgttgctatgttttcaccccagtggcatggcgcagttgaagtctttgtggacatatctttgtggctactgtggctgcgctgtggtcacctgaggatgtggttcaggtggggtctccagaaggctgcttgcccccagagagccatctcttccatttttgattcattcctgagaatggcttagtcctgagaatctgcaaagtctctgaagagaactctctcttcccactaagtgagtctggccaaaatgtaaaccccaccctccctgctgtcattggctctccctccaggctgctgctgggcatgtcatagatgggatgaatgaccatctggggtatggtgggctgaactccacaaggtcgttggaatgaattttgaaacttctcagaaattaatctgaaatggcaggcagtaagtgcagcagaatctggcaggactgatatttgtgcagtgggcctgccacacaccctctgcctaggaggctgtatgccagagctcatctctagcaaggaatttatcttcaggtgaagaagagaggaagcaggatcccactgagcacctcttgcagaaggcaaggaccaatgtttgaacgtgtttcagatgtcatgtgtttagtttttatatgtgtgtacataattatatatagagatagacttgtgtatacaccttccacaaacacatcctcacggagatacatgtgctcaatgtatattcttgtttctcctgctctcaagttggaacttgcattgtgataagttttggaaattcaaaagtactgcaacgtgttgaaataagaaatacttaatattgtcaaataacttgtgattgtcttgccatcaataaaataatgcatagttgtgttaaactacaggcaaacatagcccacgggaatatctccaccatttctctatgtactttatatgcacgggtgtgcatgcctgtgtgggccagtgtccccccaccatgggcacacccccaagtggtgcttgttggaagagtgcttacttacctcgagagaatttacaggagtccacatgacagtgtcctgcctggttggcagcgggggccatcacctgtggcctctgagaccgccccatttacaggaatctgcactgggtctcagtgaatgaacgtatggtagatttttattttcttggcactaaagattagcttttttaaaaaaacatcccataaaacagtagaaactcagttcccttctcaggggcacacacatccaaggcaccgtggactgtgtttccatcctggcctagaggagcagtaaaagatagcatttggtttgacatggccttagtgagtcctgcctttcctagcatgcacacaacatcctctctttgagtttgggttctccccagccccttggcctctgaggctgagggtggcttcctcccatcctcccatctcagtggttccatggcgctcccttcggcacgtgcggtttccgcccctcccttcctggggtgtggaaaggcagccagacctctttttcagaagttgttggttccctgatttttgtcttgagcaggcaccatccctgtccccttgcttgcaggtagaattggcacagagttaaggttccataataaactgttaggtgctcttgaagaagatgtcatggcattgcctcagcaccccagcaagagcattgcatctttgctgaatccagatgggttagcagagggcaaattggaggattcctttgaggaaatgttctcaattgagcaattcagtccctctccccaaagactagacgtgacctggcagattagcaggatcctcttggccttcttttttggggatggtgggagtgaagggggtgaatcttaaaagcttatcaacaaagctcctgttctgcaggcatcaggaaagttgagtgtaagatggaaaaagcaaacagcctatttacaagtggaaacacattggttctgatcactcctaacttgctgggtgatcatacatacatcaacatgaaggtgtgacatcagaatcatgagcaccatggctgcagttgtgtgatccaaggctagttggcttggtagctgttggcagcagtttcccttggtcagaggcctccttgctatctatcgctgctctcttcttgtcatccttaaacattcagtcatgttcccaggtctgaggggagcaatggccagaccagtttcagtatctctggcaacagaaacaaggattgaaatggtggtagttaagagtgcagacacatctggggtgcaacgtctgcatcatcctggtggctagccagtgcggggaggccctgccctgggataccagttgtgacaataaagggatggccctcctggcttcagcatcctgcaggtagagcagcctcattccttcacaagatggaaggcaggtgaggatgtcaggatgagatgggaccaggtagccgaggacagtgaggcatgtctgagccacttgaggggcagctgaacagaaggatgtctgtgtgcatcaaccgagcagattgtgcgcacactcgtttccgaactgcctctccccaaagaatgtgaggcattgtcaccttgttacagctatgtgaagcagagctgtcacaacttttcctgtctacaggcaggaaaaccaggatggagaagggcaacttgcttattaagatcacccagcaagttaggagtgatcagaaccagtgaagtttccatttttcatccattgctgccctgtgtgtgaacaaatgtgactccatatttattacacagcaaggactgctgtgtgtgggtgtgttcctcagaccatctctactctttttggttaggacactaggttcttcccagcatatgagtgagaatattggtggtattttgggctcctctactgcacaagggccagtccccaagtctactctgattgattgtcatgggcacccacacagatcaggacaccctttgaatttttgtttgacatgaactatttaggtgttccaaaaccttgggatctcaatgtgcaaactccttggactccagacccctgtctggttggcactcccagcagtgtgtggtttcatcaggaaatccttgcagcaggggtttagatggttccttcaggaggtgggaagcctccatagcattgaaggccagcctgcatctcgcggtgtgtgtccacttctcccctcactttcccctcacccatccctttaaagtgattggctgtgaggagcacagagggtggcaattccatctgttatgggctcagaagacatagccgccatgttgatttcacattaaactgtgtaaaatgtggaaaagactcagcatgttggtcaaacaataaactgtcctaattctc

SEQ ID NO: 192175 - DNA, 5526 bp, Artificial Sequence
  derived and/or modified sequence
ctcctccgccccgcgcgccgtccctgcgccccgctccgcccgcgcctctctcccagcgccgcgcctcgggcgtaaagagcgcgcccctcgcaccgcagccagtgccgaccgcagcagcccagccccagccttcctccgcctccgcctctctctcctcctcctcctccgccgccggacacgcagccgcaggccgggaccgggacgcagctggggagtcagggacgcgcgcagccagcccttccccctccggctcccgcaccgccggccgcctcccctcgccctcctactctcccctccctgctccttcgctttttcctcctcctcctctcccggccccggctgccagcaccatgtccgcagggggagattttgggaatccactgagaaaattcaagttggtgttcttgggggagcagagcgtcgggaagacgtctctgattacgaggttcatgtacgacagcttcgacaacacataccaggcaaccattgggattgacttcttgtcaaaaaccatgtacttggaggaccgcacggtgcgactgcagctctgggacacagctggtcaggagaggttccgcagcctgatccccagctacatccgggactccacggtggctgtggtggtgtacgacatcacaaatctcaactccttccaacagacctctaagtggatcgacgacgtcaggacagagaggggcagtgatgttatcatcatgctggtgggcaacaagacggacctggctgataagaggcagataaccatcgaggagggggagcagcgcgccaaagaactgagcgtcatgttcattgagaccagtgcgaagactggctacaacgtgaagcagctttttcgacgtgtggcgtcggctctacccggaatggagaatgtccaggagaaaagcaaagaagggatgatcgacatcaagctggacaaaccccaggagcccccggccagcgagggcggctgctcctgctaatgcagagccgacctgtggcttcccatgacactccttgcttgttgtgttgcttcctattggctagcttcctaaggggggagggaaccgagttatcaagatgggaggatttttcttttctctctgtctttaggagtagggtgggatggggagggaggctgggcatcagggatcacatcactcttaacggctgttacttaaacaactattttttggtttggttgtaatatattgtactttattaagattgccaaaaactgttaaaatttaaaaaaaatttaaatcatgtgtatacaattttttgccagataaaaatgtagtcatttttatttgaaagatgtgctttttgtttttgtatatttgtaaacttatagagaaccttttccacacacctcctccttcctgttctctttgaaccattcatcacctctgccttcctcctatccccagcccaataaattaaaacaattaactgagcaaattaattaggcttcagtctggggccatctggccccactctctaggccctactccagttaaatcaaacattggttgaacacatcagcctctgaaaaggtagctctgactcttgtctttccatggccagagtgggtcgtcaacctcgtgtggagctgagaccaaggtctgtgggctctaggcagcccggcagcagcccccagaggaactgctcccacctctccttctctttccctgaaaagccttgaagggggttgagggtacaggcaaccttgtgttctctgtgccctcagggactggcagagcaagaggccatcagaaggacgaggtgctgttggcaattgcagctgcgtggtgcgtggtttatagactggggtgccatgtgtacttctgaaaatattttaaccagcccacccagcagtcagtacacatgcctgggccaagtctaagaaactcagtgtgtgatgttgggcagtgtgccatcctgaagccttcctcctggatgtcagggaagctggaccacctggagttgatcctctgtgatggggaggcgggggggggggggggtgttgtctgcagaaccaccaccttgaaagatccatgttcttagagcctcagctgctaatattgttgagtgctttctggaaaagctgatttgttgctatgttttcaccccagtggcatggcgcagttgaagtctttgtggacatatctttgtggctactgtggctgcgctgtggtcacctgaggatgtggttcaggtggggtctccagaaggctgcttgcccccagagagccatctcttccatttttgattcattcctgagaatggcttagtcctgagaatctgcaaagtctctgaagagaactctctcttcccactaagtgatataacctacttggccagcattccaaatagactcagactcactgccctgagcctgcacagagccaggtgcaatgggcagtgagtctggccaaaatgtaaaccccaccctccctgctgtcattggctctccctccaggctgctgctgggcatgtcatagatgggatgaatgaccatctggggtatggtgggctgaactccacaaggtcgttggaatgaattttgaaacttctcagaaattaatctgaaatggcaggcagtaagtgcagcagaatctggcaggactgatatttgtgcagtgggcctgccacacaccctctgcctaggaggctgtatgccagagctcatctctagcaaggaatttatcttcaggtgaagaagagaggaagcaggatcccactgagcacctcttgcagaaggcaaggaccaatgtttgaacgtgtttcagatgtcatgtgtttagtttttatatgtgtgtacataattatatatagagatagacttgtgtatacaccttccacaaacacatcctcacggagatacatgtgctcaatgtatattcttgtttctcctgctctcaagttggaacttgcattgtgataagttttggaaattcaaaagtactgcaacgtgttgaaataagaaatacttaatattgtcaaataacttgtgattgtcttgccatcaataaaataatgcatagttgtgttaaactacaggcaaacatagcccacgggaatatctccaccatttctctatgtactttatatgcacgggtgtgcatgcctgtgtgggccagtgtccccccaccatgggcacacccccaagtggtgcttgttggaagagtgcttacttacctcgagagaatttacaggagtccacatgacagtgtcctgcctggttggcagcgggggccatcacctgtggcctctgagaccgccccatttacaggaatctgcactgggtctcagtgaatgaacgtatggtagatttttattttcttggcactaaagattagcttttttaaaaaaacatcccataaaacagtagaaactcagttcccttctcaggggcacacacatccaaggcaccgtggactgtgtttccatcctggcctagaggagcagtaaaagatagcatttggtttgacatggccttagtgagtcctgcctttcctagcatgcacacaacatcctctctttgagtttgggttctccccagccccttggcctctgaggctgagggtggcttcctcccatcctcccatctcagtggttccatggcgctcccttcggcacgtgcggtttccgcccctcccttcctggggtgtggaaaggcagccagacctctttttcagaagttgttggttccctgatttttgtcttgagcaggcaccatccctgtccccttgcttgcaggtagaattggcacagagttaaggttccataataaactgttaggtgctcttgaagaagatgtcatggcattgcctcagcaccccagcaagagcattgcatctttgctgaatccagatgggttagcagagggcaaattggaggattcctttgaggaaatgttctcaattgagcaattcagtccctctccccaaagactagacgtgacctggcagattagcaggatcctcttggccttcttttttggggatggtgggagtgaagggggtgaatcttaaaagcttatcaacaaagctcctgttctgcaggcatcaggaaagttgagtgtaagatggaaaaagcaaacagcctatttacaagtggaaacacattggttctgatcactcctaacttgctgggtgatcatacatacatcaacatgaaggtgtgacatcagaatcatgagcaccatggctgcagttgtgtgatccaaggctagttggcttggtagctgttggcagcagtttcccttggtcagaggcctccttgctatctatcgctgctctcttcttgtcatccttaaacattcagtcatgttcccaggtctgaggggagcaatggccagaccagtttcagtatctctggcaacagaaacaaggattgaaatggtggtagttaagagtgcagacacatctggggtgcaacgtctgcatcatcctggtggctagccagtgcggggaggccctgccctgggataccagttgtgacaataaagggatggccctcctggcttcagcatcctgcaggtagagcagcctcattccttcacaagatggaaggcaggtgaggatgtcaggatgagatgggaccaggtagccgaggacagtgaggcatgtctgagccacttgaggggcagctgaacagaaggatgtctgtgtgcatcaaccgagcagattgtgcgcacactcgtttccgaactgcctctccccaaagaatgtgaggcattgtcaccttgttacagctatgtgaagcagagctgtcacaacttttcctgtctacaggcaggaaaaccaggatggagaagggcaacttgcttattaagatcacccagcaagttaggagtgatcagaaccagtgaagtttccatttttcatccattgctgccctgtgtgtgaacaaatgtgactccatatttattacacagcaaggactgctgtgtgtgggtgtgttcctcagaccatctctactctttttggttaggacactaggttcttcccagcatatgagtgagaatattggtggtattttgggctcctctactgcacaagggccagtccccaagtctactctgattgattgtcatgggcacccacacagatcaggacaccctttgaatttttgtttgacatgaactatttaggtgttccaaaaccttgggatctcaatgtgcaaactccttggactccagacccctgtctggttggcactcccagcagtgtgtggtttcatcaggaaatccttgcagcaggggtttagatggttccttcaggaggtgggaagcctccatagcattgaaggccagcctgcatctcgcggtgtgtgtccacttctcccctcactttcccctcacccatccctttaaagtgattggctgtgaggagcacagagggtggcaattccatctgttatgggctcagaagacatagccgccatgttgatttcacattaaactgtgtaaaatgtggaaaagactcagcatgttggtcaaacaataaactgtcctaattctcaaaa

SEQ ID NO: 192176 - DNA, 627 bp, Artificial Sequence
  derived and/or modified sequence
atgagcgccggcggcgacttcggcaaccccctgagaaagttcaagctggtgttcctgggcgagcagagcgtgggcaagaccagcctgatcaccagattcatgtacgacagcttcgacaacacctaccaggccaccatcggcatcgacttcctgagcaagaccatgtacctggaggacagaaccgtgagactgcagctgtgggacaccgccggccaggagagattcagaagcctgatccccagctacatcagagacagcaccgtggccgtggtggtgtacgacatcaccaacctgaacagcttccagcagaccagcaagtggatcgacgacgtgagaaccgagagaggcagcgacgtgatcatcatgctggtgggcaacaagaccgacctggccgacaagagacagatcaccatcgaggagggcgagcagagagccaaggagctgagcgtgatgttcatcgagaccagcgccaagaccggctacaacgtgaagcagctgttcagaagagtggccagcgccctgcccggcatggagaacgtgcaggagaagagcaaggagggcatgatcgacatcaagctggacaagccccaggagccccccgccagcgagggcggctgcagctgctag

SEQ ID NO: 192177 - DNA, 577 bp, Artificial Sequence
  derived and/or modified sequence
agcaggttgggctgcggcggcggcggcagctgtggaagctcaggcgctgcgcgtgagaggtcccagatacgtctgcggttccggctccgccaccctcagcttctcttccccaggtctgggagccgagtgcggaaggagggaacggccctagctttgggaagccagaggacacccctggctcctgccgacaccgccctccttcccttcccagccgcgggcctcgctcggtgctaggctactctgccgggagagctcggtgcccgcccttccgctcgcctttttcgtcagctggctggagcagcatcggtccgggaggtctctaggctgaggcggcggccgctcctctagttccacaatgtccacgggcggagacttcgggaatccgctgaggaaattcaagctggtgttcctgggggagcaaagcgttggaaagacatctttgatcaccagattcatgtatgacagttttgacaacacctatcaggcaacaattggcattgactttttatcaaaaactatgtacttggaggatcgaacagtacgattgcaattatgggacacagcaggtcaagagcgg

SEQ ID NO: 192178 - protein, 1441 aa, Artificial Sequence
  derived and/or modified sequence
MATAAAAAAVMAPPGCPGSCPNFAVVCSFLERYGPLLDLPELPFPELERVLQAPPPDVGNGEVPKELVELHLKLMRKIGKSVTADRWEKYLIKICQEFNSTWAWEMEKKGYLEMSVECKLALLKYLCECQFDDNLKFKNIINEEDADTMRLQPIGRDKDGLMYWYQLDQDHNVRMYIEEQDDQDGSSWKCIVRNRNELAETLALLKAQIDPVLLKNSSQQDNSSRESPSLEDEETKKEEETPKQEEQKESEKMKSEEQPMDLENRSTANVLEETTVKKEKEDEKELVKLPVIVKLEKPLPENEEKKIIKEESDSFKENVKPIKVEVKECRADPKDTKSSMEKPVAQEPERIEFGGNIKSSHEITEKSTEETEKLKNDQQAKIPLKKREIKLSDDFDSPVKGPLCKSVTPTKEFLKDEIKQEEETCKRISTITALGHEGKQLVNGEVSDERVAPNFKTEPIETKFYETKEESYSPSKDRNIITEGNGTESLNSVITSMKTGELEKETAPLRKDADSSISVLEIHSQKAQIEEPDPPEMETSLDSSEMAKDLSSKTALSSTESCTMKGEEKSPKTKKDKRPPILECLEKLEKSKKTFLDKDAQRLSPIPEEVPKSTLESEKPGSPEAAETSPPSNIIDHCEKLASEKEVVECQSTSTVGGQSVKKVDLETLKEDSEFTKVEMDNLDNAQTSGIEEPSETKGSMQKSKFKYKLVPEEETTASENTEITSERQKEGIKLTIRISSRKKKPDSPPKVLEPENKQEKTEKEEEKTNVGRTLRRSPRISRPTAKVAEIRDQKADKKRGEGEDEVEEESTALQKTDKKEILKKSEKDTNSKVSKVKPKGKVRWTGSRTRGRWKYSSNDESEGSGSEKSSAASEEEEEKESEEAILADDDEPCKKCGLPNHPELILLCDSCDSGYHTACLRPPLMIIPDGEWFCPPCQHKLLCEKLEEQLQDLDVALKKKERAERRKERLVYVGISIENIIPPQEPDFSEDQEEKKKDSKKSKANLLERRSTRTRKCISYRFDEFDEAIDEAIEDDIKEADGGGVGRGKDISTITGHRGKDISTILDEERKENKRPQRAAAARRKKRRRLNDLDSDSNLDEEESEDEFKISDGSQDEFVVSDENPDESEEDPPSNDDSDTDFCSRRLRRHPSRPMRQSRRLRRKTPKKKYSDDDEEEESEENSRDSESDFSDDFSDDFVETRRRRSRRNQKRQINYKEDSESDGSQKSLRRGKEIRRVHKRRLSSSESEESYLSKNSEDDELAKESKRSVRKRGRSTDEYSEADEEEEEEEGKPSRKRLHRIETDEEESCDNAHGDANQPARDSQPRVLPSEQESTKKPYRIESDEEEDFENVGKVGSPLDYSLVDLPSTNGQSPGKAIENLIGKPTEKSQTPKDNSTASASLASNGTSGGQEAGAPEEEEDELLRVTDLVDYVCNSEQL

SEQ ID NO: 192179 - protein, 1410 aa, Artificial Sequence
  derived and/or modified sequence
MATAAAAAAVMAPPGCPGSCPNFAVVCSFLERYGPLLDLPELPFPELERVLQAPPPDVGNGEVPKELVELHLKLMRKIGKSVTADRWEKYLIKYLCECQFDDNLKFKNIINEEDADTMRLQPIGRDKDGLMYWYQLDQDHNVRMYIEEQDDQDGSSWKCIVRNRNELAETLALLKAQIDPVLLKNSSQQDNSSRESPSLEDEETKKEEETPKQEEQKESEKMKSEEQPMDLENRSTANVLEETTVKKEKEDEKELVKLPVIVKLEKPLPENEEKKIIKEESDSFKENVKPIKVEVKECRADPKDTKSSMEKPVAQEPERIEFGGNIKSSHEITEKSTEETEKLKNDQQAKIPLKKREIKLSDDFDSPVKGPLCKSVTPTKEFLKDEIKQEEETCKRISTITALGHEGKQLVNGEVSDERVAPNFKTEPIETKFYETKEESYSPSKDRNIITEGNGTESLNSVITSMKTGELEKETAPLRKDADSSISVLEIHSQKAQIEEPDPPEMETSLDSSEMAKDLSSKTALSSTESCTMKGEEKSPKTKKDKRPPILECLEKLEKSKKTFLDKDAQRLSPIPEEVPKSTLESEKPGSPEAAETSPPSNIIDHCEKLASEKEVVECQSTSTVGGQSVKKVDLETLKEDSEFTKVEMDNLDNAQTSGIEEPSETKGSMQKSKFKYKLVPEEETTASENTEITSERQKEGIKLTIRISSRKKKPDSPPKVLEPENKQEKTEKEEEKTNVGRTLRRSPRISRPTAKVAEIRDQKADKKRGEGEDEVEEESTALQKTDKKEILKKSEKDTNSKVSKVKPKGKVRWTGSRTRGRWKYSSNDESEGSGSEKSSAASEEEEEKESEEAILADDDEPCKKCGLPNHPELILLCDSCDSGYHTACLRPPLMIIPDGEWFCPPCQHKLLCEKLEEQLQDLDVALKKKERAERRKERLVYVGISIENIIPPQEPDFSEDQEEKKKDSKKSKANLLERRSTRTRKCISYRFDEFDEAIDEAIEDDIKEADGGGVGRGKDISTITGHRGKDISTILDEERKENKRPQRAAAARRKKRRRLNDLDSDSNLDEEESEDEFKISDGSQDEFVVSDENPDESEEDPPSNDDSDTDFCSRRLRRHPSRPMRQSRRLRRKTPKKKYSDDDEEEESEENSRDSESDFSDDFSDDFVETRRRRSRRNQKRQINYKEDSESDGSQKSLRRGKEIRRVHKRRLSSSESEESYLSKNSEDDELAKESKRSVRKRGRSTDEYSEADEEEEEEEGKPSRKRLHRIETDEEESCDNAHGDANQPARDSQPRVLPSEQESTKKPYRIESDEEEDFENVGKVGSPLDYSLVDLPSTNGQSPGKAIENLIGKPTEKSQTPKDNSTASASLASNGTSGGQEAGAPEEEEDELLRVTDLVDYVCNSEQL

SEQ ID NO: 192180 - protein, 1189 aa, Artificial Sequence
  derived and/or modified sequence
MKSEEQPMDLENRSTANVLEETTVKKEKEDEKELVKLPVIVKLEKPLPENEEKKIIKEESDSFKENVKPIKVEVKECRADPKDTKSSMEKPVAQEPERIEFGGNIKSSHEITEKSTEETEKLKNDQQAKIPLKKREIKLSDDFDSPVKGPLCKSVTPTKEFLKDEIKQEEETCKRISTITALGHEGKQLVNGEVSDERVAPNFKTEPIETKFYETKEESYSPSKDRNIITEGNGTESLNSVITSMKTGELEKETAPLRKDADSSISVLEIHSQKAQIEEPDPPEMETSLDSSEMAKDLSSKTALSSTESCTMKGEEKSPKTKKDKRPPILECLEKLEKSKKTFLDKDAQRLSPIPEEVPKSTLESEKPGSPEAAETSPPSNIIDHCEKLASEKEVVECQSTSTVGGQSVKKVDLETLKEDSEFTKVEMDNLDNAQTSGIEEPSETKGSMQKSKFKYKLVPEEETTASENTEITSERQKEGIKLTIRISSRKKKPDSPPKVLEPENKQEKTEKEEEKTNVGRTLRRSPRISRPTAKVAEIRDQKADKKRGEGEDEVEEESTALQKTDKKEILKKSEKDTNSKVSKVKPKGKVRWTGSRTRGRWKYSSNDESEGSGSEKSSAASEEEEEKESEEAILADDDEPCKKCGLPNHPELILLCDSCDSGYHTACLRPPLMIIPDGEWFCPPCQHKLLCEKLEEQLQDLDVALKKKERAERRKERLVYVGISIENIIPPQEPDFSEDQEEKKKDSKKSKANLLERRSTRTRKCISYRFDEFDEAIDEAIEDDIKEADGGGVGRGKDISTITGHRGKDISTILDEERKENKRPQRAAAARRKKRRRLNDLDSDSNLDEEESEDEFKISDGSQDEFVVSDENPDESEEDPPSNDDSDTDFCSRRLRRHPSRPMRQSRRLRRKTPKKKYSDDDEEEESEENSRDSESDFSDDFSDDFVETRRRRSRRNQKRQINYKEDSESDGSQKSLRRGKEIRRVHKRRLSSSESEESYLSKNSEDDELAKESKRSVRKRGRSTDEYSEADEEEEEEEGKPSRKRLHRIETDEEESCDNAHGDANQPARDSQPRVLPSEQESTKKPYRIESDEEEDFENVGKVGSPLDYSLVDLPSTNGQSPGKAIENLIGKPTEKSQTPKDNSTASASLASNGTSGGQEAGAPEEEEDELLRVTDLVDYVCNSEQL

SEQ ID NO: 192181 - protein, 803 aa, Artificial Sequence
  derived and/or modified sequence
ETLALLKAQIDPVLLKNSSQQDNSSRESPSLEDEETKKEEETPKQEEQKESEKMKSEEQPMDLENRSTANVLEETTVKKEKEDEKELVKLPVIVKLEKPLPENEEKKIIKEESDSFKENVKPIKVEVKECRADPKDTKSSMEKPVAQEPERIEFGGNIKSSHEITEKSTEETEKLKNDQQAKIPLKKREIKLSDDFDSPVKGPLCKSVTPTKEFLKDEIKQEEETCKRISTITALGHEGKQLVNGEVSDERVAPNFKTEPIETKFYETKEESYSPSKDRNIITEGNGTESLNSVITSMKTGELEKETAPLRKDADSSISVLEIHSQKAQIEEPDPPEMETSLDSSEMAKDLSSKTALSSTESCTMKGEEKSPKTKKDKRPPILECLEKLEKSKKTFLDKDAQRLSPIPEEVPKSTLESEKPGSPEAAETSPPSNIIDHCEKLASEKEVVECQSTSTVGGQSVKKVDLETLKEDSEFTKVEMDNLDNAQTSGIEEPSETKGSMQKSKFKYKLVPEEETTASENTEITSERQKEGIKLTIRISSRKKKPDSPPKVLEPENKQEKTEKEEEKTNVGRTLRRSPRISRPTAKVAEIRDQKADKKRGEGEDEVEEESTALQKTDKKEILKKSEKDTNSKVSKVKPKGKVRWTGSRTRGRWKYSSNDESEGSGSEKSSAASEEEEEKESEEAILADDDEPCKKCGLPNHPELILLCDSCDSGYHTACLRPPLMIIPDGEWFCPPCQHKLLCEKLEEQLQDLDVALKKKERAERRKERLVYVGISIENIIPPQEPDFSEDQEEKKKDSKK

SEQ ID NO: 192182 - protein, 702 aa, Artificial Sequence
  derived and/or modified sequence
ATAAAAAAVMAPPGCPGSCPNFAVVCSFLERYGPLLDLPELPFPELERVLQAPPPDVGNGEVPKELVELHLKLMRKIGKSVTADRWEKYLIKICQEFNSTWAWEMEKKGYLEMSVECKLALLKYLCECQFDDNLKFKNIINEEDADTMRLQPIGRDKDGLMYWYQLDQDHNVRMYIEEQDDQDGSSWKCIVRNRNELAETLALLKAQIDPVLLKNSSQQDNSSRESPSLEDEETKKEEETPKQEEQKESEKMKSEEQPMDLENRSTANVLEETTVKKEKEDEKELVKLPVIVKLEKPLPENEEKKIIKEESDSFKENVKPIKVEVKECRADPKDTKSSMEKPVAQEPERIEFGGNIKSSHEITEKSTEETEKLKNDQQAKIPLKKREIKLSDDFDSPVKGPLCKSVTPTKEFLKDEIKQEEETCKRISTITALGHEGKQLVNGEVSDERVAPNFKTEPIETKFYETKEESYSPSKDRNIITEGNGTESLNSVITSMKTGELEKETAPLRKDADSSISVLEIHSQKAQIEEPDPPEMETSLDSSEMAKDLSSKTALSSTESCTMKGEEKSPKTKKDKRPPILECLEKLEKSKKTFLDKDAQRLSPIPEEVPKSTLESEKPGSPEAAETSPPSNIIDHCEKLASEKEVVECQSTSTVGGQSVKKVDLETLKEDSEFTKVEMDNLDNAQTSGIEEPSETKGSMQK

SEQ ID NO: 192183 - protein, 276 aa, Artificial Sequence
  derived and/or modified sequence
EPCKKCGLPNHPELILLCDSCDSGYHTACLRPPLMIIPDGEWFCPPCQHKLLCEKLEEQLQDLDVALKKKERAERRKERLVYVGISIENIIPPQEPDFSEDQEEKKKDSKKSKANLLERRSTRTRKCISYRFDEFDEAIDEAIEDDIKEADGGGVGRGKDISTITGHRGKDISTILDEERKENKRPQRAAAARRKKRRRLNDLDSDSNLDEEESEDEFKISDGSQDEFVVSDENPDESEEDPPSNDDSDTDFCSRRLRRHPSRPMRQSRRLRRKTP

SEQ ID NO: 192184 - DNA, 4326 bp, Artificial Sequence
  derived and/or modified sequence
atggccacagctgctgccgcagccgccgtcatggcaccacctgggtgtccaggttcctgcccaaacttcgccgtcgtatgcagcttccttgaacgatatggccctcttttggaccttcccgaactcccctttccagagttggagcgtgttctccaggctccccctccggacgttggtaatggggaagtgccgaaggaactagtggagttacatcttaagctgatgagaaagatcggcaagagcgtgaccgcagaccgctgggagaaatacctaattaagatttgccaggagttcaactctacatgggcttgggagatggaaaagaaggggtatttggaaatgtcagttgaatgcaaactggctttattgaagtacttatgcgaatgtcagtttgatgacaaccttaagtttaaaaatatcataaacgaagaggatgccgatactatgcgactgcagcccattggcagagacaaagacggcctgatgtactggtaccagctcgatcaagaccacaatgtccgtatgtatattgaggagcaggatgatcaagatggttctagctggaagtgtatcgtcagaaaccgcaatgaactcgctgagacactcgcattgttgaaagctcaaatcgaccccgtgttgctgaagaacagctcccagcaagataactccagccgagagagcccaagtttggaggatgaagaaaccaaaaaagaagaggaaactccgaagcaggaagagcagaaagagagcgaaaaaatgaaaagcgaagagcagccgatggacttagagaaccgaagtactgcgaatgtcctcgaagagacaaccgtgaaaaaagaaaaagaggacgagaaagagctggttaaacttccggtcatagtgaagttggaaaaaccattacctgagaacgaggaaaaaaaaattatcaaagaggaatccgatagtttcaaagaaaacgtgaaacccataaaggtggaagtgaaggagtgtcgggcagaccctaaagacaccaagagttccatggaaaagccagtggcgcaagagccggaaagaatcgagtttggcggtaacatcaaatccagccacgagatcactgaaaagtctactgaagagaccgagaagctgaagaacgaccaacaggcgaaaatacccttgaagaagcgggaaataaaactcagcgacgacttcgacagccccgtgaagggacccctgtgtaagagtgtgaccccaacaaaagaattcctgaaggacgagattaagcaagaggaagaaacttgcaagagaatctcaactataactgcattggggcacgaagggaagcagctcgtaaacggcgaagtttcggatgaacgagtggcccccaattttaaaacagagcctatcgagactaaattttacgaaacaaaggaagaaagctactctccatctaaggatcggaatattatcaccgagggaaacggcacggagagtctgaactctgtcattacctcaatgaaaacgggcgagttggaaaaggaaaccgcacctctccgaaaggacgccgactcttcaatcagcgtgctagagatacattcacagaaagcgcagatagaagagcccgacccacctgaaatggagacatcacttgattcatccgagatggctaaggatctgtcgagcaaaacggccctatcctcaacagaatcatgtaccatgaaaggcgaggaaaaatcgcccaaaaccaagaaggacaagcggccgcccatactcgagtgtctggagaaactcgagaaaagcaaaaagacctttctcgacaaggacgctcagcgtctatctcctatccctgaagaggtgccgaagtccacactggaatccgagaagccaggttcaccagaggctgctgagacctccccaccctccaatatcattgaccattgcgagaaactggcctcagagaaggaggtcgtggagtgccaaagcaccagtacagtgggcggccagtcagtgaaaaaagttgacttagagaccctcaaggaggactccgagttcactaaggtcgagatggacaatctggacaatgcgcagaccagtgggattgaagagccctctgaaaccaagggatccatgcagaagagtaagtttaaatacaagctggtgcctgaagaagagactaccgcctcagagaataccgaaatcacctctgaacggcaaaaggaggggatcaaactgaccatcagaatctcttcaagaaagaaaaagcccgattctcctcctaaagttctggagcccgagaataaacaggagaagacagagaaggaagaagagaagacgaacgtgggcaggactttgagacgatcgccacggattagccgccccacagccaaggtcgcggaaataagggatcagaaggctgacaagaagaggggagaaggtgaggatgaggttgaggaagagtccaccgctcttcaaaaaacagataagaaggaaatccttaagaaatccgagaaggacaccaacagcaaagtcagcaaagtgaagcccaagggcaaggtgagatggaccggctctaggactcgcggaaggtggaaatacagttctaatgatgaaagtgaaggctcaggaagcgaaaaaagctccgcagcgtccgaggaggaggaagagaaggaatccgaggaggctatcttggccgacgatgacgagccatgcaaaaagtgtgggttgcctaatcaccctgaattaattctgttatgcgactcttgcgacagcgggtaccacaccgcctgcttgagacctcccttgatgatcatacccgacggggagtggttttgtcctccctgtcagcacaagctgctctgcgagaaattggaagagcagctgcaggatcttgatgtcgccttgaaaaagaaagagagggccgagcgccgcaaggagagattagtgtatgtgggaatctctatagagaatatcattccaccacaggagcctgatttttcagaagatcaggaggaaaaaaaaaaagattctaaaaagtcaaaagccaatctcctcgagcggcgatctacaagaaccagaaaatgcatcagttaccggtttgacgagttcgacgaggccattgacgaggctatcgaagacgatattaaggaggccgatggaggcggagtggggaggggcaaagacatatccacaatcaccggtcatagaggaaaagacatttctaccatcctcgatgaagaaaggaaagagaacaaacggccccaacgcgccgctgcggcccgccggaaaaaacgcaggcgccttaacgacctcgactctgactccaatcttgatgaggaagaaagcgaggatgaattcaagattagcgacggctcacaggatgaattcgtagtgagcgatgagaacccagacgaatccgaggaggaccccccgtcaaacgacgacagcgacaccgacttctgctcccgaagacttagacgccatccctctagaccgatgagacagtcgaggcgcttgaggagaaagaccccgaaaaagaagtattccgacgacgacgaggaggaagaatcagaagagaactctagagattccgagagcgatttctctgacgatttctctgacgacttcgttgagacaagaaggcgcagatcaaggagaaatcaaaagaggcagattaactataaagaagactctgagtccgacggatcacagaaatccttgcgccgtggcaaggagataaggagggtgcacaaacgccggctgagttcctcggaatccgaggagtcatacctttcgaagaactctgaggacgatgagcttgcgaaagaatcaaaaagatccgtccgtaagcgcggccggagcactgacgaatattccgaagcagacgaggaggaggaggaagaggagggcaagccgtccaggaagcggctacacaggatagagaccgatgaggaggaatcctgtgacaatgctcacggagatgccaaccagcctgcacgtgacagccagccgcgggttttacccagtgaacaggaatccacgaagaagccctatcgcattgagtcggacgaagaagaggattttgagaatgtcggcaaagtgggatccccactagactattcactggtagacctgccaagtacgaatggacagtcacctggaaaggcgattgagaacctcatcggcaagcccacggaaaaaagccaaaccccgaaagacaattcgacggccagcgcatctctggctagcaatggcacttctggcggccaggaagctggggccccagaggaggaagaagacgagctgcttagggttacagatctcgtcgactatgtttgcaattctgagcagctgtag

SEQ ID NO: 192185 - DNA, 4233 bp, Artificial Sequence
  derived and/or modified sequence
atggcaaccgctgcagctgccgcagccgtgatggcaccccctgggtgcccaggatcatgtccaaatttcgccgtcgtgtgcagctttctagagaggtatggccctttgctagacctgcctgagcttccattccctgagttggagcgcgtgctgcaggccccaccaccggatgttgggaacggtgaagtgcctaaagaattagtggaactgcatctaaaattaatgcggaaaatcgggaaatccgtgaccgcagatcgctgggagaagtacctgattaaatacctttgtgagtgccagttcgacgataacctgaaatttaaaaacatcatcaatgaagaagacgccgataccatgaggctacagcctatcggcagagataaggatggtcttatgtattggtaccagcttgatcaggatcacaatgtgcgcatgtacatcgaggaacaagatgatcaggacgggagcagctggaagtgtatcgtgcgaaatagaaacgaattggcagaaaccctggccctgttgaaggcacagatcgaccccgttttactgaagaactcttcacagcaggacaactcctctcgcgaaagccccagcctggaagacgaagagaccaagaaagaggaagagactcccaagcaggaagagcaaaaggagagtgaaaagatgaaatcagaggagcagccgatggacctggagaaccgctcaacagccaatgtgctagaggagactacagtgaaaaaagaaaaggaagatgaaaaagagcttgtgaaactgcctgtcatcgttaagctagagaagcctctgcctgagaacgaggaaaaaaagatcatcaaggaagagtctgattcttttaaagagaacgtgaagccaatcaaggtggaagttaaggaatgtagagcagaccccaaagacactaaatctagcatggaaaagcccgtcgcccaagaaccggagcgtatcgagttcggcggcaatatcaaatcctctcatgagatcactgagaaaagcactgaggagactgagaaactcaaaaatgaccagcaggcgaagatcccactgaaaaagagggagatcaagcttagcgacgattttgatagccccgtgaagggaccactttgtaagagcgtcacacccaccaaagagtttttaaaggatgagataaaacaggaagaagagacttgtaaaaggatcagcactatcacggccctaggacacgagggtaagcagcttgttaacggtgaggtgagcgatgagcgggtggccccaaactttaagacggagccgattgaaaccaagttttatgagaccaaggaggaatcctattcccctagcaaagaccggaatattattactgagggtaacggtacagagtctctaaactccgttatcaccagcatgaagaccggagagttggagaaagaaactgccccgctgcgtaaagacgcggatagcagcatctcagtgctggagattcattcccaaaaagcccagatcgaagagccagatccgcctgaaatggaaacatcgctcgatagttcagaaatggcaaaggacctgtcttccaaaactgcactaagttccacagagtcctgtaccatgaagggggaagaaaagtctcccaagaccaaaaaggacaagcgcccaccaattctcgagtgtttggaaaaactggaaaaatccaagaaaacatttctggataaggacgcccagagactctcacccataccagaggaagtgccaaagagtaccttggagagtgagaaacctggaagtcctgaggccgcagaaaccagtcccccttcaaacatcattgatcactgtgaaaaactggcatcagaaaaagaagtggtggaatgccagagcaccagtactgtgggaggccaaagcgtgaaaaaagtagatctggaaaccctaaaggaagattcagagtttactaaggtcgagatggataatctggacaacgcccaaacgtccggtatcgaggagccctcagagacgaagggcagtatgcagaagtctaaattcaagtacaagctagttcctgaagaggagactacagcgtcagaaaatacagagattacctccgagcgtcaaaaagagggaattaaactgacgatccgaataagctcaaggaaaaagaagccagactcaccacctaaggttttggagcctgagaacaaacaggaaaagacagagaaggaggaggagaagaccaacgtggggcgtaccttgcgtaggtctccaagaataagtagaccaacagccaaggtggcggagatccgtgaccagaaagccgataagaagcggggagagggcgaggacgaagtggaagaggagagcactgcgcttcagaagaccgataaaaaggagattctgaagaaaagcgagaaagatacgaattccaaggtgtcaaaagtaaaaccgaagggtaaagttaggtggacgggatcccgtaccagaggcagatggaagtattcatcgaatgacgagtccgagggttctggtagcgaaaagtcatcagccgcgtcagaagaggaggaggagaaggagtccgaggaggccatcctggcggacgatgatgagccttgtaaaaagtgtggcctgccaaaccatcctgaactgatccttctgtgtgattcttgtgattccggctatcacacagcatgcctgaggcctcccctgatgatcatccccgatggagaatggttttgccctccctgccagcacaagctcctgtgcgagaagctagaagaacagctgcaggatcttgacgtggccctgaagaagaaggaacgcgctgagaggcgcaaggaacgcctggtatacgtaggaatctccattgaaaatatcatcccaccacaagaacctgatttcagtgaggaccaggaggagaagaagaaggatagcaagaaaagcaaggctaacctgctagaacgccgcagcactcgaactcggaaatgcatatcttatcggtttgatgagtttgatgaggccattgatgaagctattgaggacgatattaaggaagccgatggcggtggagttggccggggaaaagacatcagcacaatcacaggccacaggggaaaggacatctcaactatactggatgaggaacgcaaagaaaacaagcgcccccaaagggctgcggccgcccgtcgaaagaaaaggagacgcctgaacgacctcgattctgactcaaacctggacgaggaggagagtgaggacgaattcaagattagcgatggttcacaggacgagttcgtagtttcggacgaaaaccccgacgagtctgaggaggatccaccgagtaatgacgactctgacaccgatttttgcagcaggcgcttaagacggcacccctctcggcctatgcgccagagcaggagactcaggcgaaagactcccaagaagaagtattctgacgatgatgaagaggaagaatccgaagagaatagcagggactccgagtcggactttagtgatgacttcagtgatgacttcgtggagacccgccgtcgacggtcacgaagaaaccagaaaaggcaaattaattataaggaagactccgaatctgacggctctcagaagtccttacgcaggggaaaagagatccggagagtgcataaaaggcggctgagctctagtgaaagtgaggaatcttacctatccaagaattccgaagacgacgaactggccaaagagtctaaaagatcagtccggaagcggggcagatctacggacgaatatagtgaggctgatgaggaggaagaggaggaggagggaaaaccttctagaaaaagattacatagaatcgaaactgacgaggaagaatcctgtgacaacgcccatggtgacgctaaccaacctgctagagattctcagccacgcgtgttgccttcggaacaggagtctactaaaaaaccttaccgcattgaaagcgatgaggaagaagattttgagaacgtgggtaaggttggttcccccctggactacagtctagttgacctgcccagtaccaatggccagtcaccaggtaaagccattgaaaacctgattggcaaacccaccgagaagtctcagacgcccaaggacaactcaactgcatcagcttctctggcctctaacgggacatctggaggacaagaagccggcgcaccagaagaggaagaagatgagctactacgggtgacggaccttgttgattacgtatgtaattcagaacagctttag

SEQ ID NO: 192186 - DNA, 3570 bp, Artificial Sequence
  derived and/or modified sequence
atgaagtcagaagagcaacctatggacctggagaaccgcagtaccgccaatgtgctggaagaaactacggtgaagaaagagaaagaagatgaaaaagaactggtcaagcttcccgttattgtcaaattagaaaagcctcttcccgagaatgaagaaaaaaaaataatcaaagaggaatctgattcatttaaggaaaatgtgaagcctataaaggtggaggtaaaggagtgcagggcggatccaaaggacactaagtcctcaatggagaaacccgtcgcccaggaaccagaaaggatcgaattcggggggaatatcaaatcaagccacgagattaccgagaagagcacggaggaaacagagaaattgaagaatgatcagcaggctaagattcccctgaagaagagggaaattaagttaagcgacgattttgatagtcccgtaaaagggcctttgtgcaagtcagtgacaccaactaaagaatttctgaaggacgaaattaagcaggaggaggagacatgcaaacggatcagcaccattactgctctgggccacgaaggcaagcagcttgtgaatggggaagtgagcgacgaacgcgtcgcgccaaacttcaaaacagagccaatcgagactaagttctacgagacaaaggaagaatcgtatagcccatccaaggatcgcaatattatcacagagggtaacggaacggagtcccttaacagcgtgatcacttcaatgaaaacgggcgagcttgagaaggagaccgcaccattgcgaaaagatgccgattcctccattagtgttttagagatccactcacagaaggctcagatcgaggagcctgaccctcccgaaatggagacatcgctcgacagctctgaaatggccaaggatctaagttccaagaccgcattgtctagcactgaatcttgtacaatgaaaggagaggagaagagtcctaagactaaaaaggacaaaaggcctccgatactcgaatgcctggagaagctagagaaatcaaagaaaactttcttagacaaagacgcgcagagactgtcccccatccctgaggaagttccaaagagcacgctcgaaagcgagaagccagggagtcctgaagctgcagagactagtcccccaagtaacatcatcgaccattgtgaaaagctggcatctgagaaggaggtggtagaatgccagagcacctccaccgtgggcggacaaagcgttaaaaaagtggatctggaaacccttaaagaagattccgagtttactaaagtggaaatggataacctggataacgcgcagaccagtggtattgaggaacccagtgagactaaggggtccatgcaaaaaagtaagtttaaatataaactcgtgcctgaggaagagaccaccgctagcgaaaacaccgagattacatctgaacggcagaaagaaggcatcaaactgactatacggatcagcagtcgcaaaaaaaaacctgacagtcccccaaaggtgctggagccggaaaacaagcaggaaaaaacagaaaaagaagaggagaaaactaacgtggggaggacattacgcaggagtcccaggatcagccgaccgactgccaaagtggccgaaataagggatcagaaggctgataaaaaaagaggcgagggtgaggacgaggtggaagaggagagtacagcactgcagaagaccgacaagaaagaaatcctcaagaagtccgagaaagacacgaactctaaagtttcaaaggtgaagcccaagggaaaggtgcgttggacgggctcgcgcacccgaggcaggtggaaatactcttctaatgatgagagcgagggtagtggttccgaaaaaagcagcgctgcctcagaggaggaggaggaaaaagagtccgaggaagccatactggccgatgacgatgaaccgtgcaagaaatgtggcctgccgaatcatccagaactgatcctgttgtgtgacagttgtgatagcggctatcacaccgcgtgtctaagaccacctctgatgatcatccctgacggcgagtggttttgccctccatgtcagcacaagctgctgtgcgaaaaactggaagagcaacttcaggacttagatgttgctcttaagaagaaggaacgggccgaacggcgaaaggagaggctcgtctatgttggcatatcaattgaaaacattatcccccctcaggagcctgacttcagtgaggaccaggaggaaaaaaagaaggactccaagaagtccaaggcaaatctcctggagcgacggtccacgaggacccggaaatgcataagttataggtttgatgaattcgacgaggctatcgatgaggctatagaggacgacattaaggaagccgacggcggcggcgttggcagaggtaaggatatctcaaccatcaccgggcatagaggcaaagatatatcaacgatactggatgaggagagaaaggagaataaacgaccgcagcgggccgctgcggcacgcaggaaaaaacgaagaagacttaacgatctcgattccgatagcaatctggacgaggaagagagcgaggacgaatttaaaatctcagatgggtctcaagacgagtttgtcgtgtctgacgaaaacccagatgaatcagaagaggaccctccatccaacgacgatagtgatacggacttctgttctagaagattgcggagacacccttctcgcccaatgaggcaatctagaaggcttcgtcgtaagacccctaagaagaagtacagcgacgatgatgaggaagaggagagcgaggaaaacagtagggacagcgagagtgacttttcagatgacttctcggacgatttcgtggagacgagaagacgaaggtccaggcgaaaccagaaaaggcaaattaattacaaagaagatagtgagtccgatgggtcgcaaaagagtctgagaagagggaaggagataaggcgggtccataaacgacgtctttcgtcatcggaaagcgaggagtcgtacctttccaagaacagtgaagacgatgagctggccaaagaatccaagcggtccgtaaggaagagaggaagatccactgacgagtattcggaggctgatgaagaagaggaagaggaagaggggaagcccagccggaagcggttacacaggatcgagactgacgaggaggagtcatgtgacaacgctcacggtgatgccaatcaacctgctcgcgattcccagcctagggtgcttcctagcgaacaagaaagcacaaaaaagccctatcgtatcgaatcagatgaagaggaggactttgagaatgtggggaaggtggggtcgccactggactacagtctcgtggaccttcccagcactaatggacagagcccaggaaaggcaatcgaaaatctcatcggaaaacccactgaaaaatcacagacacccaaggacaacagcacagctagcgcgagcctggcaagtaacgggacttccggcggacaagaagctggagccccagaagaagaggaagatgagctcctccgggtgacagatctggtggactatgtgtgtaattctgaacagctgtag

SEQ ID NO: 192187 - DNA, 2412 bp, Artificial Sequence
  derived and/or modified sequence
gaaacccttgctttgttgaaggcacagattgacccagtacttcttaaaaattcctcccagcaggataacagtagcagggaatcaccatccctggaagatgaggagaccaagaaagaggaggaaaccccgaaacaggaggagcagaaagaaagcgagaagatgaagagcgaggagcagccaatggacctggagaacaggtctacagccaacgtgttagaagaaacaaccgtcaaaaaggaaaaagaagatgagaaagaactcgtcaaactgccagtaattgtgaagctagagaaacctctgcctgagaacgaggagaagaagattatcaaggaggaatccgattcctttaaggaaaacgtcaagcctattaaagtggaggtcaaagaatgtagagccgatccaaaagacaccaagagctcaatggagaagcccgtagcccaagaacccgagaggattgagtttggaggaaatatcaaaagctcacatgaaatcactgaaaaatccaccgaggaaaccgaaaagcttaaaaacgaccaacaggctaagattccgcttaagaaaagggaaatcaagttgagcgacgacttcgactcaccagtcaagggcccgctttgcaagagcgtcaccccaaccaaagagtttctaaaggacgagatcaaacaagaagaagagacatgcaagagaatatctaccattacggcattgggacacgagggaaagcaactggttaatggcgaagtgtctgatgagcgcgtcgcacctaatttcaagactgagcctattgagacaaaattctatgagaccaaggaagaatcttattctccatcaaaggataggaatataatcaccgaaggcaatgggactgagtccttgaattccgtcattacgagcatgaaaacaggtgaactagaaaaagaaaccgcaccactcagaaaagacgcagacagctcgatctctgtcctggaaattcattcccagaaggctcaaattgaggagccagacccgcccgaaatggagacatccctggactccagcgaaatggccaaagatctgtctagcaagacagcgctatcttccacggagtcttgcaccatgaagggcgaggagaagagcccaaaaacgaaaaaggacaagaggccacctattctagagtgtttggagaaactggaaaaaagcaagaagactttcctcgacaaagatgcccaaagattgtctcccatacctgaggaggtccccaaatctacactggagtccgaaaaaccagggagcccagaagctgccgagactagtccaccttccaatattatcgatcactgcgaaaaactggctagcgagaaagaagtggtcgagtgccagtccaccagtaccgtcggcggccagtctgtaaagaaggtggaccttgaaacactcaaagaggactcagagttcaccaaagtggagatggacaacctcgataacgcacagactagcggaattgaagagccttctgagacaaaaggatcaatgcagaaatcgaagttcaaatataagcttgttcccgaagaagagaccacagcgagtgaaaacactgagatcacatccgaacggcagaaggaaggcattaaactgactattagaatctcctcccggaagaaaaagcctgacagtccccctaaggtactcgaaccagagaacaagcaggaaaagacagaaaaggaggaagagaagactaatgtcggtcgtacgctacggcgctctcctcggattagcaggcccacagccaaggtggccgagatccgggatcagaaagccgacaaaaaacggggagaaggtgaggatgaagtagaggaggagtccacggccttgcagaaaactgacaagaaggagattttgaagaaatccgagaaggacacaaacagtaaggtttccaaggtgaaacccaagggcaaagtacggtggaccggctcacgaacacgtggaaggtggaagtactcttccaacgatgagtccgaagggagcggttctgagaaatcaagtgccgcttctgaagaggaggaagagaaagaatcagaggaggctattctcgccgacgacgacgagccttgcaaaaaatgcggactgcctaaccatcccgaactcattctcttatgtgactcctgcgattctggttaccacaccgcttgtctccgccctccactgatgattatcccagacggggagtggttctgtcccccatgccagcacaagctcctttgcgagaagctagaggagcaactgcaggacctggatgtggctcttaaaaagaaggagcgagctgaacgccgaaaggagcgtctggtctatgtggggattagcatcgagaatatcattccccctcaggaacccgatttcagtgaagaccaggaggagaaaaagaaggactctaagaaatag

SEQ ID NO: 192188 - DNA, 4326 bp, Artificial Sequence
  derived and/or modified sequence
atggccacagctgctgctgctgctgctgtgatggcccctcctggctgccccggcagctgccccaactttgctgtggtgtgcagcttcctggagagatatggccccctgctggacctgcctgagctgcccttccctgagctggagcgggtgctgcaggcccctcctccagatgtgggcaatggagaggtgcccaaggagctggtggagctgcacctgaagctgatgaggaagattggcaagtctgtgacagctgaccgctgggagaagtacctgatcaagatctgccaggagttcaacagcacctgggcctgggagatggagaagaagggctacctggagatgtctgtggagtgcaagctggccctgctgaagtacctgtgtgagtgccagtttgatgacaacctgaagttcaagaacatcatcaatgaggaggatgctgacaccatgaggctgcagcccatcggccgggacaaggatggcctgatgtactggtaccagctggaccaggaccacaacgtgaggatgtacatcgaggagcaggatgaccaggacggcagctcctggaagtgcatcgtgaggaacagaaatgagctggccgagaccctggccctgctgaaggcccagattgatcctgtgctgctgaagaacagcagccagcaggacaacagcagccgggagagccccagcctggaggatgaggagaccaagaaggaggaggagacccccaagcaggaggagcagaaggagagcgagaagatgaagtctgaggagcagcccatggacctggagaacagaagcacagccaacgtgctggaggagaccaccgtgaagaaggagaaggaggatgagaaggagctggtgaagctgcccgtcatcgtgaagctggagaagcccctgcctgaaaatgaggagaagaagatcatcaaggaggagagtgacagcttcaaggaaaatgtgaagcccatcaaggtggaggtgaaggagtgcagagctgaccccaaggacaccaagagctccatggagaagcctgtggcccaggagcctgagagaattgaatttggaggcaacatcaagagcagccatgagatcacagagaagagcacagaggagacagagaagctgaagaatgaccagcaggccaagatccccctgaagaagcgggagatcaagctgagtgatgactttgacagccctgtgaagggccccctgtgcaagtctgtgacccccaccaaggagttcctgaaggatgagatcaagcaggaggaggagacctgcaagaggatcagcaccatcacagccctgggccacgagggcaagcagctggtgaatggagaggtgtctgatgagcgggtggcccccaacttcaagacagagcccatcgagaccaagttctatgagaccaaggaggagagctacagccccagcaaggacaggaacatcatcacagagggcaatggaacagagagcctgaacagcgtcatcacctccatgaagacaggagagctggagaaggagacagcccccctgaggaaggatgctgacagcagcatctctgtgctggagatccacagccagaaggcccagatcgaggagccagaccccccagagatggagaccagcctggacagcagcgagatggccaaggacctgagcagcaagacagccctgagcagcacagagagctgcaccatgaagggggaggagaagagccccaagaccaagaaggacaagaggcctcccatcctggagtgcctggagaagctggagaagagcaagaagaccttcctggacaaggatgcccagaggctgagccccatccctgaggaggtgcccaagagcaccctggagagcgagaagccaggcagccctgaggccgctgagaccagcccccccagcaacatcatcgaccactgtgagaagctggccagcgagaaggaggtggtggagtgccagagcaccagcacagtgggcggccagagcgtgaagaaggtggacctggagaccctgaaggaggacagcgagttcaccaaggtggagatggacaacctggacaatgcccagaccagcggcatcgaggagcccagcgagaccaagggctccatgcagaagagcaagttcaagtacaagctggtgcctgaggaggagaccacagccagcgagaacacagagatcaccagcgagcggcagaaggagggcatcaagctgaccatccgcatcagcagcaggaagaagaagccagacagcccccccaaggtgctggagcctgagaacaagcaggagaagacagagaaggaggaggagaagaccaacgtgggccgcaccctgcggcgcagcccccgcatcagccggcccacagccaaggtggccgagatccgggaccagaaggctgacaagaagagaggagagggggaggatgaggtggaggaggagagcacagccctgcagaagacagacaagaaggagatcctgaagaagtctgagaaggacaccaacagcaaggtgtccaaggtgaagcccaagggcaaggtgcgctggacaggcagcaggacccggggccgctggaagtacagcagcaatgatgagagcgagggcagcggcagcgagaagagcagcgctgccagcgaggaggaggaggagaaggagagcgaggaggccatcctggctgatgatgatgagccctgcaagaagtgtggcctgcccaaccaccctgagctgatcctgctgtgtgacagctgtgacagcggctaccacacagcctgcctgcggccccccctgatgatcatcccagatggagagtggttctgccccccctgccagcacaagctgctgtgtgagaagctggaggagcagctgcaggacctggatgtggccctgaagaagaaggagcgggcagagaggaggaaggagcggctggtgtatgtgggcatcagcattgagaacatcatccccccccaggagccagacttcagcgaggaccaggaggagaagaagaaggacagcaagaagagcaaggccaacctgctggagcggcgcagcaccaggaccaggaagtgcatctcctacagatttgatgaatttgatgaggccattgatgaggccattgaagatgacatcaaggaggctgatggcggcggcgtgggccggggcaaggacatcagcaccatcaccggccaccggggcaaggacatcagcaccatcctggatgaggagaggaaagaaaacaagaggccccagagagctgctgctgcccggaggaagaagagaagaaggctgaatgacctggacagcgacagcaacctggatgaggaggagagtgaagatgagttcaagatcagtgatggcagccaggatgaatttgtggtgtctgatgagaacccagatgaaagtgaagaagatcctcccagcaatgatgacagcgacacagacttctgcagccggcggctgcggcggcaccccagccggcccatgaggcagagccggcggctgcggaggaagacccccaagaagaagtacagtgatgatgatgaggaggaggagagcgaggagaacagccgggacagcgagagtgacttcagtgatgacttcagtgatgactttgtggagaccaggagaagaagaagcagaagaaaccagaagaggcagatcaactacaaggaggacagcgagagtgatggcagccagaagagcctgcggcggggcaaggagatcagaagagtgcacaagaggcggctgagcagcagcgagagcgaggagagctacctgagcaagaacagtgaagatgatgagctggccaaggagagcaagaggtctgtgaggaagaggggccgcagcacagatgagtacagcgaggctgatgaggaggaggaggaggaggagggcaagcccagcaggaagaggctgcacagaattgaaacagatgaggaggagagctgtgacaatgcccatggagatgccaaccagcctgcccgggacagccagccccgggtgctgcccagcgagcaggagagcaccaagaagccctacagaattgaaagtgatgaggaggaggactttgaaaatgtgggcaaggtgggcagccccctggactacagcctggtggacctgcccagcaccaacggccagagccctgggaaggccattgaaaatctcatcggcaagcccacagagaagagccagacccccaaggacaacagcacagccagcgccagcctggccagcaatggcaccagcggcggccaggaggccggggcccctgaggaggaggaggatgagctgctgcgggtgacagacctggtggactatgtgtgcaacagcgagcagctgtag

SEQ ID NO: 192189 - DNA, 4233 bp, Artificial Sequence
  derived and/or modified sequence
atggccacagctgctgctgctgctgctgtgatggcccctcctggctgccccggcagctgccccaactttgctgtggtgtgcagcttcctggagagatatggccccctgctggacctgcctgagctgcccttccctgagctggagcgggtgctgcaggcccctcctccagatgtgggcaatggagaggtgcccaaggagctggtggagctgcacctgaagctgatgaggaagattggcaagtctgtgacagctgaccgctgggagaagtacctgatcaagtacctgtgtgagtgccagtttgatgacaacctgaagttcaagaacatcatcaatgaagaagatgctgacaccatgaggctgcagcccatcggccgggacaaggatggcctgatgtactggtaccagctggaccaggaccacaacgtgaggatgtacatcgaggagcaggatgaccaggacggcagctcctggaagtgcatcgtgaggaacagaaatgagctggccgagaccctggccctgctgaaggcccagattgatcctgtgctgctgaagaacagcagccagcaggacaacagcagccgggagagccccagcctggaggatgaggagaccaagaaggaggaggagacccccaagcaggaggagcagaaggagagcgagaagatgaagtctgaggagcagcccatggacctggagaacagaagcacagccaacgtgctggaggagaccaccgtgaagaaggagaaggaggatgagaaggagctggtgaagctgcctgtgattgtgaagctggagaagcccctgcctgaaaatgaggagaagaagatcatcaaggaggagagtgacagcttcaaggaaaatgtgaagcccatcaaggtggaggtgaaggaatgtagagctgaccccaaggacaccaagagctccatggagaagcctgtggcccaggagcctgagcgcatcgagtttggaggcaacatcaagagcagccatgagatcacagagaagagcacagaggagacagagaagctgaagaatgaccagcaggccaagatccccctgaagaagcgggagatcaagctgagtgatgactttgacagccctgtgaagggccccctgtgcaagtctgtgacccccaccaaggagttcctgaaggatgagatcaagcaggaggaggagacctgcaagaggatcagcaccatcacagccctgggccacgagggcaagcagctggtgaatggagaggtgtctgatgagcgggtggcccccaacttcaagacagagcccatcgagaccaagttctatgagaccaaggaggagagctacagccccagcaaggacaggaacatcatcacagagggcaatggaacagagagcctgaacagcgtcatcacctccatgaagacaggagagctggagaaggagacagcccccctgaggaaggatgctgacagcagcatctctgtgctggagatccacagccagaaggcccagatcgaggagccagaccccccagagatggagaccagcctggacagcagcgagatggccaaggacctgagcagcaagacagccctgagcagcacagagagctgcaccatgaagggggaggagaagagccccaagaccaagaaggacaagaggcctcccatcctggagtgcctggagaagctggagaagagcaagaagaccttcctggacaaggatgcccagaggctgagccccatccctgaggaggtgcccaagagcaccctggagagcgagaagccaggcagccctgaggccgctgagaccagcccccccagcaacatcatcgaccactgtgagaagctggccagcgagaaggaggtggtggagtgccagagcaccagcacagtgggcggccagagcgtgaagaaggtggacctggagaccctgaaggaggacagcgagttcaccaaggtggagatggacaacctggacaatgcccagaccagcggcatcgaggagcccagcgagaccaagggctccatgcagaagagcaagttcaagtacaagctggtgcctgaggaggagaccacagcctctgaaaatacagagatcaccagcgagcggcagaaggagggcatcaagctgaccatccgcatcagcagcaggaagaagaagccagacagcccccccaaggtgctggagcctgagaacaagcaggagaagacagagaaggaggaggagaagaccaacgtgggccgcaccctgcggcgcagcccccgcatcagccggcccacagccaaggtggccgagatccgggaccagaaggctgacaagaagagaggagaaggagaagatgaggtggaggaggagagcacagccctgcagaagacagacaagaaggagatcctgaagaagtctgagaaggacaccaacagcaaggtgtccaaggtgaagcccaagggcaaggtgcgctggacaggcagcaggacccggggccgctggaagtacagcagcaatgatgaaagtgagggcagcggcagcgagaagagcagcgctgccagcgaggaggaggaggagaaggagagcgaggaggccatcctggctgatgatgatgagccctgcaagaagtgtggcctgcccaaccaccctgagctgatcctgctgtgtgacagctgtgacagcggctaccacacagcctgcctgcggccccccctgatgatcatcccagatggagagtggttctgccccccctgccagcacaagctgctgtgtgagaagctggaggagcagctgcaggacctggatgtggccctgaagaagaaggagagagctgagaggaggaaggagcggctggtgtatgtgggcatcagcattgagaacatcatccccccccaggagccagacttcagcgaggaccaggaggagaagaagaaggacagcaagaagagcaaggccaacctgctggagaggaggagcaccaggaccaggaagtgcatctcctacagatttgatgaatttgatgaggccattgatgaggccattgaagatgacatcaaggaggctgatggcggcggcgtgggccggggcaaggacatcagcaccatcaccggccaccggggcaaggacatcagcaccatcctggatgaggagaggaaggagaacaagaggccccagagagctgctgctgcccggaggaagaagagaagaaggctgaatgacctggacagcgacagcaacctggatgaggaggagagtgaagatgagttcaagatcagtgatggcagccaggatgaatttgtggtgtctgatgaaaatccagatgagagcgaggaggacccccccagcaatgatgacagcgacacagacttctgcagccggcggctgcggcggcaccccagccggcccatgaggcagagccggcggctgcggaggaagacccccaagaagaagtacagtgatgatgatgaggaggaggagagcgaggagaacagccgggacagcgagagtgacttcagtgatgacttcagtgatgactttgtggagaccaggagaagaagaagcagaagaaaccagaagaggcagatcaactacaaggaggacagcgagagtgatggcagccagaagagcctgcggcggggcaaggagatccggcgggtgcacaagaggcggctgagcagcagcgagagcgaggagagctacctgagcaagaacagtgaagatgatgagctggccaaggagagcaagaggtctgtgaggaagaggggccgcagcacagatgagtacagcgaggctgatgaggaggaggaggaggaggagggcaagcccagcaggaagaggctgcaccgcatcgagacagatgaggaggagagctgtgacaatgcccatggagatgccaaccagcctgcccgggacagccagccccgggtgctgcccagcgagcaggagagcaccaagaagccctaccgcatcgagagtgatgaggaggaggactttgaaaatgtgggcaaggtgggcagccccctggactacagcctggtggacctgcccagcaccaacggccagagccctgggaaggccatcgagaacctgattggcaagcccacagagaagagccagacccccaaggacaacagcacagccagcgccagcctggccagcaatggcaccagcggcggccaggaggccggggcccctgaggaggaggaggatgagctgctgcgggtgacagacctggtggactatgtgtgcaacagcgagcagctgtag

SEQ ID NO: 192190 - DNA, 3570 bp, Artificial Sequence
  derived and/or modified sequence
atgaagtctgaggagcagcccatggacctggagaacagaagcacagccaacgtgctggaggagaccaccgtgaagaaggagaaggaggatgagaaggagctggtgaagctgcccgtcatcgtgaagctggagaagcccctgcctgaaaatgaggagaagaagatcatcaaggaggagagtgacagcttcaaggaaaatgtgaagcccatcaaggtggaggtgaaggagtgcagagctgaccccaaggacaccaagagctccatggagaagcctgtggcccaggagcctgagagaattgaatttggaggcaacatcaagagcagccatgagatcacagagaagagcacagaggagacagagaagctgaagaatgaccagcaggccaagatccccctgaagaagcgggagatcaagctgagtgatgactttgacagccctgtgaagggccccctgtgcaagtctgtgacccccaccaaggagttcctgaaggatgagatcaagcaggaggaggagacctgcaagaggatcagcaccatcacagccctgggccacgagggcaagcagctggtgaatggagaggtgtctgatgagcgggtggcccccaacttcaagacagagcccatcgagaccaagttctatgagaccaaggaggagagctacagccccagcaaggacaggaacatcatcacagagggcaatggaacagagagcctgaacagcgtcatcacctccatgaagacaggagagctggagaaggagacagcccccctgaggaaggatgctgacagcagcatctctgtgctggagatccacagccagaaggcccagatcgaggagccagaccccccagagatggagaccagcctggacagcagcgagatggccaaggacctgagcagcaagacagccctgagcagcacagagagctgcaccatgaagggggaggagaagagccccaagaccaagaaggacaagaggcctcccatcctggagtgcctggagaagctggagaagagcaagaagaccttcctggacaaggatgcccagaggctgagccccatccctgaggaggtgcccaagagcaccctggagagcgagaagccaggcagccctgaggccgctgagaccagcccccccagcaacatcatcgaccactgtgagaagctggccagcgagaaggaggtggtggagtgccagagcaccagcacagtgggcggccagagcgtgaagaaggtggacctggagaccctgaaggaggacagcgagttcaccaaggtggagatggacaacctggacaatgcccagaccagcggcatcgaggagcccagcgagaccaagggctccatgcagaagagcaagttcaagtacaagctggtgcctgaggaggagaccacagccagcgagaacacagagatcaccagcgagcggcagaaggagggcatcaagctgaccatccgcatcagcagcaggaagaagaagccagacagcccccccaaggtgctggagcctgagaacaagcaggagaagacagagaaggaggaggagaagaccaacgtgggccgcaccctgcggcgcagcccccgcatcagccggcccacagccaaggtggccgagatccgggaccagaaggctgacaagaagagaggagagggggaggatgaggtggaggaggagagcacagccctgcagaagacagacaagaaggagatcctgaagaagtctgagaaggacaccaacagcaaggtgtccaaggtgaagcccaagggcaaggtgcgctggacaggcagcaggacccggggccgctggaagtacagcagcaatgatgagagcgagggcagcggcagcgagaagagcagcgctgccagcgaggaggaggaggagaaggagagcgaggaggccatcctggctgatgatgatgagccctgcaagaagtgtggcctgcccaaccaccctgagctgatcctgctgtgtgacagctgtgacagcggctaccacacagcctgcctgcggccccccctgatgatcatcccagatggagagtggttctgccccccctgccagcacaagctgctgtgtgagaagctggaggagcagctgcaggacctggatgtggccctgaagaagaaggagcgggcagagaggaggaaggagcggctggtgtatgtgggcatcagcattgagaacatcatccccccccaggagccagacttcagcgaggaccaggaggagaagaagaaggacagcaagaagagcaaggccaacctgctggagcggcgcagcaccaggaccaggaagtgcatctcctacagatttgatgaatttgatgaggccattgatgaggccattgaagatgacatcaaggaggctgatggcggcggcgtgggccggggcaaggacatcagcaccatcaccggccaccggggcaaggacatcagcaccatcctggatgaggagaggaaagaaaacaagaggccccagagagctgctgctgcccggaggaagaagagaagaaggctgaatgacctggacagcgacagcaacctggatgaggaggagagtgaagatgagttcaagatcagtgatggcagccaggatgaatttgtggtgtctgatgagaacccagatgaaagtgaagaagatcctcccagcaatgatgacagcgacacagacttctgcagccggcggctgcggcggcaccccagccggcccatgaggcagagccggcggctgcggaggaagacccccaagaagaagtacagtgatgatgatgaggaggaggagagcgaggagaacagccgggacagcgagagtgacttcagtgatgacttcagtgatgactttgtggagaccaggagaagaagaagcagaagaaaccagaagaggcagatcaactacaaggaggacagcgagagtgatggcagccagaagagcctgcggcggggcaaggagatcagaagagtgcacaagaggcggctgagcagcagcgagagcgaggagagctacctgagcaagaacagtgaagatgatgagctggccaaggagagcaagaggtctgtgaggaagaggggccgcagcacagatgagtacagcgaggctgatgaggaggaggaggaggaggagggcaagcccagcaggaagaggctgcacagaattgaaacagatgaggaggagagctgtgacaatgcccatggagatgccaaccagcctgcccgggacagccagccccgggtgctgcccagcgagcaggagagcaccaagaagccctacagaattgaaagtgatgaggaggaggactttgaaaatgtgggcaaggtgggcagccccctggactacagcctggtggacctgcccagcaccaacggccagagccctgggaaggccattgaaaatctcatcggcaagcccacagagaagagccagacccccaaggacaacagcacagccagcgccagcctggccagcaatggcaccagcggcggccaggaggccggggcccctgaggaggaggaggatgagctgctgcgggtgacagacctggtggactatgtgtgcaacagcgagcagctgtag

SEQ ID NO: 192191 - DNA, 2412 bp, Artificial Sequence
  derived and/or modified sequence
gagaccctggccctgctgaaggcccagattgatcctgtgctgctgaagaacagcagccagcaggacaacagcagccgggagagccccagcctggaggatgaggagaccaagaaggaggaggagacccccaagcaggaggagcagaaggagagcgagaagatgaagtctgaggagcagcccatggacctggagaacagaagcacagccaacgtgctggaggagaccaccgtgaagaaggagaaggaggatgagaaggagctggtgaagctgcctgtgattgtgaagctggagaagcccctgcctgaaaatgaggagaagaagatcatcaaggaggagagtgacagcttcaaggaaaatgtgaagcccatcaaggtggaggtgaaggaatgtagagctgaccccaaggacaccaagagctccatggagaagcctgtggcccaggagcctgagcgcatcgagtttggaggcaacatcaagagcagccatgagatcacagagaagagcacagaggagacagagaagctgaagaatgaccagcaggccaagatccccctgaagaagcgggagatcaagctgagtgatgactttgacagccctgtgaagggccccctgtgcaagtctgtgacccccaccaaggagttcctgaaggatgagatcaagcaggaggaggagacctgcaagaggatcagcaccatcacagccctgggccacgagggcaagcagctggtgaatggagaggtgtctgatgagcgggtggcccccaacttcaagacagagcccatcgagaccaagttctatgagaccaaggaggagagctacagccccagcaaggacaggaacatcatcacagagggcaatggaacagagagcctgaacagcgtcatcacctccatgaagacaggagagctggagaaggagacagcccccctgaggaaggatgctgacagcagcatctctgtgctggagatccacagccagaaggcccagatcgaggagccagaccccccagagatggagaccagcctggacagcagcgagatggccaaggacctgagcagcaagacagccctgagcagcacagagagctgcaccatgaagggggaggagaagagccccaagaccaagaaggacaagaggcctcccatcctggagtgcctggagaagctggagaagagcaagaagaccttcctggacaaggatgcccagaggctgagccccatccctgaggaggtgcccaagagcaccctggagagcgagaagccaggcagccctgaggccgctgagaccagcccccccagcaacatcatcgaccactgtgagaagctggccagcgagaaggaggtggtggagtgccagagcaccagcacagtgggcggccagagcgtgaagaaggtggacctggagaccctgaaggaggacagcgagttcaccaaggtggagatggacaacctggacaatgcccagaccagcggcatcgaggagcccagcgagaccaagggctccatgcagaagagcaagttcaagtacaagctggtgcctgaggaggagaccacagcctctgaaaatacagagatcaccagcgagcggcagaaggagggcatcaagctgaccatccgcatcagcagcaggaagaagaagccagacagcccccccaaggtgctggagcctgagaacaagcaggagaagacagagaaggaggaggagaagaccaacgtgggccgcaccctgcggcgcagcccccgcatcagccggcccacagccaaggtggccgagatccgggaccagaaggctgacaagaagagaggagaaggagaagatgaggtggaggaggagagcacagccctgcagaagacagacaagaaggagatcctgaagaagtctgagaaggacaccaacagcaaggtgtccaaggtgaagcccaagggcaaggtgcgctggacaggcagcaggacccggggccgctggaagtacagcagcaatgatgaaagtgagggcagcggcagcgagaagagcagcgctgccagcgaggaggaggaggagaaggagagcgaggaggccatcctggctgatgatgatgagccctgcaagaagtgtggcctgcccaaccaccctgagctgatcctgctgtgtgacagctgtgacagcggctaccacacagcctgcctgcggccccccctgatgatcatcccagatggagagtggttctgccccccctgccagcacaagctgctgtgtgagaagctggaggagcagctgcaggacctggatgtggccctgaagaagaaggagagagctgagaggaggaaggagcggctggtgtatgtgggcatcagcattgagaacatcatccccccccaggagccagacttcagcgaggaccaggaggagaagaagaaggacagcaagaagtag

SEQ ID NO: 192192 - DNA, 4326 bp, Artificial Sequence
  derived and/or modified sequence
atggccaccgccgccgccgccgccgccgtgatggccccccccggctgtccaggaagctgccctaattttgccgtcgtgtgtagttttctggaacgatacggacctctcctcgaccttccagaactgccatttccagagctggagcgtgtgctgcaggccccaccaccggacgtgggcaacggtgaggttcccaaggagctggtggaactgcatctgaaactgatgcgaaagataggcaagtcagtcaccgcagataggtgggaaaaataccttataaaaatctgccaggaattcaacagcacgtgggcttgggaaatggagaagaagggctatctggaaatgtccgtggagtgcaagcttgccctgttgaagtacctctgtgaatgtcagttcgacgacaacctgaaattcaaaaacataatcaacgaggaggacgctgatacaatgcggctccagcctataggacgcgataaagacggtttaatgtactggtaccagctggatcaggatcacaatgtccgtatgtacatagaagaacaggatgatcaagatggctcctcatggaagtgtattgttcggaaccgtaacgaactcgccgaaacgttggccctcctgaaggcccagatcgatcctgtcctcctcaaaaatagctctcagcaggacaactcctcccgggagagcccctccctggaagacgaggagacgaagaaagaggaagagaccccaaaacaggaggagcaaaaagaatctgaaaaaatgaagagcgaagaacaacctatggatctggagaatcggtcaactgctaatgtgcttgaagagaccacggtaaagaaggagaaggaggacgaaaaggagctggtgaaactgcccgtgatcgttaaactggaaaagccccttcccgaaaatgaagagaagaaaattatcaaagaggagagcgatagcttcaaagagaacgtgaaacccatcaaggtggaggtaaaagagtgtagagcagaccctaaggacacaaaaagctccatggagaagcccgtcgcacaggagccagaaagaatagaattcggcggcaatataaaatctagtcatgaaattacagaaaagagcactgaggaaacggagaagttaaagaatgaccagcaggctaaaatccctcttaaaaagcgagaaataaagctgagtgacgactttgattctcctgtgaagggccccctgtgtaaaagtgtgacacccactaaagaattccttaaggatgagatcaaacaggaggaagagacttgcaaacgcatctccacaatcacagcgctgggccacgagggcaagcagctggtcaatggggaagtgtccgacgagagggtagccccaaacttcaagaccgagccaattgagacaaaattctacgaaacaaaagaagaatcttacagtccctcaaaggatcgaaatataattacggaaggcaatggcacagagtctttaaattcagtgatcacctcaatgaaaaccggagagctagaaaaagagaccgcccccctgcggaaggacgccgactcctccatctctgttttggagatacactcacagaaagcccagattgaagagccagacccacccgagatggaaacatcgttggattcttcagagatggcaaaagacctgtcatctaaaaccgcgctttccagtacagaaagctgtacaatgaaaggcgaggaaaaatctcctaaaaccaaaaaagataagcggcctccaatcctggagtgcctcgaaaaacttgaaaaaagtaaaaagacctttctcgataaggacgctcagaggctgagtcctatacccgaggaggttcctaaatctacactggaaagcgagaagccaggctctccggaggccgccgagaccagcccccctagtaacatcattgaccactgtgaaaaactggcttccgagaaggaggtagtggaatgtcagtctacgagcacggtgggaggacagagcgtcaagaaggtggacctggaaacgttaaaggaagactccgaattcactaaggtcgaaatggacaacttggataacgcacaaacatccggaatcgaagaaccatccgaaacaaagggatcgatgcagaagagcaaatttaagtataagctggtgcctgaggaagagaccaccgcatccgagaacactgaaattacctccgagcggcaaaaggaggggattaaactgaccattcgaataagctcccggaaaaaaaagcccgattctccccccaaggtcctcgaacctgagaacaagcaggaaaagacagagaaggaggaagaaaaaaccaacgttggccggactcttcgccgtagtcccaggatcagcagacccacagctaaagttgccgaaattagggaccaaaaggctgacaagaaacgcggggaaggggaggatgaggttgaggaagagtctacagccctgcaaaaaacagacaagaaagaaattctcaagaaatccgaaaaggacacaaattcgaaggtttcaaaagtgaaacctaaaggtaaagtacgatggaccggcagcagaactaggggacggtggaagtatagttccaatgacgagtcagagggctcaggatctgagaagtcctcagctgcatctgaggaagaggaggagaaagagagtgaagaggctatcctagcagacgatgacgagccgtgtaaaaagtgcggcttgcccaatcatcccgaacttatcctgctttgcgatagctgcgacagcgggtatcatactgcttgtctgcggccgcctttaatgatcatcccggacggagagtggttctgccccccttgtcagcacaaactgctttgcgaaaagctcgaggagcaactgcaggatctggatgtggctctgaagaagaaagagcgggcagaacgccgaaaggagcgactggtgtacgtgggcatcagcatcgagaatatcatcccgccccaggagcctgatttctcagaagaccaagaagagaaaaagaaggactcaaagaagtcaaaagcgaacctactggaacggagatctacaaggacacggaaatgtatctcttacaggttcgatgagttcgacgaggcgattgatgaggcaattgaagatgatatcaaagaagctgacggaggtggggtcggtagggggaaggatatcagcacaattactgggcacagggggaaggacattagcactatcctggacgaggagagaaaggaaaataagaggcctcagagggctgctgccgctagaagaaaaaagcgccgtaggctcaacgacttggactccgactcaaatcttgatgaggaggagagcgaggatgagtttaaaatctcggacggctcacaggatgagttcgtagtgagcgatgaaaatcccgacgagagcgaggaggatccacctagtaacgatgacagtgacactgacttttgcagccgcagactgcggcgacacccgtctcgcccgatgagacagtctagacggctaaggaggaaaacacccaagaaaaaatactcagatgacgatgaagaagaggaatccgaggaaaactccagggattctgagagcgatttcagtgacgatttttccgatgattttgtagagacccgacggcgacggagtcgcaggaatcagaagcggcaaatcaattataaggaagactctgagtcggatgggtctcaaaaatctcttcggcgcgggaaggagatccgacgcgtacacaagagaagactgagttcttcggaatcagaagagagctatctgtctaaaaactctgaagacgacgaactggcgaaggagtctaaaagaagcgttcgcaaaagaggcagatcgaccgacgaatattcagaggccgatgaggaggaagaggaagaggagggcaagcccagcaggaaacgcctgcaccggatagaaactgatgaagaggagagctgcgataacgctcacggcgatgccaaccagccagcacgcgacagtcagccacgcgtgctacctagcgagcaggaatccacaaagaaaccatatagaattgagtctgatgaggaggaggactttgaaaatgtgggaaaggttgggtcacccctagactatagtctggtagacctgccttctacaaacgggcagtcacctggcaaggccattgagaacttaattggcaaacctacggaaaagtctcagacccccaaagacaactcaaccgccagcgcatctctagcatccaatggcacgagcggtggccaggaggccggcgcccccgaagaggaagaggatgaactgctgagggtcacagatctcgtggattacgtgtgcaattctgagcagctctag

SEQ ID NO: 192193 - DNA, 4233 bp, Artificial Sequence
  derived and/or modified sequence
atggccaccgccgccgccgccgccgccgtgatggccccccccggctgccccggttcttgccccaatttcgccgtggtgtgtagttttttagagcggtacggcccccttctggatttgcccgagttgccgttccctgaactagagcgtgttctccaggcacctccccctgatgtgggcaacggtgaagtccctaaagaactggtggaactgcatttgaagcttatgagaaagatcgggaaatctgtcacggccgacagatgggagaaataccttattaagtacctgtgcgagtgtcagtttgacgacaaccttaagtttaagaatatcatcaatgaggaggacgctgatacaatgcgcctgcaacctattggaagagacaaggatggtctgatgtattggtaccagctggaccaggaccacaacgtgcgaatgtatatcgaagagcaagatgatcaggacggctcgtcatggaagtgcattgtgcgcaatcggaacgaactcgccgagacgttggctttactcaaggcccagatcgatcccgtgctcctgaagaattctagtcagcaggacaactcttctcgagagtcaccttccctcgaagacgaggagacgaaaaaagaggaagagacgcccaaacaggaggagcagaaggaaagcgaaaagatgaaatctgaagagcagcctatggacttagagaatcgcagcaccgcaaacgtgctggaggaaaccacagttaaaaaggaaaaggaggatgaaaaggaacttgtgaagctgccagtgattgttaagttggagaaaccactgcccgaaaacgaggagaaaaagataattaaggaggagtctgatagcttcaaagagaacgtgaagcccatcaaggtggaagtgaaagagtgccgcgccgacccgaaggacacaaagagtagtatggagaaacccgtcgctcaagaacccgagaggatcgagtttggcggcaatataaaaagttcacatgagattacggagaagtccacagaggaaaccgagaagctcaagaacgaccaacaggccaagattcctctaaagaaacgggaaattaaattgtccgatgatttcgatagccccgtgaaaggacccctgtgtaagagtgtgacacccacaaaagagtttctgaaggacgaaataaaacaggaggaggagacttgtaaacggatttccaccattaccgctttgggccacgagggtaaacagcttgtaaatggcgaagtgtcagacgaaagagtggcccctaatttcaagaccgagccgattgagacaaagttttacgaaacaaaagaggagtcttacagcccatcaaaagaccgcaatatcatcacagagggaaatggcacagagagtctaaacagcgtaatcacatccatgaaaaccggcgagctggagaaggagactgctccgctgagaaaagatgctgattcttccatatcagtcttagagattcactctcagaaagctcagatcgaagaaccggatcccccggagatggaaacatcgttagactcttcagagatggctaaggatctcagcagcaagacagctctcagctctaccgaatcttgcaccatgaagggggaggaaaagagtccaaagactaagaaagacaagcggccaccaatactggagtgcttggaaaaactcgagaagtctaagaaaactttcttggacaaggatgcccagaggctgagcccgatccctgaagaggtccctaagagcactctggaatcagaaaaaccaggaagccctgaagccgctgagacgagcccaccgtcgaatattatagatcattgcgaaaagttggcaagtgaaaaagaggttgtggaatgtcaatccactagcaccgttggagggcagagtgttaagaaggtggacctggaaaccctgaaggaagactcagagtttacgaaagtcgaaatggataacctagacaacgcacagacttccggcatcgaggagcctagtgagacgaaggggagtatgcagaaaagtaagttcaaatacaaacttgtgccagaagaggaaactacagcatctgagaacacagagatcacttccgaaagacagaaggaaggtattaaactcaccattaggattagctctcggaaaaagaaacccgacagtcctccaaaggtactggaaccggaaaataagcaggagaaaacagagaaggaagaggaaaagaccaacgtgggccggacactgcgtcgaagccctcgtatatctcgccctactgcaaaggtagccgagattcgcgatcagaaggccgacaaaaaaaggggagagggggaggacgaggtggaagaagagagtacagctttgcagaagacagataagaaggaaatcctgaaaaagtccgagaaagacacgaacagcaaagtgtcgaaagtgaaacctaaaggaaaggttagatggaccgggtcaagaactcggggacggtggaaatactccagcaatgacgaaagtgagggttccggaagcgaaaaatcaagtgcagcatccgaagaagaagaagaaaaggagagtgaggaggcaatcttagccgacgatgacgaaccctgtaaaaaatgtggtttgccaaatcaccccgagcttatcttgctgtgcgattcttgcgactcaggttatcacacagcctgtctgaggcctcccctcatgattatccctgacggagagtggttttgtcctccatgccagcacaagctgctttgtgaaaagctggaggagcaactgcaggacctcgatgtggcgctgaagaagaaagaaagagctgagcgaagaaaagagagattggtctatgtcggaataagcatcgagaatattatccctcctcaggagcctgactttagcgaggatcaggaggaaaaaaaaaaggattctaagaagtcaaaagctaatttgctggagcggcggagtacccgcacccgcaagtgtatctcgtaccgatttgatgaattcgatgaagcgattgatgaggccatcgaggacgacattaaagaagctgacggtggcggcgtcggacggggaaaagatatctccactattacaggacatagaggaaaagatattagcactatcttggacgaggaacgcaaggagaataaacggccccagagggcagcagctgcacgtagaaaaaagcgacggaggttgaacgacctggactccgacagtaacttggatgaagaagagagtgaggacgaattcaagatttctgatggctcacaggatgagtttgttgtgtccgacgaaaatccggatgagtctgaagaggaccctcccagcaacgatgactcagacaccgatttttgcagccgacgactccggcgccatccttctcgacccatgcgccagtcccgacggctcaggagaaagacccctaaaaaaaaatacagtgacgatgatgaagaggaagagagcgaggagaatagtagagactcagaatcggatttttcagacgatttttccgacgacttcgtggaaactcgcagaagaagatcccggcgaaaccagaaacgtcaaataaattataaagaggatagtgagagtgacgggtcccagaaatctctgcggagaggtaaagaaatccgccgtgtgcataagcgacggctttcttctagcgaaagtgaagagtcatacctctcaaaaaatagcgaagacgatgagcttgccaaggagagtaaaaggtcagtcaggaagaggggtcgatcaacggacgagtatagtgaagcagatgaggaagaggaggaagaggagggtaaaccctccagaaaacggctccacagaatcgaaaccgacgaagaggagtcctgtgataacgctcacggggatgctaaccaaccagctagggactcacagcccagagtgcttccatcagagcaggaaagtactaagaagccatatcgaatcgaatccgatgaggaagaagattttgaaaatgtcggcaaggttggcagcccattagattatagcctggtggacctcccatctactaacggccagtctcctggcaaagccatcgagaatctgattggcaaacctaccgagaaatcacagactcccaaagacaactccactgcctccgcttcactggcctcaaacggtacatccggtggccaggaagcaggggcacccgaagaggaggaagatgaactgttacgggtgacagacctggtggattacgtgtgcaactcggagcagctctag

SEQ ID NO: 192194 - DNA, 3570 bp, Artificial Sequence
  derived and/or modified sequence
atgaagagcgaggagcagcccatggacctggagaaccggagcaccgctaacgtgctagaagagaccacagttaagaaagagaaggaagacgagaaagaattggtgaagcttcccgtcatagtgaaacttgagaagcctctccccgaaaatgaggaaaagaagataataaaggaggaaagtgatagcttcaaggagaacgtgaagcccataaaggtagaggtaaaagaatgcagggccgatcctaaagatactaagagttccatggaaaagccagtggcacaggagccagaacgcatcgagttcgggggcaacatcaagtcatcacacgaaataacagaaaagtctaccgaggaaaccgagaaactcaaaaatgaccagcaggctaagattccgctgaagaagcgagaaattaagctttccgacgactttgattctccagtaaagggccccctctgtaaatctgtcacaccaaccaaggaatttcttaaggatgagattaagcaagaggaagaaacatgcaaaagaatctctaccattacggcccttggccatgaaggaaagcaattagtgaatggcgaggtgagcgatgagcgcgtagctcctaacttcaagactgagcccatcgaaacgaaattctacgagactaaagaggagtcctactccccttctaaagatcgcaacatcattaccgagggtaacggcacagagtctctgaactccgtgattacaagtatgaagaccggcgaactcgagaaggagacagcacccctgcggaaagacgcagatagttctattagcgttctcgagatccattcacaaaaggcccagatagaggagcctgacccaccagaaatggagacatccctggatagcagcgaaatggctaaggatctctcttccaagaccgctctgagctctaccgagtcttgtactatgaagggagaggaaaagtcaccaaagactaagaaggacaagagacctcctatcttggaatgcctggagaaacttgagaagtcgaagaaaacatttttagataaagatgctcagcgcctttctccgattcccgaagaagtgccgaaatccaccctcgagtcagagaagcctggctctcctgaggcagcggagacttctccaccaagcaatatcatcgaccactgcgaaaagcttgccagtgagaaggaagtggtagaatgccagtccacatccaccgtcggcggccaatccgttaaaaaagtggatctggaaacgctaaaggaggactccgaatttacaaaggtggaaatggacaatctggataatgcgcagactagcggcatagaggagcccagcgagacaaaggggagtatgcagaagtctaaattcaaatacaagctcgtcccggaagaagagaccacggcctcagagaacaccgaaatcactagtgagcgacagaaagaggggattaagctgacaatccgaatttcttccaggaagaagaagccggattcccctcctaaggtattggaacccgaaaataaacaggaaaaaactgagaaggaagaggagaaaactaacgttgggcgcacactgagaaggtctccacgaatcagcaggccaacggcaaaagtggccgaaatccgcgatcaaaaggcagataagaaaaggggtgagggggaggatgaggtggaggaggaatcaacagcccttcaaaaaaccgacaagaaagagatactgaaaaagagcgagaaggacactaactctaaagtcagtaaggtgaagccaaagggaaaggtacggtggactggctctcgcaccaggggaagatggaagtatagttccaacgacgagtccgagggttcaggctcagagaagagcagcgccgctagcgaagaggaggaggagaaggagtctgaagaagctatcctcgccgatgatgacgaaccgtgtaagaagtgtggtcttcctaaccatccggagctaatcttgctgtgtgactcctgtgatagcggatatcacactgcttgcctgcggccccccttgatgatcattccagacggcgagtggttctgtccgccctgccaacacaaactcctgtgtgaaaagctggaagaacagctacaagacttggatgtcgctcttaaaaagaaggagcgggccgagcgcaggaaggagagactggtctacgttggcatatccatcgaaaacatcattcctccgcaggaaccagacttcagcgaggatcaagaagagaaaaagaaagactccaagaagagcaaagcaaacctgctggaacggcggtctacccgaacaagaaaatgcatctcttatcgatttgatgaattcgacgaggcaatcgacgaggccattgaggatgacatcaaagaagcagacggtggaggcgtgggtcggggaaaggatatctctacaattacagggcacaggggaaaggatatcagcacaattctcgatgaggagcgcaaagagaataaaaggccccagagagcagccgctgccaggcgaaagaagcgtagaaggctgaatgacctggattccgattccaatctggatgaagaggagtctgaggatgaatttaagattagcgacggctctcaggatgagttcgtagtctccgacgagaatcccgatgaaagtgaggaggatcccccctcgaacgacgacagcgacactgacttctgctctcggagactgagacgacaccccagcaggcccatgcgacaaagtagacgactgcggcgaaaaactccaaaaaaaaaatattctgatgatgacgaggaggaggagtccgaagagaacagcagggacagtgaatccgacttctcagacgacttctccgatgactttgtggaaacgcgtcgaaggcgatccaggaggaaccagaagcgccagattaactacaaggaagattccgagtccgacggaagtcagaaaagcctacgaagaggaaaggagatcaggagggtgcacaagaggagactctcctcaagtgagtcagaagagagttacttgagtaagaattctgaagacgacgaacttgccaaggagtccaagaggtccgttcgtaagagaggaaggagcactgacgagtattctgaggccgatgaagaagaggaagaggaagaagggaagcccagtcgaaaaaggttgcatcggatagaaaccgatgaggaggagagctgcgacaacgctcatggagacgctaaccagcctgcaagagactcccaaccaagggtcctcccttccgaacaagaatccaccaagaaaccctatcgcattgaatctgatgaggaggaggattttgagaacgtcggcaaagtgggatcaccactggattatagcctcgttgacttaccatccacaaacggccagagccctggaaaagctatcgaaaacttgattgggaaacctactgagaaaagccagactcccaaagataacagcacagccagcgccagtctggctagtaatggcacatcagggggacaagaggcaggggcccccgaggaggaagaagacgagctgttgagggttaccgatttggttgactacgtctgcaattctgagcagttgtag

SEQ ID NO: 192195 - DNA, 2412 bp, Artificial Sequence
  derived and/or modified sequence
gagaccctggccctgctgaaggcccagatcgaccccgtgctgctgaagaattcatcccagcaggacaattccagtcgcgaaagcccaagtctcgaggacgaagagaccaaaaaagaggaggaaacgcccaaacaagaggagcaaaaggaaagtgagaaaatgaaatctgaagagcaaccaatggatcttgagaatcggagcacggctaatgtgctggaagaaaccaccgtcaagaaggagaaggaggatgagaaggaactggtgaagctgccagtgatcgttaaactcgagaagccccttcccgagaacgaagagaaaaagatcatcaaggaggaaagcgactccttcaaagagaacgtcaagccaattaaggtggaggtaaaggagtgccgcgctgatcccaaagacaccaagagctccatggaaaaaccggtggcacaggaacctgaacgcatcgaattcggcggaaacattaaatcctcacacgagattactgagaagagcaccgaggaaaccgagaaactgaagaatgaccagcaggccaaaatacccctaaaaaagcgagaaattaaactgagtgacgactttgattcccctgtcaaaggacccctctgcaagtctgttactccaacgaaggagttcttgaaagacgagatcaagcaggaggaagagacctgcaaacgcatttcaactattaccgccttaggccatgaaggtaaacagttggtgaacggtgaggtgtctgacgaacgggtcgcccctaatttcaaaaccgaacccatcgaaactaagttttatgagactaaggaggaatcttactcacctagtaaggacagaaatatcatcacagaaggcaatggcacagagtccctcaactctgtgattacctcgatgaaaactggagagcttgaaaaagagactgcccccttgcgaaaggatgccgactcctcaatatcagttcttgaaatccactcccaaaaagctcagatcgaggaaccagacccacccgaaatggagaccagtctggatagttctgagatggccaaggatttgagttcaaaaaccgccttgtcctctaccgagtcctgtactatgaagggggaggaaaagagtccaaaaaccaaaaaggacaagagacccccaatccttgaatgcctggaaaagttggaaaagagtaagaaaacttttctggacaaggacgcccagcgcttaagccccatccccgaagaggttcccaagagcacactggaaagtgagaaaccgggctctccagaggccgctgagacatcaccaccatctaacataatcgatcattgcgaaaagcttgcttcagagaaagaggtggtggagtgtcagagcacttccacagtggggggtcaaagcgtgaagaaggtggacctcgagacacttaaagaagacagtgagtttaccaaggtagaaatggataacctcgataatgctcaaacttcgggcatcgaggagccatccgagacaaagggctccatgcagaaatccaagttcaaatacaagcttgtccccgaagaggagacaaccgccagtgaaaataccgagattacttcggaacggcagaaggagggcatcaagctgacaatccgaatatcttcacggaagaaaaaacccgacagtccacctaaggttctagaacctgaaaacaagcaggaaaaaaccgaaaaggaggaggaaaagaccaatgtaggtcgcaccctgcgccgatctcccaggatctccagaccgactgccaaagtggccgaaatacgcgaccagaaagccgacaaaaaacgcggagaaggggaagatgaagtcgaagaggaaagtaccgctctgcagaaaactgacaaaaaagaaattttaaagaaatctgagaaggatactaatagtaaagttagcaaagtgaagcctaaagggaaggtgcggtggaccggatcacgtacgagaggccgatggaaatacagcagtaatgatgaatccgagggttcaggatcagagaaatcatctgctgctagcgaagaggaggaagaaaaggaaagtgaagaggccatactagctgatgacgatgagccttgcaagaagtgtggattaccaaatcacccagagctgattctcctatgtgactcgtgcgacagcggttaccacactgcttgccttcggcccccattaatgatcattcctgatggcgagtggttctgtcccccgtgccagcacaagctgctgtgcgagaagctggaagagcagttacaggacctggacgtggcacttaaaaaaaaagagagggcggagagacggaaggagcgactggtgtacgtgggaatctccatagagaatatcattcccccccaagaacctgacttttccgaagaccaggaggaaaagaagaaagatagcaagaagtag

SEQ ID NO: 192196 - DNA, 4325 bp, Artificial Sequence
  derived and/or modified sequence
atggctactgccgctgccgcagccgcagttatggcccctccaggctgccccggatcctgcccaaactttgcggtggtttgctcatttctggagcgatatgggccactcctagatctcccagaactgccgttcccagagttggagagagtcctccaagctcctcctccagatgtgggcaacggtgaggtgccaaaggaattggtggaactgcatctgaagctgatgaggaaaataggaaaatctgttacagctgatagatgggaaaagtaccttatcaagatatgtcaagaatttaacagcacatgggcatgggagatggagaagaaggggtacctagaaatgtcggtggagtgtaaactagcgctgctaaaatacctttgcgaatgccagttcgatgataatcttaagtttaagaatatcatcaacgaagaggacgccgatactatgcgattgcaacccattggtcgggacaaggacggcctgatgtactggtaccaattagatcaggaccacaacgtgcgcatgtatattgaagagcaagacgatcaggacgggtcctcatggaagtgtatcgtgagaaaccgaaacgagttggctgaaacactggcactgctcaaagctcaaatcgacccagtgctgctgaaaaacagtagccaacaagacaattcttctcgcgaaagtccctccctggaagatgaagaaaccaagaaagaggaggaaacaccgaagcaggaagaacaaaaagagtctgaaaaaatgaagtcagaggaacagcctatggatcttgagaatcgcagtaccgctaacgtgttggaggagacgacagtaaaaaaagagaaagaagatgaaaaagaactcgtgaaattacctgttattgttaagttggagaaaccactgcctgaaaatgaagagaaaaagattattaaagaagagagcgattcgttcaaggaaaatgtaaagcccatcaaggtggaagtgaaggaatgtcgcgctgatcccaaggacacaaaatcttcaatggagaagccagtggctcaggaacccgagcgaatcgagtttggagggaatataaagtccagccatgagattactgaaaaatctactgaggaaactgagaaactaaaaaatgaccagcaggcgaagatccccctgaagaaaagagagatcaaactcagtgacgatttcgatagccctgttaagggccctctttgcaagtccgttaccccaaccaaggaattcctgaaagacgagattaaacaagaggaggagacgtgcaagcggatctccacaatcacagcactgggccatgagggcaagcagctcgttaacggggaggtttcggatgaacgcgtggcaccaaacttcaaaacagaacccatcgagaccaaattctacgagacgaaagaggagtcttacagcccaagcaaggacaggaatattataactgagggcaacggcacagagagcctgaattcagtgataactagcatgaagacaggtgagttggagaaagagacggcgcctctgcgtaaagatgctgattctagcatttccgtactggaaatccattcccagaaagctcagattgaagaacccgacccaccagaaatggaaaccagcctggactcaagcgaaatggcgaaagatctgtcgtccaagacagccctgtctagcaccgaaagctgtactatgaagggcgaggagaaatcacctaagacaaagaaagataaacgacccccaatattggagtgtttagaaaagttggaaaagagtaaaaagacctttcttgataaggatgctcagaggctctcaccgatccccgaagaagtccctaagtcaactctagaaagcgagaagccgggaagtccagaggccgcagagactagccccccatccaacattatcgatcactgcgagaagctggcctccgaaaaggaggtggtagagtgtcagtctactagcaccgtgggtgggcaaagcgtgaaaaaggtcgacctcgagacactgaaagaagatagtgaatttactaaggtagaaatggataatctcgacaatgcgcagacatctggaattgaagagccctccgaaacgaagggcagcatgcagaaatcgaagtttaagtataaactggtgcccgaagaagagacaactgccagtgagaatacagagattacttcggaacggcagaaggaaggaattaagctaacaatacgcatctctagtaggaaaaagaaacccgacagccccccaaaagtacttgagccagaaaacaaacaagagaagaccgaaaaggaggaggaaaagacaaacgtcggcaggacccttcggagaagtccccgtatatcccggccaaccgctaaggtggcagagattcgcgatcagaaggccgacaagaagagaggggaaggggaggacgaggtggaagaagaatcaacggccctgcagaaaacagacaaaaaagaaatcctgaaaaaaagcgagaaggacactaattcgaaggtctcaaaagtgaagccaaaggggaaagtaagatggacgggaagtagaactaggggcagatggaaatactcttccaacgatgagagtgagggatcaggatcagaaaagtcgtcggcagctagcgaggaagaagaggagaaagagagcgaggaagctatccttgccgatgacgacgaaccatgcaagaaatgcggcctccctaatcatcccgaactgattcttctgtgcgattcttgcgacagtggctatcacactgcctgtctcaggccgccactcatgatcatcccagatggagaatggttttgccccccatgccagcacaagttgctttgcgaaaaactagaagagcagctacaggacttggatgttgcgcttaagaaaaaggagcgcgcagagcgcagaaaagagagattagtctatgtgggcatcagcattgagaatattatccctcctcaagagccagacttctccgaagaccaagaggagaaaaaaaaagattctaagaagagtaaggcgaacctcctcgaaaggagatcaactcggaccaggaaatgcatctcttacagattcgatgagttcgacgaggcaatcgatgaggctattgaagatgacattaaggaagcggatggtggtggcgtgggcagaggcaaggacataagcactattactgggcaccgagggaaggacatctcgacaatcttagatgaagagcgcaaggagaacaagaggccacagcgcgcagcagctgccaggcgcaagaaacgtcggcgtctcaacgacctggactcagattcaaatctagatgaagaagaaagcgaggacgaatttaagatttcagatggatctcaagacgagtttgttgtcagcgacgaaaacccggatgagagcgaggaagatcctccaagcaacgatgactctgacacagacttttgcagtcgaaggcttcgtcgccacccctcccgccctatgcgtcagtcccgcagactcaggcgaaaaactccaaagaaaaagtatagcgacgacgacgaggaagaggagtccgaagaaaatagccgggactccgagtcagattttagcgacgacttctctgatgattttgtcgagacccggaggcgaagatctagaagaaatcagaagcggcagattaactataaggaggactcggaatctgacggatctcaaaagtccctccgtcggggtaaggaaataagacgggtacataaaagacggctaagctcaagcgagagcgaggagtcctatctgagcaaaaacagcgaggacgacgagctggcaaaagagagcaaacgtagcgttcgaaagcggggtcgaagtacggacgagtacagcgaagccgatgaagaagaagaagaagaggagggtaaacccagcagaaagcgcctgcatcggattgagaccgatgaggaagagagctgcgataatgcacacggggacgcgaatcaacctgccagggattcacaacctcgggtattgccttctgagcaggagagtaccaaaaaaccttaccgcattgaaagcgacgaagaagaggactttgaaaatgtggggaaagttggcagtccactcgactatagtctcgtagatctgccttccaccaatggacagagccccggtaaagccattgagaacctcattggcaagcccactgagaaatcccagacacccaaggataactctaccgcaagtgcgtctctggcatcaaacggaacgagtggtggtcaagaggcaggtgcgccagaggaagaagaggacgaacttcttcgggtaaccgatctcgtcgattacgtatgcaattctgaacagcttta

SEQ ID NO: 192197 - DNA, 4233 bp, Artificial Sequence
  derived and/or modified sequence
atggcgaccgccgcagctgctgcggctgtaatggcaccccctgggtgtcccggaagctgtcccaatttcgccgtggtgtgtagctttctcgaaagatatggtcccctgcttgatcttccagagctgccattccccgagctggaaagagtcctacaggcccctcctcccgatgtcggtaacggggaggtgcccaaagaacttgtggaactccatctgaagttaatgcgtaaaatcggcaaatccgtcaccgccgaccgctgggaaaaatatctcattaaatacttgtgtgagtgccagttcgacgacaatctaaagttcaagaacattattaacgaggaggatgcagacaccatgagactccaacctatcggcagagacaaagatgggcttatgtactggtaccagctggaccaggatcacaatgttcgtatgtacattgaggagcaagatgatcaggatggttcctcctggaagtgcatcgtgcgtaatcgaaacgagctagctgaaaccttggctctgctgaaagcccaaatagacccagttctacttaagaatagctcccagcaggacaacagcagccgggagtcacccagcctcgaagacgaggagaccaagaaagaggaagaaacaccaaagcaggaagaacagaaggagtcagaaaaaatgaaatcagaagaacaaccaatggatctggagaatcggtcaactgccaacgtgctcgaagagactactgtcaagaaagagaaagaggacgagaaggagctggtcaaactccccgtgattgtgaagctggagaaacccctgccggagaacgaagaaaagaagatcattaaggaggaaagtgattcctttaaggagaacgtgaaaccaattaaagtggaagtcaaggagtgtagggctgacccaaaagacacaaagtcttctatggaaaagccagtcgcacaggagccagaacgtatcgaatttggcggtaacataaagagctctcatgaaattactgagaaaagcaccgaagaaacagagaagcttaagaacgatcaacaggcgaaaatcccactaaaaaagcgcgaaatcaagttgagtgacgactttgacagtccagtgaagggacccctgtgcaaatcagtgacccccaccaaggaattcttgaaagatgaaatcaagcaggaagaagagacctgtaaaaggatctctactattactgccctcgggcatgagggcaagcagctggtaaatggggaagtctccgatgagagggtagcacctaacttcaagactgagccaatagagacaaagttctacgaaaccaaagaagagagctattccccgagtaaggatcgtaatattataactgaaggcaacgggactgagtccttgaacagtgttattacctcgatgaaaacaggagaacttgagaaggaaactgcccctcttagaaaggacgccgattcctctatcagcgtgctcgagattcactcacagaaggcccagatagaggagcctgatccccctgaaatggagaccagcttggattcttccgaaatggctaaggacctgtccagcaagacagcgctgagctcaaccgaatcttgcacaatgaaaggtgaagaaaaatcacctaagactaagaaggataagagaccacccatactggaatgcttggaaaaactggaaaagtctaagaagacatttctggacaaagacgcacaacgtttgtcaccaatcccggaagaggtacccaagtctactctggagtccgagaagccgggaagcccagaggcagctgaaacttctcccccaagcaatattattgatcattgcgaaaaactggcctcggaaaaagaggtcgttgagtgtcaatcaacgagcaccgtggggggacagtccgtaaagaaagttgatctggaaactctgaaggaggatagtgaatttacaaaagtagaaatggacaacctggacaatgcacaaaccagtggaattgaagagccatctgaaaccaaggggagcatgcagaagtccaagtttaaatacaaactggtgcctgaagaagaaaccacagcctctgagaacactgaaatcaccagtgagcgacagaaggagggcattaaactcactatccgaatttcttcacggaagaaaaagcctgactcaccaccgaaggtgttagaacctgagaataagcaagaaaaaacagaaaaggaagaagagaaaacgaacgtagggcgaaccctgcgtcgatctccacgtattagcaggcccacagccaaggttgccgaaatccgcgatcagaaggcagacaagaagaggggtgaaggtgaggacgaggtagaggaggagtctaccgctttacaaaagactgataagaaggagatcctcaaaaagtccgagaaagataccaactctaaggtgtcgaaggtgaagccgaaaggcaaagtccgttggaccggttctaggaccagaggccgatggaagtactcctctaatgacgaatcagagggaagcggaagtgagaagagctctgctgcaagcgaggaggaggaagaaaaggaatcagaggaggcaatcctggccgatgatgacgaaccatgcaagaagtgcggcctccctaaccacccggagttgatcctgctgtgcgattcctgcgattctggctaccatactgcctgtcttcggccacccctgatgattataccagacggtgagtggttttgccccccttgtcaacacaaactgttatgtgagaagctggaggagcagcttcaggaccttgacgtggccttgaagaagaaggagcgcgcagagaggcgtaaggagaggctggtatacgtcggtattagcattgaaaacatcatcccccctcaggagccagacttttccgaggatcaagaagagaaaaaaaaagattccaaaaaatctaaagctaacctcttggagagacgctcaaccagaaccaggaaatgcatatcttacagatttgatgaattcgacgaagccattgatgaagccatagaggatgatattaaagaggcggacgggggtggagttggacgaggcaaggatatcagcacaatcactggacacagagggaaagacatctctaccattcttgatgaagaaagaaaggaaaacaagagaccacaaagagctgctgccgcaagacggaaaaaacgcaggcgcctcaatgatttggatagcgacagcaatcttgacgaggaggagtctgaggacgagtttaaaatatcagacgggtcccaagacgaattcgtggtgtcagatgagaacccagatgagagcgaggaagatcctccatccaatgacgacagcgataccgatttttgctctcggaggttgcgcagacacccctcacggcctatgcgacaatcccgcagactcagacggaaaacccctaagaagaaatactccgacgacgatgaggaggaagagtcagaggagaactcgagagacagcgagagtgactttagtgacgatttttcagatgattttgtggagacccggcgtcggaggagtagacgcaaccaaaagagacagataaactataaagaggactctgagtctgacggcagtcagaaatctttgcgtagggggaaggagatacggagagtccacaagagaagactttccagctctgaaagcgaagagtcatatctgagtaagaactctgaggacgatgaactggccaaggagagcaagagatcagtccgtaagagagggagatctacagacgaatattcagaggccgatgaggaagaagaagaggaagaggggaagccaagccgaaaacggcttcatagaatagagaccgacgaggaagagtcttgtgataatgctcatggcgatgccaatcagccagcaagggacagccagccccgagtgcttccaagcgaacaggaatccacgaaaaagccatataggattgagtccgatgaggaggaggactttgagaatgtaggaaaggtcggcagcccactcgactattcgttagttgacctgccatccacaaatgggcagtctcccggaaaggctattgagaatctgataggcaagcctaccgagaagtcacaaacccccaaggataattctaccgcctccgccagtctggcaagcaacggcacgtccggcggacaagaggcaggcgcacccgaggaggaagaggacgagctgctaagggtgaccgacctggtggattatgtgtgcaactctgaacagctatag

SEQ ID NO: 192198 - DNA, 3570 bp, Artificial Sequence
  derived and/or modified sequence
atgaaatcagaagaacagcccatggacttggagaatagatcgacagccaacgtcctcgaggaaaccacggttaagaaagaaaaggaggatgaaaaggaactggttaagctccccgtcatcgtgaagttggagaaaccattgccagaaaatgaagagaaaaagatcattaaggaagaaagcgacagcttcaaagagaatgtgaaacccatcaaagtcgaggtgaaagaatgccgtgctgaccctaaagacactaagtcaagcatggagaaaccggtagcacaagagcccgaaaggatagaatttgggggtaatatcaagagtagccacgagataaccgagaagtcaacggaagaaacagaaaagttgaagaacgaccaacaagctaaaatcccacttaaaaaacgcgagattaagctgagtgacgactttgacagtccagtcaagggacctttgtgtaagagcgtcacccccacaaaagagtttctcaaagatgagatcaaacaggaagaggaaacttgtaagcggatcagcacgatcacagcgcttggccatgaggggaagcagctcgttaacggtgaggtcagcgacgagagggtggccccaaattttaaaacagagccgatcgagaccaaattctatgaaaccaaggaagagtcctatagtcccagcaaggaccgtaacatcatcacggaaggtaatggcactgaaagcttaaactctgtcattacctcaatgaaaaccggagaactcgagaaggagactgcccctctgcgtaaagacgccgactccagcatttctgtactggaaatccattcacagaaagcacagattgaagagcctgatcctcccgagatggaaacatcgcttgatagctctgagatggctaaggacctcagctctaagaccgcgctgtctagcacggagtcgtgtactatgaagggggaggaaaaaagccctaagaccaagaaggacaagaggccacctatattggagtgcttagagaagctggagaagtctaaaaagacctttttagacaaagatgcccaacggctgagtccaattcccgaagaagtgcctaaaagtacccttgagagcgaaaaaccaggttcgcctgaagccgcagaaactagtcctcctagcaacatcatagatcactgcgaaaagctcgcaagcgaaaaggaggtcgtggaatgtcagagcacctctacagtgggtggtcagtctgtgaaaaaagtcgatctggaaacactgaaagaagactcggaattcacaaaggtagagatggacaacctggataatgcacagacaagcggaattgaagaacccagtgaaactaagggctcaatgcagaagagtaaattcaagtataagttggtacccgaagaggaaacaactgcttctgaaaacacagagattacctcggagcggcagaaagaaggcatcaagctgacaattcgtataagttcacgaaaaaaaaagcctgattcaccaccaaaagttctggagcccgaaaataagcaggagaaaactgagaaggaggaggaaaaaaccaacgtgggcaggactctccgaagaagcccccgtatctcaaggcccacagcaaaggttgccgaaatccgggatcagaaggccgataaaaagcggggagaaggagaggacgaggtcgaagaggagagcaccgccctgcagaagacagataagaaagagatattgaagaaaagcgagaaggatacaaacagtaaggtttcaaaagtcaaacccaagggtaaggtccgatggacaggaagtcgtacacgcggtagatggaaatatagttccaacgacgaatccgaagggtccgggtccgagaaatcttccgccgcttccgaggaggaggaggaaaaggagagtgaggaggctattctggctgatgatgatgaaccatgtaagaagtgcgggctacccaatcacccagagctcatattgctctgcgacagttgtgactcaggatatcataccgcttgtcttcggccaccgctgatgatcatccctgatggcgaatggttttgtcctccctgccaacacaagctcctgtgtgagaaacttgaggagcagctccaggacctggacgtggccctgaagaagaaagaacgggcagagcggcgaaaagagcgattagtctacgttggcatctctatcgagaacattattccaccccaagaaccagatttttccgaggatcaggaagaaaagaagaaagactcaaagaagtccaaagctaacctgctggagaggcggagtacccgcacaagaaaatgcattagttacaggtttgatgaatttgacgaagctatcgacgaggcaatcgaggatgatatcaaggaagctgatggaggcggtgtgggccgaggcaaggatatttcaacaatcacaggacatcgcggaaaagacatcagtactattttggatgaggagcggaaggaaaataagaggccccagagggccgctgccgctaggaggaagaagcgacgccgtctgaacgatctagactccgattccaatttagatgaggaggaaagcgaggacgaattcaagatttcagatggttcccaggatgagttcgttgtgtcagacgagaacccggacgagtccgaggaggatcctccttctaacgacgatagcgatactgatttctgctcccgcaggctgcgtaggcacccatcaagaccaatgcgccagagccggagattacggaggaagacacccaagaagaagtatagcgatgatgatgaagaggaggagtctgaagagaatagtcgggattcagaatccgatttctccgacgatttctcggacgattttgtcgagacgcggcgaaggcggtcacgacgaaaccaaaagcggcagattaattacaaggaggacagcgaatctgatggaagtcagaaaagtctccgcaggggtaaggaaatccgcagagtgcacaagcggaggctcagcagctccgaaagcgaagagtcgtatttaagcaaaaatagcgaggacgatgaactggcaaaagagagcaagagatccgtaaggaagagaggtcggtcgactgatgaatattctgaggctgatgaggaagaggaagaggaagaaggcaaaccttcccgcaagcgtctacaccgcatcgagactgacgaggaggagtcctgtgacaatgcccacggcgacgctaatcagcctgcccgagactctcagccacgggtgctccctagtgagcaggagagtaccaaaaaaccgtaccgtattgagagtgatgaggaggaggactttgagaatgtcgggaaggtgggatctcccctggactattccctggtggatctgccctccacgaacggccagagtcccggaaaagctattgagaacttgatcgggaaacccactgagaaatcccagacccctaaagacaatagtaccgcatctgcaagtttggccagtaatgggacttcaggaggccaggaagcgggtgcgccagaagaagaggaggacgagttactgcgagttaccgatctggtggattatgtgtgtaatagcgaacagctgtag

SEQ ID NO: 192199 - DNA, 2412 bp, Artificial Sequence
  derived and/or modified sequence
gaaacactcgctctactgaaggcccaaatagatccagttctactaaagaatagttctcagcaggataatagctcccgggagtctccgtctctggaggatgaggagactaagaaagaagaggaaaccccaaaacaggaggagcagaaagagagtgagaagatgaaaagtgaggagcagccaatggatcttgagaaccgaagcaccgctaatgtgcttgaagagacaacagtgaagaaggaaaaggaagacgagaaggaactagtcaagctccctgtgatagtgaagcttgagaagccccttcccgaaaatgaagaaaaaaaaatcatcaaggaggagagcgactccttcaaggagaacgtaaaacccattaaggttgaagtgaaggagtgtagagctgacccgaaggacacaaagtctagtatggagaagcctgtagctcaggaacccgagcgcattgagtttggtggtaatattaagtcttcacacgagataactgagaagtctactgaagaaacagagaagctcaagaatgatcaacaggcaaaaattcccctaaagaaacgggagatcaaactgagcgacgactttgattctccagtgaaaggaccactgtgtaaaagcgtgactccaacgaaggaattcttgaaagatgaaattaaacaggaggaggagacctgtaaacggataagtactatcacagctctggggcatgagggaaagcagttagtgaatggagaggtctccgacgaaagagtggcccctaacttcaagactgaaccgatcgagaccaagttctacgagactaaagaggaaagttacagtccctcaaaggatcggaatatcatcaccgagggaaacggaaccgaatccctgaatagcgtgattacaagcatgaaaaccggagaactcgagaaggagacagccccactgcggaaggacgctgactcttccatctctgtgctcgagattcactctcagaaagcacagatcgaagagcctgatcccccagagatggagacttcactggacagctctgaaatggctaaagacctcagctcaaaaacagccctctcaagcactgagagctgcacaatgaaaggcgaagagaagtcacccaaaaccaagaaagataagcggcctcccatcctggagtgcctggagaagctggagaagagcaagaagacctttcttgacaaggatgcccagagactcagtcccatccctgaggaggtgccgaaaagcacccttgagagtgagaagcccggttcaccagaggccgcagagacttctcccccatcaaatattattgatcattgcgagaaactggcgtctgaaaaagaggtcgtcgaatgtcaatcaacgagcaccgttggcggacaatccgtaaagaaagtagatctggagacgcttaaggaagacagtgagtttacgaaggttgagatggataaccttgacaacgcacagaccagcggaatcgaagagcccagcgagactaaggggagcatgcaaaagtccaagttcaaatacaaactggtgccggaagaggaaacgacagcaagcgagaatactgaaattacaagtgaaaggcagaaggagggcattaagcttacaattcgaataagttctcggaaaaagaagcctgacagccctcctaaagtattggagccagagaataaacaggagaaaaccgagaaagaggaagagaaaacgaacgtgggcaggaccttgaggcgcagcccccgaatcagcagaccaacagcaaaagtagccgagatccgggaccaaaaagcggataagaagaggggtgaaggagaggatgaggttgaagaagaatctactgctctccagaagacagacaagaaggaaatcctgaagaaatccgagaaagatacaaacagcaaggtttctaaagtgaaacctaaaggaaaagtacgatggacaggcagccgcacaaggggccgttggaagtattcctctaatgacgagagtgaaggctcaggctccgagaaatccagcgctgcttctgaagaggaagaggagaaagaaagtgaagaagcaattcttgctgacgatgacgaaccgtgcaagaaatgcggattgccaaatcacccagaactgatattactttgcgactcctgtgattctgggtaccacacagcctgcctccgcccaccccttatgattatacctgatggtgaatggttttgtcctccatgtcaacacaagctgctgtgcgaaaagctggaggaacagctacaagacctggatgtcgctctgaagaaaaaggaaagagctgagcggagaaaggagagactggtttatgtcggaatttccattgagaacatcataccccctcaggagccagacttttcggaagaccaggaagagaagaaaaaagatagcaaaaaatag

SEQ ID NO: 192200 - DNA, 11550 bp, Artificial Sequence
  derived and/or modified sequence
ttgttttcattccccctgtcacacgaggcagtggcaagcccgaaggggaggagagaagggggcggaaagagggcggaaagtgaaaggcgccgagggccgctctgtctcccgtctgactcggttctcgactgctccgggccgccgatgtattgtgggatcgcggagccgtccctgagacgctgggatccgcagaggagcccacttgagagcgcctcctgtcgtctgtaaggttgccttgccatccctcggcaccacaacttcccccgcccccccatcgcctcctcctccatcctccagttcaaaatggcgacggcggcggcagcggcggcggtgatggctcctccgggctgcccgggttcgtgccccaacttcgccgtagtctgctccttcttggagcgctacgggccgctgctagacctgcctgagttgccgttccctgagctggagcgggtgctgcaggcgccgccgccggacgtcggcaacggagaagtaccaaaagaattggtggagctccatttgaagctgatgaggaaaattggcaaatctgttactgcagacagatgggaaaaatatttgatcaagatatgccaagagtttaacagtacctgggcatgggagatggagaagaagggctatcttgaaatgagtgttgaatgcaaactagcactcttaaagtacctctgtgagtgtcagtttgatgacaatctcaaattcaagaatattattaatgaggaggatgccgatactatgcgtctccagccaattggtcgagacaaagatggcctcatgtactggtaccaattggatcaagatcacaatgtcagaatgtacatagaagaacaagatgatcaagatggctcttcatggaaatgcattgtcagaaatcgaaacgagttggctgagactcttgcactcctgaaagcacaaattgatcctgtactattgaaaaactctagccaacaagacaactcttctcgggaaagtcccagcttagaggatgaggagactaaaaaagaggaagaaacacctaaacaagaggaacagaaagaaagtgaaaagatgaaaagtgaggagcagcctatggatttagaaaaccgttctacagccaatgttctagaagagactactgtgaaaaaagaaaaagaagatgaaaaggaacttgtgaaactgccagtcatagtgaagctagaaaaacctttgccagaaaatgaagaaaaaaagattatcaaagaagaaagtgattccttcaaggaaaatgtcaaacccattaaagttgaggtgaaggaatgtagagcagatcctaaagataccaaaagtagcatggagaagccagtggcacaggagcctgaaaggatcgaatttggtggcaatattaaatcttctcacgaaattactgagaaatctactgaagaaactgagaaacttaaaaatgaccagcaggccaagataccactaaaaaaacgagaaattaaactgagtgatgattttgacagtccagtcaagggacctttgtgtaaatcagttactccaacaaaagagtttttgaaagatgaaataaaacaagaggaagagacttgtaaaaggatctctacaatcactgctttgggtcatgaagggaaacagctggtaaatggagaagttagtgatgaaagggtagctccaaattttaagacagaaccaatagagacaaagttttatgagacaaaggaagagagctatagcccctctaaggacagaaatatcatcacggagggaaatggaacagagtccttaaattctgtcataacaagtatgaaaacaggtgagcttgagaaagaaacagcccctttgaggaaagatgcagatagttcaatatcagtcttagagatccatagtcaaaaagcacaaatagaggaacccgatcctccagaaatggaaacttctcttgattcttctgagatggcaaaagatctctcttcaaaaactgctttatcttccaccgagtcgtgtaccatgaaaggtgaagagaagtctcccaaaactaagaaggataagcgcccaccaatcctagaatgtcttgaaaagttagagaagtccaaaaagacttttcttgataaggacgcacaaagattgagtccaataccagaagaagttccaaagagtactctagagtcagaaaagcctggctctcctgaggcagctgaaacttctccaccatctaatatcattgaccactgtgagaaactagcctcagaaaaagaagtggtagaatgccagagtacaagtactgttggtggccagtctgtgaaaaaagtagacctagaaaccctaaaagaggattctgagttcacaaaggtagaaatggataatctggacaatgcccagacctctggcatagaggagccttctgagacaaagggttctatgcaaaaaagcaaattcaaatataagttggttcctgaagaagaaaccactgcctcagaaaatacagagataacctctgaaaggcagaaagagggcatcaaattaacaatcaggatatcaagtcggaaaaagaagcccgattctccccccaaagttctagaaccagaaaacaagcaagagaagacagaaaaggaagaggagaaaacaaatgtgggtcgtactttaagaagatctccaagaatatctagacccactgcaaaagtggctgagatcagagatcagaaagctgataaaaaaagaggggaaggagaagatgaggtggaagaagagtcaacagctttgcaaaaaactgacaaaaaggaaattttgaaaaaatcagagaaagatacaaattctaaagtaagcaaggtaaaacccaaaggcaaagttcgatggactggttctcggacacgtggcagatggaaatattccagcaatgatgaaagtgaagggtctggcagtgaaaaatcatctgcagcttcagaagaggaggaagaaaaggaaagtgaagaagccatcctagcagatgatgatgaaccatgcaaaaaatgtggccttccaaaccatcctgagctaattcttctgtgtgactcttgcgatagtggataccatactgcctgccttcgccctcctctgatgatcatcccagatggagaatggttctgcccaccttgccaacataaactgctctgtgaaaaattagaggaacagttgcaggatttggatgttgccttaaagaagaaagagcgtgccgaacgaagaaaagaacgcttggtgtatgttggtatcagtattgaaaacatcattcctccacaagagccagacttttctgaagatcaagaagaaaagaaaaaagattcaaaaaaatccaaagcaaacttgcttgaaaggaggtcaacaagaacaaggaaatgtataagctacagatttgatgagtttgatgaagcaattgatgaagctattgaagatgacatcaaagaagccgatggaggaggagttggccgaggaaaagatatctccaccatcacaggtcatcgtgggaaagacatctctactattttggatgaagaaagaaaagaaaataaacgaccccagagggcagctgctgctcgaaggaagaaacgccggcgattaaatgatctggacagtgatagcaacctggatgaagaagagagcgaggatgaattcaagatcagtgatggatctcaagatgagtttgttgtgtctgatgaaaacccagatgaaagtgaagaagatccgccatctaatgatgacagtgacactgacttttgtagccgtagactgaggcgacacccctctcggccaatgaggcagagcaggcgtttgcgaagaaagaccccaaagaaaaaatattccgatgatgatgaagaggaggaatctgaggagaatagtagagactctgaaagtgacttcagtgatgattttagtgatgattttgtagaaactcggcgaaggcggtcaaggagaaatcagaaaagacaaattaactacaaagaagactcagaaagtgacggttcccagaagagtttgcgacgtggtaaagaaataaggcgagtacacaagcgaagactttccagctcagagagtgaagagagctatttgtccaagaactctgaagatgatgagctagctaaagaatcaaagcggtcagttcgaaagcggggccgaagcacagacgagtattcagaagcagatgaggaggaggaggaagaggaaggcaaaccatcccgcaaacggctacaccggattgagacggatgaggaggagagttgtgacaatgctcatggagatgcaaatcagcctgcccgtgacagccagcctagggtcctgccctcagaacaagagagcaccaagaagccctaccggatagaaagtgatgaggaagaggactttgaaaatgtaggcaaagtggggagcccattggactatagcttagtggacttaccttcaaccaatggacagagccctggcaaagccattgagaacttgattggcaagcctactgagaagtctcagacccccaaggacaacagcacagccagtgcaagcctagcctccaatgggacaagtggtgggcaggaggcaggagcaccagaagaggaggaagatgagcttttgagagtgactgaccttgttgattatgtctgtaacagtgaacagttataagactttttttccatttttgtgctaatttattccacggtagctctcacaccagcgggccagttattaaaagctgtttaatttttcctagaaaactccactacagaatgacttttagaagaaaaatttcaacaaatcctgaagtctttctgtgaagtgaccagttctgaactttgaagataaataattgctgtaaattccttttgattttctttttccaggttcatggtccttggtaatttcattcatggaaaaaaatcttattataataacaacaaagatttgtatatttttgactttatatttcctgagctctcctgactttgtgaaaaagggtggatgaaaatgcattccgaatctgtgagggcccaaaacagaatttaggggtgggtgaaagcacttgtgctttagctttttcatattaaatatatattatatttaaacattcatggcatagatgatgatttacagacaatttaaaagttcaagtctgtactgttacagtttgagaattgtagataacatcatacataagtcatttagtaacagcctttgtgaaatgaacttgtttactattggagataaccacacttaataaagaagagacagtgaaagtaccatcataattaacctaaatttttgttatagcagagtttcttgtttaaaaaaaaataaaatcatctgaaaagcatttgtacagtaaaatgtataatgaagctttgccaaccagactgtgctagcaacaaatttttttaaataagctttatgcagtggtaataaggtggcctcaaatatattgtgtctgatggagagttattagtgaaatgaatgtggtctttcttaaggcctgggtggactgtaaactttgccaatagtataactcttgtcttctggccacttgatgtttaaatatctgaaatatcattttgaaaaaaatacatctatatataacatacatgaagagatgctaagctgacagtgatattttagcacatttgaagactgggaagagattttcaggtgaattttaactggtctattcttgcccttagtatctacttcaaattgaagtctacaaacaaagcagttcctttgggaggtttttagtttgagttttagcgtgtgtgtgtgtttgtgtgtgtgcgtgtgcgtgtgtgtgtgtgttggaatttcctatctgcctggatatattagcagagtttgaatgtagttttggcctttggccattagacttctattaaaattcattaatagtcatacaaccaacatagagttgaatgagaactgccgatgtaattaataggcatgacatccatttcaaacatctcaacactttaaagaaaagccctttgtttcaagaaaaaagggtttgtaactaactaaatacctaacatgtaattgacactaaaatatgaactttgtcttatttagtttctgttatagctgtaaaatttcaggcagagccataacattgtacagagtgtagcacttgtgattaaacctagcctgttaaatcctgaaaccttcaaccattacttctgtgaatactttagccctgggatttgggtttttctgttccggtgttgtgtctgttgccggcaatggacacaccatatctgctgctggcccaaggaacgtcattaatttttctttccaaattaagtattatgtgctagtcagtgtatagtaaagcacttctcttttttattactaaaaagctggcattagatttgcattataaatacctctctaggaactttatactccttttccttcttcaacaggtattgcccttaaatcttatcttttggccttgaaagtttatagctattgtttttcagttgttcgttgttttgttttgtttcactttagttctgtagtacctgcccattaatatttttgctttgattctagcaatgtgtatgtatctgtataaaaaataaaataatgaaagcaacctaaaaataggatgcaccaatagcatgtggttccaagtaagttgtgatttttattttgagacagtgttccactggaagggagggaagggcttacattcacagacagtaaagcagggctgtgtaaggagctacatttacttaacagtctcctttccagctaggtttgttttatttatttgcaagtcagctaagaattaaccttttaaaccatctaaaacaggcaagcaatataaagatttctactagtgcaaggtaagtggtttgaatatacaagtgccctttcctgccacccagtctcactaccgttttagtcctgcagctgggtaaagccactattgtgtggaaactctcccatgtgccctgtctctacctctggacacaccagctccttcttccacctattctattcctcagttaagccaagtgatcagaagtagtattaaatgggtagataattttaacaggatgcctaatgtgaaataaggagttatttttactcttctactatagaaagcctaaggtaattcttaccatctcaaagactgagtattccatttaggtttggagaccacttgtgctgtgctgcctgatatttaccaaacttgaataagtgttcgtcaacttgatagtgaatgtaccccttctcaccttatattttgattaaatcaattaactataggtcatctaccaagaatgtaatccaagcggttgataaaacattattaggcagatagattattgattattaaattttgagcagtgcaaaaacggttttgctgcttggagttcagattcagtccctcaaagagtttatgatcactgaaatacactctgaaggtattctgaagaagttaaaaaattttagaaaacgaaatgttctgtatacaaagacaatacagtcactacgaactgcagaaagtataggaaagcagtaattgatgtagagtttagacagtcttggatcttttttagagcactaaccatggatttagactcaaaatagctgctacataatagagccctttaataatttaaaccccccttgttgaaatacaagttggactcccagtgtcaaactctagactgtagctaatgtattaaagggagatgtagattaatattcagtatatttagtttgcaatttctgaaaaggtttgaaaactagtcagcttttcacacagcagaagctttgaactgaaatatgtgtgaaaaggacgcagactgaaaacgttttggttttgtacatcagtgctgatgaaattagtgtaaaacattttccatcattggcacattactgcaaaatgatggcagagatattttcaagaatgtacatcaagttatatttccttgacatccttttttcaattggtcaaggttacagattcagaggataaagggtagtttcatttagaataaattcatgtctactggcaatctatatataaaagtgacctgcccaagaaccaaaaactttaaatgctaatgaagcttttgaaaaataatttttaaacaaattaattttaaaagggtgttacacgtacccagtttttactttttagttgatgaaacccatcctataatatacatttgagcaaagtacacatattaagaaaaacatggacatttacttgtttaatagtcaaaatgatgaggaaatgttagctgtttttaagtgggactggtggggtgtcctttgtcacaaggaatgcttttttagcttgtttgtgggcataagagatgttaaccctttgctgattctaccacacaactgtaaagaacctaatgaatctacaagtttaatattcagaaaaagctaggaactccgctctttaccagtacagtggaacaggcccgttattcaaggtgatgcctcacagctatagaacaactattcaaagacccagagttaaatggtacatgtgtatatgtgtgtgtgtgtgtgcacacgcacacacttcagataagtatcagaaaaaataaaaatgaatccatcattaacttgaaagaaataagatggctgcattgcaacagatacaaatattatgaacatcatttaattacagaaaatctagacaacagtttctcctgatgtttgacattctcaaaatatattcctcattctcgaagaagcagagaatgccaaggctgcatatctgctgtaatctacctagccctcttctgcttaatatgatccattattgaatcttctcagattaaaatccattcctatatcatctacctttcccaaagtgtgtgcctgtaaacctaccttggaagtggcaagttaactgatttttttgtgtcatttttataccaatccttaaggtcaaagccttttgctatcaatgtatttaaactgagttgctatatgttcactaatttgttttcaaaatgttttgctccaacttaaattatcttttaacatcttttgagtgccaagaattgctaagtaactgtaatatgttgaagagagtaattgccaagcaagcagtcataagccaaaatgtaatgagcttagtatataaccactttagagtatacactcaccactttttgtattcattcatgcaaaccctcctggaagtcgattagaagaggatccaatttgtggaccttttttcctccttttggacacctgagcacaattttttttttcctttcatatttataccactttggaaaattcagtaaacccaattctggcacatcataatggtttcagttagtgaagatgtttattttaataactttaaaatatgactatcctatacataagttatataagagggcataacaatagatgagtagaaatttataaaatttcttggatattttgaatgagaaaaaaacatttttaaaggaattttgttttttccttttttggccaaaccggtacaagttagaaagtgtgctaaggactgaatacttgcctcgtgctttttgccactggatgatgtaagttaagaatggaattgttaatcctaagtatatattttcttgactttcatcagtttctaaagaaatctaatttaagtgttttgcggttttgtttgatctgtatttattgagttctggtcatagaccagcagcttgcacgtcatgctcatgaacagccagaacatagttattggggaacttcatggctcaaaaccttctgaatcatttaacttattttgtatgttgcaaaaaaaaaaaaaaagtttattttgcttgagagtcacctttttttaaaaaaaataactgtacagcttttaagggatgggaggtgggaaaataccctaaaataggatgtagattttttacaattgtgtttatgctagatcatctacaggtgcattatgtaattaaacctaaaattgtttaaaaatttgtgccatgtctttttcattctcctgccctttagcagaattggtgcatgtcaactgctatgtggacaagccttgaaattagagtaacaagccctgtctccaaagctttaaggtcactgcatgaaaattgcacacacacacacacacacacacacatctagcttatattagtaaatggattttcaggatcagaacagctacagtagcccagatttggctgttaacagcatattcttacagcacatgatttttgtgatgcctaactagggtattctcaatgttagtctggtgttctattctctttcaaagtagcttcttgagatggtatctgttgtagcttgcccaaacctgccatgaggttgtgtgtacactttgaaagggtatgtcctatgctaagatggtggtagagcagggcttgattttaatctattcatataaaagaaggaaaaaactagaattggtctatttggttattcagtggacttaattccacaggaatagttgtctgctgaagcgtggcagcaagagaagtcaaattcaagtttcagttccttccttattcactaagtattttgaaatcttgtagaacttctgattctagcacagtcttttacatggcacattttaccatggtatattcacagcttcgtttaaatgtcagtactttttcccatctgataattttgccattctaatttctcacctttgtagtacaagtgtattcttgaaaataattaaattcatctaagtgtgtcataatttcaatcaaagctatattcatgtgttgccagcgtcagttttttgctatcctcattcagaagggaagcctgcagatcatgagtttccatatgaagaatacaaattccacataaaaatttataaatggtatctttagaattttgatttaaagtaatagctggaattcagggactgatcagaatgcctcttgaattttccaacatgcttatatgaaatgctttattttcctatgcgttaaaaaaaatattcctggaataggttctcagaatgttttatttggtttctaggagatgagatttaaagcagaagctccaagattggcataaaactaactcttgaggtaatcaggaccatgctgttagtcaaatagaagctggagtgctctctgtcacataatgtactgcatgtgtgtgggggtgggggggcagggaagatcagaaaactggaaatgtaattctgataacacgcaaagtaaattgtgcattaaaagtatgggaattcttggtagcttaaagcttcaggggttaacttcagtgtatgaacacctagtgtgttagaattgcagtgcatagttgtttaaatacaatattccttgtaagtgacaaccaaaatatgttgtggctggtgccagtatttttgttaatgaaatgttcagtgtctcactacagtctgatcagaactcttggtgttataagccaggcctaaagccattttatagctattggcctaattgtgtaactttttctttcaaaatgttttattataatacttctgtcatttctttcacttaatatgtcaattgtcataataaaaatttaaatttgaattatttagcatga

SEQ ID NO: 192201 - DNA, 5040 bp, Artificial Sequence
  derived and/or modified sequence
gatccgcagaggagcccacttgagagcgcctcctgtcgtctgtaaggttgccttgccatccctcggcaccacaacttcccccgcccccccatcgcctcctcctccatcctccagttcaaaatggcgacggcggcggcagcggcggcggtgatggctcctccgggctgcccgggttcgtgccccaacttcgccgtagtctgctccttcttggagcgctacgggccgctgctagacctgcctgagttgccgttccctgagctggagcgggtgctgcaggcgccgccgccggacgtcggcaacggagaagtaccaaaagaattggtggagctccatttgaagctgatgaggaaaattggcaaatctgttactgcagacagatgggaaaaatatttgatcaagtacctctgtgagtgtcagtttgatgacaatctcaaattcaagaatattattaatgaggaggatgccgatactatgcgtctccagccaattggtcgagacaaagatggcctcatgtactggtaccaattggatcaagatcacaatgtcagaatgtacatagaagaacaagatgatcaagatggctcttcatggaaatgcattgtcagaaatcgaaacgagttggctgagactcttgcactcctgaaagcacaaattgatcctgtactattgaaaaactctagccaacaagacaactcttctcgggaaagtcccagcttagaggatgaggagactaaaaaagaggaagaaacacctaaacaagaggaacagaaagaaagtgaaaagatgaaaagtgaggagcagcctatggatttagaaaaccgttctacagccaatgttctagaagagactactgtgaaaaaagaaaaagaagatgaaaaggaacttgtgaaactgccagtcatagtgaagctagaaaaacctttgccagaaaatgaagaaaaaaagattatcaaagaagaaagtgattccttcaaggaaaatgtcaaacccattaaagttgaggtgaaggaatgtagagcagatcctaaagataccaaaagtagcatggagaagccagtggcacaggagcctgaaaggatcgaatttggtggcaatattaaatcttctcacgaaattactgagaaatctactgaagaaactgagaaacttaaaaatgaccagcaggccaagataccactaaaaaaacgagaaattaaactgagtgatgattttgacagtccagtcaagggacctttgtgtaaatcagttactccaacaaaagagtttttgaaagatgaaataaaacaagaggaagagacttgtaaaaggatctctacaatcactgctttgggtcatgaagggaaacagctggtaaatggagaagttagtgatgaaagggtagctccaaattttaagacagaaccaatagagacaaagttttatgagacaaaggaagagagctatagcccctctaaggacagaaatatcatcacggagggaaatggaacagagtccttaaattctgtcataacaagtatgaaaacaggtgagcttgagaaagaaacagcccctttgaggaaagatgcagatagttcaatatcagtcttagagatccatagtcaaaaagcacaaatagaggaacccgatcctccagaaatggaaacttctcttgattcttctgagatggcaaaagatctctcttcaaaaactgctttatcttccaccgagtcgtgtaccatgaaaggtgaagagaagtctcccaaaactaagaaggataagcgcccaccaatcctagaatgtcttgaaaagttagagaagtccaaaaagacttttcttgataaggacgcacaaagattgagtccaataccagaagaagttccaaagagtactctagagtcagaaaagcctggctctcctgaggcagctgaaacttctccaccatctaatatcattgaccactgtgagaaactagcctcagaaaaagaagtggtagaatgccagagtacaagtactgttggtggccagtctgtgaaaaaagtagacctagaaaccctaaaagaggattctgagttcacaaaggtagaaatggataatctggacaatgcccagacctctggcatagaggagccttctgagacaaagggttctatgcaaaaaagcaaattcaaatataagttggttcctgaagaagaaaccactgcctcagaaaatacagagataacctctgaaaggcagaaagagggcatcaaattaacaatcaggatatcaagtcggaaaaagaagcccgattctccccccaaagttctagaaccagaaaacaagcaagagaagacagaaaaggaagaggagaaaacaaatgtgggtcgtactttaagaagatctccaagaatatctagacccactgcaaaagtggctgagatcagagatcagaaagctgataaaaaaagaggggaaggagaagatgaggtggaagaagagtcaacagctttgcaaaaaactgacaaaaaggaaattttgaaaaaatcagagaaagatacaaattctaaagtaagcaaggtaaaacccaaaggcaaagttcgatggactggttctcggacacgtggcagatggaaatattccagcaatgatgaaagtgaagggtctggcagtgaaaaatcatctgcagcttcagaagaggaggaagaaaaggaaagtgaagaagccatcctagcagatgatgatgaaccatgcaaaaaatgtggccttccaaaccatcctgagctaattcttctgtgtgactcttgcgatagtggataccatactgcctgccttcgccctcctctgatgatcatcccagatggagaatggttctgcccaccttgccaacataaactgctctgtgaaaaattagaggaacagttgcaggatttggatgttgccttaaagaagaaagagcgtgccgaacgaagaaaagaacgcttggtgtatgttggtatcagtattgaaaacatcattcctccacaagagccagacttttctgaagatcaagaagaaaagaaaaaagattcaaaaaaatccaaagcaaacttgcttgaaaggaggtcaacaagaacaaggaaatgtataagctacagatttgatgagtttgatgaagcaattgatgaagctattgaagatgacatcaaagaagccgatggaggaggagttggccgaggaaaagatatctccaccatcacaggtcatcgtgggaaagacatctctactattttggatgaagaaagaaaagaaaataaacgaccccagagggcagctgctgctcgaaggaagaaacgccggcgattaaatgatctggacagtgatagcaacctggatgaagaagagagcgaggatgaattcaagatcagtgatggatctcaagatgagtttgttgtgtctgatgaaaacccagatgaaagtgaagaagatccgccatctaatgatgacagtgacactgacttttgtagccgtagactgaggcgacacccctctcggccaatgaggcagagcaggcgtttgcgaagaaagaccccaaagaaaaaatattccgatgatgatgaagaggaggaatctgaggagaatagtagagactctgaaagtgacttcagtgatgattttagtgatgattttgtagaaactcggcgaaggcggtcaaggagaaatcagaaaagacaaattaactacaaagaagactcagaaagtgacggttcccagaagagtttgcgacgtggtaaagaaataaggcgagtacacaagcgaagactttccagctcagagagtgaagagagctatttgtccaagaactctgaagatgatgagctagctaaagaatcaaagcggtcagttcgaaagcggggccgaagcacagacgagtattcagaagcagatgaggaggaggaggaagaggaaggcaaaccatcccgcaaacggctacaccggattgagacggatgaggaggagagttgtgacaatgctcatggagatgcaaatcagcctgcccgtgacagccagcctagggtcctgccctcagaacaagagagcaccaagaagccctaccggatagaaagtgatgaggaagaggactttgaaaatgtaggcaaagtggggagcccattggactatagcttagtggacttaccttcaaccaatggacagagccctggcaaagccattgagaacttgattggcaagcctactgagaagtctcagacccccaaggacaacagcacagccagtgcaagcctagcctccaatgggacaagtggtgggcaggaggcaggagcaccagaagaggaggaagatgagcttttgagagtgactgaccttgttgattatgtctgtaacagtgaacagttataagactttttttccatttttgtgctaatttattccacggtagctctcacaccagcgggccagttattaaaagctgtttaatttttcctagaaaactccactacagaatgacttttagaagaaaaatttcaacaaatcctgaagtctttctgtgaagtgaccagttctgaactttgaagataaataattgctgtaaattccttttgattttctttttccaggttcatggtccttggtaatttcattcatggaaaaaaatcttattataataacaacaaagatttgtatatttttgactttatatttcctgagctctcctgactttgtgaaaaagggtggatgaaaatgcattccgaatctgtgagggcccaaaacagaatttaggggtgggtgaaagcacttgtgctttagctttttcatattaaatatatattatatttaaacattcatggcatagatgatgatttacagacaatttaaaagttcaagtctgtactgttacagtttgagaattgtagataacatcatacataagtcatttagtaacagcctttgtgaaatgaacttgtttactattggagataaccacacttaataaagaagagacagtgaaagtaccatcataattaacctaaatttttgttatagcagagtttcttgtttaaaaaaaaataaaatcatctgaaaagc

SEQ ID NO: 192202 - DNA, 5318 bp, Artificial Sequence
  derived and/or modified sequence
ctggtttatcaacttgacgagaatcatttcaaaattttaggaaaaaaatttatgtctcagtaaaactttgtttagaattaggtttttcagtagcaaggataaggtgaagggattaaaaatgtacgtaaaattagtagtcaatgaattctggaatgcagtctgtataatcctattcagagattatgctatttactgaatatagctttggttgtgtttaaatctgcactagtattaggtgctccttaaaagttgaaaatatatagccaataaggtataaagaagaattgacagataaatctaaacagtttctttgtatagtactaacttctgaaatgttcagtggtggcatttgataaagtaagttgtaatatgatcacattgaggaatgttatataattattaaactcaatttttataaaaggcatcattttataaaagtatcataagaaagtgccaatgtttcaatgaataaattgaggcaacatgataccaacttagtgaaaaatatacaagaccagaaggaagtaacctaaaatattactagtgattgcctctgggtaataggatatgggctttttgtctttctatatttttcattttcccactgccgtgttcctggtacctcagtgaaatgaagtgctcagttcttttaacagttgtcagtttttaaaacaaatatagtcttctggaaatgttttaggtagcattttcaattttatgtttttaagccatctcttgaatttgaataaattatttgaactgcataaatatttgcaatccattgagaacaccaaaacaaaaagtaaaaagcagaaacctaaatttttctaaattttttttaatatctagaagttgtatctcaaagtttttgtaattttcttcattgtcagattttattttttactgtcaaatatccaatgacagaggccacctcttttaaaatagaaactttaaatggaaatatacattatactaagtcttatattttatagccttgaaagtttctattcatgtaattaagctttttctgatttttagaggaacagaaagaaagtgaaaagatgaaaagtgaggagcagcctatggatttagaaaaccgttctacagccaatgttctagaagagactactgtgaaaaaagaaaaagaagatgaaaaggaacttgtgaaactgccagtcatagtgaagctagaaaaacctttgccagaaaatgaagaaaaaaagattatcaaagaagaaagtgattccttcaaggaaaatgtcaaacccattaaagttgaggtgaaggaatgtagagcagatcctaaagataccaaaagtagcatggagaagccagtggcacaggagcctgaaaggatcgaatttggtggcaatattaaatcttctcacgaaattactgagaaatctactgaagaaactgagaaacttaaaaatgaccagcaggccaagataccactaaaaaaacgagaaattaaactgagtgatgattttgacagtccagtcaagggacctttgtgtaaatcagttactccaacaaaagagtttttgaaagatgaaataaaacaagaggaagagacttgtaaaaggatctctacaatcactgctttgggtcatgaagggaaacagctggtaaatggagaagttagtgatgaaagggtagctccaaattttaagacagaaccaatagagacaaagttttatgagacaaaggaagagagctatagcccctctaaggacagaaatatcatcacggagggaaatggaacagagtccttaaattctgtcataacaagtatgaaaacaggtgagcttgagaaagaaacagcccctttgaggaaagatgcagatagttcaatatcagtcttagagatccatagtcaaaaagcacaaatagaggaacccgatcctccagaaatggaaacttctcttgattcttctgagatggcaaaagatctctcttcaaaaactgctttatcttccaccgagtcgtgtaccatgaaaggtgaagagaagtctcccaaaactaagaaggataagcgcccaccaatcctagaatgtcttgaaaagttagagaagtccaaaaagacttttcttgataaggacgcacaaagattgagtccaataccagaagaagttccaaagagtactctagagtcagaaaagcctggctctcctgaggcagctgaaacttctccaccatctaatatcattgaccactgtgagaaactagcctcagaaaaagaagtggtagaatgccagagtacaagtactgttggtggccagtctgtgaaaaaagtagacctagaaaccctaaaagaggattctgagttcacaaaggtagaaatggataatctggacaatgcccagacctctggcatagaggagccttctgagacaaagggttctatgcaaaaaagcaaattcaaatataagttggttcctgaagaagaaaccactgcctcagaaaatacagagataacctctgaaaggcagaaagagggcatcaaattaacaatcaggatatcaagtcggaaaaagaagcccgattctccccccaaagttctagaaccagaaaacaagcaagagaagacagaaaaggaagaggagaaaacaaatgtgggtcgtactttaagaagatctccaagaatatctagacccactgcaaaagtggctgagatcagagatcagaaagctgataaaaaaagaggggaaggagaagatgaggtggaagaagagtcaacagctttgcaaaaaactgacaaaaaggaaattttgaaaaaatcagagaaagatacaaattctaaagtaagcaaggtaaaacccaaaggcaaagttcgatggactggttctcggacacgtggcagatggaaatattccagcaatgatgaaagtgaagggtctggcagtgaaaaatcatctgcagcttcagaagaggaggaagaaaaggaaagtgaagaagccatcctagcagatgatgatgaaccatgcaaaaaatgtggccttccaaaccatcctgagctaattcttctgtgtgactcttgcgatagtggataccatactgcctgccttcgccctcctctgatgatcatcccagatggagaatggttctgcccaccttgccaacataaactgctctgtgaaaaattagaggaacagttgcaggatttggatgttgccttaaagaagaaagagcgtgccgaacgaagaaaagaacgcttggtgtatgttggtatcagtattgaaaacatcattcctccacaagagccagacttttctgaagatcaagaagaaaagaaaaaagattcaaaaaaatccaaagcaaacttgcttgaaaggaggtcaacaagaacaaggaaatgtataagctacagatttgatgagtttgatgaagcaattgatgaagctattgaagatgacatcaaagaagccgatggaggaggagttggccgaggaaaagatatctccaccatcacaggtcatcgtgggaaagacatctctactattttggatgaagaaagaaaagaaaataaacgaccccagagggcagctgctgctcgaaggaagaaacgccggcgattaaatgatctggacagtgatagcaacctggatgaagaagagagcgaggatgaattcaagatcagtgatggatctcaagatgagtttgttgtgtctgatgaaaacccagatgaaagtgaagaagatccgccatctaatgatgacagtgacactgacttttgtagccgtagactgaggcgacacccctctcggccaatgaggcagagcaggcgtttgcgaagaaagaccccaaagaaaaaatattccgatgatgatgaagaggaggaatctgaggagaatagtagagactctgaaagtgacttcagtgatgattttagtgatgattttgtagaaactcggcgaaggcggtcaaggagaaatcagaaaagacaaattaactacaaagaagactcagaaagtgacggttcccagaagagtttgcgacgtggtaaagaaataaggcgagtacacaagcgaagactttccagctcagagagtgaagagagctatttgtccaagaactctgaagatgatgagctagctaaagaatcaaagcggtcagttcgaaagcggggccgaagcacagacgagtattcagaagcagatgaggaggaggaggaagaggaaggcaaaccatcccgcaaacggctacaccggattgagacggatgaggaggagagttgtgacaatgctcatggagatgcaaatcagcctgcccgtgacagccagcctagggtcctgccctcagaacaagagagcaccaagaagccctaccggatagaaagtgatgaggaagaggactttgaaaatgtaggcaaagtggggagcccattggactatagcttagtggacttaccttcaaccaatggacagagccctggcaaagccattgagaacttgattggcaagcctactgagaagtctcagacccccaaggacaacagcacagccagtgcaagcctagcctccaatgggacaagtggtgggcaggaggcaggagcaccagaagaggaggaagatgagcttttgagagtgactgaccttgttgattatgtctgtaacagtgaacagttataagactttttttccatttttgtgctaatttattccacggtagctctcacaccagcgggccagttattaaaagctgtttaatttttcctagaaaactccactacagaatgacttttagaagaaaaatttcaacaaatcctgaagtctttctgtgaagtgaccagttctgaactttgaagataaataattgctgtaaattccttttgattttctttttccaggttcatggtccttggtaatttcattcatggaaaaaaatcttattataataacaacaaagatttgtatatttttgactttatatttcctgagctctcctgactttgtgaaaaagggtggatgaaaatgcattccgaatctgtgagggcccaaaacagaatttaggggtgggtgaaagcacttgtgctttagctttttcatattaaatatatattatatttaaacattcatggcatagatgatgatttacagacaatttaaaagttcaagtctgtactgttacagtttgagaattgtagataacatcatacataagtcatttagtaacagcctttgtgaaatgaacttgtttactattggagataaccacacttaataaagaagagacagtgaaagtaccatcataattaacctaaatttttgttatagcagagtttcttgtttaaaaaaaaataaaatcatctgaaaagc

SEQ ID NO: 192203 - DNA, 2409 bp, Artificial Sequence
  derived and/or modified sequence
gagactcttgcactcctgaaagcacaaattgatcctgtactattgaaaaactctagccaacaagacaactcttctcgggaaagtcccagcttagaggatgaggagactaaaaaagaggaagaaacacctaaacaagaggaacagaaagaaagtgaaaagatgaaaagtgaggagcagcctatggatttagaaaaccgttctacagccaatgttctagaagagactactgtgaaaaaagaaaaagaagatgaaaaggaacttgtgaaactgccagtcatagtgaagctagaaaaacctttgccagaaaatgaagaaaaaaagattatcaaagaagaaagtgattccttcaaggaaaatgtcaaacccattaaagttgaggtgaaggaatgtagagcagatcctaaagataccaaaagtagcatggagaagccagtggcacaggagcctgaaaggatcgaatttggtggcaatattaaatcttctcacgaaattactgagaaatctactgaagaaactgagaaacttaaaaatgaccagcaggccaagataccactaaaaaaacgagaaattaaactgagtgatgattttgacagtccagtcaagggacctttgtgtaaatcagttactccaacaaaagagtttttgaaagatgaaataaaacaagaggaagagacttgtaaaaggatctctacaatcactgctttgggtcatgaagggaaacagctggtaaatggagaagttagtgatgaaagggtagctccaaattttaagacagaaccaatagagacaaagttttatgagacaaaggaagagagctatagcccctctaaggacagaaatatcatcacggagggaaatggaacagagtccttaaattctgtcataacaagtatgaaaacaggtgagcttgagaaagaaacagcccctttgaggaaagatgcagatagttcaatatcagtcttagagatccatagtcaaaaagcacaaatagaggaacccgatcctccagaaatggaaacttctcttgattcttctgagatggcaaaagatctctcttcaaaaactgctttatcttccaccgagtcgtgtaccatgaaaggtgaagagaagtctcccaaaactaagaaggataagcgcccaccaatcctagaatgtcttgaaaagttagagaagtccaaaaagacttttcttgataaggacgcacaaagattgagtccaataccagaagaagttccaaagagtactctagagtcagaaaagcctggctctcctgaggcagctgaaacttctccaccatctaatatcattgaccactgtgagaaactagcctcagaaaaagaagtggtagaatgccagagtacaagtactgttggtggccagtctgtgaaaaaagtagacctagaaaccctaaaagaggattctgagttcacaaaggtagaaatggataatctggacaatgcccagacctctggcatagaggagccttctgagacaaagggttctatgcaaaaaagcaaattcaaatataagttggttcctgaagaagaaaccactgcctcagaaaatacagagataacctctgaaaggcagaaagagggcatcaaattaacaatcaggatatcaagtcggaaaaagaagcccgattctccccccaaagttctagaaccagaaaacaagcaagagaagacagaaaaggaagaggagaaaacaaatgtgggtcgtactttaagaagatctccaagaatatctagacccactgcaaaagtggctgagatcagagatcagaaagctgataaaaaaagaggggaaggagaagatgaggtggaagaagagtcaacagctttgcaaaaaactgacaaaaaggaaattttgaaaaaatcagagaaagatacaaattctaaagtaagcaaggtaaaacccaaaggcaaagttcgatggactggttctcggacacgtggcagatggaaatattccagcaatgatgaaagtgaagggtctggcagtgaaaaatcatctgcagcttcagaagaggaggaagaaaaggaaagtgaagaagccatcctagcagatgatgatgaaccatgcaaaaaatgtggccttccaaaccatcctgagctaattcttctgtgtgactcttgcgatagtggataccatactgcctgccttcgccctcctctgatgatcatcccagatggagaatggttctgcccaccttgccaacataaactgctctgtgaaaaattagaggaacagttgcaggatttggatgttgccttaaagaagaaagagcgtgccgaacgaagaaaagaacgcttggtgtatgttggtatcagtattgaaaacatcattcctccacaagagccagacttttctgaagatcaagaagaaaagaaaaaagattcaaaaaaa

SEQ ID NO: 192204 - DNA, 4326 bp, Artificial Sequence
  derived and/or modified sequence
atggccaccgccgccgccgccgccgccgtgatggccccccccggctgccccggcagctgccccaacttcgccgtggtgtgcagcttcctggagagatacggccccctgctggacctgcccgagctgcccttccccgagctggagagagtgctgcaggcccccccccccgacgtgggcaacggcgaggtgcccaaggagctggtggagctgcacctgaagctgatgagaaagatcggcaagagcgtgaccgccgacagatgggagaagtacctgatcaagatctgccaggagttcaacagcacctgggcctgggagatggagaagaagggctacctggagatgagcgtggagtgcaagctggccctgctgaagtacctgtgcgagtgccagttcgacgacaacctgaagttcaagaacatcatcaacgaggaggacgccgacaccatgagactgcagcccatcggcagagacaaggacggcctgatgtactggtaccagctggaccaggaccacaacgtgagaatgtacatcgaggagcaggacgaccaggacggcagcagctggaagtgcatcgtgagaaacagaaacgagctggccgagaccctggccctgctgaaggcccagatcgaccccgtgctgctgaagaacagcagccagcaggacaacagcagcagagagagccccagcctggaggacgaggagaccaagaaggaggaggagacccccaagcaggaggagcagaaggagagcgagaagatgaagagcgaggagcagcccatggacctggagaacagaagcaccgccaacgtgctggaggagaccaccgtgaagaaggagaaggaggacgagaaggagctggtgaagctgcccgtgatcgtgaagctggagaagcccctgcccgagaacgaggagaagaagatcatcaaggaggagagcgacagcttcaaggagaacgtgaagcccatcaaggtggaggtgaaggagtgcagagccgaccccaaggacaccaagagcagcatggagaagcccgtggcccaggagcccgagagaatcgagttcggcggcaacatcaagagcagccacgagatcaccgagaagagcaccgaggagaccgagaagctgaagaacgaccagcaggccaagatccccctgaagaagagagagatcaagctgagcgacgacttcgacagccccgtgaagggccccctgtgcaagagcgtgacccccaccaaggagttcctgaaggacgagatcaagcaggaggaggagacctgcaagagaatcagcaccatcaccgccctgggccacgagggcaagcagctggtgaacggcgaggtgagcgacgagagagtggcccccaacttcaagaccgagcccatcgagaccaagttctacgagaccaaggaggagagctacagccccagcaaggacagaaacatcatcaccgagggcaacggcaccgagagcctgaacagcgtgatcaccagcatgaagaccggcgagctggagaaggagaccgcccccctgagaaaggacgccgacagcagcatcagcgtgctggagatccacagccagaaggcccagatcgaggagcccgacccccccgagatggagaccagcctggacagcagcgagatggccaaggacctgagcagcaagaccgccctgagcagcaccgagagctgcaccatgaagggcgaggagaagagccccaagaccaagaaggacaagagaccccccatcctggagtgcctggagaagctggagaagagcaagaagaccttcctggacaaggacgcccagagactgagccccatccccgaggaggtgcccaagagcaccctggagagcgagaagcccggcagccccgaggccgccgagaccagcccccccagcaacatcatcgaccactgcgagaagctggccagcgagaaggaggtggtggagtgccagagcaccagcaccgtgggcggccagagcgtgaagaaggtggacctggagaccctgaaggaggacagcgagttcaccaaggtggagatggacaacctggacaacgcccagaccagcggcatcgaggagcccagcgagaccaagggcagcatgcagaagagcaagttcaagtacaagctggtgcccgaggaggagaccaccgccagcgagaacaccgagatcaccagcgagagacagaaggagggcatcaagctgaccatcagaatcagcagcagaaagaagaagcccgacagcccccccaaggtgctggagcccgagaacaagcaggagaagaccgagaaggaggaggagaagaccaacgtgggcagaaccctgagaagaagccccagaatcagcagacccaccgccaaggtggccgagatcagagaccagaaggccgacaagaagagaggcgagggcgaggacgaggtggaggaggagagcaccgccctgcagaagaccgacaagaaggagatcctgaagaagagcgagaaggacaccaacagcaaggtgagcaaggtgaagcccaagggcaaggtgagatggaccggcagcagaaccagaggcagatggaagtacagcagcaacgacgagagcgagggcagcggcagcgagaagagcagcgccgccagcgaggaggaggaggagaaggagagcgaggaggccatcctggccgacgacgacgagccctgcaagaagtgcggcctgcccaaccaccccgagctgatcctgctgtgcgacagctgcgacagcggctaccacaccgcctgcctgagaccccccctgatgatcatccccgacggcgagtggttctgccccccctgccagcacaagctgctgtgcgagaagctggaggagcagctgcaggacctggacgtggccctgaagaagaaggagagagccgagagaagaaaggagagactggtgtacgtgggcatcagcatcgagaacatcatccccccccaggagcccgacttcagcgaggaccaggaggagaagaagaaggacagcaagaagagcaaggccaacctgctggagagaagaagcaccagaaccagaaagtgcatcagctacagattcgacgagttcgacgaggccatcgacgaggccatcgaggacgacatcaaggaggccgacggcggcggcgtgggcagaggcaaggacatcagcaccatcaccggccacagaggcaaggacatcagcaccatcctggacgaggagagaaaggagaacaagagaccccagagagccgccgccgccagaagaaagaagagaagaagactgaacgacctggacagcgacagcaacctggacgaggaggagagcgaggacgagttcaagatcagcgacggcagccaggacgagttcgtggtgagcgacgagaaccccgacgagagcgaggaggacccccccagcaacgacgacagcgacaccgacttctgcagcagaagactgagaagacaccccagcagacccatgagacagagcagaagactgagaagaaagacccccaagaagaagtacagcgacgacgacgaggaggaggagagcgaggagaacagcagagacagcgagagcgacttcagcgacgacttcagcgacgacttcgtggagaccagaagaagaagaagcagaagaaaccagaagagacagatcaactacaaggaggacagcgagagcgacggcagccagaagagcctgagaagaggcaaggagatcagaagagtgcacaagagaagactgagcagcagcgagagcgaggagagctacctgagcaagaacagcgaggacgacgagctggccaaggagagcaagagaagcgtgagaaagagaggcagaagcaccgacgagtacagcgaggccgacgaggaggaggaggaggaggagggcaagcccagcagaaagagactgcacagaatcgagaccgacgaggaggagagctgcgacaacgcccacggcgacgccaaccagcccgccagagacagccagcccagagtgctgcccagcgagcaggagagcaccaagaagccctacagaatcgagagcgacgaggaggaggacttcgagaacgtgggcaaggtgggcagccccctggactacagcctggtggacctgcccagcaccaacggccagagccccggcaaggccatcgagaacctgatcggcaagcccaccgagaagagccagacccccaaggacaacagcaccgccagcgccagcctggccagcaacggcaccagcggcggccaggaggccggcgcccccgaggaggaggaggacgagctgctgagagtgaccgacctggtggactacgtgtgcaacagcgagcagctgtag

SEQ ID NO: 192205 - DNA, 4233 bp, Artificial Sequence
  derived and/or modified sequence
atggccaccgccgccgccgccgccgccgtgatggccccccccggctgccccggcagctgccccaacttcgccgtggtgtgcagcttcctggagagatacggccccctgctggacctgcccgagctgcccttccccgagctggagagagtgctgcaggcccccccccccgacgtgggcaacggcgaggtgcccaaggagctggtggagctgcacctgaagctgatgagaaagatcggcaagagcgtgaccgccgacagatgggagaagtacctgatcaagtacctgtgcgagtgccagttcgacgacaacctgaagttcaagaacatcatcaacgaggaggacgccgacaccatgagactgcagcccatcggcagagacaaggacggcctgatgtactggtaccagctggaccaggaccacaacgtgagaatgtacatcgaggagcaggacgaccaggacggcagcagctggaagtgcatcgtgagaaacagaaacgagctggccgagaccctggccctgctgaaggcccagatcgaccccgtgctgctgaagaacagcagccagcaggacaacagcagcagagagagccccagcctggaggacgaggagaccaagaaggaggaggagacccccaagcaggaggagcagaaggagagcgagaagatgaagagcgaggagcagcccatggacctggagaacagaagcaccgccaacgtgctggaggagaccaccgtgaagaaggagaaggaggacgagaaggagctggtgaagctgcccgtgatcgtgaagctggagaagcccctgcccgagaacgaggagaagaagatcatcaaggaggagagcgacagcttcaaggagaacgtgaagcccatcaaggtggaggtgaaggagtgcagagccgaccccaaggacaccaagagcagcatggagaagcccgtggcccaggagcccgagagaatcgagttcggcggcaacatcaagagcagccacgagatcaccgagaagagcaccgaggagaccgagaagctgaagaacgaccagcaggccaagatccccctgaagaagagagagatcaagctgagcgacgacttcgacagccccgtgaagggccccctgtgcaagagcgtgacccccaccaaggagttcctgaaggacgagatcaagcaggaggaggagacctgcaagagaatcagcaccatcaccgccctgggccacgagggcaagcagctggtgaacggcgaggtgagcgacgagagagtggcccccaacttcaagaccgagcccatcgagaccaagttctacgagaccaaggaggagagctacagccccagcaaggacagaaacatcatcaccgagggcaacggcaccgagagcctgaacagcgtgatcaccagcatgaagaccggcgagctggagaaggagaccgcccccctgagaaaggacgccgacagcagcatcagcgtgctggagatccacagccagaaggcccagatcgaggagcccgacccccccgagatggagaccagcctggacagcagcgagatggccaaggacctgagcagcaagaccgccctgagcagcaccgagagctgcaccatgaagggcgaggagaagagccccaagaccaagaaggacaagagaccccccatcctggagtgcctggagaagctggagaagagcaagaagaccttcctggacaaggacgcccagagactgagccccatccccgaggaggtgcccaagagcaccctggagagcgagaagcccggcagccccgaggccgccgagaccagcccccccagcaacatcatcgaccactgcgagaagctggccagcgagaaggaggtggtggagtgccagagcaccagcaccgtgggcggccagagcgtgaagaaggtggacctggagaccctgaaggaggacagcgagttcaccaaggtggagatggacaacctggacaacgcccagaccagcggcatcgaggagcccagcgagaccaagggcagcatgcagaagagcaagttcaagtacaagctggtgcccgaggaggagaccaccgccagcgagaacaccgagatcaccagcgagagacagaaggagggcatcaagctgaccatcagaatcagcagcagaaagaagaagcccgacagcccccccaaggtgctggagcccgagaacaagcaggagaagaccgagaaggaggaggagaagaccaacgtgggcagaaccctgagaagaagccccagaatcagcagacccaccgccaaggtggccgagatcagagaccagaaggccgacaagaagagaggcgagggcgaggacgaggtggaggaggagagcaccgccctgcagaagaccgacaagaaggagatcctgaagaagagcgagaaggacaccaacagcaaggtgagcaaggtgaagcccaagggcaaggtgagatggaccggcagcagaaccagaggcagatggaagtacagcagcaacgacgagagcgagggcagcggcagcgagaagagcagcgccgccagcgaggaggaggaggagaaggagagcgaggaggccatcctggccgacgacgacgagccctgcaagaagtgcggcctgcccaaccaccccgagctgatcctgctgtgcgacagctgcgacagcggctaccacaccgcctgcctgagaccccccctgatgatcatccccgacggcgagtggttctgccccccctgccagcacaagctgctgtgcgagaagctggaggagcagctgcaggacctggacgtggccctgaagaagaaggagagagccgagagaagaaaggagagactggtgtacgtgggcatcagcatcgagaacatcatccccccccaggagcccgacttcagcgaggaccaggaggagaagaagaaggacagcaagaagagcaaggccaacctgctggagagaagaagcaccagaaccagaaagtgcatcagctacagattcgacgagttcgacgaggccatcgacgaggccatcgaggacgacatcaaggaggccgacggcggcggcgtgggcagaggcaaggacatcagcaccatcaccggccacagaggcaaggacatcagcaccatcctggacgaggagagaaaggagaacaagagaccccagagagccgccgccgccagaagaaagaagagaagaagactgaacgacctggacagcgacagcaacctggacgaggaggagagcgaggacgagttcaagatcagcgacggcagccaggacgagttcgtggtgagcgacgagaaccccgacgagagcgaggaggacccccccagcaacgacgacagcgacaccgacttctgcagcagaagactgagaagacaccccagcagacccatgagacagagcagaagactgagaagaaagacccccaagaagaagtacagcgacgacgacgaggaggaggagagcgaggagaacagcagagacagcgagagcgacttcagcgacgacttcagcgacgacttcgtggagaccagaagaagaagaagcagaagaaaccagaagagacagatcaactacaaggaggacagcgagagcgacggcagccagaagagcctgagaagaggcaaggagatcagaagagtgcacaagagaagactgagcagcagcgagagcgaggagagctacctgagcaagaacagcgaggacgacgagctggccaaggagagcaagagaagcgtgagaaagagaggcagaagcaccgacgagtacagcgaggccgacgaggaggaggaggaggaggagggcaagcccagcagaaagagactgcacagaatcgagaccgacgaggaggagagctgcgacaacgcccacggcgacgccaaccagcccgccagagacagccagcccagagtgctgcccagcgagcaggagagcaccaagaagccctacagaatcgagagcgacgaggaggaggacttcgagaacgtgggcaaggtgggcagccccctggactacagcctggtggacctgcccagcaccaacggccagagccccggcaaggccatcgagaacctgatcggcaagcccaccgagaagagccagacccccaaggacaacagcaccgccagcgccagcctggccagcaacggcaccagcggcggccaggaggccggcgcccccgaggaggaggaggacgagctgctgagagtgaccgacctggtggactacgtgtgcaacagcgagcagctgtag

SEQ ID NO: 192206 - DNA, 3570 bp, Artificial Sequence
  derived and/or modified sequence
atgaagagcgaggagcagcccatggacctggagaacagaagcaccgccaacgtgctggaggagaccaccgtgaagaaggagaaggaggacgagaaggagctggtgaagctgcccgtgatcgtgaagctggagaagcccctgcccgagaacgaggagaagaagatcatcaaggaggagagcgacagcttcaaggagaacgtgaagcccatcaaggtggaggtgaaggagtgcagagccgaccccaaggacaccaagagcagcatggagaagcccgtggcccaggagcccgagagaatcgagttcggcggcaacatcaagagcagccacgagatcaccgagaagagcaccgaggagaccgagaagctgaagaacgaccagcaggccaagatccccctgaagaagagagagatcaagctgagcgacgacttcgacagccccgtgaagggccccctgtgcaagagcgtgacccccaccaaggagttcctgaaggacgagatcaagcaggaggaggagacctgcaagagaatcagcaccatcaccgccctgggccacgagggcaagcagctggtgaacggcgaggtgagcgacgagagagtggcccccaacttcaagaccgagcccatcgagaccaagttctacgagaccaaggaggagagctacagccccagcaaggacagaaacatcatcaccgagggcaacggcaccgagagcctgaacagcgtgatcaccagcatgaagaccggcgagctggagaaggagaccgcccccctgagaaaggacgccgacagcagcatcagcgtgctggagatccacagccagaaggcccagatcgaggagcccgacccccccgagatggagaccagcctggacagcagcgagatggccaaggacctgagcagcaagaccgccctgagcagcaccgagagctgcaccatgaagggcgaggagaagagccccaagaccaagaaggacaagagaccccccatcctggagtgcctggagaagctggagaagagcaagaagaccttcctggacaaggacgcccagagactgagccccatccccgaggaggtgcccaagagcaccctggagagcgagaagcccggcagccccgaggccgccgagaccagcccccccagcaacatcatcgaccactgcgagaagctggccagcgagaaggaggtggtggagtgccagagcaccagcaccgtgggcggccagagcgtgaagaaggtggacctggagaccctgaaggaggacagcgagttcaccaaggtggagatggacaacctggacaacgcccagaccagcggcatcgaggagcccagcgagaccaagggcagcatgcagaagagcaagttcaagtacaagctggtgcccgaggaggagaccaccgccagcgagaacaccgagatcaccagcgagagacagaaggagggcatcaagctgaccatcagaatcagcagcagaaagaagaagcccgacagcccccccaaggtgctggagcccgagaacaagcaggagaagaccgagaaggaggaggagaagaccaacgtgggcagaaccctgagaagaagccccagaatcagcagacccaccgccaaggtggccgagatcagagaccagaaggccgacaagaagagaggcgagggcgaggacgaggtggaggaggagagcaccgccctgcagaagaccgacaagaaggagatcctgaagaagagcgagaaggacaccaacagcaaggtgagcaaggtgaagcccaagggcaaggtgagatggaccggcagcagaaccagaggcagatggaagtacagcagcaacgacgagagcgagggcagcggcagcgagaagagcagcgccgccagcgaggaggaggaggagaaggagagcgaggaggccatcctggccgacgacgacgagccctgcaagaagtgcggcctgcccaaccaccccgagctgatcctgctgtgcgacagctgcgacagcggctaccacaccgcctgcctgagaccccccctgatgatcatccccgacggcgagtggttctgccccccctgccagcacaagctgctgtgcgagaagctggaggagcagctgcaggacctggacgtggccctgaagaagaaggagagagccgagagaagaaaggagagactggtgtacgtgggcatcagcatcgagaacatcatccccccccaggagcccgacttcagcgaggaccaggaggagaagaagaaggacagcaagaagagcaaggccaacctgctggagagaagaagcaccagaaccagaaagtgcatcagctacagattcgacgagttcgacgaggccatcgacgaggccatcgaggacgacatcaaggaggccgacggcggcggcgtgggcagaggcaaggacatcagcaccatcaccggccacagaggcaaggacatcagcaccatcctggacgaggagagaaaggagaacaagagaccccagagagccgccgccgccagaagaaagaagagaagaagactgaacgacctggacagcgacagcaacctggacgaggaggagagcgaggacgagttcaagatcagcgacggcagccaggacgagttcgtggtgagcgacgagaaccccgacgagagcgaggaggacccccccagcaacgacgacagcgacaccgacttctgcagcagaagactgagaagacaccccagcagacccatgagacagagcagaagactgagaagaaagacccccaagaagaagtacagcgacgacgacgaggaggaggagagcgaggagaacagcagagacagcgagagcgacttcagcgacgacttcagcgacgacttcgtggagaccagaagaagaagaagcagaagaaaccagaagagacagatcaactacaaggaggacagcgagagcgacggcagccagaagagcctgagaagaggcaaggagatcagaagagtgcacaagagaagactgagcagcagcgagagcgaggagagctacctgagcaagaacagcgaggacgacgagctggccaaggagagcaagagaagcgtgagaaagagaggcagaagcaccgacgagtacagcgaggccgacgaggaggaggaggaggaggagggcaagcccagcagaaagagactgcacagaatcgagaccgacgaggaggagagctgcgacaacgcccacggcgacgccaaccagcccgccagagacagccagcccagagtgctgcccagcgagcaggagagcaccaagaagccctacagaatcgagagcgacgaggaggaggacttcgagaacgtgggcaaggtgggcagccccctggactacagcctggtggacctgcccagcaccaacggccagagccccggcaaggccatcgagaacctgatcggcaagcccaccgagaagagccagacccccaaggacaacagcaccgccagcgccagcctggccagcaacggcaccagcggcggccaggaggccggcgcccccgaggaggaggaggacgagctgctgagagtgaccgacctggtggactacgtgtgcaacagcgagcagctgtag

SEQ ID NO: 192207 - DNA, 2412 bp, Artificial Sequence
  derived and/or modified sequence
gagaccctggccctgctgaaggcccagatcgaccccgtgctgctgaagaacagcagccagcaggacaacagcagcagagagagccccagcctggaggacgaggagaccaagaaggaggaggagacccccaagcaggaggagcagaaggagagcgagaagatgaagagcgaggagcagcccatggacctggagaacagaagcaccgccaacgtgctggaggagaccaccgtgaagaaggagaaggaggacgagaaggagctggtgaagctgcccgtgatcgtgaagctggagaagcccctgcccgagaacgaggagaagaagatcatcaaggaggagagcgacagcttcaaggagaacgtgaagcccatcaaggtggaggtgaaggagtgcagagccgaccccaaggacaccaagagcagcatggagaagcccgtggcccaggagcccgagagaatcgagttcggcggcaacatcaagagcagccacgagatcaccgagaagagcaccgaggagaccgagaagctgaagaacgaccagcaggccaagatccccctgaagaagagagagatcaagctgagcgacgacttcgacagccccgtgaagggccccctgtgcaagagcgtgacccccaccaaggagttcctgaaggacgagatcaagcaggaggaggagacctgcaagagaatcagcaccatcaccgccctgggccacgagggcaagcagctggtgaacggcgaggtgagcgacgagagagtggcccccaacttcaagaccgagcccatcgagaccaagttctacgagaccaaggaggagagctacagccccagcaaggacagaaacatcatcaccgagggcaacggcaccgagagcctgaacagcgtgatcaccagcatgaagaccggcgagctggagaaggagaccgcccccctgagaaaggacgccgacagcagcatcagcgtgctggagatccacagccagaaggcccagatcgaggagcccgacccccccgagatggagaccagcctggacagcagcgagatggccaaggacctgagcagcaagaccgccctgagcagcaccgagagctgcaccatgaagggcgaggagaagagccccaagaccaagaaggacaagagaccccccatcctggagtgcctggagaagctggagaagagcaagaagaccttcctggacaaggacgcccagagactgagccccatccccgaggaggtgcccaagagcaccctggagagcgagaagcccggcagccccgaggccgccgagaccagcccccccagcaacatcatcgaccactgcgagaagctggccagcgagaaggaggtggtggagtgccagagcaccagcaccgtgggcggccagagcgtgaagaaggtggacctggagaccctgaaggaggacagcgagttcaccaaggtggagatggacaacctggacaacgcccagaccagcggcatcgaggagcccagcgagaccaagggcagcatgcagaagagcaagttcaagtacaagctggtgcccgaggaggagaccaccgccagcgagaacaccgagatcaccagcgagagacagaaggagggcatcaagctgaccatcagaatcagcagcagaaagaagaagcccgacagcccccccaaggtgctggagcccgagaacaagcaggagaagaccgagaaggaggaggagaagaccaacgtgggcagaaccctgagaagaagccccagaatcagcagacccaccgccaaggtggccgagatcagagaccagaaggccgacaagaagagaggcgagggcgaggacgaggtggaggaggagagcaccgccctgcagaagaccgacaagaaggagatcctgaagaagagcgagaaggacaccaacagcaaggtgagcaaggtgaagcccaagggcaaggtgagatggaccggcagcagaaccagaggcagatggaagtacagcagcaacgacgagagcgagggcagcggcagcgagaagagcagcgccgccagcgaggaggaggaggagaaggagagcgaggaggccatcctggccgacgacgacgagccctgcaagaagtgcggcctgcccaaccaccccgagctgatcctgctgtgcgacagctgcgacagcggctaccacaccgcctgcctgagaccccccctgatgatcatccccgacggcgagtggttctgccccccctgccagcacaagctgctgtgcgagaagctggaggagcagctgcaggacctggacgtggccctgaagaagaaggagagagccgagagaagaaaggagagactggtgtacgtgggcatcagcatcgagaacatcatccccccccaggagcccgacttcagcgaggaccaggaggagaagaagaaggacagcaagaagtag

SEQ ID NO: 192208 - protein, 282 aa, Artificial Sequence
  derived and/or modified sequence
MSGGWMAQVGAWRTGALGLALLLLLGLGLGLEAAASPLSTPTSAQAAGPSSGSCPPTKFQCRTSGLCVPLTWRCDRDLDCSDGSDEEECRIEPCTQKGQCPPPPGLPCPCTGVSDCSGGTDKKLRNCSRLACLAGELRCTLSDDCIPLTWRCDGHPDCPDSSDELGCGTNEILPEGDATTMGPPVTLESVTSLRNATTMGPPVTLESVPSVGNATSSSAGDQSGSPTAYGVIAAAAVLSASLVTATLLLLSWLRAQERLRPLGLLVAMKESLLLSEQKTSLP

SEQ ID NO: 192209 - protein, 201 aa, Artificial Sequence
  derived and/or modified sequence
NEILPEGDATTMGPPVTLESVTSLRNATTMGPPVTLESVPSVGNAILLCRRPVWKPNCLWGYCSCCGAQCKPGHRHPPPFVLAPSPGAPPPTGVTGGHEGVPAAVRTEDLAALRTSTCHHRHSALGVAGQEESSDADGYPGTPALRDLSSSGHVEPRTRAPAEVALEIEGPWTLPMEIRGARMGNLPQPELRGWPQAAPRG

SEQ ID NO: 192210 - DNA, 849 bp, Artificial Sequence
  derived and/or modified sequence
atgagcgggggctggatggcccaggtcggcgcgtggagaacaggcgccttagggttagcacttctgttactcttagggcttggcctcggtctggaagccgcagcaagccctctgtccacccccacttcagcccaagcggctggtccttctagtggttcgtgtccacctaccaagttccagtgtaggaccagcggcctttgtgtgcctctgacctggcgatgcgaccgtgacctagattgcagcgacggtagtgacgaagaagagtgcagaatcgagccttgtacacagaaaggacagtgtcctccccccccaggcttgccctgtccctgcacgggagtctcagactgtagcgggggcaccgataagaagctgcgaaactgtagtagacttgcctgtctggcgggcgaactgaggtgtaccctctctgatgattgcattccactgacttggagatgcgatggacaccctgactgccccgatagcagcgatgaacttggctgtggtaccaacgagatactgcccgagggagatgctacgacgatggggccacctgttaccctggaatctgtcacctccttaaggaacgctaccacaatggggccccctgttacgcttgagtctgtcccctcggttggaaatgcaacttcatcctctgctggcgatcagtccggtagcccgaccgcatacggagtgattgccgccgccgcagtgctctctgcatctctggtaacggccaccttgctgcttctgagctggctgcgggcccaagagagattgcgccctttaggcttgctcgtcgcaatgaaagaatcccttctgctgtctgaacagaaaacctctctgccctag

SEQ ID NO: 192211 - DNA, 849 bp, Artificial Sequence
  derived and/or modified sequence
atgtctgggggctggatggcccaggtgggcgcctggaggactggagccctgggcctggccctgctgctgctgctgggcctgggcctgggcctggaggccgccgccagccccctgagcacccccaccagcgcccaggccgccggccccagcagcggcagctgcccccccaccaagttccagtgcaggaccagcggcctgtgtgtgcccctgacctggaggtgtgaccgggacctggactgcagtgatggcagtgatgaggaggagtgcagaattgagccctgcacccagaagggccagtgccccccacctcctggcctgccctgcccctgcacaggagtgtctgactgcagcggcggcacagacaagaagctgaggaactgcagccggctggcctgcctggccggggagctgcgctgcaccctgagtgatgactgcatccccctgacctggaggtgtgatggccacccagactgcccagacagcagtgatgagctgggctgcggcaccaatgagatcctgcctgaaggagatgccaccaccatgggcccccctgtgaccctggagagcgtgaccagcctgagaaatgccaccaccatgggcccccctgtgaccctggagagcgtgcccagcgtgggcaatgccaccagcagcagcgctggggaccagagcggcagccccacagcctatggagtgattgctgctgctgctgtgctgagcgccagcctggtgacagccaccctgctgctgctgtcctggctgcgggcccaggagcggctgcggcccctgggcctgctggtggccatgaaggagagcctgctgctgtctgagcagaagaccagcctgccctag

SEQ ID NO: 192212 - DNA, 849 bp, Artificial Sequence
  derived and/or modified sequence
atgagcggcggctggatggcccaggtgggcgcctggcggaccggcgcgctgggcctcgcccttctccttctgttagggcttggcttaggtctggaagccgcagcttcccccctcagcactccaaccagcgcgcaagctgcagggcctagctccgggagttgcccgcctaccaaattccagtgtcgcactagtggtctgtgcgtgccactgacctggagatgcgacagggacttggactgttcagatggtagcgatgaggaagagtgtaggatcgagccttgcacacagaagggacaatgtccaccacctccagggttaccgtgcccctgtaccggtgtgtctgactgctccggcggaacggataagaaactccgaaattgttcccgattggcttgcttggctggagagctgcgatgcaccttgtccgacgactgtatccccttgacatggcgctgcgacggccatcctgactgtcccgacagctccgacgaactcgggtgtggcacaaacgaaatcctccccgaaggcgacgccaccaccatggggccaccagtcacactggagtccgtgacatcactgcgcaatgccaccaccatgggcccacccgtgacattggagagcgttccctctgtcggcaacgccacatcatctagtgctggggatcagtctgggtcccccactgcctacggcgtcattgccgcggctgccgtgctgagtgccagcctggtgacggctactctgctgctactgtcctggctccgtgctcaggagcgcctgaggcctttaggtctcttggtcgccatgaaggaaagcctgctcctgtcagagcagaaaactagcctaccgtag

SEQ ID NO: 192213 - DNA, 606 bp, Artificial Sequence
  derived and/or modified sequence
aacgagatcctgcccgagggcgacgccaccaccatgggcccccccgtaactctggaaagcgtgacttccctgcgaaatgcgacaacgatggggccaccggtaacactggagagcgttccaagcgtgggaaacgccattcttctctgccggagaccggtttggaagccgaactgtctgtggggttactgctcctgctgtggtgcacagtgcaaacctggccaccgccaccctccaccctttgtcctcgccccctctcccggtgccccaccacccaccggagtaacagggggccacgaaggggttcctgcggccgttagaacagaagatctcgccgccttgcgcacctctacttgccatcaccgacatagcgcactcggcgttgcgggccaggaggagtctagcgacgctgatggatatccgggcacacctgcattacgggacctgtctagcagtggccacgtggagcctcgcacgagagctcctgcagaggtggcattggagattgagggaccttggacgttaccaatggagataaggggagctaggatggggaatttgccacagccggaacttcgtggctggccccaggctgcccctcggggatag

SEQ ID NO: 192214 - DNA, 849 bp, Artificial Sequence
  derived and/or modified sequence
atgtccgggggatggatggcgcaggtgggcgcttggcgcaccggtgccctcgggctggccctgttgctgctgctgggtctgggtttaggcttagaggccgctgccagtcccctgtctactcctacatccgcacaggccgctggaccctcaagcggtagttgtccgccaaccaaatttcaatgtaggaccagcgggctgtgtgtgcctcttacctggcgttgtgacagggatctggactgtagtgacggcagcgatgaagaggagtgcaggatagagccctgtacacagaaaggccaatgtccgcctccccctggcttgccttgcccttgtactggtgtgtccgattgttcagggggtactgacaagaagctgcgcaattgctctagattggcttgccttgctggggagttaagatgtactctgtctgatgactgcatccctttgacttggagatgtgatggtcatcccgattgtcccgatagcagcgacgagctgggctgtgggaccaacgagatactccctgagggggacgccacgactatggggccacccgtaactctcgaaagcgtgacaagtcttagaaatgccaccacaatgggcccaccagtcacactggaatccgtgccaagcgtcgggaacgctacttcctcctcagctggtgaccaatctggtagtcctactgcttatggtgtcatcgctgcagcagccgtattgagcgcctcattggtaacagcaaccctcctcctgttgagttggctgagagcgcaggagcgtctaaggccactcggcctgctggtagccatgaaggagtctctgctcttgagtgagcagaagacatccctgccgtag

SEQ ID NO: 192215 - DNA, 1251 bp, Artificial Sequence
  derived and/or modified sequence
gtgcgcgtgcgcagggataagagagcggtctggacagcgcgtggccggcgccgctgtggggacagcatgagcggcggttggatggcgcaggttggagcgtggcgaacaggggctctgggcctggcgctgctgctgctgctcggcctcggactaggcctggaggccgccgcgagcccgctttccaccccgacctctgcccaggccgcaggccccagctcaggctcgtgcccacccaccaagttccagtgccgcaccagtggcttatgcgtgcccctcacctggcgctgcgacagggacttggactgcagcgatggcagcgatgaggaggagtgcaggattgagccatgtacccagaaagggcaatgcccaccgccccctggcctcccctgcccctgcaccggcgtcagtgactgctctgggggaactgacaagaaactgcgcaactgcagccgcctggcctgcctagcaggcgagctccgttgcacgctgagcgatgactgcattccactcacgtggcgctgcgacggccacccagactgtcccgactccagcgacgagctcggctgtggaaccaatgagatcctcccggaaggggatgccacaaccatggggccccctgtgaccctggagagtgtcacctctctcaggaatgccacaaccatggggccccctgtgaccctggagagtgtcccctctgtcgggaatgccacatcctcctctgccggagaccagtctggaagcccaactgcctatggggttattgcagctgctgcggtgctcagtgcaagcctggtcaccgccaccctcctccttttgtcctggctccgagcccaggagcgcctccgcccactggggttactggtggccatgaaggagtccctgctgctgtcagaacagaagacctcgctgccctgaggacaagcacttgccaccaccgtcactcagccctgggcgtagccggacaggaggagagcagtgatgcggatgggtacccgggcacaccagccctcagagacctgagctcttctggccacgtggaacctcgaacccgagctcctgcagaagtggccctggagattgagggtccctggacactccctatggagatccggggagctaggatggggaacctgccacagccagaactgaggggctggccccaggcagctcccagggggtagaacggccctgtgcttaagacactcctgctgccccgtctgagggtggcaattaaagttgcttcacatcctc

SEQ ID NO: 192216 - DNA, 676 bp, Artificial Sequence
  derived and/or modified sequence
aatgagatcctcccggaaggggatgccacaaccatggggccccctgtgaccctggagagtgtcacctctctcaggaatgccacaaccatggggccccctgtgaccctggagagtgtcccctctgtcgggaatgccatcctcctctgccggagaccagtctggaagcccaactgcctatggggttattgcagctgctgcggtgctcagtgcaagcctggtcaccgccaccctcctccttttgtcctggctccgagcccaggagcgcctccgcccactggggttactggtggccatgaaggagtccctgctgctgtcagaacagaagacctcgctgccctgaggacaagcacttgccaccaccgtcactcagccctgggcgtagccggacaggaggagagcagtgatgcggatgggtacccgggcacaccagccctcagagacctgagctcttctggccacgtggaacctcgaacccgagctcctgcagaagtggccctggagattgagggtccctggacactccctatggagatccggggagctaggatggggaacctgccacagccagaactgaggggctggccccaggcagctcccagggggtagaacggccctgtgcttaagacactcctgctgccccgtctgagggtggcaattaaagttgcttcacatcctc

SEQ ID NO: 192217 - DNA, 849 bp, Artificial Sequence
  derived and/or modified sequence
atgagcggcggctggatggcccaggtgggcgcctggagaaccggcgccctgggcctggccctgctgctgctgctgggcctgggcctgggcctggaggccgccgccagccccctgagcacccccaccagcgcccaggccgccggccccagcagcggcagctgcccccccaccaagttccagtgcagaaccagcggcctgtgcgtgcccctgacctggagatgcgacagagacctggactgcagcgacggcagcgacgaggaggagtgcagaatcgagccctgcacccagaagggccagtgcccccccccccccggcctgccctgcccctgcaccggcgtgagcgactgcagcggcggcaccgacaagaagctgagaaactgcagcagactggcctgcctggccggcgagctgagatgcaccctgagcgacgactgcatccccctgacctggagatgcgacggccaccccgactgccccgacagcagcgacgagctgggctgcggcaccaacgagatcctgcccgagggcgacgccaccaccatgggcccccccgtgaccctggagagcgtgaccagcctgagaaacgccaccaccatgggcccccccgtgaccctggagagcgtgcccagcgtgggcaacgccaccagcagcagcgccggcgaccagagcggcagccccaccgcctacggcgtgatcgccgccgccgccgtgctgagcgccagcctggtgaccgccaccctgctgctgctgagctggctgagagcccaggagagactgagacccctgggcctgctggtggccatgaaggagagcctgctgctgagcgagcagaagaccagcctgccctag

SEQ ID NO: 192218 - protein, 431 aa, Artificial Sequence
  derived and/or modified sequence
MSWVQATLLARGLCRAWGGTCGAALTGTSISQVPRRLPRGLHCSAAAHSSEQSLVPSPPEPRQRPTKALVPFEDLFGQAPGGERDKASFLQTVQKFAEHSVRKRGHIDFIYLALRKMREYGVERDLAVYNQLLNIFPKEVFRPRNIIQRIFVHYPRQQECGIAVLEQMENHGVMPNKETEFLLIQIFGRKSYPMLKLVRLKLWFPRFMNVNPFPVPRDLPQDPVELAMFGLRHMEPDLSARVTIYQVPLPKDSTGAADPPQPHIVGIQSPDQQAALARHNPARPVFVEGPFSLWLRNKCVYYHILRADLLPPEEREVEETPEEWNLYYPMQLDLEYVRSGWDNYEFDINEVEEGPVFAMCMAGAHDQATMAKWIQGLQETNPTLAQIPVVFRLAGSTRELQTSSAGLEEPPLPEDHQEEDDNLQRQQQGQS

SEQ ID NO: 192219 - DNA, 1296 bp, Artificial Sequence
  derived and/or modified sequence
atgtcttgggtgcaagcgacactgctcgcccgcggactgtgccgtgcctggggcggaacatgcggagccgcactcactggaaccagcatctcccaggttccaagacgcctgccaagagggttgcactgtagtgctgcagctcactcttctgagcagtcattagtgccttctcctcccgaacctcgtcagcgcccgacgaaggccctggtgccttttgaagacttgttcgggcaggctcccggcggcgagagagataaagcaagctttctgcagacggtgcaaaagttcgcagagcacagtgtccgaaagcgggggcatatagatttcatatacctcgctctgcggaaaatgagggaatacggcgtggagagggaccttgctgtatacaaccagttgctcaatatatttccaaaagaagtgttcagacctaggaacattatccaacggatttttgtacactacccacgccaacaggaatgtggcattgcagtgctggaacaaatggagaaccacggggtcatgccaaacaaagaaacggagttcctgctcattcaaatcttcggtagaaagtcatatccaatgctgaaactggtgaggcttaagttgtggtttcctaggttcatgaacgtcaacccgttccccgtacccagggatcttccacaggatccggtcgaattagctatgtttggtcttaggcatatggaacccgacctgtccgctcgtgtcacaatttaccaagtacctttaccaaaggattctacaggggcggcggacccaccccaaccccatattgtgggtatccagtccccagaccagcaggctgcacttgcccgtcacaaccccgcccggcccgtttttgttgaaggcccattcagcctgtggctaagaaacaaatgcgtctattaccacatccttcgtgcggatcttttaccacctgaagagagggaggtggaggaaactcctgaggagtggaacctgtattacccaatgcagctggacctggaatacgtccgaagcgggtgggacaactatgagttcgacattaatgaggttgaggagggccctgtatttgctatgtgtatggctggggcacatgatcaagctacaatggctaagtggatccaagggctgcaagagaccaacccaacgctcgctcaaattccagtggtcttccgcctcgctggctcaactagagagcttcagaccagctccgcggggctcgaggagccaccgttgcctgaggatcaccaggaagaggatgataatctccagcgccaacaacagggacaatcttag

SEQ ID NO: 192220 - DNA, 1296 bp, Artificial Sequence
  derived and/or modified sequence
atgtcctgggtgcaggccaccctgctggcccggggcctgtgccgggcctggggcggcacctgtggggccgccctgaccggcaccagcatcagccaggtgccccggcggctgccccggggcctgcactgcagcgctgctgcccacagcagcgagcagagcctggtgcccagccccccagagccccggcagaggcccaccaaggccctggtgccctttgaggacctgtttggccaggcccctggaggagagcgggacaaggccagcttcctgcagacagtgcagaagtttgctgagcacagcgtgaggaagaggggccacatcgacttcatctacctggccctgaggaagatgagagaatatggagtggagcgggacctggccgtgtacaaccagctgctgaacatcttccccaaggaggtgttccggcccaggaacatcatccagaggatctttgtgcactacccccggcagcaggagtgtggcattgctgtgctggagcagatggagaaccacggcgtgatgcccaacaaggagacagagttcctgctgatccagatctttggaaggaagagctaccccatgctgaagctggtgcggctgaagctgtggttcccccgcttcatgaatgtgaaccccttccctgtgccccgggacctgccccaggaccctgtggagctggccatgtttggcctgcggcacatggagccagacctgagcgcccgggtgaccatctaccaggtgcccctgcccaaggacagcactggagctgctgaccccccccagccccacatcgtgggcatccagagcccagaccagcaggccgccctggcccggcacaacccagcccggcctgtgtttgtggagggccccttcagcctgtggctgaggaacaagtgtgtgtactaccacatcctgcgggctgacctgctgcccccagaggagcgggaggtggaggagaccccagaggagtggaacctgtactaccccatgcagctggacctggagtatgtgcgcagcggctgggacaactatgaatttgacatcaatgaggtggaggagggccctgtgtttgccatgtgcatggccggggcccatgaccaggccaccatggccaagtggatccagggcctgcaggagaccaaccccaccctggcccagatccctgtggtgttccggctggccggcagcacccgggagctgcagaccagcagcgctggcctggaggagccccccctgcctgaggaccaccaggaggaggatgacaacctgcagaggcagcagcagggccagagctag

SEQ ID NO: 192221 - DNA, 1296 bp, Artificial Sequence
  derived and/or modified sequence
atgagctgggtgcaggccaccctgctggcccggggcctgtgccgggcgtggggtggtacctgtggagccgctctgactggcacatccattagccaggtgcccagacggttgcctcgcgggttgcactgctcggctgcagctcactcatctgaacagtctctcgttccaagcccgcccgagccccgccagagaccgaccaaggctcttgtccccttcgaagatctgttcggacaagctccaggaggtgagcgggacaaagcttctttcctgcagaccgtgcagaaattcgcagagcactcagtgagaaagcgtggccacatcgacttcatctatctggcgttaagaaagatgagggagtacggcgttgagagagacctagctgtctataatcaactgttaaatatttttccaaaggaagtcttccggcctagaaacataatccagcggatcttcgttcattatcctagacaacaggagtgtggaatcgccgtgctggaacaaatggaaaaccacggggttatgcctaacaaagaaacagaattcctgttgatccagatctttggacgtaagagctatcccatgctcaaactggtcaggctaaagttatggtttccaagattcatgaatgtgaacccatttccagtaccacgggaccttccccaggacccagtcgaattggccatgttcgggctgcggcacatggaaccagatctgtccgcgagggtgaccatataccaggtacccctgccgaaggattctaccggcgcagccgatccgccccagccacatattgttgggatccagagccccgaccagcaagccgctctcgctagacacaaccccgctaggcccgtgtttgtcgagggacctttcagtctttggctgcgaaataaatgtgtgtattatcatatcctacgggccgacctgctccccccagaggagcgagaagtcgaggagacccccgaagaatggaacttgtactatcccatgcagttggatcttgagtacgtcagaagcggctgggacaattacgaatttgatattaacgaggtggaggagggcccagtatttgctatgtgtatggccggagcccacgaccaagctacaatggctaagtggatccaggggctacaggagaccaatcctactctggcacagattccggtggtctttcgattggccggaagcacgagggagctgcagacttcctcagcaggccttgaagaacccccattacctgaggaccaccaggaggaggatgacaacctgcagcggcagcagcaaggtcagagttag

SEQ ID NO: 192222 - DNA, 1296 bp, Artificial Sequence
  derived and/or modified sequence
atgagttgggtgcaggcgaccctgctagcgagaggtctgtgccgcgcatgggggggtacttgcggggcagctctgactgggaccagtattagtcaggttccaaggcggttgcccagaggcctccattgttcagcagccgcacactcctcggagcaaagtctggtgccctcccctcctgagccacggcaaaggcctactaaggcactggtgcccttcgaggatctttttggccaggcccctgggggtgaaagagataaggcctcatttttgcaaaccgtccaaaaatttgcagagcattctgtccgtaagcgaggccacatcgactttatctatttagccttacgaaagatgcgggagtacggggtagaaagggacctcgcagtatacaatcagctactgaacatcttccctaaggaggtgtttcgcccacgcaacatcattcagcggatattcgtgcattatcctcggcagcaggagtgcggcatagccgttcttgagcagatggagaatcatggggtcatgcctaacaaggagaccgagttcttgctcattcagattttcggtaggaagtcttatcccatgttgaagcttgtcagactgaaattatggttccctaggttcatgaatgtgaaccctttcccggttccaagggacctcccgcaggatcccgtggagctggctatgtttggtttacgacacatggaacctgatctgtctgcacgggtcacaatttatcaagtccccttgccaaaggactccacaggggctgcagacccgccacagccgcacatcgtgggcatccagagtcccgatcaacaagctgcccttgccagacacaaccctgcaagaccagttttcgtggaggggccatttagcctgtggttacgcaacaagtgcgtctattaccatatactgagagcagatctcttacccccagaggaaagagaggttgaggaaacgccagaggagtggaacctgtactaccctatgcagcttgacctcgaatacgtaaggtcgggttgggataattacgagtttgacataaatgaggttgaagagggcccagtttttgccatgtgcatggcgggagcacacgatcaagccacgatggcaaagtggatccaagggctccaggaaactaaccccacactggcacaaatccccgtcgtctttcgacttgctgggagcacgagggaattgcagacgtcctccgcagggctggaagagccacctcttcccgaagaccaccaggaggaggacgacaacctgcagagacaacagcagggacaaagctag

SEQ ID NO: 192223 - DNA, 1296 bp, Artificial Sequence
  derived and/or modified sequence
atgagctgggtgcaggccaccctgctggccagaggcctgtgcagagcctggggcggcacctgcggcgccgccctgaccggcaccagcatcagccaggtgcccagaagactgcccagaggcctgcactgcagcgccgccgcccacagcagcgagcagagcctggtgcccagcccccccgagcccagacagagacccaccaaggccctggtgcccttcgaggacctgttcggccaggcccccggcggcgagagagacaaggccagcttcctgcagaccgtgcagaagttcgccgagcacagcgtgagaaagagaggccacatcgacttcatctacctggccctgagaaagatgagagagtacggcgtggagagagacctggccgtgtacaaccagctgctgaacatcttccccaaggaggtgttcagacccagaaacatcatccagagaatcttcgtgcactaccccagacagcaggagtgcggcatcgccgtgctggagcagatggagaaccacggcgtgatgcccaacaaggagaccgagttcctgctgatccagatcttcggcagaaagagctaccccatgctgaagctggtgagactgaagctgtggttccccagattcatgaacgtgaaccccttccccgtgcccagagacctgccccaggaccccgtggagctggccatgttcggcctgagacacatggagcccgacctgagcgccagagtgaccatctaccaggtgcccctgcccaaggacagcaccggcgccgccgaccccccccagccccacatcgtgggcatccagagccccgaccagcaggccgccctggccagacacaaccccgccagacccgtgttcgtggagggccccttcagcctgtggctgagaaacaagtgcgtgtactaccacatcctgagagccgacctgctgccccccgaggagagagaggtggaggagacccccgaggagtggaacctgtactaccccatgcagctggacctggagtacgtgagaagcggctgggacaactacgagttcgacatcaacgaggtggaggagggccccgtgttcgccatgtgcatggccggcgcccacgaccaggccaccatggccaagtggatccagggcctgcaggagaccaaccccaccctggcccagatccccgtggtgttcagactggccggcagcaccagagagctgcagaccagcagcgccggcctggaggagccccccctgcccgaggaccaccaggaggaggacgacaacctgcagagacagcagcagggccagagctag

SEQ ID NO: 192224 - DNA, 1684 bp, Artificial Sequence
  derived and/or modified sequence
gatttgctacctccctggagctccctgacccggacgctctctgggccaatatggcagcgcccagcaacaagacagagctggcctggagtccgcggctggccgcgtgagtaggtgattgtctgacaagcagaggcatgagctgggtccaggccaccctactggcccgaggcctctgtagggcctggggaggcacctgcggggccgccctcacaggaacctccatctctcaggtccctcgccggctccctcggggcctccactgcagcgcagctgcccatagctctgaacagtccctggttcccagcccaccggaaccccggcagaggcccaccaaggctctggtgccctttgaggacctgtttgggcaggcgcctggtggggaacgggacaaggcgagcttcctgcagacggtgcagaaatttgcggagcacagcgtgcgtaagcggggccacattgacttcatctacctggccctgcgcaagatgcgggagtatggtgtcgagcgggacctggctgtgtacaaccagctgctcaacatcttccccaaggaggtcttccggcctcgcaacatcatccagcgcatcttcgtccactaccctcggcagcaggagtgtgggattgctgtcctggagcagatggagaaccacggtgtgatgcccaacaaggagacggagttcctgctgattcagatctttggacgcaaaagctaccccatgctcaagttggtgcgcctgaagctgtggttccctcgattcatgaacgtcaaccccttcccagtgccccgggacctgccccaggaccctgtggagctggccatgtttggcctgcggcacatggagcctgaccttagtgccagggtcaccatctaccaggttcctttgcccaaagactcaacaggtgcagcagatcccccccagccccacatcgtaggaatccagagtcccgatcagcaggccgccctggcccgccacaatccagcccggcctgtctttgttgagggccccttctccctgtggctccgcaacaagtgtgtgtattaccacatcctcagagctgacttgctgcccccggaggagagggaagtggaagagacgccggaggagtggaacctctactacccgatgcagctggacctggagtatgtgaggagtggctgggacaactacgagtttgacatcaatgaagtggaggaaggccctgtcttcgccatgtgcatggcgggtgctcatgaccaggcgacgatggctaagtggatccagggcctgcaggagaccaacccaaccctggcccagatccccgtggtcttccgcctcgccgggtccacccgggagctccagacatcctctgcagggctggaggagccgcccctgcccgaggaccaccaggaagaagacgacaacctgcagcgacagcagcagggccagagctagtctgagccggcgcgagggcacgggctgtggcccgaggaggcggtggactgaaggcatgagatgccctttgagtgtacagcaaatcaatgttttcctgcttggggctctcttccctcatctctagcagtatggcatcccctccccaggatctcgggctgccagcgatgggcaggcgagacccctccagaatctgcaggcgcctctggttctccgaattcaaataaaaaggggcgggagcgctgttggttgtgcgc

SEQ ID NO: 192225 - DNA, 1319 bp, Artificial Sequence
  derived and/or modified sequence
ttttgcagatgacctcgcgagaggtcacgccgcaagtcggcaaccgggcaggatttggaatccgcgtctgcctttttcccccaagagacccagaatcctggcagccggtttcaaagctgttgtgattgtctgacaagcagaggcatgagctgggtccaggccaccctactggcccgaggcctctgtagggcctggggaggcacctgcggggccgccctcacaggaacctccatctctcaggtccctcgccggctccctcggggcctccactgcagcgcagctgcccatagctctgaacagtccctggttcccagcccaccggaaccccggcagaggcccaccaaggctctggtgccctttgaggacctgtttgggcaggcgcctggtggggaacgggacaaggcgagcttcctgcagacggtgcagaaatttgcggagcacagcgtgcgtaagcggggccacattgacttcatctacctggccctgcgcaagatgcgggagtatggtgtcgagcgggacctggctgtgtacaaccagctgctcaacatcttccccaaggaggtcttccggcctcgcaacatcatccagcgcatcttcgtccactaccctcggcagcaggagtgtgggattgctgtcctggagcagatggagaaccacggtgtgatgcccaacaaggagacggagttcctgctgattcagatctttggacgcaaaagctaccccatgctcaagttggtgcgcctgaagctgtggttccctcgattcatgaacgtcaaccccttcccagtgccccgggacctgccccaggaccctgtggagctggccatgtttggcctgcggcacatggagcctgaccttagtgccagggtcaccatctaccaggttcctttgcccaaagactcaacaggtgcagcagatcccccccagccccacatcgtagagctgacttgctgcccccggaggagagggaagtggaagagacgccggaggagtggaacctctactacccgatgcagctggacctggagtatgtgaggagtggctgggacaactacgagtttgacatcaatgaagtggaggaaggccctgtcttcgccatgtgcatggcgggtgctcatgaccaggcgacgatggctaagtggatccagggcctgcaggagaccaacccaaccctggcccagatccccgtggtcttccgcctcgccgggtccacccgggagctccagacatcctctgcagggctggaggagccgcccctgcccgaggaccaccaggaagaagacgacaacctgcagcgacagcagcagggccagagctag

SEQ ID NO: 192226 - protein, 256 aa, Artificial Sequence
  derived and/or modified sequence
MFQTGGLIVFYGLLAQTMAQFGGLPVPLDQTLPLNVNPALPLSPTGLAGSLTNALSNGLLSGGLLGILENLPLLDILKPGGGTSGGLLGGLLGKVTSVIPGLNNIIDIKVTDPQLLELGLVQSPDGHRLYVTIPLGIKLQVNTPLVGASLLRLAVKLDITAEILAVRDKQERIHLVLGDCTHSPGSLQISLLDGLGPLPIQGLLDSLTGILNKVLPELVQGNVCPLVNEVLRGLDITLVHDIVNMLIHGLQFVIKV

SEQ ID NO: 192227 - protein, 242 aa, Artificial Sequence
  derived and/or modified sequence
MFQTGGLIVFYGLLAQTLPLNVNPALPLSPTGLAGSLTNALSNGLLSGGLLGILENLPLLDILKPGGGTSGGLLGGLLGKVTSVIPGLNNIIDIKVTDPQLLELGLVQSPDGHRLYVTIPLGIKLQVNTPLVGASLLRLAVKLDITAEILAVRDKQERIHLVLGDCTHSPGSLQISLLDGLGPLPIQGLLDSLTGILNKVLPELVQGNVCPLVNEVLRGLDITLVHDIVNMLIHGLQFVIKV

SEQ ID NO: 192228 - DNA, 729 bp, Artificial Sequence
  derived and/or modified sequence
atgttccagaccggcggcctgatcgtgttctacggcctgctggcccagacccttccactcaatgtgaatcccgcactacccttgagtccaaccggactggccggtagtctgacgaacgcgctcagtaacggacttttatctggcggcctcctgggtatcctggagaacttgccacttctggatatcctgaagccaggaggcggcaccagcggagggctgctcggcgggttgctgggcaaggttacgtccgttattcctggactgaacaacatcattgacattaaagtgactgatcctcaattgcttgagctcggtctcgtccagtcaccagacgggcataggctgtatgtcacaatcccacttggaattaaattgcaagttaacactccgctggtgggggcttctttactgaggctcgcggtgaagctcgatataacggctgaaatcctggcggtcagggataaacaggagcggattcatctggttctgggggactgcacgcactcccctggctccctccagatctcactgctcgacgggctggggcccctgccaatccaaggactcctggacagcttgaccggtatccttaacaaagtgctcccagagctggtgcagggtaacgtgtgcccactggtaaatgaggttctgagaggtttagatatcactctcgttcatgatatcgtgaatatgttgatccacggcctccaattcgtcattaaggtctag

SEQ ID NO: 192229 - DNA, 771 bp, Artificial Sequence
  derived and/or modified sequence
atgtttcaaactggaggactgatagtgttctatggcttgctagcacaaactatggctcagtttggcggactgccagtgccactagaccagacgttacctctgaatgtgaaccccgctctccctctgtcgccaacaggactggcaggctcgcttactaacgcgctttctaatgggcttttgagcggaggcctgctgggtatccttgaaaatctacctctgctggatatcctgaaacccggaggaggcacgtccggcggattgcttggagggctgctaggaaaggtgacctctgttattcccggtctgaataacattattgatataaaagtgacagatccgcagctccttgagctggggcttgtacagtctcctgatggtcatagactgtacgtgacaattccactgggaataaagttgcaggtgaatacacctcttgttggagcttcacttctgaggttggccgtaaaacttgatattactgccgaaattttagccgtccgggataagcaggaaagaattcatctggtcctgggtgactgtacccatagtccagggtctttgcagatatctctcttagacgggctcggaccccttccaatccaggggttgttggattctctgactggcatattaaataaggttttgcctgagctggtgcagggaaacgtgtgccccttggtaaacgaggtgctacgcggactggacatcacccttgtgcacgacatagtaaatatgctaatccatggcctccagtttgtcatcaaggtgtag

SEQ ID NO: 192230 - DNA, 771 bp, Artificial Sequence
  derived and/or modified sequence
atgtttcagaccggaggcctgatcgtcttttatggcctcctcgctcaaacgatggcccagtttggaggtctgccagtgcctctcgaccaaacactacctctcaatgttaaccctgctctacctctttcccctactggtctggccggatcacttacaaatgcattaagcaatggtctcctatcagggggactgctgggcattcttgagaatcttcccctactggatattctgaagccaggtgggggaacctcgggtggtttattgggtggactgctcggaaaggtgacatcagtgattccagggctcaataacataatagatatcaaggtgacagatccacagttgttggagctgggcctggtccagtcacccgatggccatagactttacgtcaccatccccctagggattaaactgcaagtcaacacacctctcgtgggagcctctctattgcgactcgctgtgaaactcgatattaccgctgagattttggccgtcagggacaagcaggagcgtattcatctcgttttgggcgactgcacacatagccccggttccttacagatctcactgctcgatggcctggggcctctgcccatacaggggctgctggacagtctcacagggattctgaacaaggtcttgccagagctggtccagggcaacgtctgtcccttagtgaacgaggtcctgcggggtctcgatattacactggtccacgatattgtgaacatgctaatacatggccttcagtttgtcattaaggtatag

SEQ ID NO: 192231 - DNA, 771 bp, Artificial Sequence
  derived and/or modified sequence
atgttccagaccggaggactgatcgtcttttatggactcctggcccaaacgatggctcagtttgggggactgcctgttccactggatcaaacccttcccctcaatgtcaatccagctctgcctctttcacctacaggactcgccggttcccttaccaatgccttgagcaatggcctcctgtccggcggactgctgggtatcctagaaaacttgccgctgcttgatattctgaagccgggagggggaactagcggaggcctcctaggcggtctactgggaaaagtgaccagcgtcatccccggactaaacaatataattgatattaaggtaaccgacccccagctgctcgagctgggactggtccaatcgccggacgggcaccggttgtatgtaacaatccctctagggatcaagctgcaggtcaacacccctctggtgggcgcaagtttgctgagactggcagtaaaattggatatcactgcggagatacttgctgtccgggacaagcaggaacgcatccatctggtccttggcgactgcactcattcaccagggtcgctccagatttccctgttggacggcttgggacccttgccaattcaaggactgctagacagtctgaccggcatcctgaacaaagtgctgcctgagctcgttcaggggaatgtctgccctctggtcaatgaggtccttcgaggactcgatattacccttgtgcacgatatcgtcaacatgttgatacacggactccagttcgtcattaaagtctag

SEQ ID NO: 192232 - DNA, 729 bp, Artificial Sequence
  derived and/or modified sequence
atgtttcagaccgggggtctaatcgtgttttacgggctccttgcccagaccctgcccctgaacgtcaatcccgctctcccattgagcccgacaggtctggctggctctcttacaaatgcactgagtaatggattactaagcggtggtctcttaggcatcctcgagaacttgccactgctggacatactgaagcccggtggcggaaccagcgggggtctgttaggcggattattgggcaaggtgacctcagtgattccgggtctaaataatattatagacattaaagtgacagacccccagctgctggaactcgggctcgttcaaagtccagatggacataggttatacgtcaccataccactgggaataaaactgcaggtgaatactcccctagtgggcgcatccttgctcaggctggccgtgaaattggacataaccgccgagatcttagcagtgagagacaagcaggaacggattcacctggtgttaggggactgcacccactcacccggatcactccagatctccctgctcgatggactggggccactgccaattcagggattacttgatagtctcacgggcatcttaaacaaagtgcttcctgagcttgtgcagggaaatgtttgtcccctcgtgaacgaagtgctgcggggactggatattaccctagtccacgacattgtgaacatgttgatccatggattgcaatttgtgatcaaagtatag

SEQ ID NO: 192233 - DNA, 771 bp, Artificial Sequence
  derived and/or modified sequence
atgttccagactggagggctcattgttttttatggactgcttgcccagaccatggcccaattcggagggctccctgtgcccctggatcagaccctcccgctgaacgtgaatcccgctttgcctctctccccaactggattagccgggagtctaactaacgcactttccaatgggctcctgtctggaggtcttttaggaatcctcgagaaccttccactattagacatacttaaacccggcggcgggactagcggaggcttgctgggcggtctactaggtaaagtaaccagcgtgatacccggcttaaacaatattatcgatataaaagtcaccgacccacagttgttagaactcggcctcgtccaaagtcccgatgggcatcgactgtacgtgacaattcctctaggaataaaactgcaggtgaatacccccctggttggagcatctctactgcgcttagcagtaaaactggatatcaccgcggagattttagccgtccgggacaagcaggagaggattcacctggttctgggtgactgtacgcattctcccgggtcccttcaaatcagccttctagatggactgggtcccctccctatccagggcctacttgacagcttaactggaatcctcaacaaggtgttacctgaactcgtgcagggcaacgtgtgcccacttgtgaacgaagtcctgcgaggactcgatatcaccctcgttcatgacatcgtgaacatgttgatccacggattgcagtttgtgataaaggtgtag

SEQ ID NO: 192234 - DNA, 771 bp, Artificial Sequence
  derived and/or modified sequence
atgtttcagacaggcggcctaattgtgttctatggcctgttggcccagacaatggcccagttcggagggcttcctgtacccctcgaccagacgctgcctcttaacgttaacccagctctccccctgtctcccactgggctcgcgggttccttaacaaatgccttatccaacggtctgctaagcggcggcttactgggaatcctcgaaaatctgcctctgctggacattttgaagcccggcggcggcacaagcggtggacttttgggcggcctcttgggaaaggtaacatcagtcattcccggcttgaacaacattattgatatcaaggtgacagacccccagttgttggaactcgggctggtgcaaagtcctgacgggcacaggctctacgtcacaatccccctgggtatcaagctgcaagtcaatactccgcttgttggggcatcacttcttcggttagccgtgaaactagatattacagcagaaatccttgccgttcgagataaacaagaacgaatccatctggttttgggagactgtactcacagcccgggcagcctgcagatatctcttctagatggacttggtcccctgcccattcagggactgctggattccctgaccgggatcttaaacaaggtgctgccagaacttgtccaggggaatgtgtgccctctcgtcaacgaggtattacgtggcctagatatcaccctcgtgcatgatattgtgaacatgctcatccatggtctccagtttgtgattaaagtttag

SEQ ID NO: 192235 - DNA, 771 bp, Artificial Sequence
  derived and/or modified sequence
atgtttcaaacagggggtttgatcgtcttttacggcctactagcacagactatggctcagtttggtggtttgcccgtacctctagatcagactctgcccttgaacgttaaccccgccctcccactgtcacccactggcctggccggctccctgacgaatgccctttcaaacggactcttgtctggcggactcctggggatcctggagaacctcccactgctcgacatactcaaaccagggggcggtacttctggcggcctcctgggggggttattaggaaaggtaaccagtgtaatccccggcctcaacaacataatagacattaaggtgaccgacccacagctcctggagttaggcttggtgcagagccccgatggccacagactgtatgttacaatcccccttggtattaaactgcaggtgaatacccctcttgtgggggctagtcttctccgactcgccgtgaagttggatatcaccgccgaaattcttgccgttcgagataaacaggaaaggattcatttggtacttggtgactgtactcatagcccagggagcttgcaaattagccttttagacgggctgggaccactgccaatccagggcttacttgactctctgacaggtattctcaataaagtgctgccagaactggtacagggcaacgtttgtcctttagttaatgaggtattgcgcggcctcgatattacactggtacacgatatcgtcaatatgttaatccacggcctgcaatttgtaatcaaggtctag

SEQ ID NO: 192236 - DNA, 729 bp, Artificial Sequence
  derived and/or modified sequence
atgttccagacaggcggcctgatcgtattctatggactcctggcccagactctcccgctcaacgttaatcctgcgctgcccttgtcccccacgggattagcaggttctttgacaaatgccctatcgaacggactgttaagcggaggtctcctcggaatactagagaacctgccccttcttgacattcttaagccgggtggagggactagcggcggcctactgggcggcttgctgggcaaggtcacctctgtgatccccggtctaaataacattattgacattaaggtcactgaccctcaactactggaacttggccttgtgcagtctcctgacggacatcggttgtatgtgactatccccctcgggattaagctccaggtcaacacaccacttgttggcgcaagcctcctaagacttgccgtgaaacttgatattaccgcagaaattctcgccgtcagagataagcaggagcgtatccacctcgttttgggcgactgtacacactcaccaggcagccttcaaatctccctgctcgacggtttgggccccctcccgatccagggcttgctggatagtctgactggcatcttgaataaagtgctccccgaactagttcagggaaacgtttgccctctggtcaacgaagtattaagaggattggatattactctggtacacgatattgtcaacatgctgattcatgggcttcagttcgtaataaaggtgtag

SEQ ID NO: 192237 - DNA, 771 bp, Artificial Sequence
  derived and/or modified sequence
atgttccagaccggaggcctcatcgtcttctatggactgttggcgcagacaatggctcaattcggtggcctgccagttccacttgatcagactctcccactgaacgttaatcctgctctgcccttgtcacctaccggattagccggctccctcactaacgcgttatctaatggtttgctctccggcggactgctcgggatcctggaaaatctcccccttctggatatcctcaagcctggcggcggcactagcgggggcctgttaggcggtttactgggcaaggtgacatcggttatccccggcctcaacaacatcatcgatattaaagtgacagatccccagctcctggaactcggactggttcagagtccagacggacaccggctctacgtgactatacctctaggaattaaactgcaggtcaacacaccattagttggagcatctcttcttagactggcagtaaaattggatataaccgctgagatcctggcagtgagagacaagcaagagaggattcatttggtcctgggagattgtacccatagtcccggtagtcttcagatttcccttctagatggattaggtcccctgcccattcagggtctgttggactcattaactgggatcctgaacaaggttttaccggagcttgtccaagggaacgtgtgccctttagtgaacgaagtcttacgcggattagatatcactcttgtgcacgatattgtcaatatgctaatccacggcctccagtttgtaattaaggtctag

SEQ ID NO: 192238 - DNA, 771 bp, Artificial Sequence
  derived and/or modified sequence
atgttccagactgggggcctgatcgttttttatggccttcttgcgcaaaccatggcgcagttcggaggcttgcccgtgcctctggatcaaaccctgcccctgaatgtcaatcccgcacttccgctgtcacctactggcttagcagggtcattaactaatgccttatcgaacgggttactaagcggcggcctcttaggtatactggaaaacctacctctcctggacatcctgaaaccgggaggcggaacctcagggggcttgctgggcggtttattggggaaagttacatcagttatcccagggttaaataacattattgacattaaggtaactgacccacagttgctagaattagggctggttcagtctccagacggccacagactgtatgttaccattccactaggtatcaagcttcaagtgaacacgcctctagtgggcgcctctttgttgcgcctcgccgttaaactagacatcacagcagaaatcctagccgttcgggacaaacaggaacgtattcacctggttctcggtgactgcacccactctccagggtctctgcagatttcactcttggacggcctcggcccgctgccaatacaagggctcctcgactcgctcactggaatactcaacaaggtcctgcctgagctggtgcagggaaatgtgtgtcctctcgttaatgaagtgttgcgcggattggatattaccctggtgcacgatattgttaatatgctaattcacggattgcagtttgtcataaaggtatag

SEQ ID NO: 192239 - DNA, 771 bp, Artificial Sequence
  derived and/or modified sequence
atgttccaaacaggagggctcatcgtgttctatgggctcctggcccagactatggctcaatttggagggctgcccgtacccttagaccagacgctcccacttaatgtcaacccagcgctaccactgtccccaaccggacttgctggatctctgaccaacgccctgtccaacggcctgctgtcggggggtcttcttggtattctggaaaatttaccactgctggacattttaaagccaggcgggggaacatctggcggcctgctcggcgggttactcggaaaagttaccagtgtaattcctggattaaacaacatcattgacattaaagtaactgaccctcaattactggagctgggacttgttcaatctcctgacggacacagactttacgttaccatccccctgggaatcaagctccaggtaaacacccccctcgtcggcgcaagtttgcttcgcctggccgttaaactggatatcaccgccgaaatccttgcagtgcgtgataagcaagagaggatacacttggtacttggagattgtactcactctcctggatctctgcagatctctcttttagatgggctggggcctctgcctatccagggattgctggattctctgacaggtatcctaaacaaagtgctgcctgagctcgtgcaaggaaacgtctgccccctggttaatgaagtcttgaggggtctggacataacattagtacacgatattgtcaatatgctcatccatggactacagtttgtcattaaagtgtag

SEQ ID NO: 192240 - DNA, 729 bp, Artificial Sequence
  derived and/or modified sequence
atgtttcagacggggggactcattgtattctacggactacttgctcagacacttcccctgaacgtcaaccctgcactccccttatccccaaccggcttggctggttcactcactaatgcgctgtcaaatggtctcctgagcggtggcctgttaggcatcttagaaaatctccctctgcttgacattctcaagccaggtggcggaacttcagggggcctgctcgggggtctattaggtaaagtaactagtgtcattccaggcctcaataatatcatcgatatcaaagtgaccgatccccagctactggaacttggccttgtgcagtctcctgacggacatcggttgtatgtgactatccccctcgggattaagctccaggtcaacacaccacttgttggcgcaagcctcctaagacttgccgtgaaacttgatattaccgcagaaattctcgccgtcagagataagcaggagcgtatccacctcgttttgggcgactgtacacactcaccaggcagccttcaaatctccctgctcgacggtttgggccccctcccgatccagggcttgctggatagtctgactggcatcttgaataaagtgctcccggagctagtgcaaggaaacgtttgtccacttgtaaatgaagtactccgcggcttggacattacactggtgcatgatatcgtcaacatgttaattcacggattgcaatttgtcatcaaagtgtag

SEQ ID NO: 192241 - DNA, 729 bp, Artificial Sequence
  derived and/or modified sequence
atgtttcaaactgggggcctcattgtcttctacgggctgttagcccagaccctgcccttgaatgtgaatccagccctgcccttgagtcccacaggtcttgcaggaagcttgacaaatgccctcagcaatggcctgctgtctgggggcctgttgggcattctggaaaaccttccgctcctggacatcctgaagcctggaggaggtacttctggtggcctccttgggggactgcttggaaaagtgacgtcagtgattcctggcctgaacaacatcattgacataaaggtcactgacccccagctgctggaacttggccttgtgcagagccctgatggccaccgtctctatgtcaccatccctctcggcataaagctccaagtgaatacgcccctggtcggtgcaagtctgttgaggctggctgtgaagctggacatcactgcagaaatcttagctgtgagagataagcaggagaggatccacctggtccttggtgactgcacccattcccctggaagcctgcaaatttctctgcttgatggacttggccccctccccattcaaggtcttctggacagcctcacagggatcttgaataaagtcctgcctgagttggttcagggcaacgtgtgccctctggtcaatgaggttctcagaggcttggacatcaccctggtgcatgacattgttaacatgctgatccacggactacagtttgtcatcaaggtctaa

SEQ ID NO: 192242 - DNA, 771 bp, Artificial Sequence
  derived and/or modified sequence
atgttccagaccggcggcctgatcgtgttctacggcctgctggcccagaccatggcccagttcggcggcctgcccgtgcccctggaccagaccctgcccctgaacgtgaaccccgccctgcccctgagccccaccggcctggccggcagcctgaccaacgccctgagcaacggcctgctgagcggcggcctgctgggcatcctggagaacctgcccctgctggacatcctgaagcccggcggcggcaccagcggcggcctgctgggcggcctgctgggcaaggtgaccagcgtgatccccggcctgaacaacatcatcgacatcaaggtgaccgacccccagctgctggagctgggcctggtgcagagccccgacggccacagactgtacgtgaccatccccctgggcatcaagctgcaggtgaacacccccctggtgggcgccagcctgctgagactggccgtgaagctggacatcaccgccgagatcctggccgtgagagacaagcaggagagaatccacctggtgctgggcgactgcacccacagccccggcagcctgcagatcagcctgctggacggcctgggccccctgcccatccagggcctgctggacagcctgaccggcatcctgaacaaggtgctgcccgagctggtgcagggcaacgtgtgccccctggtgaacgaggtgctgagaggcctggacatcaccctggtgcacgacatcgtgaacatgctgatccacggcctgcagttcgtgatcaaggtgtag

SEQ ID NO: 192243 - DNA, 729 bp, Artificial Sequence
  derived and/or modified sequence
atgttccagaccggcggcctgatcgtgttctacggcctgctggcccagaccctgcccctgaacgtgaaccccgccctgcccctgagccccaccggcctggccggcagcctgaccaacgccctgagcaacggcctgctgagcggcggcctgctgggcatcctggagaacctgcccctgctggacatcctgaagcccggcggcggcaccagcggcggcctgctgggcggcctgctgggcaaggtgaccagcgtgatccccggcctgaacaacatcatcgacatcaaggtgaccgacccccagctgctggagctgggcctggtgcagagccccgacggccacagactgtacgtgaccatccccctgggcatcaagctgcaggtgaacacccccctggtgggcgccagcctgctgagactggccgtgaagctggacatcaccgccgagatcctggccgtgagagacaagcaggagagaatccacctggtgctgggcgactgcacccacagccccggcagcctgcagatcagcctgctggacggcctgggccccctgcccatccagggcctgctggacagcctgaccggcatcctgaacaaggtgctgcccgagctggtgcagggcaacgtgtgccccctggtgaacgaggtgctgagaggcctggacatcaccctggtgcacgacatcgtgaacatgctgatccacggcctgcagttcgtgatcaaggtgtag

SEQ ID NO: 192244 - DNA, 771 bp, Artificial Sequence
  derived and/or modified sequence
atgttccagactggcggccttattgtcttctacggcctgttagcccaaactatggcccagtttggcggactccctgttcctctggaccaaacactccccctgaacgtgaaccccgcactcccacttagtcccactggtcttgccgggagtctgaccaatgctctttctaatggacttctgagcggcggcctgttgggcattctggaaaatctccccctcctggatatcctaaagcctggtggaggcacaagcgggggactcctgggaggcctgttagggaaagtgacttccgtgattccgggactgaataatattattgatattaaggtgacggatccgcagctactggagttgggactggtgcaaagccctgacggacaccgtctgtatgttacaattcctctgggcattaagctgcaggtgaatacaccattggtaggcgcgtccctgctgcggctggcggtcaagcttgacatcactgccgagatcctcgcagtgagggacaaacaggagcgtattcatctggtcttgggagattgtacccacagcccggggtcacttcagattagtttgctggatggcctgggacctcttcccattcagggactgttggacagcttgactggcatacttaataaggtgctccctgaactggtgcaggggaatgtgtgtccactggtcaatgaagttctcaggggacttgatattaccttggtgcacgacatagtgaacatgcttatccacgggttacagttcgttattaaagtctag

SEQ ID NO: 192245 - DNA, 771 bp, Artificial Sequence
  derived and/or modified sequence
atgttccagacgggagggctgattgttttttacggactgcttgctcagaccatggcacagtttggcggactccctgtgcccctcgaccagactctgcctctcaatgttaaccctgctcttcccctgagccccacaggtctggccgggagcttgacgaatgcactcagcaatggtctcttaagcggcggattgttaggaattttggagaaccttcctctcctagacatattgaagccagggggaggtacgtctggggggctgctgggagggctccttgggaaagtgacttctgtcataccaggtctgaacaatatcatcgatatcaaagttacagacccccagttgctggagctaggactggtccagagtcctgacggccaccgcctctatgtcactatcccccttgggatcaaactgcaggtgaacacccccttggtgggggcatccctacttcggctcgccgtgaagttggatatcacagccgaaattctggcagtccgtgacaagcaggaaaggatccacttggtcttaggggactgtacgcattcccctggatctctgcagatctctcttcttgacggcctaggacctctgcccattcaggggctactcgatagtcttactggcatcctcaataaggtcctgccagagctggtgcaagggaatgtgtgccctctggttaatgaagtactgcgggggctagacattaccctggtgcatgatattgttaacatgttgatccacggcctgcagttcgtcatcaaggtttag

SEQ ID NO: 192246 - DNA, 771 bp, Artificial Sequence
  derived and/or modified sequence
atgtttcagaccggcggtctcatcgttttctatggactcttggcccaaacaatggcccaattcggcggacttcctgtacctctggaccagactcttcccctcaatgttaatcctgctttgcccctctcaccaacaggtttggcaggaagtctgaccaacgccctgtctaacggtttgctgtctggcgggctgcttggcatcctggaaaatctgccccttctagacattcttaagcctggaggaggaacatctggcggactcctcggggggcttctgggaaaggtaacctcggtcatcccgggcctgaataatattatagacataaaagttacggatccgcagcttctggagttgggtctcgtgcagagccccgatgggcaccgcctgtatgtaacaatccccctggggatcaaactgcaggtgaatacacctttggtcggggcatcacttttaaggcttgctgttaagcttgatattaccgccgaaattttggcagtcagagacaagcaggaacgaattcacctggtgctgggagattgtacacacagcccaggcagcctccagatttcattgttagacggcctcggcccactgccaatccagggtctcctggattccttgacaggcatcctcaataaggtcttgccagagctggtacagggcaacgtgtgcccccttgtcaatgaggttctcagggggctcgatattaccctcgtgcacgacattgtgaacatgctgatccacggactgcagttcgtgattaaagtttag

SEQ ID NO: 192247 - DNA, 1079 bp, Artificial Sequence
  derived and/or modified sequence
tgagtgggggagagagaggagaccaggacagctgctgagacctctaagaagtccagatactaagagcaaagatgtttcaaactgggggcctcattgtcttctacgggctgttagcccagaccatggcccagtttggaggcctgcccgtgcccctggaccagaccctgcccttgaatgtgaatccagccctgcccttgagtcccacaggtcttgcaggaagcttgacaaatgccctcagcaatggcctgctgtctgggggcctgttgggcattctggaaaaccttccgctcctggacatcctgaagcctggaggaggtacttctggtggcctccttgggggactgcttggaaaagtgacgtcagtgattcctggcctgaacaacatcattgacataaaggtcactgacccccagctgctggaacttggccttgtgcagagccctgatggccaccgtctctatgtcaccatccctctcggcataaagctccaagtgaatacgcccctggtcggtgcaagtctgttgaggctggctgtgaagctggacatcactgcagaaatcttagctgtgagagataagcaggagaggatccacctggtccttggtgactgcacccattcccctggaagcctgcaaatttctctgcttgatggacttggccccctccccattcaaggtcttctggacagcctcacagggatcttgaataaagtcctgcctgagttggttcagggcaacgtgtgccctctggtcaatgaggttctcagaggcttggacatcaccctggtgcatgacattgttaacatgctgatccacggactacagtttgtcatcaaggtctaagccttccaggaaggggctggcctctgctgagctgggtcttcccccaacagaactatttcttgctgctcaatccatttcctctggcccagcttcccagtgctcacagatggctggcccatgtgctggaagatgacacagttgccttctctccgaggaacctgccccctctcctttcccaccaggcgtgtgtaacatcccatgtgcctcacctaataaaatggctcttcttctgcatca

SEQ ID NO: 192248 - DNA, 729 bp, Artificial Sequence
  derived and/or modified sequence
atgttccagaccggaggcctcattgtcttttacggactcctggctcagacacttccactcaatgtcaatcccgcactcccactgagtcctacgggcctggcaggatcgctgaccaacgcactgagcaacgggctgctgtccggggggttgctcggaattctcgagaatctgcctctgctcgatatcctgaaaccagggggaggaacctccggcggactgctggggggactcttgggtaaagtgacgtccgttattcctggtttgaataacatcatcgatatcaaggtcacggatccacaactgttagagttgggactggttcaaagccccgacggccatcgcctatatgtcaccatacccctcggcatcaaattacaggtcaatacgccactggttggggcttctctgttgcggctggctgttaaattggacattaccgccgagattctggccgtcagagataagcaggagcggatccaccttgtgttgggggactgcacccactctccgggctctctgcagatctcactgctggacgggttgggccctctgcctatccaggggctcctggatagtcttaccggcattctgaataaggtactaccagagctcgtccagggcaatgtctgtcctctagtgaatgaggttctgcgcggactcgacatcaccctggtgcacgacattgtgaatatgctgatacacggactgcagttcgtaatcaaggtttag

SEQ ID NO: 192249 - DNA, 771 bp, Artificial Sequence
  derived and/or modified sequence
atgttccagacaggaggcctcatcgtgttctacggcctgctggcccagaccatggcccagtttggaggcctgcctgtgcccctggaccagaccctgcccctgaatgtgaacccagccctgcccctgagccccaccggcctggccggcagcctgaccaatgccctgagcaatggcctgctgagcggcggcctgctgggcatcctggagaacctgcccctgctggacatcctgaagccaggcggcggcaccagcggcggcctgctgggcggcctgctgggcaaggtgaccagcgtcatccctggcctgaacaacatcatcgacatcaaggtgacagacccccagctgctggagctgggcctggtgcagagcccagatggccaccggctgtatgtgaccatccccctgggcatcaagctgcaggtgaacacccccctggtgggcgccagcctgctgcggctggccgtgaagctggacatcacagctgagatcctggccgtgcgggacaagcaggagcgcatccacctggtgctgggggactgcacccacagccctggcagcctgcagatcagcctgctggatggcctgggccccctgcccatccagggcctgctggacagcctgaccggcatcctgaacaaggtgctgcctgagctggtgcagggcaatgtgtgccccctggtgaatgaggtgctgcggggcctggacatcaccctggtgcatgacatcgtgaacatgctgatccacggcctgcagtttgtgatcaaggtgtag

SEQ ID NO: 192250 - DNA, 1024 bp, Artificial Sequence
  derived and/or modified sequence
tgagtgggggagagagaggagaccaggacagctgctgagacctctaagaagtccagatactaagagcaaagatgtttcaaactgggggcctcattgtcttctacgggctgttagcccagaccatggcccagtttggaggcctgcccgtgcccctggaccagaccctgcccttgaatgtgaatccagccctgcccttgagtcccacaggtcttgcaggaagcttgacaaatgccctcagcaatggcctgctgtctgggggcctgttgggcattctggaaaaccttccgctcctggacatcctgaagcctggaggaggtacttctggtggcctccttgggggactgcttggaaaagtgacgtcagtgattcctggcctgaacaacatcattgacataaaggtcactgacccccagctgctggaacttggccttgtgcagagccctgatggccaccgtctctatgtcaccatccctctcggcataaagctccaagtgaatacgcccctggtcggtgcaagtctgttgaggctggctgtgaagctggacatcactgcagaaatcttagctgtgagagataagcaggagaggatccacctggtccttggtgactgcacccattcccctggaagcctgcaaatttctctgcttgatggacttggccccctccccattcaaggtcttctggacagcctcacagggatcttgaataaagtcctgcctgagttggttcagggcaacgtgtgccctctggtcaatgaggttctcagaggcttggacatcaccctggtgcatgacattgttaacatgctgatccacggactacagtttgtcatcaaggtctaagccttccaggaaggggctggcctctgctgagctgcttcccagtgctcacagatggctggcccatgtgctggaagatgacacagttgccttctctccgaggaacctgccccctctcctttcccaccaggcgtgtgtaacatcccatgtgcctcacctaataaaatggctcttcttctgcatca

SEQ ID NO: 192251 - DNA, 1063 bp, Artificial Sequence
  derived and/or modified sequence
tgagtgggggagagagaggagaccaggacagctgctgagacctctaagaagtccagatactaagagcaaagatgtttcaaactgggggcctcattgtcttctacgggctgttagcccagaccatggcccagtttggaggcctgcccgtgcccctggaccagaccctgcccttgaatgtgaatccagccctgcccttgagtcccacaggtcttgcaggaagcttgacaaatgccctcagcaatggcctgctgtctgggggcctgttgggcattctggaaaaccttccgctcctggacatcctgaagcctggaggaggtacttctggtggcctccttgggggactgcttggaaaagtgacgtcagtgattcctggcctgaacaacatcattgacataaaggtcactgacccccagctgctggaacttggccttgtgcagagccctgatggccaccgtctctatgtcaccatccctctcggcataaagctccaagtgaatacgcccctggtcggtgcaagtctgttgaggctggctgtgaagctggacatcactgcagaaatcttagctgtgagagataagcaggagaggatccacctggtccttggtgactgcacccattcccctggaagcctgcaaatttctctgcttgatggacttggccccctccccattcaaggtcttctggacagcctcacagggatcttgaataaagtcctgcctgagttggttcagggcaacgtgtgccctctggtcaatgaggttctcagaggcttggacatcaccctggtgcatgacattgttaacatgctgatccacggactacagtttgtcatcaaggtctaagccttccaggaaggggctggcctctgctgagctgaactatttcttgctgctcaatccatttcctctggcccagcttcccagtgctcacagatggctggcccatgtgctggaagatgacacagttgccttctctccgaggaacctgccccctctcctttcccaccaggcgtgtgtaacatcccatgtgcctcacctaataaaatggctcttcttctgcatca

SEQ ID NO: 192252 - DNA, 729 bp, Artificial Sequence
  derived and/or modified sequence
atgttccagacaggaggcctcatcgtgttctacggcctgctggcccagaccctgcccctgaatgtgaacccagccctgcccctgagccccaccggcctggccggcagcctgaccaatgccctgagcaatggcctgctgagcggcggcctgctgggcatcctggagaacctgcccctgctggacatcctgaagccaggcggcggcaccagcggcggcctgctgggcggcctgctgggcaaggtgaccagcgtcatccctggcctgaacaacatcatcgacatcaaggtgacagacccccagctgctggagctgggcctggtgcagagcccagatggccaccggctgtatgtgaccatccccctgggcatcaagctgcaggtgaacacccccctggtgggcgccagcctgctgcggctggccgtgaagctggacatcacagctgagatcctggccgtgcgggacaagcaggagcgcatccacctggtgctgggggactgcacccacagccctggcagcctgcagatcagcctgctggatggcctgggccccctgcccatccagggcctgctggacagcctgaccggcatcctgaacaaggtgctgcctgagctggtgcagggcaatgtgtgccccctggtgaatgaggtgctgcggggcctggacatcaccctggtgcatgacatcgtgaacatgctgatccacggcctgcagtttgtgatcaaggtgtag

SEQ ID NO: 192253 - DNA, 771 bp, Artificial Sequence
  derived and/or modified sequence
atgttccagaccggcggcctgatcgtgttctacggcctgctggcccagacaatggctcagttcggtgggctgccagtccccttggatcagactctgccgcttaatgtcaaccccgccttgcctctgtcccctaccggcctcgccgggagcctgactaatgctctgtctaatggattgctgtccggaggacttcttggcatcctagaaaacctacctctcttggatattctgaagccaggcggtgggacatcggggggactgctgggcggtctcctcggtaaggtgactagtgtgatacccgggctcaacaatattatcgacattaaagtaacggacccgcaactgcttgagctgggattagtgcaatcccccgatgggcaccgcctgtatgttacaattcctctgggtatcaagttgcaggtcaatactcctttggttggcgcttctctgcttcgactagcggtgaagctggacatcaccgctgagatcttagccgttcgcgacaagcaagaacggatccacctagtgctgggcgattgcacacattctcctggatccctgcagatcagtttgctggacggcttgggacctctgcctatacagggccttttggattcacttacaggaattcttaataaagtgctccctgaactggtacagggtaatgtctgccccctggtgaacgaggtgcttagaggtctggatatcacactcgtccacgacattgtaaatatgctcatccatggtttacagttcgttataaaagtctag

SEQ ID NO: 192254 - DNA, 771 bp, Artificial Sequence
  derived and/or modified sequence
atgttccagaccggcggcctgatcgtgttctacggcctgctggcccaaacgatggctcagtttggtggtttgcctgtgcctctcgatcagaccttgcctttgaacgttaaccccgcacttcccctgtcccccacgggactggcaggatctctcacaaatgccctgtcaaatggactgttgtcgggcgggttactcgggatactcgaaaacctgcctctgctcgacatcctcaagccgggcggggggactagcggtggactgctcgggggtcttctcggcaaagtgacatccgttatcccgggcctgaacaatatcatcgatatcaaagtgaccgaccctcagcttttggaactgggcctggttcagtcacctgatggccacagattatacgttacgattccactgggaattaagctgcaggttaatacacccctggtgggggctagcctgctgcgcctggcggtgaagcttgacatcactgcggaaattctggccgtgcgggataagcaggaaagaatccatttggtgctcggagactgcacccattcacctggctctctacagatttcactgctggacgggctagggcccctccctattcaaggtctgcttgactctctgactggaattttgaataaagtgctgcctgagctcgtgcaaggtaacgtgtgccctcttgtgaatgaagtcctgcgaggattggatatcactctggttcacgatattgtcaatatgctgatccacggcctgcaattcgtaatcaaggtgtag

SEQ ID NO: 192255 - DNA, 771 bp, Artificial Sequence
  derived and/or modified sequence
atgttccagaccggcggcctgatcgtgttctacggcctgctggcccagaccatggcccaattcggcgggttgcctgtgccccttgatcagacccttccgctcaatgtcaatcctgctttacccctgtcacccacaggactcgcgggatctctaacgaatgccctgtctaatggactgctgagcggcggcctgctcggaatcctggagaaccttcctctcctagatatcctcaagccgggcggcggcactagcggcgggctgctcggcggacttctaggcaaagtgacatccgtgatcccaggccttaacaacattatagacatcaaggttaccgacccgcaattgctggaactaggactggtccagtcgccggacggccaccgactgtatgtgactattcctctggggatcaaattacaggtgaacacacctttagtgggggctagcctcttgaggctagctgtgaagctggatattacagcagaaatcttagccgtccgggataagcaggagcgcattcacttggtgctcggagactgtacacactcacccggcagcctgcagatcagtctgctggatgggctgggccctctgccaatacagggtttgctcgattctttaacgggcatcctgaataaagttctgccagagctcgtacaaggaaatgtgtgccccctcgtgaatgaggttctacgtggcctagacatcactctggtgcatgacattgtcaatatgctaatccacgggttgcagttcgttattaaagtgtag

SEQ ID NO: 192256 - RNA, 771 nt, Artificial Sequence
  derived and/or modified sequence
auguuccagacuggagggcucauuguuuuuuauggacugcuugcccagaccauggcccaauucggagggcucccugugccccuggaucagacccucccgcugaacgugaaucccgcuuugccucucuccccaacuggauuagccgggagucuaacuaacgcacuuuccaaugggcuccugucuggaggucuuuuaggaauccucgagaaccuuccacuauuagacauacuuaaacccggcggcgggacuagcggaggcuugcugggcggucuacuagguaaaguaaccagcgugauacccggcuuaaacaauauuaucgauauaaaagucaccgacccacaguuguuagaacucggccucguccaaagucccgaugggcaucgacuguacgugacaauuccucuaggaauaaaacugcaggugaauaccccccugguuggagcaucucuacugcgcuuagcaguaaaacuggauaucaccgcggagauuuuagccguccgggacaagcaggagaggauucaccugguucugggugacuguacgcauucucccgggucccuucaaaucagccuucuagauggacuggguccccucccuauccagggccuacuugacagcuuaacuggaauccucaacaagguguuaccugaacucgugcagggcaacgugugcccacuugugaacgaaguccugcgaggacucgauaucacccucguucaugacaucgugaacauguugauccacggauugcaguuugugauaaagguguag

SEQ ID NO: 192257 - RNA, 771 nt, Artificial Sequence
  derived and/or modified sequence
auguuucagacaggcggccuaauuguguucuauggccuguuggcccagacaauggcccaguucggagggcuuccuguaccccucgaccagacgcugccucuuaacguuaacccagcucucccccugucucccacugggcucgcggguuccuuaacaaaugccuuauccaacggucugcuaagcggcggcuuacugggaauccucgaaaaucugccucugcuggacauuuugaagcccggcggcggcacaagcgguggacuuuugggcggccucuugggaaagguaacaucagucauucccggcuugaacaacauuauugauaucaaggugacagacccccaguuguuggaacucgggcuggugcaaaguccugacgggcacaggcucuacgucacaaucccccuggguaucaagcugcaagucaauacuccgcuuguuggggcaucacuucuucgguuagccgugaaacuagauauuacagcagaaauccuugccguucgagauaaacaagaacgaauccaucugguuuugggagacuguacucacagcccgggcagccugcagauaucucuucuagauggacuugguccccugcccauucagggacugcuggauucccugaccgggaucuuaaacaaggugcugccagaacuuguccaggggaaugugugcccucucgucaacgagguauuacguggccuagauaucacccucgugcaugauauugugaacaugcucauccauggucuccaguuugugauuaaaguuuag

SEQ ID NO: 192258 - RNA, 771 nt, Artificial Sequence
  derived and/or modified sequence
auguuucaaacaggggguuugaucgucuuuuacggccuacuagcacagacuauggcucaguuuggugguuugcccguaccucuagaucagacucugcccuugaacguuaaccccgcccucccacugucacccacuggccuggccggcucccugacgaaugcccuuucaaacggacucuugucuggcggacuccuggggauccuggagaaccucccacugcucgacauacucaaaccagggggcgguacuucuggcggccuccuggggggguuauuaggaaagguaaccaguguaauccccggccucaacaacauaauagacauuaaggugaccgacccacagcuccuggaguuaggcuuggugcagagccccgauggccacagacuguauguuacaaucccccuugguauuaaacugcaggugaauaccccucuugugggggcuagucuucuccgacucgccgugaaguuggauaucaccgccgaaauucuugccguucgagauaaacaggaaaggauucauuugguacuuggugacuguacucauagcccagggagcuugcaaauuagccuuuuagacgggcugggaccacugccaauccagggcuuacuugacucucugacagguauucucaauaaagugcugccagaacugguacagggcaacguuuguccuuuaguuaaugagguauugcgcggccucgauauuacacugguacacgauaucgucaauauguuaauccacggccugcaauuuguaaucaaggucuag

SEQ ID NO: 192259 - RNA, 729 nt, Artificial Sequence
  derived and/or modified sequence
auguuccagacaggcggccugaucguauucuauggacuccuggcccagacucucccgcucaacguuaauccugcgcugcccuugucccccacgggauuagcagguucuuugacaaaugcccuaucgaacggacuguuaagcggaggucuccucggaauacuagagaaccugccccuucuugacauucuuaagccggguggagggacuagcggcggccuacugggcggcuugcugggcaaggucaccucugugauccccggucuaaauaacauuauugacauuaaggucacugacccucaacuacuggaacuuggccuugugcagucuccugacggacaucgguuguaugugacuaucccccucgggauuaagcuccaggucaacacaccacuuguuggcgcaagccuccuaagacuugccgugaaacuugauauuaccgcagaaauucucgccgucagagauaagcaggagcguauccaccucguuuugggcgacuguacacacucaccaggcagccuucaaaucucccugcucgacgguuugggcccccucccgauccagggcuugcuggauagucugacuggcaucuugaauaaagugcuccccgaacuaguucagggaaacguuugcccucuggucaacgaaguauuaagaggauuggauauuacucugguacacgauauugucaacaugcugauucaugggcuucaguucguaauaaagguguag

SEQ ID NO: 192260 - RNA, 771 nt, Artificial Sequence
  derived and/or modified sequence
auguuccagaccggaggccucaucgucuucuauggacuguuggcgcagacaauggcucaauucgguggccugccaguuccacuugaucagacucucccacugaacguuaauccugcucugcccuugucaccuaccggauuagccggcucccucacuaacgcguuaucuaaugguuugcucuccggcggacugcucgggauccuggaaaaucucccccuucuggauauccucaagccuggcggcggcacuagcgggggccuguuaggcgguuuacugggcaaggugacaucgguuauccccggccucaacaacaucaucgauauuaaagugacagauccccagcuccuggaacucggacugguucagaguccagacggacaccggcucuacgugacuauaccucuaggaauuaaacugcaggucaacacaccauuaguuggagcaucucuucuuagacuggcaguaaaauuggauauaaccgcugagauccuggcagugagagacaagcaagagaggauucauuugguccugggagauuguacccauagucccgguagucuucagauuucccuucuagauggauuagguccccugcccauucagggucuguuggacucauuaacugggauccugaacaagguuuuaccggagcuuguccaagggaacgugugcccuuuagugaacgaagucuuacgcggauuagauaucacucuugugcacgauauugucaauaugcuaauccacggccuccaguuuguaauuaaggucuag

SEQ ID NO: 192261 - RNA, 771 nt, Artificial Sequence
  derived and/or modified sequence
auguuccagacugggggccugaucguuuuuuauggccuucuugcgcaaaccauggcgcaguucggaggcuugcccgugccucuggaucaaacccugccccugaaugucaaucccgcacuuccgcugucaccuacuggcuuagcagggucauuaacuaaugccuuaucgaacggguuacuaagcggcggccucuuagguauacuggaaaaccuaccucuccuggacauccugaaaccgggaggcggaaccucagggggcuugcugggcgguuuauuggggaaaguuacaucaguuaucccaggguuaaauaacauuauugacauuaagguaacugacccacaguugcuagaauuagggcugguucagucuccagacggccacagacuguauguuaccauuccacuagguaucaagcuucaagugaacacgccucuagugggcgccucuuuguugcgccucgccguuaaacuagacaucacagcagaaauccuagccguucgggacaaacaggaacguauucaccugguucucggugacugcacccacucuccagggucucugcagauuucacucuuggacggccucggcccgcugccaauacaagggcuccucgacucgcucacuggaauacucaacaagguccugccugagcuggugcagggaaauguguguccucucguuaaugaaguguugcgcggauuggauauuacccuggugcacgauauuguuaauaugcuaauucacggauugcaguuugucauaaagguauag

SEQ ID NO: 192262 - RNA, 771 nt, Artificial Sequence
  derived and/or modified sequence
auguuccaaacaggagggcucaucguguucuaugggcuccuggcccagacuauggcucaauuuggagggcugcccguacccuuagaccagacgcucccacuuaaugucaacccagcgcuaccacuguccccaaccggacuugcuggaucucugaccaacgcccuguccaacggccugcugucggggggucuucuugguauucuggaaaauuuaccacugcuggacauuuuaaagccaggcgggggaacaucuggcggccugcucggcggguuacucggaaaaguuaccaguguaauuccuggauuaaacaacaucauugacauuaaaguaacugacccucaauuacuggagcugggacuuguucaaucuccugacggacacagacuuuacguuaccaucccccugggaaucaagcuccagguaaacaccccccucgucggcgcaaguuugcuucgccuggccguuaaacuggauaucaccgccgaaauccuugcagugcgugauaagcaagagaggauacacuugguacuuggagauuguacucacucuccuggaucucugcagaucucucuuuuagaugggcuggggccucugccuauccagggauugcuggauucucugacagguauccuaaacaaagugcugccugagcucgugcaaggaaacgucugcccccugguuaaugaagucuugaggggucuggacauaacauuaguacacgauauugucaauaugcucauccauggacuacaguuugucauuaaaguguag

SEQ ID NO: 192263 - RNA, 729 nt, Artificial Sequence
  derived and/or modified sequence
auguuucagacggggggacucauuguauucuacggacuacuugcucagacacuuccccugaacgucaacccugcacuccccuuauccccaaccggcuuggcugguucacucacuaaugcgcugucaaauggucuccugagcgguggccuguuaggcaucuuagaaaaucucccucugcuugacauucucaagccagguggcggaacuucagggggccugcucgggggucuauuagguaaaguaacuagugucauuccaggccucaauaauaucaucgauaucaaagugaccgauccccagcuacuggaacuuggccuugugcagucuccugacggacaucgguuguaugugacuaucccccucgggauuaagcuccaggucaacacaccacuuguuggcgcaagccuccuaagacuugccgugaaacuugauauuaccgcagaaauucucgccgucagagauaagcaggagcguauccaccucguuuugggcgacuguacacacucaccaggcagccuucaaaucucccugcucgacgguuugggcccccucccgauccagggcuugcuggauagucugacuggcaucuugaauaaagugcucccggagcuagugcaaggaaacguuuguccacuuguaaaugaaguacuccgcggcuuggacauuacacuggugcaugauaucgucaacauguuaauucacggauugcaauuugucaucaaaguguag

SEQ ID NO: 192264 - protein, 379 aa, Artificial Sequence
  derived and/or modified sequence
MGDSRRRSLGNQPSSEAAGRSEREQDGDPRGLQSSVYESRRVTDPERQDLDNAELGPEDPEEELPPEEVAGEEFPETLDPKEALSELERVLDKDLEEDIPEISRLSISQKLPSTTMTKARKRRRRRRLMELAEPKINWQVLKDRKGRCGKGYAWISPCKMSLHFCLCWPSVYWTERFLEDTTLTITVPAVSRRVEELSRPKRFYLEYYNNNRTTPVWPIPRSSLEYRASSRLKELAAPKIRDNFWSMPMSEVSQVSRAAQMAVPSSRILQLSKPKAPATLLEEWDPVPKPKPHVSDHNRLLHLARPKAQSDKCVPDRDPRWEVLDVTKKVVASPRIISLAKPKVRKGLNEGYDRRPLASMSLPPPKASPEKCDQPRPGL

SEQ ID NO: 192265 - DNA, 1140 bp, Artificial Sequence
  derived and/or modified sequence
atgggagactcccggcgacgatccctgggaaatcagccctccagcgaagccgccggacgatccgagcgcgagcaggatggagaccctaggggcttgcagagtagcgtatacgaatcacgcagggtcacggatccggaaagacaggatctcgacaacgctgagctcggccccgaagaccccgaggaggaactcccccccgaggaagtcgccggtgaagaatttcccgagaccctggaccccaaggaagccttaagcgaattggaacgcgtgttggataaggacctggaggaagacattccagaaatctctcgcctcagtatctcccagaagttaccctcaacaacaatgacaaaagccaggaagcgccgtcggaggaggcggctgatggagttagctgaaccaaagatcaactggcaggtgctcaaggaccggaaggggcgctgcggaaaggggtacgcctggatatctccatgtaaaatgagcctccatttctgcttgtgttggccttctgtatattggaccgagagatttttagaggatacaacgttaactatcacggtcccagccgtaagcagaagggtagaagaactgagcaggccaaaaagattctacctcgagtactacaacaataataggaccacgcctgtatggccaatccctagatccagcttggaataccgcgcttccagccgcttgaaggaacttgccgcccctaaaattagggacaacttctggagcatgccaatgtctgaagtaagccaggtgagccgtgccgcccagatggctgtgcctagctctcgaatcctccaactgtcgaagcctaaagcgccagctacactgctggaggaatgggatcctgtgcccaaacctaaaccacatgttagcgatcataaccgcctgctgcatctggccaggccaaaagcacagtcagacaagtgcgtccctgatagagaccctaggtgggaggtccttgatgtgacgaaaaaggttgtcgcgtccccacgaatcattagtctggccaagccaaaggtccgaaagggactgaacgaggggtatgatagacggcccctcgcgagtatgagtcttccaccaccgaaggcctccccggagaaatgtgatcaaccacggccgggcctgtag

SEQ ID NO: 192266 - DNA, 1140 bp, Artificial Sequence
  derived and/or modified sequence
atgggagacagcagaagaagaagcctgggcaaccagcccagcagcgaggccgccggccgctctgagcgggagcaggatggagacccccggggcctgcagagctctgtgtatgagagccggcgggtgacagatcctgagcggcaggacctggacaatgctgagctgggccctgaggaccctgaggaggagctgcccccagaggaggtggccggggaggagttccctgagaccctggaccccaaggaggccctgtctgagctggagcgggtgctggacaaggacctggaggaggacatccctgagatcagccggctgagcatcagccagaagctgcccagcaccaccatgaccaaggccaggaagagaagaagaagaagaaggctgatggagctggccgagcccaagatcaactggcaggtgctgaaggacaggaagggccgctgtgggaagggctacgcctggatcagcccctgcaagatgagcctgcacttctgcctgtgctggcccagcgtgtactggacagagcgcttcctggaggacaccaccctgaccatcaccgtgcctgctgtgtcccggcgggtggaggagctgagccggcccaagcgcttctacctggagtactacaacaacaacagaaccacccctgtgtggcccatccccaggagcagcctggagtaccgggccagcagccggctgaaggagctggccgcccccaagatccgggacaacttctggagcatgcccatgtctgaggtgtcccaggtgtcccgggccgcccagatggctgtgcccagcagccgcatcctgcagctgagcaagcccaaggccccagccaccctgctggaggagtgggaccctgtgcccaagcccaagccccacgtgtctgaccacaaccggctgctgcacctggcccggcccaaggcccagagcgacaagtgtgtgcctgaccgggacccccgctgggaggtgctggatgtgaccaagaaggtggtggccagcccccgcatcatcagcctggccaagcccaaggtgaggaagggcctgaatgaaggctatgaccggcggcccctggcctccatgagcctgcccccacccaaggccagccctgagaagtgtgaccagcccaggcctggcctgtag

SEQ ID NO: 192267 - DNA, 1140 bp, Artificial Sequence
  derived and/or modified sequence
atgggcgacagccggcggcggagcctgggcaaccagcccagcagcgaagctgctggtcgctccgaaagggaacaagatggcgaccctcgtgggctgcaatccagtgtttacgaaagcagacgcgtcacagatcctgagcgtcaggatctggataatgcagaacttgggcccgaagatccagaggaagagctgcctcccgaagaggtggcaggtgaggaattccccgagacactggatccgaaagaagccttgtcagagctcgagcgcgtgcttgataaagatctcgaggaagatatccctgaaatctcccggctctcaatcagtcagaagctgccgagtaccactatgacaaaagctagaaagcgccgaagacgccgccgattgatggaactggccgagcccaaaattaactggcaggtgctgaaggacagaaagggtaggtgtggcaaaggttacgcatggatcagcccctgcaagatgtctctgcacttctgtttatgctggcctagcgtttattggaccgaaagatttcttgaagatactactttgacaatcaccgtgcctgcggtctcgagacgagtggaggagctgtctcgcccaaagcgtttctaccttgagtattataataacaaccgcaccacaccagtctggcctatccccagatcatctctggaatatagagccagcagccgccttaaggagctcgccgctcccaaaatccgtgacaatttttggtctatgcctatgtccgaagtgtctcaagtttcacgagccgcccagatggcagtcccatcctcacggatccttcagctcagtaaaccaaaagcgcccgctactctgctggaggaatgggatccggttccaaaacctaagccccacgtgtccgatcacaaccgcctgctgcacttggcgaggccgaaagctcagtcagacaaatgtgtgcccgatcgtgatccgcggtgggaggtcctcgacgtgacgaagaaggttgtagccagcccacgcatcatttccctggctaagccaaaagtgcgcaaggggctgaacgagggatatgatcgccgccccctagccagcatgtctcttccaccccctaaagcgtcaccggaaaaatgcgatcagccacgcccaggcttgtag

SEQ ID NO: 192268 - DNA, 1140 bp, Artificial Sequence
  derived and/or modified sequence
atgggtgacagtcggcgtcgaagcctgggcaatcagcccagctcagaggcggcaggcaggagtgaacgcgagcaggatggtgaccctcgcggattacagtcttctgtgtatgagtctaggagggtgactgacccggagcggcaagatctcgacaatgcagaattgggccctgaggacccggaggaagaattgccacctgaagaggtggcaggagaagaatttcccgagactttggatccaaaggaggcgttatccgagcttgaacgtgtgctggacaaggaccttgaagaggatattcctgagatcagtcgcttgtcaatttcccagaagctgccatcaactaccatgaccaaggcgaggaaaaggcgcagaagacggagactgatggaactcgcagagccaaagatcaactggcaagtgctgaaggaccgtaagggccgatgtggcaagggttacgcgtggatctcaccctgtaaaatgtccctccatttctgcctctgctggccctccgtctattggacagagcgtttcctggaggatacgactctgacaatcaccgtgcccgcagttagtcgcagagtggaggaactatctagaccgaagcgtttctatctggaatactacaacaataaccgaactactcccgtctggcctatccccagatcatcactggaataccgagccagcagtcgtttgaaagagcttgcagcacccaagattagagataacttctggtctatgccaatgtcagaagtgtcccaggtctccagagcagcccaaatggctgttccttcttcacgcatccttcaactgagcaagcctaaagccccagccaccctactggaagagtgggatccggtgcctaaacccaaaccacatgtgagcgaccacaatcgcctcctccatctggcaagacccaaagcacagagtgacaagtgtgttccagatagggaccccaggtgggaagttctggatgtgacaaaaaaggtggtcgccagtccacgcattatttctctggctaagcctaaagttcggaagggcctcaacgaggggtacgatcgcagacctttggctagtatgtctctgcctccgcctaaagcatccccagagaagtgtgatcagccaaggccaggactctag

SEQ ID NO: 192269 - DNA, 1140 bp, Artificial Sequence
  derived and/or modified sequence
atgggcgacagcagaagaagaagcctgggcaaccagcccagcagcgaggccgccggcagaagcgagagagagcaggacggcgaccccagaggcctgcagagcagcgtgtacgagagcagaagagtgaccgaccccgagagacaggacctggacaacgccgagctgggccccgaggaccccgaggaggagctgccccccgaggaggtggccggcgaggagttccccgagaccctggaccccaaggaggccctgagcgagctggagagagtgctggacaaggacctggaggaggacatccccgagatcagcagactgagcatcagccagaagctgcccagcaccaccatgaccaaggccagaaagagaagaagaagaagaagactgatggagctggccgagcccaagatcaactggcaggtgctgaaggacagaaagggcagatgcggcaagggctacgcctggatcagcccctgcaagatgagcctgcacttctgcctgtgctggcccagcgtgtactggaccgagagattcctggaggacaccaccctgaccatcaccgtgcccgccgtgagcagaagagtggaggagctgagcagacccaagagattctacctggagtactacaacaacaacagaaccacccccgtgtggcccatccccagaagcagcctggagtacagagccagcagcagactgaaggagctggccgcccccaagatcagagacaacttctggagcatgcccatgagcgaggtgagccaggtgagcagagccgcccagatggccgtgcccagcagcagaatcctgcagctgagcaagcccaaggcccccgccaccctgctggaggagtgggaccccgtgcccaagcccaagccccacgtgagcgaccacaacagactgctgcacctggccagacccaaggcccagagcgacaagtgcgtgcccgacagagaccccagatgggaggtgctggacgtgaccaagaaggtggtggccagccccagaatcatcagcctggccaagcccaaggtgagaaagggcctgaacgagggctacgacagaagacccctggccagcatgagcctgcccccccccaaggccagccccgagaagtgcgaccagcccagacccggcctgtag

SEQ ID NO: 192270 - protein, 344 aa, Artificial Sequence
  derived and/or modified sequence
MAAATELNRPSSGDRNLERRCRPNLSREVLYEIFRSLHTLVGQLDLRDDVVKITIDWNKLQSLSAFQPALLFSALEQHILYLQPFLAKLQSPIKEENTTAVEEIGRTEMGNKNEVNDKFSIGDLQEEEKHKESDLRDVKKTQIHFDPEVVQIKAGKAEIDRRISAFIERKQAEINENNVREFCNVIDCNQENSCARTDAIFTPYPGFKSHVKVSRVVNTYGPQTRPEGIPGSGHKPNSMLRDCGNQAVEERLQNIEAHLRLQTGGPVPRDIYQRIKKLEDKILELEGISPEYFQSVSFSGKRRKVQPPQQNYSLAELDEKISALKQALLRKSREAESMATHHLP

SEQ ID NO: 192271 - DNA, 1035 bp, Artificial Sequence
  derived and/or modified sequence
atggctgctgcgactgagctcaatcgaccctcaagtggagacagaaaccttgagaggaggtgccgtcctaacctgagcagggaggtgctgtatgagatcttccggtctctccacacgctggtgggtcagctcgatcttagggacgacgtggttaaaatcaccattgattggaacaagttacagagtttgtccgccttccaacccgcacttctcttttccgccctggagcaacacattttgtacctacagcccttccttgcaaagctgcagtcccctatcaaggaggaaaatacaaccgccgtggaggagatcggacggacagaaatgggaaataaaaatgaggtgaatgacaaattctctattggagacctgcaagaggaggagaaacataaagagtccgacctgagagatgtcaagaagacccagatccacttcgacccagaggtggtgcagattaaggcagggaaagctgagattgaccgtcggataagcgcattcatcgaaaggaagcaggccgaaatcaacgagaataacgtgagagagttttgcaacgtcatcgattgcaaccaggagaattcttgtgctcggactgatgctatcttcactccttatcccggattcaaaagccacgtcaaggtaagccgagtggtcaatacatacggcccccagaccagaccagaaggcatacccggctctgggcacaaaccaaatagcatgttgagggactgcggtaaccaggcagtagaggaaagactccagaatatcgaggctcacttgcgattgcagaccggagggcccgtgcctcgcgacatctatcagaggattaagaaattagaagataaaatcctggaactagaaggcatttctccggagtacttccagagtgtatctttttctggaaagaggcggaaagtacagccacctcagcagaactacagtctggccgaattagatgagaaaattagtgccttaaagcaagccctgttaaggaaatcgcgggaggcagaatctatggcaacccatcatctcccctag

SEQ ID NO: 192272 - DNA, 1035 bp, Artificial Sequence
  derived and/or modified sequence
atggctgctgccacagagctgaaccggcccagcagcggggacaggaacctggagcggcgctgccggcccaacctgagccgggaggtgctgtatgagatcttccgcagcctgcacaccctggtgggccagctggacctgagagatgatgtggtgaagatcaccatcgactggaacaagctgcagagcctgagcgccttccagcctgccctgctcttcagcgccctggagcagcacatcctgtacctgcagcccttcctggccaagctgcagagccccatcaaggaggagaacaccacagctgtggaggagatcggccgcacagagatgggcaacaagaatgaggtgaatgacaagttcagcattggagacctgcaggaggaggagaagcacaaggagagtgacctgagagatgtgaagaagacccagatccactttgatcctgaggtggtgcagatcaaggccggcaaggccgagattgaccggcgcatcagcgccttcattgaaaggaagcaggccgagatcaatgaaaacaacgtgcgggagttctgcaacgtcatcgactgcaaccaggagaacagctgtgccaggacagatgccatcttcaccccctacccaggcttcaagagccacgtgaaggtgtcccgggtggtgaacacctacggcccccagaccaggcctgagggcatccctggcagcggccacaagcccaacagcatgctgcgggactgtggcaaccaggccgtggaggagcggctgcagaacatcgaggcccacctgcggctgcagacaggaggccctgtgccccgggacatctaccagaggatcaagaagctggaggacaagatcctggagctggagggcatcagccctgagtacttccagagcgtgtccttcagcggcaagaggaggaaggtgcagcccccccagcagaactacagcctggccgagctggatgagaagatcagcgccctgaagcaggccctgctgaggaagagccgggaggccgagagcatggccacccaccacctgccctag

SEQ ID NO: 192273 - DNA, 1642 bp, Artificial Sequence
  derived and/or modified sequence
tcgccaagcgactaaagctggaagggagggggcggggttgtgagcaaatcttggtggtggtggtggtggggcggcctgagaagatatcatggctgctgccacggagcttaatcgcccgagcagcggtgacaggaacctggagcgaagatgcagacccaacctctcccgagaggtgctctacgaaatctttcgctccctacacaccctggttggacagcttgacctcagagatgatgtggtgaaaattacaatcgattggaacaagctccagagcctctcggcattccagcctgcattgctctttagtgcacttgaacaacacattttatatttacagccttttttagcaaaacttcagtctccgattaaagaggagaatacaactgctgttgaagagataggaagaacagaaatggggaacaaaaatgaagtaaatgacaaattttccattggcgacctacaagaggaagaaaagcacaaagaaagtgatttaagagatgtgaaaaagacacagatccattttgatccagaagtagttcagataaaggctggaaaagcagaaattgacagacgaatatctgcatttattgaaagaaagcaagctgaaatcaatgaaaacaacgtcagggaattttgcaatgttattgattgtaatcaagaaaatagttgtgcaagaactgatgcgatttttaccccttaccccggatttaaaagtcacgtaaaagtttctagagttgtgaatacatacggaccacagactagacctgaaggaattccagggtcaggtcataaacctaacagcatgcttcgagactgtggtaatcaggctgtagaagaacgactacaaaatattgaggcccacttgcggttacagacaggtggtccagtgccaagagacatttatcagagaattaaaaaacttgaggataaaatccttgaattggaaggcatctctcctgaatattttcagtctgtaagcttttctggaaaaagaagaaaagttcaaccacctcaacagaactattcactggctgaacttgatgagaaaattagtgccctcaaacaagccctcctcagaaaatcaagagaagcagaatccatggcaacccaccaccttccatgaaaaactcctctcatccttgtcattttacttttttgtatacatatgtgtaacttacactgttattaattcaacggatatatatttatcaatgtagacttctctgtgaagtcaaggtttattttcacatgagtccagcttgcagcaagtaatcttcaaatattccagtaagttttgaaataatgaatgcattgaaaatagcattgttggaatttattcccttctgttttaaaggaggtattttggaaattgaaaaacttaatttacaagtgctggtacatcttttttcttttgtggaccacaggaaggaagatttattttgatattgatactttaaaaggactttatatttgtaacattgatgttaaccagtttattagtttaaatcagtactttgcatataataagcattcaacaaaaatttattgactgaaatgaattttaaatgcatgtgtatgaacttgtttttcttaatctttaagatgtcagtattcatgtaaataaacaatagatccagcttta

SEQ ID NO: 192274 - DNA, 1035 bp, Artificial Sequence
  derived and/or modified sequence
atggccgccgccaccgagctgaaccggcccagcagcggcgaccggaatctcgagcggcgctgccgtcctaacctgtccagggaggtcctctatgagatcttcaggtcactacataccctggtgggacaactggaccttagggacgatgtcgtcaagattaccatcgactggaataaactacaatctctgagcgccttccagcccgccctgctgttctctgctctggaacagcacatcttgtacttacagccttttttggctaagctccagtcacccattaaagaggaaaatactacagcggtcgaggagatcgggaggacagaaatgggcaataagaatgaggtaaacgataaatttagcattggggacctgcaggaggaggaaaagcacaaggaatccgatctgcgggatgtcaaaaaaacccaaatacactttgatcctgaggtggttcagatcaaagctgggaaggcagaaatagatcgccgcattagcgcctttatcgagaggaagcaggcagagattaacgaaaacaatgtacgcgaattctgcaacgtaatcgattgcaatcaggagaacagctgtgcccgcacggatgccatattcaccccttatcctggctttaaatcccatgtcaaagtgtcccgggtggtcaatacgtacgggccacagaccagaccagaaggaatccccggcagcgggcataagccaaacagcatgctccgcgactgcggtaaccaggcagtggaagaaagactgcagaatatcgaagcgcacctgcgactacaaaccggcgggcctgttcctcgcgatatctaccaaagaataaagaagcttgaggacaaaatcctggaactggaaggcatttcaccagagtactttcagtcagtatccttttcaggcaagaggcgcaaagttcagcccccacaacagaactattccctagccgagctggatgagaagatctctgccctgaaacaagcgctcctgcggaagtccagggaggctgagtctatggcgacacaccacctgccgtag

SEQ ID NO: 192275 - DNA, 1035 bp, Artificial Sequence
  derived and/or modified sequence
atggcagctgccaccgaactgaatcgcccttctagcggcgatcgaaacctcgagaggaggtgtcggcctaacctgagcagggaagtcctgtatgagatctttcgcagtctgcacacccttgtaggacaactggacttacgggacgacgtcgtgaaaatcacgatagactggaacaaactgcagagtctttctgcttttcagcctgctctgctgttctccgcactggagcagcacatcctctatctgcagccctttctggcaaagctgcaatctcctatcaaggaggaaaacaccacagcagtagaagagatcggcaggactgaaatgggaaataagaacgaagtcaacgataaattctcaattggagatctgcaggaggaagaaaaacacaaagagtcagatctcagggatgttaaaaagacccagattcacttcgaccctgaggtggtccagattaaagcaggtaaggctgagattgacaggaggatctcagccttcatagaaaggaagcaggctgaaataaacgagaacaacgtacgggagttctgcaatgtgatcgactgcaaccaggagaacagttgcgcccgaacggacgcaatcttcactccctacccaggcttcaagtcacatgtgaaagtctcccgcgtggtaaatacctacggaccacaaactcggccagaaggcatccccggatctgggcataaaccaaatagcatgcttagagattgtggcaaccaggcagtggaggagcgcctgcagaacatagaagcccatctgaggctgcagacagggggacccgtgcctagagatatataccaacgaataaaaaaacttgaagacaaaatcctcgaactggagggcatttccccggaatactttcagagcgtgagtttctctggcaagcgtcggaaagtccagccacctcaacagaactattccctggcagagctggacgagaagatttcggctctgaagcaggctctgctacgaaaaagtagagaggccgaaagcatggctacccatcatttaccctag

SEQ ID NO: 192276 - DNA, 1035 bp, Artificial Sequence
  derived and/or modified sequence
atggccgccgccaccgagctgaacagacccagcagcggcgacagaaacctggagagaagatgcagacccaacctgagcagagaggtgctgtacgagatcttcagaagcctgcacaccctggtgggccagctggacctgagagacgacgtggtgaagatcaccatcgactggaacaagctgcagagcctgagcgccttccagcccgccctgctgttcagcgccctggagcagcacatcctgtacctgcagcccttcctggccaagctgcagagccccatcaaggaggagaacaccaccgccgtggaggagatcggcagaaccgagatgggcaacaagaacgaggtgaacgacaagttcagcatcggcgacctgcaggaggaggagaagcacaaggagagcgacctgagagacgtgaagaagacccagatccacttcgaccccgaggtggtgcagatcaaggccggcaaggccgagatcgacagaagaatcagcgccttcatcgagagaaagcaggccgagatcaacgagaacaacgtgagagagttctgcaacgtgatcgactgcaaccaggagaacagctgcgccagaaccgacgccatcttcaccccctaccccggcttcaagagccacgtgaaggtgagcagagtggtgaacacctacggcccccagaccagacccgagggcatccccggcagcggccacaagcccaacagcatgctgagagactgcggcaaccaggccgtggaggagagactgcagaacatcgaggcccacctgagactgcagaccggcggccccgtgcccagagacatctaccagagaatcaagaagctggaggacaagatcctggagctggagggcatcagccccgagtacttccagagcgtgagcttcagcggcaagagaagaaaggtgcagcccccccagcagaactacagcctggccgagctggacgagaagatcagcgccctgaagcaggccctgctgagaaagagcagagaggccgagagcatggccacccaccacctgccctag

SEQ ID NO: 192277 - protein, 285 aa, Artificial Sequence
  derived and/or modified sequence
MEVPPPAPRSFLCRALCLFPRVFAAEAVTADSEVLEERQKRLPYVPEPYYPESGWDRLRELFGKDEQQRISKDLANICKTAATAGIIGWVYGGIPAFIHAKQQYIEQSQAEIYHNRFDAVQSAHRAATRGFIRYGWRWGWRTAVFVTIFNTVNTSLNVYRNKDALSHFVIAGAVTGSLFRINVGLRGLVAGGIIGALLGTPVGGLLMAFQKYSGETVQERKQKDRKALHELKLEEWKGRLQVTEHLPEKIESSLQEDEPENDAKKIEALLNLPRNPSVIDKQDKD

SEQ ID NO: 192278 - DNA, 858 bp, Artificial Sequence
  derived and/or modified sequence
atggaggtgcccccccccgcccccagaagcttcctgtgcagagccctgtgcctgttccccagagtgttcgccgccgaggccgtgaccgccgacagcgaggtgctggaggagagacagaagagactgccctacgtgcccgagccctactaccccgagagcggctgggacagactgagagagctgttcggcaaggacgagcagcagagaatcagcaaggacctggccaacatctgcaagaccgccgccaccgccggcatcatcggctgggtgtacggcggcatccccgccttcatccacgccaagcagcagtacatcgagcagagccaggccgagatctaccacaacagattcgacgccgtgcagagcgcccacagagccgccaccagaggcttcatcagatacggctggagatggggctggagaaccgccgtgttcgtgaccatcttcaacaccgtgaacaccagcctgaacgtgtacagaaacaaggacgccctgagccacttcgtgatcgccggcgccgtgaccggcagcctgttcagaatcaacgtgggcctgagaggcctggtggccggcggcatcatcggcgccctgctgggcacccccgtgggcggcctgctgatggccttccagaagtacagcggcgagaccgtgcaggagagaaagcagaaggacagaaaggccctgcacgagctgaagctggaggagtggaagggcagactgcaggtgaccgagcacctgcccgagaagatcgagagcagcctgcaggaggacgagcccgagaacgacgccaagaagatcgaggccctgctgaacctgcccagaaaccccagcgtgatcgacaagcaggacaaggactag

SEQ ID NO: 192279 - DNA, 858 bp, Artificial Sequence
  derived and/or modified sequence
atggaggttccgccccctgctccaaggtctttcctgtgtcgggcactgtgcctatttccaagagtgttcgccgctgaggcagtgacggccgactccgaggtgctggaggagaggcagaagcggttgccctacgtccctgagccatactacccggagagtggctgggatagactgcgggaactgttcggtaaggacgaacagcagagaataagcaaagaccttgccaacatttgcaagaccgcagccaccgctggcatcattgggtgggtatacggaggcatacctgcattcatccatgctaagcagcagtacatcgaacagagtcaagctgagatttaccacaaccgatttgatgccgtgcagtccgcacatcgagccgctacacgtggttttatccgatacggatggcgatgggggtggcgaacagccgtgtttgttactattttcaacacggtgaatacatccctgaatgtgtatcgcaacaaggatgcactcagccacttcgttatcgccggagccgtcacgggaagtttgttcagaatcaatgtggggttaaggggcctggtggccgggggcatcataggggcgctgctcgggactcctgtaggaggattactgatggcatttcaaaagtatagtggtgagaccgtacaggaaaggaagcaaaaagacagaaaagctctgcatgagctgaagctcgaggagtggaagggtcgtctgcaagtcacagaacacctgcccgagaagattgaatcttcactgcaggaggacgagcccgagaacgacgccaaaaaaatcgaggccctcttgaacctccctcgcaaccctagtgtgatcgacaagcaagataaagattag

SEQ ID NO: 192280 - DNA, 858 bp, Artificial Sequence
  derived and/or modified sequence
atggaggtgcccccaccagcccccaggagcttcctgtgccgggccctgtgcctcttcccccgggtgtttgctgctgaggccgtgacagctgacagcgaggtgctggaggagcggcagaagaggctgccctacgtgcctgagccctactacccagagagcggctgggaccggctgcgggagctgtttgggaaggatgagcagcagaggatcagcaaggacctggccaacatctgcaagacagctgccacagctggcatcatcggctgggtgtatggaggcatcccagccttcatccacgccaagcagcagtacatcgagcagagccaggccgagatctaccacaacagatttgatgctgtgcagagcgcccaccgggccgccacccggggcttcatccgctatggctggcgctggggctggaggacagctgtgtttgtgaccatcttcaacacagtgaacaccagcctgaatgtgtacagaaacaaggatgccctgagccactttgtgattgctggagctgtgacaggcagcctcttccgcatcaacgtgggcctgcggggcctggtggccggcggcatcatcggggccctgctgggcacccctgtgggcggcctgctgatggccttccagaagtacagcggggagaccgtgcaggagaggaagcagaaggacaggaaggccctgcacgagctgaagctggaggagtggaagggccgcctgcaggtgacagagcacctgcctgagaagattgagagcagcctgcaggaggatgagccagaaaatgatgccaagaagattgaggccctgctgaacctgcccaggaaccccagcgtgattgacaagcaggacaaggactag

SEQ ID NO: 192281 - DNA, 858 bp, Artificial Sequence
  derived and/or modified sequence
atggaggtgcccccccccgccccccggagcttcctgtgccgggccctgtgtctatttcctagggtatttgccgctgaggcagtgaccgccgactccgaggtattggaagaaagacagaaacgccttccatatgtaccagagccctactacccagagtcaggttgggaccgccttcgtgagctattcggcaaagatgagcagcagagaatcagcaaggatctcgctaatatctgtaagactgccgcaactgccggcatcatcggctgggtttatggaggtatccctgcattcatccacgccaagcaacagtatatcgagcagtctcaggcagagatctaccacaacagatttgacgctgtgcagtcggcccacagggccgccacgagagggttcattcggtacgggtggcggtggggctggagaaccgccgtttttgtgacaatcttcaatacagtgaacacaagtcttaatgtttacaggaacaaggacgctctgagccactttgtgatcgccggagccgtgacagggtccctctttcgtattaacgtagggctgcgcggcctcgtggccgggggcataataggcgcgcttctcggaactccagtcggcggactgcttatggccttccagaagtactctggtgaaacagttcaggagaggaagcagaaggatagaaaagcactgcacgagctgaaattagaggaatggaaagggaggctgcaagtcaccgaacaccttccggagaagatcgagtctagcttacaggaggatgagccagagaacgacgccaagaagattgaggccctcctgaatttgccccgcaacccctctgttattgacaagcaggacaaggactag

SEQ ID NO: 192282 - DNA, 858 bp, Artificial Sequence
  derived and/or modified sequence
atggaagtcccgcctcctgcaccccgatccttcctgtgcagggccttgtgcctcttccccagagttttcgctgccgaagcggtgacagccgattccgaggtgctcgaggaaagacagaaacgtctcccctatgtgccggaaccctactacccagagagcggttgggatcggctcagagagctgtttggcaaagacgagcagcagcgcatttctaaagatctagcaaacatatgcaaaacggcggcaactgctggaatcatcggttgggtgtatggaggaattcctgcattcattcatgccaagcagcaatatattgaacaaagtcaggccgagatatatcacaatagattcgacgccgtccagtccgcgcacagggctgccactaggggtttcatccggtacggttggagatggggatggaggaccgccgtgtttgtgacaatttttaacacggtcaatacctccctaaacgtctacaggaacaaggacgctctgtcccatttcgttattgcaggtgccgtgactgggtccctgtttcgaattaacgtgggactccgcggactggtggcaggtggcatcattggagccttgctgggcacaccagttggaggtcttctcatggctttccagaaatacagcggagaaactgtccaggagcgcaagcaaaaggatcgaaaggcactccatgagctgaagctggaagaatggaaaggtcgattgcaggtgacggaacacctgcctgaaaaaatcgagtctagtttacaggaagatgagcctgagaatgacgccaagaaaatcgaggcgctgttgaatctgcctcgaaatccctcagtgatcgataagcaggacaaagactag

SEQ ID NO: 192283 - DNA, 2394 bp, Artificial Sequence
  derived and/or modified sequence
ggcgggacttcctgtgtcgtatttccaaggactccaaagcgaggccggggactgaaggtgtgggtgtcgagccctctggcagagggttaacctgggtcaaatgcacggattctcacctcgtacagttacgctctcccgcggcacgtccgcgaggacttgaagtcctgagcgctcaagtttgtccgtaggtcgagagaaggccatggaggtgccgccaccggcaccgcggagctttctctgtagagcattgtgcctatttccccgagtctttgctgccgaagctgtgactgccgattcggaagtccttgaggagcgtcagaagcggcttccctacgtcccagagccctattacccggaatctggatgggaccgcctccgggagctgtttggcaaagatgaacagcagagaatttcaaaggaccttgctaatatctgtaagacggcagctacagcaggcatcattggctgggtgtatgggggaataccagcttttattcatgctaaacaacaatacattgagcagagccaggcagaaatttatcataaccggtttgatgctgtgcaatctgcacatcgtgctgccacacgaggcttcattcgttatggctggcgctggggttggagaactgcagtgtttgtgactatattcaacacagtgaacactagtctgaatgtataccgaaataaagatgccttaagccattttgtaattgcaggagctgtcacgggaagtctttttaggataaacgtaggcctgcgtggcctggtggctggtggcataattggagccttgctgggcactcctgtaggaggcctgctgatggcatttcagaagtactctggtgagactgttcaggaaagaaaacagaaggatcgaaaggcactccatgagctaaaactggaagagtggaaaggcagactacaagttactgagcacctccctgagaaaattgaaagtagtttacaggaagatgaacctgagaatgatgctaagaaaattgaagcactgctaaaccttcctagaaacccttcagtaatagataaacaagacaaggactgaaagtgctctgaacttgaaactcactggagagctgaagggagctgccatgtccgatgaatgccaacagacaggccactctttggtcagcctgctgacaaatttaagtgctggtacctgtggtggcagtggcttgctcttgtctttttcttttctttttaactaagaatggggctgttgtactctcactttacttatccttaaatttaaatacatacttatgtttgtattaatctatcaatatatgcatacatgaatatatccacccacctagattttaagcagtaaataaaacatttcgcaaaagattaaagttgaattttacagttcgtatattcatgtggtcctttgaaagggtattctagaaatcactggaaagaggagaggaaagaaccaggtaggcaaatggtctgtgaaacccttgggtcctggaagcagtgtgagtgtaaatgtgtagtgtttggtttcatctaaataaacaaagatgatttctttgacacttgaaataaaatacaaattcaacaaaaagtagatcagcattattaaagaaacggttcaactttgtttcttcccttagtattgctgacaaagtatctgctgtagaatacaggaattacttagaatagaaacatagtcatcacaactgttactaaatggaaaagaaaagaattattgagttaagtattcctgtcaatacgggaaacactgctagtaccttatgttggtgttagacctctctgccctacactgagaatatagttttacacaggagcaaggtttgtgaagcagcatagtgaggtagctaaagccatgggctggctctaaaggctttaaatcccagccatgtggcttagctgccatgagatgtgcatttgagaaatgttgtcttcttttgctgttcaactccagattttcagatgataatgtgattatcccagcttaagttgcgtccacttctggtctagtgaattgtggaaggcagttttagagaaaggagtcatgagtaacatgaacagcagttggctatgtctttccagttctctgctgatgtcagaaagacccagaaataccaaggagaaaaagccatcttagggatctaaggaggccctatggaaagttactaccttagacatttgaagatagcttactgcttagtacatacactgtaaacaacgatctcattttaaatgagaactttctcataaatattttacaaatgaggtcaaactagcataaagccatttaaagagattatcagtccaatatgaaccagttaagtctttggactatccctttcctccttgactactgctttgacgtacctaaatcattcgtct

SEQ ID NO: 192284 - protein, 245 aa, Artificial Sequence
  derived and/or modified sequence
MDRRSRAQQWRRARHNYNDLCPPIGRRAATALLWLSCSIALLRALATSNARAQQRAAAQQRRSFLNAHHRSGAQVFPESPESESDHEHEEADLELSLPECLEYEEEFDYETESETESEIESETDFETEPETAPTTEPETEPEDDRGPVVPKHSTFGQSLTQRLHALKLRSPDASPSRAPPSTQEPQSPREGEELKPEDKDPRDPEESKEPKEEKQRRRCKPKKPTRRDASPESPSKKGPIPIRRH

SEQ ID NO: 192285 - protein, 113 aa, Artificial Sequence
  derived and/or modified sequence
  misc_feature (1)..(1): Xaa can be any naturally occurring amino acid
XTTEPETEPEDDRGPVVPKHSTFGQSLTQRLHALKLRSPDASPSRAPPSTQEPQSPREGEELKPEDKDPRDPEESKEPKEEKQRRRCKPKKPTRRDASPESPSKKGPIPIRRH

SEQ ID NO: 192286 - protein, 166 aa, Artificial Sequence
  derived and/or modified sequence
PESESDHEHEEADLELSLPECLEYEEEFDYETESETESEIESETDFETEPETAPTTEPETEPEDDRGPVVPKHSTFGQSLTQRLHALKLRSPDASPSRAPPSTQEPQSPREGEELKPEDKDPRDPEESKEPKEEKQRRRCKPKKPTRRDASPESPSKKGPIPIRRH

SEQ ID NO: 192287 - DNA, 738 bp, Artificial Sequence
  derived and/or modified sequence
atggatcgccgaagccgggcacagcagtggcgacgggccaggcataattacaatgacctatgtccaccgatagggcgtcgagccgccactgctctgctgtggttgagctgcagcatcgccttgctcagggcattagccacctctaatgcgagagcccagcaacgggctgccgcccaacaaagacgctccttccttaatgcccatcacaggagcggcgcccaagtgtttcctgagtctcctgaatctgagtcagatcacgagcatgaagaggcggacttggagctgagcctacccgaatgcctagaatacgaggaggagtttgattatgaaactgaatctgagactgagtcagagattgaaagtgagaccgacttcgaaactgaacccgagacagccccgacaacagaacccgagacagagcctgaagatgatagagggccggtggttccaaagcactccacgtttggccagtcactgactcaaagactccacgcattaaaactgagatcgcctgacgcatccccgtcaagggcccccccaagcacccaagagccccaatcacccagggagggtgaggaacttaaaccagaggacaaagaccctcgggacccagaagagagtaaggagcccaaggaggagaaacagcgtagacggtgcaagcctaagaaacccacaagaagggacgcctctcctgaatccccttctaagaaaggacctattcctatcaggaggcactag

SEQ ID NO: 192288 - DNA, 738 bp, Artificial Sequence
  derived and/or modified sequence
atggatcggaggtcgcgcgcgcagcaatggcggcgtgcaagacataactacaacgatctatgccctccaatcggccggcgggcagctacggcgctcctgtggctgagctgtagtatcgcacttttgagggctttggcgacatcaaatgcaagggcccagcagcgggccgcagcccagcaaagacggtctttcctgaacgctcatcaccgaagcggcgcacaggtcttccctgagagtccggagtcagagtcagatcacgaacacgaggaggcagacctggagctgtctctcccggagtgccttgagtacgaagaggagtttgattacgagaccgagagtgaaaccgaaagtgaaatagagagcgagactgattttgagactgagcccgagactgcccctaccaccgagcccgagaccgaacctgaagacgaccggggcccggtggtgcctaaacacagtactttcgggcaaagtttgactcagcgcttgcatgccctgaagcttaggtcacctgatgcgagtccatcccgagccccgccgagcacacaggaaccgcagtcccctagggagggtgaggagctgaagccggaggacaaagatcccagagacccagaagagtccaaagagccaaaagaggagaagcagaggcgcaggtgtaaaccaaagaagcctacccgtcgcgatgcctcccctgaaagtccttccaagaagggccccatccccatcaggaggcactag

SEQ ID NO: 192289 - DNA, 738 bp, Artificial Sequence
  derived and/or modified sequence
atggaccggagaagccgtgcgcagcaatggcgccgggcacgacataactacaatgacctatgccctccaattggccgtcgagcagctacagccttactgtggctcagctgttcaattgctctgttacgggcccttgccacaagtaacgccagggcacagcagcgagccgctgcccagcagcgccgatctttcctcaacgcccaccatcgcagcggtgctcaggtgtttcccgagagcccggaaagtgaatctgaccacgaacacgaagaggctgacctggaactgtccctccctgagtgccttgaatacgaggaggagttcgactatgaaacagagtctgagacagaatctgagatcgaatccgagaccgacttcgagacagagccggagactgctccgacaactgagcccgagacggagcccgaggatgaccgtggcccagtcgtgcctaaacactccacctttgggcagtccctgacccagcgcctgcacgccctgaaactaaggtccccggacgcttcaccttcccgggccccacctagtactcaggagcctcagtctccccgggaaggagaggaactgaagcctgaagataaagatccaagagatcctgaggagagcaaagagccaaaagaagagaagcagaggagaaggtgcaagccgaagaaaccgacccgccgggacgcctctcccgagtccccttctaaaaagggtcctatccccatcaggcgccattag

SEQ ID NO: 192290 - DNA, 342 bp, Artificial Sequence
  derived and/or modified sequence
tgaactacagaaccggagactgagcctgaggatgatcgggggcctgtggtcccaaagcactctacctttgggcagagcttgacacagaggctgcatgcgttaaaattacgcagcccagatgcttcacccagcagagcgcccccttccacacaggaaccccagtcaccgcgcgagggagaggaactcaaacctgaagataaggatcctagggaccccgaggaatctaaggagcccaaagaggaaaaacagaggcgaagatgcaagccaaagaaacccacaaggcgcgatgctagccctgagagcccctcaaagaaaggccctatccctatccgcagacactag

SEQ ID NO: 192291 - DNA, 501 bp, Artificial Sequence
  derived and/or modified sequence
cccgagagcgaatctgatcatgaacacgaagaagcggacttggagctctcactgccagagtgcctggaatatgaggaggaattcgactatgaaacggagtccgagaccgagtcggaaatcgaatctgaaaccgactttgaaaccgagccagagaccgcccccacaacagagcctgagactgagccagaggatgaccgggggcccgtggtccctaaacattctactttcggacagtcactaacgcagcgcctgcacgccctcaagttaaggagcccagatgcttccccctcaagagcgcccccatccacgcaggaacctcagtctccaagagagggagaagagctgaagcccgaggacaaggatccgcgcgatccagaggagtcgaaagagccaaaggaagagaagcaacgccggcggtgtaagccgaaaaagcccacacgcagagacgcaagcccagaatccccaagcaaaaaaggcccaatcccaatccgccgtcactag

SEQ ID NO: 192292 - DNA, 1719 bp, Artificial Sequence
  derived and/or modified sequence
agtctcctctgtcctctcccaggcaagaggaccggcggaggcacctctctcgagtcttaggctgcggaatctaagactcagcgagaggagcccgggaggagacagaactttccccttttttcccatcccttcttcttgctcagagaggcaagcaaggcgcggagctttagaaagttcttaagtggtcaggaaggtaggtgcttccctttttctcctcacaaggaggtgaggctgggacctccgggccagcttctcacctcatagggtgtacctttcccggctccagcagccaatgtgcttcggagccactctctgcagagccagagggcaggccggcttctcggtgtgtgcctaagaggatggatcggaggtcccgggctcagcagtggcgccgagctcgccataattacaacgacctgtgcccgcccataggccgccgggcagccaccgcgctcctctggctctcctgctccatcgcgctcctccgcgcccttgccacctccaacgcccgtgcccagcagcgcgcggctgcccaacagcgccggagcttccttaacgcccaccaccgctccggcgcccaggtattccctgagtcccccgaatcggaatctgaccacgagcacgaggaggcagaccttgagctgtccctccccgagtgcctagagtacgaggaagagttcgactacgagaccgagagcgagaccgagtccgaaatcgagtccgagaccgacttcgagaccgagcctgagaccgcccccaccactgagcccgagaccgagcctgaagacgatcgcggcccggtggtgcccaagcactccaccttcggccagtccctcacccagcgtctgcacgctctcaagttgcgaagccccgacgcctccccaagtcgcgcgccgcccagcactcaggagccccagagccccagggaaggggaggagctcaagcccgaggacaaagatccaagggaccccgaagagtcgaaggagcccaaggaggagaagcagcggcgtcgctgcaagccaaagaagcccacccgccgtgacgcgtccccggagtccccttccaaaaagggacccatccccatccggcgtcactaatggaggacgccgtccagattctccttgttttcatggattcaggtgctggagaatctggtaaaagcaccattgtgaagcagatgaggatcctgcatgttaatgggtttaatggagagggcggcgaagaggacccgcaggctgcaaggagcaacagcgatggaatataatatccctagatgatggctacagtttctcatcttcccggctatgtcctatcacaatttgcatgctggaattgctcggtcttaggaacttctaataagaatactattctgttatctgaggggggaggggggatggggcccctgctacctgaccttaaacgatgattgaaaaaacgaaaaatgaactgaaatccttaattggcagaaatgtagtatgacaactatccaaaaaggcatctctataagaaatgactaattgacaatctgctgtaccaaaagttggcatttgagcaagatatgacaagtccttagtgagcaacctactgtgtactagatgtcctgctaaacccttgaaccctactaataccttggcctgcacgtctctctcactctgttctgcaagtcaatataagtattaacattcgtgataaataaaaattctctgcatgtttcagcaa

SEQ ID NO: 192293 - DNA, 632 bp, Artificial Sequence
  derived and/or modified sequence
cccgaatcggaatctgaccacgagcacgaggaggcagaccttgagctgtccctccccgagtgcctagagtacgaggaagagttcgactacgagaccgagagcgagaccgagtccgaaatcgagtccgagaccgacttcgagaccgagcctgagaccgcccccaccactgagcccgagaccgagcctgaagacgatcgcggcccggtggtgcccaagcactccaccttcggccagtccctcacccagcgtctgcacgctctcaagttgcgaagccccgacgcctccccaagtcgcgcgccgcccagcactcaggagccccagagccccagggaaggggaggagctcaagcccgaggacaaagatccaagggaccccgaagagtcgaaggagcccaaggaggagaagcagcggcgtcgctgcaagccaaagaagcccacccgccgtgacgcgtccccggagtccccttccaaaaagggacccatccccatccggcgtcactaatggaggacgccgtccagattctccttgttttcatggattcaggtgctggagaatctggtaaaagcaccattgtgaagcagatgaggatcctgcatgttaatgggtttaatggagacagtgagaaggcaacc

SEQ ID NO: 192294 - DNA, 738 bp, Artificial Sequence
  derived and/or modified sequence
atggacagaagaagccgggcccagcagtggaggcgggcccggcacaactacaatgacctgtgcccccccatcggccggcgggccgccacagccctgctgtggctgagctgcagcatcgccctgctgcgggccctggccaccagcaatgcccgggcccagcagagagctgctgcccagcagaggaggagcttcctgaatgcccaccacaggtctggggcccaggtgtttcctgagagccctgagagcgagagtgaccacgagcacgaggaggccgacctggagctgagcctgcctgaatgtctggagtatgaggaggagtttgattatgaaacagaaagtgaaacagaaagtgaaattgaaagtgaaacagactttgaaacagagcctgagacagcccccaccacagagcctgagacagagccagaagatgaccggggccctgtggtgcccaagcacagcaccttcggccagagcctgacccagaggctgcacgccctgaagctgcggagcccagatgccagccccagccgggccccacccagcacccaggagccccagagcccccgggagggggaggagctgaagccagaggacaaggacccccgggaccctgaggagagcaaggagcccaaggaggagaagcagaggcggcgctgcaagcccaagaagcccaccaggagagatgccagccctgagagccccagcaagaagggccccatccccatcagaagacactag

SEQ ID NO: 192295 - DNA, 342 bp, Artificial Sequence
  derived and/or modified sequence
tgaacaacagagcctgagacagagccagaagatgaccggggccctgtggtgcccaagcacagcaccttcggccagagcctgacccagaggctgcacgccctgaagctgcggagcccagatgccagccccagccgggccccacccagcacccaggagccccagagcccccgggagggggaggagctgaagccagaggacaaggacccccgggaccctgaggagagcaaggagcccaaggaggagaagcagaggcggcgctgcaagcccaagaagcccaccaggagagatgccagccctgagagccccagcaagaagggccccatccccatcagaagacactag

SEQ ID NO: 192296 - DNA, 501 bp, Artificial Sequence
  derived and/or modified sequence
cctgagagcgagagtgaccatgaacatgaggaggccgacctggagctgagcctgcctgagtgcctggagtatgaggaggagtttgattatgaaacagagagcgagacagagagcgagattgagagcgagacagactttgaaacagagcctgagacagcccccaccacagagcctgagacagagccagaagatgaccggggccctgtggtgcccaagcacagcaccttcggccagagcctgacccagaggctgcacgccctgaagctgcggagcccagatgccagccccagccgggccccacccagcacccaggagccccagagcccccgggagggggaggagctgaagccagaggacaaggacccccgggaccctgaggagagcaaggagcccaaggaggagaagcagaggcggcgctgcaagcccaagaagcccaccaggagagatgccagccctgagagccccagcaagaagggccccatccccatccgccgccactag

SEQ ID NO: 192297 - DNA, 738 bp, Artificial Sequence
  derived and/or modified sequence
atggaccggcggagccgggcccagcagtggcggcgggcccggcacaactataacgacctgtgtcctcccatcggacgtagggccgccactgccctgctgtggttgtcttgctcgatcgctctcctcagagcgttggccacctccaacgcacgcgcacaacaacgtgctgccgcacaacagagaaggtctttcttgaatgctcaccataggtccggcgctcaggtgtttcctgagagcccagagtctgagagcgaccatgagcacgaggaggcagacctggagctttccttgccagaatgcctagagtatgaggaagagttcgactacgaaacagagtccgagaccgagtccgaaattgagtcggagaccgacttcgaaacagaaccagagaccgcacctaccaccgaacccgaaaccgaacctgaagacgaccgcggtccagtggtgcccaaacactctacatttggacagagtcttacccagcgccttcacgctctcaagcttaggtcccccgatgcatccccatcccgggccccaccctcaacacaggagcctcagtcgcctcgagaaggcgaggagttgaagcctgaggacaaggacccacgcgacccggaagaaagcaaggagcccaaagaagagaaacagcgccggaggtgcaagccaaagaaacccacgagacgcgatgcgtcaccggaatcaccttcaaaaaagggccctattccaattcgcagacactag

SEQ ID NO: 192298 - DNA, 738 bp, Artificial Sequence
  derived and/or modified sequence
atggaccggcggagccgggcccagcagtggcggcgggcccggcacaattacaacgacctctgcccacctattggaaggagagcagctactgcactgctatggctgtcctgtagcattgccctcttgcgagctctcgctacctcaaacgcgcgggcacaacaacgggctgctgcccaacagcggcgcagctttctcaatgcacatcaccggagcggggcacaggtgtttccggaatcccctgagagtgagtccgatcacgagcacgaggaggccgacctggaattgagtcttccagaatgtctcgagtacgaggaagagtttgattatgagaccgaatccgaaacggagagtgagatcgagtctgaaacagactttgagactgaacccgaaactgctcctacgaccgagcccgaaaccgagccggaagatgaccgtgggccagtggtacctaagcacagtacctttggacaatcactcactcagcgccttcatgcattaaagctgagatcccccgatgcttccccctcacgggctccacctagtacccaagaaccacagtcccctagggagggcgaggaactcaagccggaagataaggaccctcgcgaccctgaggagtcaaaagagcccaaggaggagaagcaaagaagaagatgtaaacctaaaaagccaactcgccgggacgccagtcccgagtcgccatccaagaagggtcccattcccattaggcgccactag

SEQ ID NO: 192299 - DNA, 738 bp, Artificial Sequence
  derived and/or modified sequence
atggaccggcggagccgggcccagcagtggcggcgggcccggcacaactataatgatttatgtcccccaatcggacgcagagctgctaccgcattactgtggctcagctgttccattgcgcttcttcgagctctggccacgtcaaatgcacgggcacaacagagggctgcagcacagcaaaggagatcctttcttaacgctcatcaccgcagtggtgcacaggtctttccagagtcacccgagtccgagagcgaccatgaacatgaagaggctgatctcgaactgtctcttccagaatgcctggaatatgaggaggagtttgactacgaaaccgaatccgaaactgagtctgaaatcgagtcagaaactgactttgaaactgagccagaaactgcacccactaccgaacctgaaactgaacccgaagacgacagaggccccgttgtccctaaacactccaccttcggtcagtccttgacccaaaggctgcacgctctgaagctgaggtcccctgatgcttctccttcaagagctcctccctcaactcaagagccacagtccccccgagagggagaggagctcaagcccgaagacaaagacccccgtgatcccgaagaatcaaaagagcctaaagaagagaagcagcggcggagatgtaagcctaaaaaacctacccggcgtgacgcctcccccgagtccccctcaaagaagggaccaattccaatacgccgtcattag

SEQ ID NO: 192300 - DNA, 342 bp, Artificial Sequence
  derived and/or modified sequence
tgaaccaccgagcccgagaccgagcccgaggacgaccggggccccgtggtgccaaaacattccacctttggacagagtctgacacagcgcttacatgctcttaaacttcgctctcctgacgcttctccgagtagagcccctccaagcacccaggagccccagagcccccgcgagggtgaggaactgaagcctgaagacaaggacccccgggacccggaggagtcaaaggaaccgaaggaggaaaaacagagacggcggtgcaaacccaaaaaacccacacggagggatgccagcccagagtcaccaagcaagaaggggcctatccctatccgccgccattag

SEQ ID NO: 192301 - DNA, 501 bp, Artificial Sequence
  derived and/or modified sequence
cccgagagcgagagcgaccacgagcacgaggaggccgacctggagctctccctgcctgagtgcttagaatacgaggaggagttcgattacgagactgaatctgaaactgagagcgagattgaaagtgagactgattttgaaacagaacccgagaccgcccccaccaccgagccagagacggaacctgaagacgatagaggccccgtagttccaaagcactctaccttcggccaatcccttactcagcgcctgcatgccttgaagttaagatcgcccgacgcatctcctagccgcgccccaccttcaacacaggagccccagagtccccgggaaggcgaggaactgaagcccgaagataaagatccacgggatcccgaggagtctaaggaacccaaggaagagaaacagagaaggaggtgcaagccgaagaagcccacacgccgcgacgcgtcccctgaatcaccctccaagaagggacccatacccataagaagacattag

SEQ ID NO: 192302 - DNA, 738 bp, Artificial Sequence
  derived and/or modified sequence
atggatcgcaggagtcgagcccagcagtggaggcgagccaggcacaattataacgacctgtgcccaccgatagggcgacgagctgcaaccgcattgctgtggctgtcctgctccatcgcactcctgagagctctggctacctctaacgcgcgtgcacaacaacgcgcagccgcacaacagaggcgatccttcctgaacgcacaccatcgctctggtgctcaggttttcccagaatccccagagtccgagagcgaccatgagcacgaagaagcagatctggagctgagtcttccggaatgtttggagtacgaagaggagtttgactacgagactgagtccgagacggagtcggagatcgaatctgaaaccgatttcgagacggagcccgagacagcccctactactgaacccgaaactgagcccgaggacgaccgagggccagtcgtccctaagcactccacgttcggccagtctctaactcaacggctccatgcactcaagctgagatcccccgacgccagcccaagcagagctcctccctcaacccaggaaccacagagccccagggagggcgaggagctcaaacctgaggataaggaccccagggaccctgaggaaagtaaggagcctaaggaagagaagcaaaggaggcgttgcaaacccaaaaagccgacaagaagagacgctagcccagagtcaccttcaaaaaaaggtccgatcccaattcgcaggcactag

SEQ ID NO: 192303 - DNA, 738 bp, Artificial Sequence
  derived and/or modified sequence
atggacagacgatccagagcccagcagtggcgcagggcccgacacaactacaacgacctgtgccccccaatcgggagacgcgcagctacagctctcctctggctgtcgtgttcaatagctttactgagagctctggccacaagcaacgcgcgtgctcagcagagagctgctgcccagcagaggcgctcgtttttgaatgcccaccacaggtcaggcgcacaagtgttccccgagtcgccggaaagcgagagcgaccacgagcacgaggaggctgatctggagctatctttgcctgagtgcctcgaatacgaggaggaattcgattatgagacggagtcagaaactgaaagcgaaatcgaatcagaaaccgacttcgagactgaaccggaaacggccccaactacagaacccgaaaccgaacccgaggatgatcggggacctgtcgtgcccaagcactccaccttcggacagagcctgacccagaggctccacgccctgaagttacgctcccccgacgcctccccgagtcgcgcaccaccaagcactcaggaaccgcagagcccgagggaaggcgaggagcttaagcctgaggataaggacccacgcgatccagaagagagcaaggaaccaaaagaggaaaaacaacggcgaagatgcaagcccaaaaaacctaccagaagggatgcctctcccgagtcgccaagcaagaagggaccaatcccaatccggagacattag

SEQ ID NO: 192304 - DNA, 738 bp, Artificial Sequence
  derived and/or modified sequence
atggacaggcgtagcagggcacagcagtggcggcgagctcggcataactacaacgacctttgtcctcccattgggaggagagcagccacagccctcctgtggctctcttgttccattgcccttctcagggcgctggccacaagtaacgctagggctcagcagagggctgcagcccagcaacgcaggtctttccttaacgcccaccaccgctcaggagctcaggtgttcccagaatcccccgagtcggagagcgaccacgagcacgaagaagccgatctggaactgagtctgcctgagtgcctcgagtatgaggaagaattcgactacgaaactgagtctgaaacggaatccgagattgagtccgagactgatttcgagactgaaccagagactgccccaacgaccgagccagagacggagcccgaggacgatcggggacccgtcgtccccaaacacagtacctttgggcagtccctaactcagcgtttgcacgctctgaaactgcggtcccccgatgccagtccctctcgggcacctccttctacccaagaaccacagtctcccagagaaggcgaggaactgaagcctgaggacaaagacccgagggacccggaagaaagcaaggagcccaaggaggaaaagcagaggcgacgttgtaagcccaagaaacctacaaggcgcgacgcctccccagaaagccccagcaaaaaagggcctatcccaatcagacggcactag

SEQ ID NO: 192305 - DNA, 342 bp, Artificial Sequence
  derived and/or modified sequence
tgaacaactgaacctgaaaccgaaccagaggatgatcggggacctgttgtgccaaaacatagcactttcggccagagtctaactcaaaggctgcatgctttgaagctgcgttcccctgacgcaagcccatccagagctccaccttctacgcaggaaccacagtctcccagagagggtgaagagttgaagcctgaagataaagacccacgggacccggaggagtccaaggaaccaaaagaggagaagcaacggcgaaggtgcaagcccaaaaagccaaccaggagagacgcgtcccccgagtcaccatcaaaaaagggacctatcccaatcaggagacattag

SEQ ID NO: 192306 - DNA, 501 bp, Artificial Sequence
  derived and/or modified sequence
cccgaatcagagagcgaccatgagcacgaagaggcagatctggagctatccctgccggagtgtttagagtacgaggaggagtttgattacgaaaccgagtccgaaaccgaatccgagattgaatccgagaccgacttcgagactgagccggagacggcccctaccactgaaccagaaaccgagcctgaagacgatcgtggccctgtcgttcccaagcacagcacttttgggcagtctctgactcagagactacatgcattaaagcttcgttcccctgacgcttctcctagtcgggctcctccatccacccaggagccacaatcaccccgagaaggggaggaactgaagcccgaggataaggaccctcgcgaccctgaggaatcaaaagaaccaaaagaagagaagcagcgtagacgttgcaagcctaagaaaccaacaagaagagacgcctcacctgagagtccttcaaagaagggcccaattcccatccgccgtcactag

SEQ ID NO: 192307 - DNA, 738 bp, Artificial Sequence
  derived and/or modified sequence
atggacagaagaagcagagcccagcagtggagaagagccagacacaactacaacgacctgtgcccccccatcggcagaagagccgccaccgccctgctgtggctgagctgcagcatcgccctgctgagagccctggccaccagcaacgccagagcccagcagagagccgccgcccagcagagaagaagcttcctgaacgcccaccacagaagcggcgcccaggtgttccccgagagccccgagagcgagagcgaccacgagcacgaggaggccgacctggagctgagcctgcccgagtgcctggagtacgaggaggagttcgactacgagaccgagagcgagaccgagagcgagatcgagagcgagaccgacttcgagaccgagcccgagaccgcccccaccaccgagcccgagaccgagcccgaggacgacagaggccccgtggtgcccaagcacagcaccttcggccagagcctgacccagagactgcacgccctgaagctgagaagccccgacgccagccccagcagagccccccccagcacccaggagccccagagccccagagagggcgaggagctgaagcccgaggacaaggaccccagagaccccgaggagagcaaggagcccaaggaggagaagcagagaagaagatgcaagcccaagaagcccaccagaagagacgccagccccgagagccccagcaagaagggccccatccccatcagaagacactag

SEQ ID NO: 192308 - DNA, 342 bp, Artificial Sequence
  derived and/or modified sequence
tgaaccaccgagcccgagaccgagcccgaggacgacagaggccccgtggtgcccaagcacagcaccttcggccagagcctgacccagagactgcacgccctgaagctgagaagccccgacgccagccccagcagagccccccccagcacccaggagccccagagccccagagagggcgaggagctgaagcccgaggacaaggaccccagagaccccgaggagagcaaggagcccaaggaggagaagcagagaagaagatgcaagcccaagaagcccaccagaagagacgccagccccgagagccccagcaagaagggccccatccccatcagaagacactag

SEQ ID NO: 192309 - DNA, 501 bp, Artificial Sequence
  derived and/or modified sequence
cccgagagcgagagcgaccacgagcacgaggaggccgacctggagctgagcctgcccgagtgcctggagtacgaggaggagttcgactacgagaccgagagcgagaccgagagcgagatcgagagcgagaccgacttcgagaccgagcccgagaccgcccccaccaccgagcccgagaccgagcccgaggacgacagaggccccgtggtgcccaagcacagcaccttcggccagagcctgacccagagactgcacgccctgaagctgagaagccccgacgccagccccagcagagccccccccagcacccaggagccccagagccccagagagggcgaggagctgaagcccgaggacaaggaccccagagaccccgaggagagcaaggagcccaaggaggagaagcagagaagaagatgcaagcccaagaagcccaccagaagagacgccagccccgagagccccagcaagaagggccccatccccatcagaagacactag

SEQ ID NO: 192310 - protein, 469 aa, Artificial Sequence
  derived and/or modified sequence
MELISPTVIIILGCLALFLLLQRKNLRRPPCIKGWIPWIGVGFEFGKAPLEFIEKARIKYGPIFTVFAMGNRMTFVTEEEGINVFLKSKKVDFELAVQNIVYRTASIPKNVFLALHEKLYIMLKGKMGTVNLHQFTGQLTEELHEQLENLGTHGTMDLNNLVRHLLYPVTVNMLFNKSLFSTNKKKIKEFHQYFQVYDEDFEYGSQLPECLLRNWSKSKKWFLELFEKNIPDIKACKSAKDNSMTLLQATLDIVETETSKENSPNYGLLLLWASLSNAVPVAFWTLAYVLSHPDIHKAIMEGISSVFGKAGKDKIKVSEDDLENLLLIKWCVLETIRLKAPGVITRKVVKPVEILNYIIPSGDLLMLSPFWLHRNPKYFPEPELFKPERWKKANLEKHSFLDCFMAFGSGKFQCPARWFALLEVQMCIILILYKYDCSLLDPLPKQSYLHLVGVPQPEGQCRIEYKQRI

SEQ ID NO: 192311 - DNA, 1410 bp, Artificial Sequence
  derived and/or modified sequence
atggagctgatctcccccaccgttatcattatcctggggtgcctggcactgttcttgttactccaacgaaaaaacttgcgccggccaccctgcatcaagggctggataccctggatcggggttggttttgagtttgggaaagcccccttggagttcatcgagaaggcccggataaagtatgggccaatattcacagtgttcgctatggggaaccggatgaccttcgtgaccgaagaagaaggtattaatgtgttccttaaaagcaagaaggtggatttcgagctggctgttcaaaatattgtctacaggaccgcttctatccctaaaaacgtcttcctggcactccatgagaagctctacatcatgttgaagggcaaaatgggcacggtcaacctccatcaattcaccggacagttaacggaggaattacacgagcagctagagaacctgggcactcatgggactatggatctcaataacctggtgcggcatctcctgtacccagtaaccgtcaatatgctcttcaacaaatctcttttctccactaacaagaagaagatcaaggagtttcatcaatactttcaggtttacgacgaggattttgagtatggcagccagctacccgaatgcctgctgcgtaattggtctaagtccaaaaagtggtttcttgagctgttcgaaaagaacattcctgacattaaagcttgcaagagtgccaaggataacagcatgacactcctacaggctacccttgatatcgtcgagacagaaaccagcaaagagaactcccccaattacggcctactgcttctgtgggcatctctgtccaacgccgtgcctgtggccttctggactcttgcatacgtgctgtctcatccagatattcataaagccataatggaaggcatttcctccgttttcgggaaagccggcaaagataaaatcaaggtgtccgaggatgacttggagaatctcctccttatcaaatggtgcgtgctcgaaactatcagactgaaagctccgggagttattacacgtaaggtcgtcaaacctgtcgagatcttgaattacataatacctagcggagacctcctgatgctttcacccttttggctacatcgtaaccccaaatacttccctgaacctgagttatttaagccagagaggtggaagaaggctaatcttgaaaagcattcctttctggactgctttatggcatttggaagtggaaagttccagtgtcccgcgcgctggtttgccctgctggaggtccagatgtgcatcatattaattctgtacaagtacgactgttcactgctggatccgctccctaaacagagctacctacacttagtcggcgtgcctcagcccgaaggacagtgcagaatagaatataaacagcgcatttag

SEQ ID NO: 192312 - DNA, 1410 bp, Artificial Sequence
  derived and/or modified sequence
atggagctgatcagccccaccgtcatcatcatcctgggctgcctggccctcttcctgctgctgcagaggaagaacctgcggcggcccccctgcatcaagggctggatcccctggattggagtgggctttgaatttgggaaggcccccctggagttcatcgagaaggcccgcatcaagtatggccccatcttcaccgtgtttgccatgggcaacaggatgacctttgtgacagaggaggagggcatcaacgtgttcctgaagagcaagaaggtggactttgagctggccgtgcagaacatcgtgtacagaacagccagcatccccaagaatgtgttcctggccctgcacgagaagctgtacatcatgctgaagggcaagatgggcaccgtgaacctgcaccagttcaccggccagctgacagaggagctgcacgagcagctggagaacctgggcacccacggcaccatggacctgaacaacctggtgcgccacctgctgtaccctgtgacagtgaacatgctgttcaacaagagcctcttcagcaccaacaagaagaagatcaaggagttccaccagtacttccaggtgtatgatgaagattttgaatatggcagccagctgcctgaatgtctgctgaggaactggagcaagagcaagaagtggttcctggagctgtttgagaagaacatcccagacatcaaggcctgcaagagcgccaaggacaacagcatgaccctgctgcaggccaccctggacatcgtggagacagagaccagcaaagaaaacagccccaactacggcctgctgctgctgtgggccagcctgagcaatgctgtgcctgtggccttctggaccctggcctacgtgctgagccacccagacatccacaaggccatcatggagggcatcagctctgtgtttgggaaggccggcaaggacaagatcaaggtgtctgaagatgacctggagaacctgctgctgatcaagtggtgtgtgctggagaccatccggctgaaggcccctggggtcatcaccaggaaggtggtgaagcctgtggagatcctgaactacatcatccccagcggggacctgctgatgctgagccccttctggctgcacaggaaccccaagtacttccctgagcctgagctgttcaagccagagcgctggaagaaggccaacctggagaagcacagcttcctggactgcttcatggcctttggaagtggcaagttccagtgcccagcccgctggtttgccctgctggaggtgcagatgtgcatcatcctgatcctgtacaagtatgactgcagcctgctggaccccctgcccaagcagagctacctgcacctggtgggcgtgccccagcctgagggccagtgcagaattgagtacaagcagaggatctag

SEQ ID NO: 192313 - DNA, 1410 bp, Artificial Sequence
  derived and/or modified sequence
atggagctgatcagccccaccgtgatcatcatcctgggctgcctggcactattccttctgttgcagagaaaaaatctgcggcgtcccccatgtatcaagggctggattccctggatcggcgtgggtttcgaattcgggaaggcccccctggaattcatcgaaaaggcacgaatcaaatacggtccaatcttcaccgtgtttgccatgggcaatagaatgacattcgtgacagaggaagagggaattaacgtgttcctgaagagcaagaaggtggactttgagctcgctgttcagaatattgtctatcggactgccagcattccaaaaaatgttttcctggccctccatgaaaagctgtacattatgctcaaaggcaagatggggaccgtcaatctgcatcagttcaccggacagttgactgaggaacttcatgagcaactggagaatctgggcacacatggcacaatggatttgaataatctcgtcaggcacctcttgtatccagttaccgtgaacatgttgttcaacaaatccctgtttagcacaaacaaaaagaaaatcaaagagttccaccagtactttcaggtttacgacgaggattttgaatatgggtcccagctccccgagtgtctgttgcgcaactggtcaaagtctaagaagtggttccttgaactgtttgaaaagaatattcctgatattaaagcatgcaaaagcgctaaggataactctatgaccttgttacaggccactctggatattgtggagaccgaaacgtccaaggagaacagcccaaactacggcctcctgctcctgtgggcttctctttccaacgccgtcccagtggccttctggactctggcctacgtgctgtcccatccggacattcacaaggccatcatggaaggaatatcatccgtgttcggcaaggcaggtaaggataagattaaggtgtccgaggacgacctggagaatctactgctgattaagtggtgcgtgttggagacaattcgcctgaaagcaccgggggtgatcactcgtaaggtcgtcaagcctgtggaaattttaaactatataattcccagcggggatctgctaatgctgtcccccttctggcttcatcgcaaccctaagtactttccggagccagaactgtttaaacctgaaaggtggaagaaggccaatctggaaaagcacagcttcctcgactgtttcatggcttttgggagtgggaagttccaatgtcctgccagatggtttgctctgctcgaggtgcagatgtgtatcatcctaatcttgtacaaatacgattgttctctgctggaccctctgcctaagcagagttacttgcatctggttggggtcccacagcccgaaggccaatgtcgaatcgaatataagcagagaatttag

SEQ ID NO: 192314 - DNA, 1410 bp, Artificial Sequence
  derived and/or modified sequence
atggaacttatctccccaaccgttattatcatcttgggctgcctcgccctgtttctgcttctccagcgaaagaacctccgtcgccctccgtgcataaagggttggattccttggattggcgttggattcgaattcggcaaagcccctttggagttcattgaaaaggccagaataaagtacggccctatctttacagtatttgcaatgggaaacaggatgaccttcgtgacagaagaagaaggcattaacgtttttttaaagagtaagaaggttgatttcgagctggcagtgcagaatattgtgtaccggaccgcaagcattccaaaaaatgtgttcctggccctgcatgagaaattgtatatcatgctaaagggcaaaatggggaccgtgaatctgcaccagttcaccggccagctgactgaggagctacatgaacagctcgaaaatctgggcacccatgggacaatggacctcaataatctcgtgaggcacctgctgtatcctgtcacagtgaatatgctgttcaataagtcactgttcagcaccaacaaaaagaaaatcaaggaattccatcaatacttccaggtgtacgatgaggattttgagtatggcagccagcttccggaatgtcttctgcggaactggagcaaatccaagaagtggttcctggaacttttcgagaagaacattccagatatcaaggcgtgtaagagcgcaaaagataattctatgaccttgctgcaagccaccctggacattgtggaaacagagacttcaaaagagaatagccctaactacggtctgttgctgctctgggcatccctctccaatgcagtgccggtcgcgttttggacgcttgcgtatgttcttagtcatcctgacattcataaagctatcatggagggtatctcttctgtgttcggaaaggcgggtaaagataagatcaaggtgagtgaggacgatctagaaaatctgcttctgatcaaatggtgcgtgcttgagactatcaggctaaaagctcccggagtgatcactaggaaggtcgtgaagccagtagagatcttgaattacattatcccatcgggagatttacttatgctttcccctttctggttgcatcggaatcccaaatacttccctgagcccgaactgttcaagccggagagatggaagaaggctaacctcgaaaagcatagcttcctcgactgctttatggcttttgggtcaggaaaattccagtgcccggcacggtggttcgctctgctggaggttcagatgtgtatcatcctgatactgtataagtatgactgtagtctgctggatcccctccccaagcagtcctatttgcatctagttggggtgccccagccagaaggacagtgcaggatcgaatacaagcagcgcatttag

SEQ ID NO: 192315 - DNA, 2176 bp, Artificial Sequence
  derived and/or modified sequence
gaagtggaggtgggagggagcgacaatggaaaaatcacctgaaaactgggacagaggaaggaagctacagttacgaaggagagctgcaaaagttgcagcagaaaggttgggagtcccgacaggttccgtagcccacagaaaagaagcaagggacggcaggactgtttcacacttttctgcttctggaaggtgctggacaaaaacatggaactaatttccccaacagtgattataatcctgggttgccttgctctgttcttactccttcagcggaagaatttgcgtagacccccgtgcatcaagggctggattccttggattggagttggatttgagtttgggaaagcccctctagaatttatagagaaagcaagaatcaagtatggaccaatatttacagtctttgctatgggaaaccgaatgacctttgttactgaagaagaaggaattaatgtgtttctaaaatccaaaaaagtagattttgaactagcagtgcaaaatatcgtttatcgtacagcatcaattccaaagaatgtctttttagcactgcatgaaaaactctatattatgttgaaagggaaaatggggactgtcaatctccatcagtttactgggcaactgactgaagaattacatgaacaactggagaatttaggcactcatgggacaatggacctgaacaacttagtaagacatctcctttatccagtcacagtgaatatgctctttaataaaagtttgttttccacaaacaagaaaaaaatcaaggagttccatcagtattttcaagtttatgatgaagattttgagtatgggtcccagttgccagagtgtcttctaagaaactggtcaaaatccaaaaagtggttcctggaactgtttgagaaaaacattccagatataaaagcatgtaaatctgcaaaagataattccatgacattattgcaagctacgctggatattgtagagacggaaacaagtaaggaaaactcacccaattatgggctcttactgctttgggcttctctgtctaatgctgttcctgttgcattttggacacttgcatacgtcctttctcatcctgatatccacaaggccattatggaaggcatatcttctgtgtttggcaaagcaggcaaagataagattaaagtgtctgaggatgacctggagaatctccttctaattaaatggtgtgttttggaaaccattcgtttaaaagctcctggtgtcattactagaaaagtggtgaagcctgtggaaattttgaattacatcattccttctggtgacttgttgatgttgtctccattttggctgcatagaaatccaaagtattttcctgagcctgaattgttcaaacctgaacgttggaaaaaggcaaatttagagaagcactctttcttggactgcttcatggcatttggaagcgggaagttccagtgtcctgcaaggtggtttgctctgttagaggttcagatgtgtattattttaatactttataaatatgactgtagtcttctggacccattacccaaacagagttatctccatttggtgggtgtcccccagccggaagggcaatgccgaattgaatataaacaaagaatatgacatctgttgggcctcacaaggaccagggccttctggaggagtggcactaccccacctggcagcacctagacctgagctctacaaaaacacactgcttcactttgttttaggacttagttcaagaacacattcaaatggtgcatgtgtttggtatcttcaacagtagaccaagaatctaacatcactctcagtaatatagagaccggaatacatggtttataggaaatgatcaaatgatccaaaaaaactccacattttttaagaagttggaatttgatttcatgcataactgtattaaaacattaaatagaaataatgtcatttgaatgaaaatcttatcacattaaattcactgtgaaggcagcatacttaaatttttattttgaaaagtctaaaaggcttagatttttaaaatttaataattatttctacaaattttctatttttcttgaggtgattctcaactagcaattggaactcctaggctctattaacataattctttattgtaaacgtatctaatgctaaaagtaataaaatggtagttttctgagacctgtga

SEQ ID NO: 192316 - DNA, 1410 bp, Artificial Sequence
  derived and/or modified sequence
atggagctgatcagccccaccgtgatcatcatcctgggctgcctggccctgttcctgctgctgcagagaaagaacctgagaagacccccctgcatcaagggctggatcccctggatcggcgtgggcttcgagttcggcaaggcccccctggagttcatcgagaaggccagaatcaagtacggccccatcttcaccgtgttcgccatgggcaacagaatgaccttcgtgaccgaggaggagggcatcaacgtgttcctgaagagcaagaaggtggacttcgagctggccgtgcagaacatcgtgtacagaaccgccagcatccccaagaacgtgttcctggccctgcacgagaagctgtacatcatgctgaagggcaagatgggcaccgtgaacctgcaccagttcaccggccagctgaccgaggagctgcacgagcagctggagaacctgggcacccacggcaccatggacctgaacaacctggtgagacacctgctgtaccccgtgaccgtgaacatgctgttcaacaagagcctgttcagcaccaacaagaagaagatcaaggagttccaccagtacttccaggtgtacgacgaggacttcgagtacggcagccagctgcccgagtgcctgctgagaaactggagcaagagcaagaagtggttcctggagctgttcgagaagaacatccccgacatcaaggcctgcaagagcgccaaggacaacagcatgaccctgctgcaggccaccctggacatcgtggagaccgagaccagcaaggagaacagccccaactacggcctgctgctgctgtgggccagcctgagcaacgccgtgcccgtggccttctggaccctggcctacgtgctgagccaccccgacatccacaaggccatcatggagggcatcagcagcgtgttcggcaaggccggcaaggacaagatcaaggtgagcgaggacgacctggagaacctgctgctgatcaagtggtgcgtgctggagaccatcagactgaaggcccccggcgtgatcaccagaaaggtggtgaagcccgtggagatcctgaactacatcatccccagcggcgacctgctgatgctgagccccttctggctgcacagaaaccccaagtacttccccgagcccgagctgttcaagcccgagagatggaagaaggccaacctggagaagcacagcttcctggactgcttcatggccttcggcagcggcaagttccagtgccccgccagatggttcgccctgctggaggtgcagatgtgcatcatcctgatcctgtacaagtacgactgcagcctgctggaccccctgcccaagcagagctacctgcacctggtgggcgtgccccagcccgagggccagtgcagaatcgagtacaagcagagaatctag

SEQ ID NO: 192317 - protein, 99 aa, Artificial Sequence
  derived and/or modified sequence
MCVGEKRRAIIPSHLAYGKRGFPPSVPADAVVQYDVELIALIRANYWLKLVKGILPLVGMAMVPALLGLIGYHLYRKANRPKVSKKKLKEEKRNKSKKK

SEQ ID NO: 192318 - protein, 201 aa, Artificial Sequence
  derived and/or modified sequence
MTLRPSLLPLHLLLLLLLSAAVCRAEAGLETESPVRTLQVETLVEPPEPCAEPAAFGDTLHIHYTGSLVDGRIIDTSLTRDPLVIELGQKQVIPGLEQSLLDMCVGEKRRAIIPSHLAYGKRGFPPSVPADAVVQYDVELIALIRANYWLKLVKGILPLVGMAMVPALLGLIGYHLYRKANRPKVSKKKLKEEKRNKSKKK

SEQ ID NO: 192319 - DNA, 606 bp, Artificial Sequence
  derived and/or modified sequence
atgaccctgagacccagcctgctgcccctgcacctgctgctgctgctgctgctgagcgccgccgtgtgcagagccgaggccggcctggagaccgagagccccgtgagaaccctgcaggtggagaccctggtggagccccccgagccctgcgccgagcccgccgccttcggcgacaccctgcacatccactacaccggcagcctggtggacggcagaatcatcgacaccagcctgaccagagaccccctggtgatcgagctgggccagaagcaggtgatccccggcctggagcagagcctgctggacatgtgcgtgggcgagaagagaagagccatcatccccagccacctggcctacggcaagagaggcttcccccccagcgtgcccgccgacgccgtggtgcagtacgacgtggagctgatcgccctgatcagagccaactactggctgaagctggtgaagggcatcctgcccctggtgggcatggccatggtgcccgccctgctgggcctgatcggctaccacctgtacagaaaggccaacagacccaaggtgagcaagaagaagctgaaggaggagaagagaaacaagagcaagaagaagtag

SEQ ID NO: 192320 - DNA, 630 bp, Artificial Sequence
  derived and/or modified sequence
cgtggcaagcggttcgggagaagaaactcggggctctggggtcgtcgagcacgtggcgaggggagagacgttgctcttccgtgcctcttttccctccttgcttttctgccagttcctacctggcacggagaagtgcagggtggagagatctccgagaagcgccagccttctggggcttcctgttccttacagcgggaagcttggtagatggacgtattattgacacctccctgaccagagaccctctggttatagaacttggccaaaagcaggtgattccaggtctggagcagagtcttctcgacatgtgtgtgggagagaagcgaagggcaatcattccttctcacttggcctatggaaaacggggatttccaccatctgtcccagcggatgcagtggtgcagtatgacgtggagctgattgcactaatccgagccaactactggctaaagctggtgaagggcattttgcctctggtagggatggccatggtgccagccctcctgggcctcattgggtatcacctatacagaaaggccaatagacccaaagtctccaaaaagaagctcaaggaagagaaacgaaacaagagcaaaaagaaataataaataataaattttaaaaaactta

SEQ ID NO: 192321 - DNA, 1030 bp, Artificial Sequence
  derived and/or modified sequence
ggcacatcctgagcaccctgtgccttatctgtaaaatggaaacaatcatgccgacctttcagggtggttttgaggattagagactagctcctgacacacagtaggtaatcgtaaatgggtgctattgtttggcccgacccacgttataggacagaacgtctaacggatgcgtcagaacctgcgccctccggatcttggagggtacagagggcgcccctcggcctcctccctttcggaggtggggacaaggtggaggaagggctgcaggaggaggagctctagcatcgcgacccgccccgtcccgtccagtctggcctgggcgccgcgggaacgctgtcctggctgccgccacccgaacagcctgtcctggtgccccggctccctgccccgcgcccagtcatgaccctgcgcccctcactcctcccgctccatctgctgctgctgctgctgctcagtgcggcggtgtgccgggctgaggctgggctcgaaaccgaaagtcccgtccggaccctccaagtggagaccctggtggagcccccagaaccatgtgccgagcccgctgcttttggagacacgcttcacatacactacacgggaagcttggtagatggacgtattattgacacctccctgaccagagaccctctggttatagaacttggccaaaagcaggtgattccaggtctggagcagagtcttctcgacatgtgtgtgggagagaagcgaagggcaatcattccttctcacttggcctatggaaaacggggatttccaccatctgtcccagcggatgcagtggtgcagtatgacgtggagctgattgcactaatccgagccaactactggctaaagctggtgaagggcattttgcctctggtagggatggccatggtgccagccctcctgggcctcattgggtatcacctatacagaaaggccaatagacccaaagtctccaaaaagaagctcaaggaagagaaacgaaacaagagcaaaaagaaataataaataataaattttaaaaaactta

SEQ ID NO: 192322 - DNA, 606 bp, Artificial Sequence
  derived and/or modified sequence
atgaccctgagaccgagcctgcttccactgcatttgctgctgcttctgctgctgtctgcagccgtttgtagggccgaggccggcttggagaccgaaagcccagtgaggactctgcaggttgagacccttgtggagcctcctgaaccttgcgccgaacctgctgcttttggtgacacactgcacattcactacactggctctctggtggatggcagaatcatcgacacatctctgaccagagaccccctggtcattgaactgggccagaaacaggtgatccccggcctggagcaatcattgctcgacatgtgcgtcggcgagaagcggagagcaattattccatctcacctagcatacggcaagaggggctttcctccgagcgtccctgctgacgcagtggtccaatatgatgtggaactaatcgcactgatacgcgccaactattggctgaagcttgtcaaggggatcttgcctctggtgggcatggccatggttccagccttactggggctgatcgggtatcatctataccgcaaagccaacaggcctaaggtcagtaaaaagaagctgaaggaagagaaacgcaataaatcaaaaaagaaatag

SEQ ID NO: 192323 - DNA, 606 bp, Artificial Sequence
  derived and/or modified sequence
atgaccctgcggcccagcctgctgcccctgcacctgctgctgctgctgctgctgtctgctgctgtgtgcagagctgaggccggcctggagacagagagccctgtgaggaccctgcaggtggagaccctggtggagcccccagagccctgtgccgagcctgctgccttcggggacaccctgcacatccactacacaggcagcctggtggatggccgcatcatcgacaccagcctgacccgggaccccctggtgattgagctgggccagaagcaggtgattcctggcctggagcagagcctgctggacatgtgtgtgggggagaagagaagagccatcatccccagccacctggcctacggcaagaggggcttccccccatctgtgcctgcagatgctgtggtgcagtatgatgtggagctgattgccctgatccgggccaactactggctgaagctggtgaagggcatcctgcccctggtgggcatggccatggtgcctgccctgctgggcctcatcggctaccacctgtacaggaaggccaaccggcccaaggtgtccaagaagaagctgaaggaggagaagaggaacaagagcaagaagaagtag

SEQ ID NO: 192324 - DNA, 606 bp, Artificial Sequence
  derived and/or modified sequence
atgaccctgcggcccagcctgctgcccctgcacctgctgctgctgctcctcctgagcgcagctgtttgcagggccgaggccggtctggagaccgaatctccagtgaggactttgcaggttgagactctggtagaacctcctgagccatgtgccgagcccgcagccttcggcgatacgctgcatatccactacacgggttcactcgtcgatggacgcatcatcgacacatctctaactcgcgatccactggttatcgagctcggccagaaacaggtgataccaggcctggagcaaagcctgctggatatgtgcgtaggggaaaagcgaagggctattatccctagccatctcgcctatggtaagagaggctttcctcctagcgttcccgctgatgccgtggtgcagtacgacgtggaattgatagccctcatcagagcgaattattggcttaaactcgtgaaagggattttaccactggttgggatggccatggttcctgccctgctcggcctgattggatatcacctgtaccggaaggcaaacagacccaaggtgtcaaaaaaaaaactcaaggaggaaaagcgaaataagagcaaaaagaagtag

SEQ ID NO: 192325 - DNA, 606 bp, Artificial Sequence
  derived and/or modified sequence
atgaccctgagaccgagtctcttaccactgcatttattactgctattgctccttagtgcagcagtttgccgtgccgaggccggtctggagacagaaagccccgtgagaaccttacaggttgagactctggtcgaaccacctgagccatgcgccgaacccgctgcatttggagacaccctccacatccattataccggtagtctcgtggacggccgaatcatcgatacgagcctgacaagggaccctctggttattgagctgggtcagaagcaagttattcccggtctcgagcagagcctgctggacatgtgcgttggtgagaaaagaagagctatcattccaagccatctagcctatggaaaacggggatttcccccaagtgtgccggctgacgcagtcgtccaatatgatgtggagctgattgcactgattcgcgcaaattactggttgaagcttgttaaggggatactgcctctggtcggcatggcaatggtgccggcactgttagggctcattggctatcatctgtatcggaaggccaatcgcccaaaagtctccaaaaagaaattaaaagaagaaaagagaaataaatctaaaaagaaatag

SEQ ID NO: 192326 - protein, 264 aa, Artificial Sequence
  derived and/or modified sequence
MLSHNTMMKQRKQQATAIMKEVHGNDVDGMDLGKKVSIPRDIMLEELSHLSNRGARLFKMRQRRSDKYTFENFQYQSRAQINHSIAMQNGKVDGSNLEGGSQQAPLTPPNTPDPRSPPNPDNIAPGYSGPLKEIPPEKFNTTAVPKYYQSPWEQAISNDPELLEALYPKLFKPEGKAELPDYRSFNRVATPFGGFEKASRMVKFKVPDFELLLLTDPRFMSFVNPLSGRRSFNRTPKGWISENIPIVITTEPTDDTTVPESEDL

SEQ ID NO: 192327 - DNA, 795 bp, Artificial Sequence
  derived and/or modified sequence
atgctttctcacaatacgatgatgaagcagcgcaagcagcaggcgacagccataatgaaggaagtgcacggcaatgacgtggacggcatggatctggggaagaaggtgtcaataccccgcgacataatgctggaagaactaagccacctgtctaatcgcggggctaggctgttcaagatgcgccagagacgtagtgataaatataccttcgaaaattttcagtatcaatcccgcgcacagatcaatcactctattgctatgcaaaacggaaaggtagatggaagcaatcttgaggggggttcccagcaagccccactgacccccccaaatacaccagatccacgatcccctcccaaccccgacaacatcgcaccagggtatagcggccccctaaaggaaattccacctgagaagttcaacacgacagcagttcctaaatactatcagtccccatgggagcaggccataagcaacgaccccgaactgctggaagccctgtacccaaagctgtttaagccagagggcaaggccgaattgcccgattacaggagctttaatagagtagccactcctttcgggggctttgagaaagcaagcaggatggtgaagttcaaagttcccgacttcgagcttttactgctgaccgaccctcggtttatgagctttgttaacccactcagcggccgaaggtcttttaaccggaccccaaagggctggatctcagagaatatccccattgtcatcaccactgagccaacagacgataccaccgttcccgaaagcgaggacctttag

SEQ ID NO: 192328 - DNA, 795 bp, Artificial Sequence
  derived and/or modified sequence
atgctgagccacaacaccatgatgaagcagaggaagcagcaggccacagccatcatgaaggaggtgcatggaaatgatgtggatggcatggacctgggcaagaaggtgtccatcccccgggacatcatgctggaggagctgagccacctgagcaacagaggagcccggctcttcaagatgaggcagaggagaagtgacaagtacacctttgagaacttccagtaccagagccgggcccagatcaaccacagcatcgccatgcagaatggcaaggtggatggcagcaacctggagggcggcagccagcaggcccccctgaccccacccaacaccccagaccccaggagcccccccaacccagacaacatcgcccctggctacagcggccccctgaaggagatccccccagagaagttcaacaccacagctgtgcccaagtactaccagagcccctgggagcaggccatcagcaatgaccctgagctgctggaggccctgtaccccaagctgttcaagccagagggcaaggccgagctgcctgactaccgctccttcaacagagtggccaccccatttggaggctttgagaaggccagcaggatggtgaagttcaaggtgcctgactttgagctgctgctgctgacagacccccgcttcatgagctttgtgaaccccctgtctggaagaagaagcttcaacagaacacccaagggctggatcagcgagaacatccccatcgtcatcaccacagagcccacagatgacaccaccgtgcctgagagcgaggacctgtag

SEQ ID NO: 192329 - DNA, 2597 bp, Artificial Sequence
  derived and/or modified sequence
atatagccagttgatgtcagctgaatgccagtctcttcagaaaagctcagtccccagtttgagtcagagtagggaccatgctgtcccaggttcaaggataaaaaccatcaggcccaagtgccatccatagtccatctccagagtcttcctccacaaactgggattcatccccgctgaaaaagcacaatctaacagcaagggaacaaaaaaaccatgctatcacataatactatgatgaagcagagaaaacagcaagcaacagccatcatgaaggaagtccatggaaatgatgttgatggcatggacctgggcaaaaaggtcagcatccccagagacatcatgttggaagaattatcccatctcagtaaccgtggtgccaggctatttaagatgcgtcaaagaagatctgacaaatacacatttgaaaatttccagtatcaatctagagcacaaataaatcacagtattgctatgcagaatgggaaagtggatggaagtaacttggaaggtggttcgcagcaagcccccttgactcctcccaacaccccagatccacgaagccctccaaatccagacaacattgctccaggatattctggaccactgaaggaaattcctcctgaaaaattcaacaccacagctgtccctaagtactatcaatctccctgggaacaagccattagcaatgatccggagcttttagaggctttatatcctaaacttttcaagcctgaaggaaaggcagaactgcctgattacaggagctttaacagggttgccacaccatttggaggttttgaaaaagcatcaagaatggttaaatttaaagttccagattttgagctactattgctaacagatcccaggtttatgtcctttgtcaatcccctttctggcagacggtcctttaataggactcctaagggatggatatctgagaatattcctatagtgataacaaccgaacctacagatgataccactgtaccagaatcagaagacctatgaaaagaaagttgtatgtgccacataaaactctgaatataaaagttgctgttctactattttaactactggcaaagccacttgcatttttcattagtagcaacaatagcaatttagtgattttccttttctgacattcaatttcaatctcagatcaaatactaataaacaattagaaatcttactttaaaaaacttataactcacttgtcttcattcataattttgttttcacctggtttaaagaatccagatattttactgcaaaagttcagatggaaaagtaattgacagtttcacctttgtctcattttatatgatttattacagtgtaagtttttcaagtggaatctagaatcaaaatacagggagagatatgaagacctattcagagtttcatctggggatgaaagctatggaagatgatgtacaaatgttattgatggagaaaatggttgggtgtgtcctttctggtgaccatgagaaaataatatgtcttgatgaagtcttttcattagtcactcttagaattctaaagtgctttgcacttttcaatatgttttgaatcattaggtaatttattctggatgatattctccaaaattcaattcagttattatattcatttagcattaagtcaaggagactgagaatgactcaagggacgtcatagtaccatagttttaaggaccaaggtgtgcccagaattcaagtttcacaaatcccaatgctgtgcattgattatgttcaactttatgtgtgcattcttagaagagtaagaacaaataaagtacaccgtaatatacatataaatacattcatgtttgtgagagaaggaaagagtaagtaatttgaattggcagctttctttgctaaatctttaaattctgttaagatcctcaagtaactggggagtacatgctttaggacacaaacaaaaacaaagggcatgaaagtatctgaaagcaatgtagcacatatctatcgtaatatatgtaatatattgacataaaagacacaaactaatataaagttatagttatatcttaaaatataattgaagaagcatatgacatataacttatagaaatcagtatcaattcctcccatttcaattcagttaagacttctgtgatagatgtttatagcagagaagaaatgtctcatcaatagaaaactatcagataaagtttaggagataggaagaaggactgtgtgtagtaatgaaaataccaagttgcaacattacatgtttacaaaaaaaaatctgtgtttgtagtgtggaagttggtgactgttttaatcatcatctagacttgttaagtagaaaaattttaaaaatttgcttatgaaaatataacccccagaaagtaacaatgacaaagtattatatttatatatattattgtagagaatttgtatatttttaaagatgtcttaagatatcttaattttatttataagttttggtgtttacctgttttaaaatgataatgttggcatctgtgataaactatcaatgaggctcccatcatgccattttttgttcattttaatctttaaaaaataaaaattaggcatattaattatgca

SEQ ID NO: 192330 - DNA, 795 bp, Artificial Sequence
  derived and/or modified sequence
atgctgagccacaacaccatgatgaagcagcggaagcagcaggccaccgccattatgaaagaggttcatggtaacgacgtggatggcatggatttgggtaaaaaagtgtcaattccacgcgatatcatgctcgaagagttgtcgcacttatccaacaggggggctagactgttcaagatgcggcaacgaagatctgacaaatacacattcgaaaactttcaatatcagtcccgcgctcagattaaccacagtatagccatgcagaatggaaaggtggacggctctaacctggagggcggttctcagcaggccccgctcactccacccaatacgcccgatccgagatctccccctaatcctgacaacatcgcgcctggatacagcggcccccttaaggagatcccccctgagaagtttaataccacagctgtccctaaatattaccagtccccttgggagcaagcaatctctaacgatcccgaactgctggaagcactgtaccccaagctcttcaagcctgagggcaaagccgagttgccagattaccgctccttcaaccgcgtagcaaccccattcggcggcttcgagaaggccagtaggatggtgaaatttaaagtgcctgattttgagttgcttctgctgaccgaccctcgttttatgtccttcgtcaacccactgtccggacgtcgctccttcaatcgcactccaaaaggctggataagtgagaacatccctatagtaattacgacggaacccactgatgatactaccgtacctgagtccgaggacttatag

SEQ ID NO: 192331 - DNA, 795 bp, Artificial Sequence
  derived and/or modified sequence
atgttgagtcacaacaccatgatgaaacagcgcaagcagcaggccaccgccatcatgaaggaagtacacgggaacgacgtcgacggcatggacctgggaaagaaagtgtcgattccccgtgacatcatgttagaggagctgtcccatctctccaatcgcggagccagattatttaaaatgcgccaaagacgatctgacaagtacacctttgagaactttcagtaccagagcagagcccagattaatcactccatcgccatgcagaatggtaaggtcgacggctcaaatctggagggagggtcccaacaggcccctttgacgccgcctaatacgcctgatcccagatccccacctaatcctgacaatatcgcccctggctatagcggaccactgaaggaaataccccctgagaagttcaatacaaccgccgtgcctaagtactaccaatccccctgggagcaagctatctccaacgatcctgaactgttggaagccctctaccctaaactattcaagcctgagggaaaggctgaattgccagattataggtcttttaaccgcgttgccactccatttggtgggtttgagaaggcgtcacgcatggttaaatttaaggtgcctgatttcgagctgctcctccttacagatccacgctttatgtctttcgttaacccgctttcaggccgtaggagtttcaatcgcacacctaagggatggatcagcgaaaacatccccatcgttatcactaccgagcctaccgatgataccaccgtgcccgaatctgaggatctgtag

SEQ ID NO: 192332 - DNA, 795 bp, Artificial Sequence
  derived and/or modified sequence
atgctgagccacaacaccatgatgaagcagagaaagcagcaggccaccgccatcatgaaggaggtgcacggcaacgacgtggacggcatggacctgggcaagaaggtgagcatccccagagacatcatgctggaggagctgagccacctgagcaacagaggcgccagactgttcaagatgagacagagaagaagcgacaagtacaccttcgagaacttccagtaccagagcagagcccagatcaaccacagcatcgccatgcagaacggcaaggtggacggcagcaacctggagggcggcagccagcaggcccccctgaccccccccaacacccccgaccccagaagcccccccaaccccgacaacatcgcccccggctacagcggccccctgaaggagatcccccccgagaagttcaacaccaccgccgtgcccaagtactaccagagcccctgggagcaggccatcagcaacgaccccgagctgctggaggccctgtaccccaagctgttcaagcccgagggcaaggccgagctgcccgactacagaagcttcaacagagtggccacccccttcggcggcttcgagaaggccagcagaatggtgaagttcaaggtgcccgacttcgagctgctgctgctgaccgaccccagattcatgagcttcgtgaaccccctgagcggcagaagaagcttcaacagaacccccaagggctggatcagcgagaacatccccatcgtgatcaccaccgagcccaccgacgacaccaccgtgcccgagagcgaggacctgtag

SEQ ID NO: 192333 - protein, 362 aa, Artificial Sequence
  derived and/or modified sequence
MGTEATEQVSWGHYSGDEEDAYSAEPLPELCYKADVQAFSRAFQPSVSLTVAALGLAGNGLVLATHLAARRAARSPTSAHLLQLALADLLLALTLPFAAAGALQGWSLGSATCRTISGLYSASFHAGFLFLACISADRYVAIARALPAGPRPSTPGRAHLVSVIVWLLSLLLALPALLFSQDGQREGQRRCRLIFPEGLTQTVKGASAVAQVALGFALPLGVMVACYALLGRTLLAARGPERRRALRVVVALVAAFVVLQLPYSLALLLDTADLLAARERSCPASKRKDVALLVTSGLALARCGLNPVLYAFLGLRFRQDLRRLLRGGSCPSGPQPRRGCPRRPRLSSCSAPTETHSLSWDN

SEQ ID NO: 192334 - DNA, 1089 bp, Artificial Sequence
  derived and/or modified sequence
atggggacagaggctacagaacaggtgtcatggggtcactatagcggggatgaggaggatgcctatagcgctgagccactgccggaactctgttacaaagctgacgtacaggcgttctcacgggccttccagccctctgtctccctgacagtcgcggcgctggggttggctggaaatggattggtgctcgctacccacctagctgctaggagagcagcaaggtcccccacaagcgctcatctactacaactggctctggcagatctcttgctagccttgacactgcctttcgcggccgcgggcgcactacaaggctggtctttgggttccgccacatgccgcaccatttccggtctttacagtgccagctttcatgccggattcttattcctggcctgcatctcagctgacagatacgtggctattgccagggccctgccagcaggcccacggcccagcactcccggccgagcccacttggtctccgttatagtctggttgctgagcctactcctcgccctgccagcgctactgttcagccaagatgggcagcgggaaggacaacgacggtgtcgtctaatcttcccagaagggcttacccaaactgtcaaaggcgccagtgcagttgcacaagttgccctcggctttgccctccctctgggcgtcatggtggcttgttacgccttactgggccgcacacttctcgccgccagagggcctgaacgtagaagggcgctgagagtcgtggtggccctggtcgccgcttttgtggtgctgcagctgccctattctctggccctgctccttgatactgctgatctgctcgcggcccgagaaaggagctgccctgccagcaagagaaaggacgtcgcattactcgtgacaagcgggcttgcactcgctcgctgcggactcaatccagtgctgtatgcttttttggggcttcgatttaggcaggatctgcgtcggctcttgcgaggcggatcctgtccatctggcccccagccccggagaggctgcccaaggagaccaagattgtcctcctgttccgcacctacagaaacccactccctcagctgggataattag

SEQ ID NO: 192335 - DNA, 1089 bp, Artificial Sequence
  derived and/or modified sequence
atgggcacagaggccacagagcaggtgtcctggggccactacagcggagatgaagaagatgcctacagcgctgagcccctgcctgagctgtgctacaaggcagatgtgcaggccttcagccgggccttccagcccagcgtgtccctgactgtggccgccctgggcctggccggaaatggcctggtgctggccacccacctggccgcccggcgggccgcccggagccccaccagcgcccacctgctgcagctggccctggccgacctgctgctggccctgaccctgccctttgctgctgctggggccctgcagggctggagcctgggcagcgccacctgcaggaccatcagcggcctgtacagcgccagcttccacgccggcttcctgttcctggcctgcatctctgctgacagatatgtggccatcgcccgggccctgcctgctggcccccggcccagcaccccaggccgggcccacctggtgtctgtcatcgtgtggctgctgagcctgctgctggccctgcctgccctgctcttcagccaggacggccagcgggagggccagaggcgctgccgcctcatcttccctgagggcctgacccagacagtgaagggggccagcgctgtggcccaggtggccctgggctttgccctgcccctgggcgtgatggtggcctgctacgccctgctgggccgcaccctgctggccgcccggggccctgagaggagaagagccctgcgggtggtggtggccctggtggccgcctttgtggtgctgcagctgccctacagcctggccctgctgctggacacagctgacctgctggccgcccgggagaggagctgcccagccagcaagaggaaggatgtggccctgctggtgaccagcggcctggccctggcccgctgtggcctgaaccctgtgctgtatgccttcctgggcctgcgcttccggcaggacctgcggcggctgctgcggggcggcagctgccccagcggcccccagccccggcggggctgcccccggcggccccggctgagcagctgcagcgcccccacagagacccacagcctgtcctgggacaactag

SEQ ID NO: 192336 - DNA, 1089 bp, Artificial Sequence
  derived and/or modified sequence
atgggcaccgaggccaccgagcaggtgagctggggccactacagcggggatgaggaggacgcttattcagctgaacccctgcctgagctctgttacaaggctgatgtccaggctttttcccgcgcttttcagcccagcgtctccctcactgtcgccgccttgggtttagccggcaatggtcttgtgctcgcgacgcatttagccgcgaggcgggctgccagatcgcccacttcagcccatctgctgcagttagcccttgctgatctgttgctcgcactgacgctccccttcgctgccgccggcgccctgcaggggtggagcttggggtctgcgacctgccgaaccatcagtggactatactccgcctccttccacgctggcttcctgtttctggcatgcatttcggccgaccggtatgtggcaatcgcccgggctctgcccgccgggcccagacccagcactcctggaagagcccatctggtgtcggtaattgtgtggctgctgagcctgctcctggccctgccagctctgttgttcagtcaggacggacagcgggagggacagagacgatgtcgcctgatcttcccagaggggttaacgcagacagttaaaggcgcgagcgcggtggctcaggtagccctcggttttgcacttccgctgggcgttatggtagcctgttacgcactcctcggacgcacacttctagcggcccggggtcccgaaagacggagggctctgagagttgtggtagcattagtggccgcattcgtcgtgctgcaactgccctactctttggccctattgctggataccgctgacctgttggctgctcgagagagaagctgtccagcctcaaagcgcaaggacgttgcgctcctggtgactagtggccttgctctggctaggtgtggcctcaatcctgtcttatatgcattcctaggcctgcgcttccgtcaggaccttagacgcttactgagagggggcagctgtccgtctgggcctcaacctaggcgcggctgtccccggcgaccaaggctgagcagttgctctgctcccactgagacccacagcttatcttgggacaactag

SEQ ID NO: 192337 - DNA, 1089 bp, Artificial Sequence
  derived and/or modified sequence
atgggcactgaggccaccgagcaagtgtcctggggacactactctggggacgaggaagatgcctatagcgccgaacccctgcccgagctgtgctacaaggcagacgtgcaggctttctcacgggcatttcagccctctgtcagcctgacagttgctgctctgggactggccggaaatggtctcgttctggccacccaccttgccgctaggagggcagccaggtcgccaactagcgcgcacctccttcagttagctttggccgatcttttgctcgcgcttactctgcctttcgccgcagcaggcgctctgcagggttggtcactggggtcagctacatgccggaccatctcggggctgtattcggcgagtttccacgctgggttcctttttctagcgtgcatttctgcagatcgatacgtcgcgattgcccgtgctctcccggcaggtccgaggccttccacgcctggtcgtgctcatctagtgtccgtcattgtatggctgctaagtcttctcctggcactgcccgctctcctgttcagtcaagatggccagagggagggacagcgtcggtgtagactgatctttccggagggtctgacccagactgttaagggagcctcagctgtcgcccaggtggccctcggcttcgcactcccactcggggtgatggtggcgtgctacgctttacttggtcgcacactgttagcagcacggggacccgaacggcgtcgtgccctcagagtcgtggttgcgctggtggcggcattcgtcgtacttcagctcccgtattcgctggccctgctcctcgacacagctgacctgcttgcagctcgtgagcgaagctgtccggcttctaaaagaaaagatgtcgctttgttagtcacatcgggactcgctctggcccgatgcggcttgaaccccgtgctctacgcttttcttgggctgagatttaggcaagacctgaggcgactgctccggggagggtcttgccctagcggcccacagcccagacggggatgcccgcgtagacccagattatctagctgttccgcacctaccgagactcacagtctctcctgggacaactag

SEQ ID NO: 192338 - DNA, 1773 bp, Artificial Sequence
  derived and/or modified sequence
agaaacctgtgtagccagagatggggacggaggccacagagcaggtttcctggggccattactctggggatgaagaggacgcatactcggctgagccactgccggagctttgctacaaggccgatgtccaggccttcagccgggccttccaacccagtgtctccctgaccgtggctgcgctgggtctggccggcaatggcctggtcctggccacccacctggcagcccgacgcgcagcgcgctcgcccacctctgcccacctgctccagctggccctggccgacctcttgctggccctgactctgcccttcgcggcagcaggggctcttcagggctggagtctgggaagtgccacctgccgcaccatctctggcctctactcggcctccttccacgccggcttcctcttcctggcctgtatcagcgccgaccgctacgtggccatcgcgcgagcgctcccagccgggccgcggccctccactcccggccgcgcacacttggtctccgtcatcgtgtggctgctgtcactgctcctggcgctgcctgcgctgctcttcagccaggatgggcagcgggaaggccaacgacgctgtcgcctcatcttccccgagggcctcacgcagacggtgaagggggcgagcgccgtggcgcaggtggccctgggcttcgcgctgccgctgggcgtcatggtagcctgctacgcgcttctgggccgcacgctgctggccgccagggggcccgagcgccggcgtgcgctgcgcgtcgtggtggctctggtggcggccttcgtggtgctgcagctgccctacagcctcgccctgctgctggatactgccgatctactggctgcgcgcgagcggagctgccctgccagcaaacgcaaggatgtcgcactgctggtgaccagcggcttggccctcgcccgctgtggcctcaatcccgttctctacgccttcctgggcctgcgcttccgccaggacctgcggaggctgctacggggtgggagctgcccctcagggcctcaaccccgccgcggctgcccccgccggccccgcctttcttcctgctcagctcccacggagacccacagtctctcctgggacaactagggctgcgaatctagaggagggggcaggctgagggtcgtgggaaaggggagtaggtgggggaacactgagaaagaggcagggacctaaagggactacctctgtgccttgccacattaaattgataacatggaaatgagatgcaacccaacaactgttactatttttgagtcaccgacttggaagtgatttgtggcggggcagaaccggtgggttaacaccccgcccccgccccaccccccgccctgccccgcgcttggctctctgagtggaagacgctgagggcctgggtgggggtggggggctgctgagtctgctaaagctctagccactgacaccccctccaccgtcacctggcctcagccaacagaggtgaggtgggaaagctgccaggcaaggaggggcggtggttcctcttgcaatactgtaaggaagagctttctaacaaccagagcgctctccagtaatggctgccttagcaaatactgagttcccgctattggaatgttcagactgtcggggacgctgtgggcctttgcgtggtgtggggggagggggaggggcaggggattcccgtttttggtgggcgtttggatttcataaccactttacaatcccttcctagtgtctgtgatggaaagaaaaaatgaaaaaatgaattgtaaaa

SEQ ID NO: 192339 - DNA, 1089 bp, Artificial Sequence
  derived and/or modified sequence
atgggcaccgaggccaccgagcaggtgagctggggccactacagcggcgacgaggaggacgcctacagcgccgagcccctgcccgagctgtgctacaaggccgacgtgcaggccttcagcagagccttccagcccagcgtgagcctgaccgtggccgccctgggcctggccggcaacggcctggtgctggccacccacctggccgccagaagagccgccagaagccccaccagcgcccacctgctgcagctggccctggccgacctgctgctggccctgaccctgcccttcgccgccgccggcgccctgcagggctggagcctgggcagcgccacctgcagaaccatcagcggcctgtacagcgccagcttccacgccggcttcctgttcctggcctgcatcagcgccgacagatacgtggccatcgccagagccctgcccgccggccccagacccagcacccccggcagagcccacctggtgagcgtgatcgtgtggctgctgagcctgctgctggccctgcccgccctgctgttcagccaggacggccagagagagggccagagaagatgcagactgatcttccccgagggcctgacccagaccgtgaagggcgccagcgccgtggcccaggtggccctgggcttcgccctgcccctgggcgtgatggtggcctgctacgccctgctgggcagaaccctgctggccgccagaggccccgagagaagaagagccctgagagtggtggtggccctggtggccgccttcgtggtgctgcagctgccctacagcctggccctgctgctggacaccgccgacctgctggccgccagagagagaagctgccccgccagcaagagaaaggacgtggccctgctggtgaccagcggcctggccctggccagatgcggcctgaaccccgtgctgtacgccttcctgggcctgagattcagacaggacctgagaagactgctgagaggcggcagctgccccagcggcccccagcccagaagaggctgccccagaagacccagactgagcagctgcagcgcccccaccgagacccacagcctgagctgggacaactag

SEQ ID NO: 192340 - protein, 1761 aa, Artificial Sequence
  derived and/or modified sequence
MADAAASPVGKRLLLLFADTAASASASAPAAAAASGDPGPALRTRAWRAGTVRAMSGAVPQDLAIFVEFDGCNWKQHSWVKVHAEEVIVLLLEGSLVWAPREDPVLLQGIRVSIAQWPALTFTPLVDKLGLGSVVPVEYLLDRELRFLSDANGLHLFQMGTDSQNQILLEHAALRETVNALISDQKLQEIFSRGPYSVQGHRVKIYQPEGEEGWLYGVVSHQDSITRLMEVSVTESGEIKSVDPRLIHVMLMDNSAPQSEGGTLKAVKSSKGKKKRESIEGKDGRRRKSASDSGCDPASKKLKGDRGEVDSNGSDGGEASRGPWKGGNASGEPGLDQRAKQPPSTFVPQINRNIRFATYTKENGRTLVVQDEPVGGDTPASFTPYSTATGQTPLAPEVGGAENKEAGKTLEQVGQGIVASAAVVTTASSTPNTVRISDTGLAAGTVPEKQKGSRSQASGENSRNSILASSGFGAPLPSSSQPLTFGSGRSQSNGVLATENKPLGFSFGCSSAQEAQKDTDLSKNLFFQCMSQTLPTSNYFTTVSESLADDSSSRDSFKQSLESLSSGLCKGRSVLGTDTKPGSKAGSSVDRKVPAESMPTLTPAFPRSLLNARTPENHENLFLQPPKLSREEPSNPFLAFVEKVEHSPFSSFASQASGSSSSATTVTSKVAPSWPESHSSADSASLAKKKPLFITTDSSKLVSGVLGSALTSGGPSLSAMGNGRSSSPTSSLTQPIEMPTLSSSPTEERPTVGPGQQDNPLLKTFSNVFGRHSGGFLSSPADFSQENKAPFEAVKRFSLDERSLACRQDSDSSTNSDLSDLSDSEEQLQAKTGLKGIPEHLMGKLGPNGERSAELLLGKSKGKQAPKGRPRTAPLKVGQSVLKDVSKVKKLKQSGEPFLQDGSCINVAPHLHKCRECRLERYRKFKEQEQDDSTVACRFFHFRRLIFTRKGVLRVEGFLSPQQSDPDAMNLWIPSSSLAEGIDLETSKYILANVGDQFCQLVMSEKEAMMMVEPHQKVAWKRAVRGVREMCDVCETTLFNIHWVCRKCGFGVCLDCYRLRKSRPRSETEEMGDEEVFSWLKCAKGQSHEPENLMPTQIIPGTALYNIGDMVHAARGKWGIKANCPCISRQNKSVLRPAVTNGMSQLPSINPSASSGNETTFSGGGGPAPVTTPEPDHVPKADSTDIRSEEPLKTDSSASNSNSELKAIRPPCPDTAPPSSALHWLADLATQKAKEETKEAGSLRSVLNKESHSPFGLDSFNSTAKVSPLTPKLFNSLLLGPTASNNKTEGSSLRDLLHSGPGKLPQTPLDTGIPFPPVFSTSSAGVKSKASLPNFLDHIIASVVENKKTSDASKRACNLTDTQKEVKEMVMGLNVLDPHTSHSWLCDGRLLCLHDPSNKNNWKIFRECWKQGQPVLVSGVHKKLKSELWKPEAFSQEFGDQDVDLVNCRNCAIISDVKVRDFWDGFEIICKRLRSEDGQPMVLKLKDWPPGEDFRDMMPTRFEDLMENLPLPEYTKRDGRLNLASRLPSYFVRPDLGPKMYNAYGLITAEDRRVGTTNLHLDVSDAVNVMVYVGIPIGEGAHDEEVLKTIDEGDADEVTKQRIHDGKEKPGALWHIYAAKDAEKIRELLRKVGEEQGQENPPDHDPIHDQSWYLDQTLRKRLYEEYGVQGWAIVQFLGDAVFIPAGAPHQVHNLYSCIKVAEDFVSPEHVKHCFRLTQEFRHLSNTHTNHEDKLQVKNIIYHAVKDAVGTLKAHESKLARS

SEQ ID NO: 192341 - protein, 1417 aa, Artificial Sequence
  derived and/or modified sequence
MGAMEINRNIRFATYTKENGRTLVVQDEPVGGDTPASFTPYSTATGQTPLAPEVGGAENKEAGKTLEQVGQGIVASAAVVTTASSTPNTVRISDTGLAAGTVPEKQKGSRSQASGENSRNSILASSGFGAPLPSSSQPLTFGSGRSQSNGVLATENKPLGFSFGCSSAQEAQKDTDLSKNLFFQCMSQTLPTSNYFTTVSESLADDSSSRDSFKQSLESLSSGLCKGRSVLGTDTKPGSKAGSSVDRKVPAESMPTLTPAFPRSLLNARTPENHENLFLQPPKLSREEPSNPFLAFVEKVEHSPFSSFASQASGSSSSATTVTSKVAPSWPESHSSADSASLAKKKPLFITTDSSKLVSGVLGSALTSGGPSLSAMGNGRSSSPTSSLTQPIEMPTLSSSPTEERPTVGPGQQDNPLLKTFSNVFGRHSGGFLSSPADFSQENKAPFEAVKRFSLDERSLACRQDSDSSTNSDLSDLSDSEEQLQAKTGLKGIPEHLMGKLGPNGERSAELLLGKSKGKQAPKGRPRTAPLKVGQSVLKDVSKVKKLKQSGEPFLQDGSCINVAPHLHKCRECRLERYRKFKEQEQDDSTVACRFFHFRRLIFTRKGVLRVEGFLSPQQSDPDAMNLWIPSSSLAEGIDLETSKYILANVGDQFCQLVMSEKEAMMMVEPHQKVAWKRAVRGVREMCDVCETTLFNIHWVCRKCGFGVCLDCYRLRKSRPRSETEEMGDEEVFSWLKCAKGQSHEPENLMPTQIIPGTALYNIGDMVHAARGKWGIKANCPCISRQNKSVLRPAVTNGMSQLPSINPSASSGNETTFSGGGGPAPVTTPEPDHVPKADSTDIRSEEPLKTDSSASNSNSELKAIRPPCPDTAPPSSALHWLADLATQKAKEETKEAGSLRSVLNKESHSPFGLDSFNSTAKVSPLTPKLFNSLLLGPTASNNKTEGSSLRDLLHSGPGKLPQTPLDTGIPFPPVFSTSSAGVKSKASLPNFLDHIIASVVENKKTSDASKRACNLTDTQKEVKEMVMGLNVLDPHTSHSWLCDGRLLCLHDPSNKNNWKIFRECWKQGQPVLVSGVHKKLKSELWKPEAFSQEFGDQDVDLVNCRNCAIISDVKVRDFWDGFEIICKRLRSEDGQPMVLKLKDWPPGEDFRDMMPTRFEDLMENLPLPEYTKRDGRLNLASRLPSYFVRPDLGPKMYNAYGLITAEDRRVGTTNLHLDVSDAVNVMVYVGIPIGEGAHDEEVLKTIDEGDADEVTKQRIHDGKEKPGALWHIYAAKDAEKIRELLRKVGEEQGQENPPDHDPIHDQSWYLDQTLRKRLYEEYGVQGWAIVQFLGDAVFIPAGAPHQVHNLYSCIKVAEDFVSPEHVKHCFRLTQEFRHLSNTHTNHEDKLQVKNIIYHAVKDAVGTLKAHESKLARS

SEQ ID NO: 192342 - protein, 793 aa, Artificial Sequence
  derived and/or modified sequence
MNLWIPSSSLAEGIDLETSKYILANVGDQFCQLVMSEKEAMMMVEPHQKVAWKRAVRGVREMCDVCETTLFNIHWVCRKCGFGVCLDCYRLRKSRPRSETEEMGDEEVFSWLKCAKGQSHEPENLMPTQIIPGTALYNIGDMVHAARGKWGIKANCPCISRQNKSVLRPAVTNGMSQLPSINPSASSGNETTFSGGGGPAPVTTPEPDHVPKADSTDIRSEEPLKTDSSASNSNSELKAIRPPCPDTAPPSSALHWLADLATQKAKEETKEAGSLRSVLNKESHSPFGLDSFNSTAKVSPLTPKLFNSLLLGPTASNNKTEGSSLRDLLHSGPGKLPQTPLDTGIPFPPVFSTSSAGVKSKASLPNFLDHIIASVVENKKTSDASKRACNLTDTQKEVKEMVMGLNVLDPHTSHSWLCDGRLLCLHDPSNKNNWKIFRECWKQGQPVLVSGVHKKLKSELWKPEAFSQEFGDQDVDLVNCRNCAIISDVKVRDFWDGFEIICKRLRSEDGQPMVLKLKDWPPGEDFRDMMPTRFEDLMENLPLPEYTKRDGRLNLASRLPSYFVRPDLGPKMYNAYGLITAEDRRVGTTNLHLDVSDAVNVMVYVGIPIGEGAHDEEVLKTIDEGDADEVTKQRIHDGKEKPGALWHIYAAKDAEKIRELLRKVGEEQGQENPPDHDPIHDQSWYLDQTLRKRLYEEYGVQGWAIVQFLGDAVFIPAGAPHQVHNLYSCIKVAEDFVSPEHVKHCFRLTQEFRHLSNTHTNHEDKLQVKNIIYHAVKDAVGTLKAHESKLARS

SEQ ID NO: 192343 - protein, 1551 aa, Artificial Sequence
  derived and/or modified sequence
GWRWLYGVVSHQDSITRLMEVSVTESGEIKSVDPRLIHVMLMDNSAPQSEGGTLKAVKSSKGKKKRESIEGKDGRRRKSASDSGCDPASKKLKGDRGEVDSNGSDGGEASRGPWKGGNASGEPGLDQRAKQPPSTFVPQINRNIRFATYTKENGRTLVVQDEPVGGDTPASFTPYSTATGQTPLAPEVGGAENKEAGKTLEQVGQGIVASAAVVTTASSTPNTVRISDTGLAAGTVPEKQKGSRSQASGENSRNSILASSGFGAPLPSSSQPLTFGSGRSQSNGVLATENKPLGFSFGCSSAQEAQKDTDLSKNLFFQCMSQTLPTSNYFTTVSESLADDSSSRDSFKQSLESLSSGLCKGRSVLGTDTKPGSKAGSSVDRKVPAESMPTLTPAFPRSLLNARTPENHENLFLQPPKLSREEPSNPFLAFVEKVEHSPFSSFASQASGSSSSATTVTSKVAPSWPESHSSADSASLAKKKPLFITTDSSKLVSGVLGSALTSGGPSLSAMGNGRSSSPTSSLTQPIEMPTLSSSPTEERPTVGPGQQDNPLLKTFSNVFGRHSGGFLSSPADFSQENKAPFEAVKRFSLDERSLACRQDSDSSTNSDLSDLSDSEEQLQAKTGLKGIPEHLMGKLGPNGERSAELLLGKSKGKQAPKGRPRTAPLKVGQSVLKDVSKVKKLKQSGEPFLQDGSCINVAPHLHKCRECRLERYRKFKEQEQDDSTVACRFFHFRRLIFTRKGVLRVEGFLSPQQSDPDAMNLWIPSSSLAEGIDLETSKYILANVGDQFCQLVMSEKEAMMMVEPHQKVAWKRAVRGVREMCDVCETTLFNIHWVCRKCGFGVCLDCYRLRKSRPRSETEEMGDEEVFSWLKCAKGQSHEPENLMPTQIIPGTALYNIGDMVHAARGKWGIKANCPCISRQNKSVLRPAVTNGMSQLPSINPSASSGNETTFSGGGGPAPVTTPEPDHVPKADSTDIRSEEPLKTDSSASNSNSELKAIRPPCPDTAPPSSALHWLADLATQKAKEETKEAGSLRSVLNKESHSPFGLDSFNSTAKVSPLTPKLFNSLLLGPTASNNKTEGSSLRDLLHSGPGKLPQTPLDTGIPFPPVFSTSSAGVKSKASLPNFLDHIIASVVENKKTSDASKRACNLTDTQKEVKEMVMGLNVLDPHTSHSWLCDGRLLCLHDPSNKNNWKIFRECWKQGQPVLVSGVHKKLKSELWKPEAFSQEFGDQDVDLVNCRNCAIISDVKVRDFWDGFEIICKRLRSEDGQPMVLKLKDWPPGEDFRDMMPTRFEDLMENLPLPEYTKRDGRLNLASRLPSYFVRPDLGPKMYNAYGLITAEDRRVGTTNLHLDVSDAVNVMVYVGIPIGEGAHDEEVLKTIDEGDADEVTKQRIHDGKEKPGALWHIYAAKDAEKIRELLRKVGEEQGQENPPDHDPIHDQSWYLDQTLRKRLYEEYGVQGWAIVQFLGDAVFIPAGAPHQVHNLYSCIKVAEDFVSPEHVKHCFRLTQEFRHLSNTHTNHEDKLQVKNIIYHAVKDAVGTLKAHESKLARS

SEQ ID NO: 192344 - DNA, 6830 bp, Artificial Sequence
  derived and/or modified sequence
gcggggcccaggctgcggctccgctcccggccacggggggcgctgcgctgcgccggtggttggtggtggctgttggggggggtgggggggaacggcggccgcgggtggtgcggagggaggccttgcgggcggatcgggcgcttggcggcggaggtggtgggaggcggcgggcgggagcgcgggtcaggccggccccggcgatggcggacgcggcggcctccccggtgggcaagcggctgctgctgctgttcgcggacactgcggcctcagcctcggcctcggctcccgcggcggcagcggcgagcggagatccggggcctgcgctgcgcactcgagcctggcgggccggcacggtgcgggccatgagcggggcggtgccccaggacctagcgatctttgtagaatttgatggctgtaactggaagcaacactcctgggtaaaagttcatgctgaggaagttatcgtgcttctgctggaagggtctcttgtatgggcgccccgtgaggacccagtccttctccagggcattcgagtctccattgcacaatggccagccctgacttttactccccttgtagataaactgggtttgggttctgtggttccagtggaatatcttctggatcgagagcttcggttcctgtcagatgccaatgggttgcatctgtttcagatgggaacagatagccaaaaccagattcttttggaacatgctgcactgagagaaacagttaatgctttgatcagtgaccaaaagctacaagagatattcagccgaggtccctacagtgttcaaggtcacagggtcaaaatatatcagccagagggggaagaagggtggctctatggtgttgtgagccatcaggactccatcactcgtcttatggaggtgtctgtaactgagagtggtgagatcaagtcggtagatcccagactaatccatgtgatgctgatggataattcaacgcctcaaagcgaggggggtacgttaaaagcagtaaaatcttccaaaggaaagaagaagagagaaagcatagaggggaaagatggccggaggaggaaaagtgcttcggactctgggtgtgaccctgcatcaaagaaattaaaaggagacaggggtgaagtagacagtaatgggagcgatggaggtgaggcaagccgagggccctggaaaggagggaatgccagtggagagccagggctggatcagagagccaagcagccaccgtctacatttgtcccccagataaaccgcaacattcgctttgccacttacaccaaagaaaacggcaggactctggtggtgcaggatgagcctgtaggtggggacacacctgcatctttcactccatattctacagccacaggtcagacacctttggccccagaggtgggtggagccgaaaacaaagaggcaggaaaaacactggaacaagttggccagggcatagtggcttccgcagctgtggtcactaccgccagctccaccccaaacacagtgaggatctcagacactggccttgcagcagggactgtgccagaaaaacagaaaggcagccggtcgcaggcctcgggagagaattcaagaaattctattctggcctcttctggatttggagcacctctccctagttcatcgcaacctttgacttttggaagtggaaggagccagtccaatggtgttctagccacagagaacaaacctttgggcttctcttttggctgtagctctgcacaagaggcacagaaagacactgatctctccaaaaacttgttttttcaatgcatgtcccaaactttacctaccagtaactacttcactactgtttcagagagtttggctgatgattcttctagtcgggactcattcaaacaaagccttgagagcctgagctcaggcctgtgtaaaggcagatccgttcttggaacagacactaagccaggctctaaggctggcagctctgtggaccggaaagtgcctgcagagtccatgcccaccctcactccagccttcccacggagcctcctaaatgcccgtaccccagagaatcatgaaaatctatttttacagccccccaaattgtcccgagaagagccttctaatcctttcctggcatttgtggagaaagttgaacacagccctttcagtagttttgcatctcaggcatcaggtagctcctcttctgctaccactgtcacctccaaggtggcacccagctggcccgagtctcactcctctgcagattcggcatctttagcaaagaagaaacccctcttcattacaactgactcctccaagctagtatctggtgttctgggctcagctcttaccagtgggggcccaagcctctctgccatggggaatggccgctccagctcgcccaccagcagcctcactcagcccattgagatgccaactctctcctctagccccacagaggagaggccaactgtggggcctgggcagcaggacaatcccctcctcaaaacctttagtaacgtctttggcaggcactcaggcggctttctgtcctccccggcagatttttcacaggagaacaaagctccttttgaagctgtgaaaaggttctcactggatgaacgaagcttggcttgcagacaagactcggactccagcaccaacagtgacctgtcagatttgagtgactctgaggagcagctgcaggctaagacaggcctgaagggaattccagagcacctgatggggaagctgggccccaatggggagcgcagtgctgagctgttgctgggcaaaagcaaagggaagcaggcccccaagggccggcctcggactgcccccctgaaagttggccagtcagtgctgaaagatgtaagcaaagtgaagaagctgaagcaatctggagagcccttcctgcaggatgggtcatgcatcaatgtggcacctcatctgcacaagtgtcgtgaatgccgcctggagcggtaccggaagtttaaggaacaggagcaagatgattctactgtagcctgccgtttctttcacttccggaggttgatcttcactcgaaaaggggtactccgtgtggaggggtttttaagcccccagcaaagtgaccctgatgccatgaacctgtggattccctcttcctccctagcagaagggatagatctagagacctcaaaatacatcctggccaatgttggggaccagttctgccagctcgtaatgtctgagaaggaggccatgatgatggtggagccacaccagaaagtggcatggaagcgagctgtgcgtggtgtacgggagatgtgtgatgtgtgtgaaacaactctcttcaacatccactgggtttgtcgcaaatgtggatttggggtctgccttgactgttaccggctcaggaaaagccggccacgcagtgagacagaagagatgggtgatgaagaagttttctcctggttgaagtgtgcaaagggacagtcccacgaaccagagaatctcatgcccacacaaattattcctggcacagctctttacaatattggagacatggtacatgctgcccggggcaagtggggaattaaagcaaactgcccttgtatcagtcgacagaacaaatctgtattgagacctgccgtcaccaatgggatgtcacagcttcctagcataaaccctagtgcctcttctggaaacgaaactaccttctctggtggaggaggaccggcaccagtaacaactccagagccggaccatgttcccaaagccgacagcactgacatcagatctgaagagcctctgaaaacagacagttcggcatcaaatagcaatagtgaactgaaagccatcaggcctccttgccctgacacggccccaccctcctccgccctgcactggttggcagatttagcaactcagaaggctaaagaagaaacaaaagaagcagggtccctgaggtcggtgctcaataaagagtctcattcaccctttgggctggactcgttcaactccactgcaaaggtctctccgctgactccaaagctttttaacagtctgttgctgggtcccactgcctccaacaacaaaaccgaagggtctagccttcgagacctccttcactccgggccgggaaaacttcctcaaacccccttggacacaggcataccctttcccccggtcttctctacatcctcagcaggagtgaagagcaaggccagcctacccaactttcttgaccacatcattgcctcagtggtagaaaataagaaaacctcagatgcttcaaagcgggcctgcaacttgactgatacccagaaggaagtgaaggagatggtgatggggttaaatgtgctagatccccatacttctcactcctggctttgtgatgggaggcttctgtgtctccatgaccccagcaacaaaaacaattggaagatcttccgggagtgttggaagcaaggtcagccagtgctggtttcgggggtacataaaaagctcaagtctgagctctggaagccagaagcctttagccaggaatttggagaccaggatgtagacttggtgaactgcaggaactgtgctataatttccgatgtgaaagttcgggatttctgggatggtttcgagatcatatgcaaacgactacggtcagaagatgggcagccaatggtgctcaaactcaaggactggcctcctggggaagattttcgagacatgatgccaaccaggtttgaagatctgatggagaaccttcctctgccagaatataccaaacgagatggcaggctcaatctggcctctaggctacctagctactttgtaaggcctgatctgggccccaagatgtacaacgcctatgggttgataacagcagaagatagaagagttggtacaacaaatcttcacttagatgtgtctgatgctgttaatgtgatggtgtatgttgggattcccatcggggagggtgctcatgatgaagaggtactcaagacaattgacgagggagatgccgatgaggtgacgaagcagaggattcatgatggaaaagagaagccaggtgctttatggcacatctatgcagccaaggatgcagagaagatccgggagctgctccgaaaggttggagaagaacaaggccaagagaacccccctgatcatgacccaattcatgaccaaagttggtacctggaccagaccctccgtaagcgactctatgaggagtatggcgtgcaaggctgggctattgtgcagttcctaggtgatgctgttttcatacctgctggagccccacaccaggttcacaatctatacagttgcataaaagtagcagaagactttgtatctccagaacatgtaaagcactgtttccgcctgactcaggaattcaggcatctctctaacactcatacaaatcatgaggataaactgcaggtgaagaacatcatttaccatgcagtgaaagatgcggttggcaccctcaaggctcatgaatccaaactggcaaggtcctaggcatggagaaactccaagctcctctgtgaagcaggtctttcactcacaacacttaacagggaacggcagggctctttgctggagcagaggcccttcacccagagccagtgtggtcagtattccaaactctccagccactctcttctacgctgcctcaacactgaaggttgacacaggaaagtcgtactgttcacacacacagtttgagactccaagccaagagtgccacatccctatcctgtggccttttggaaatccaaattgcctgaacatggcggggctttcctgcacattctcctgatttgagattcacgggcacacctttcttttcttttcctcttgtgcctagttaagtggaaatgtgtttggagataggggaaatcacataactggtacaagtatggggtaattgcttaaacatgcctggtggaagtctgatagcgtctctgcacgtgacctctgacaaagcccatcccaggagacggggtgaagctattccccacactctcctgtgaacactggagtcttgcaagacccagggagaacccactgcttttcccaggaggctccaggattaggaaatgtgtgtatttagtgaaaaataggtttgtagtgaaatagttactatttcatgaaagtagatatttttagaatttttgaaataccacagttgttttcctggattataaggaaaggcacattacatttagtcttcctttcgatataaaactctttgaagaaatatgatttttagaaatcagctacccattatagcacaaaatcagccaaagcagaatttttaaaaattggcttttttaggattctttttctccccctcccatcttagtcttaccttgagggaacagtcatatgagaaggaactttgtcacatctaagctgtggtgtgttccccatgtgtgtgtacaacactggtgactccaggaaccattttcacctattaccagtgttccctggggactcctcttaatgtttccaaatgggaaggacagttgatttccaacatgaggttttttgttttttatccagaaatattttcagcaaaactttccaactgagtggagtctgattaaggatttatttgaaaatggtgggattcattggcccataggtacattggaaaatgtatatctctccagctgtactgtagtgccctgcaggctgtttatatgttcacagttacttttttttttttttttaaataaaagtcatttaatgtagaatacttttaatttcactttctgtattttaattttgttgaagggctgattgggatttccatgttcttattaaaaatctaacaaatctgaaaaaaaaaaaaaaaaa

SEQ ID NO: 192345 - DNA, 5286 bp, Artificial Sequence
  derived and/or modified sequence
atggctgatgccgcggcaagccctgtgggcaaacggttgctcttgctgttcgcggataccgcagcttccgccagcgcaagcgcccctgctgctgcagccgccagcggcgacccggggcctgcgttaagaacacgggcctggagggctggcactgtgagagctatgtcgggtgccgtgcctcaggatctcgctatcttcgtagaatttgacgggtgtaattggaagcagcattcgtgggtgaaggttcatgccgaggaagtgattgttctacttctggagggaagtctcgtctgggccccccgggaggatccagttttgcttcagggaatccgcgtcagcatagctcagtggccagctttaacttttacgccccttgttgataaactaggactcgggtccgtcgttcctgtggagtatttgctggatcgcgagctcaggttccttagtgacgctaacgggctgcatctgtttcagatggggaccgattcgcaaaaccagattctgctcgaacacgctgcccttagagaaaccgtgaacgccctgatctccgaccaaaaactgcaagagattttcagccgcgggccgtactctgtacagggacaccgcgtgaagatctaccaacctgagggagaggagggatggctgtacggtgtcgtgtcacaccaggactctattactcggctgatggaagtgtctgttactgagtccggtgaaatcaagtcggtcgatccccgattgatccacgtgatgttgatggataattctgccccccagagcgagggcggaacactcaaggcagtcaaatcctcaaaggggaaaaagaagagagagtcaatcgagggaaaggacgggcggcggagaaagtcagcatcagattccggttgcgaccccgctagtaagaagctgaagggcgatcgcggagaggtggactcgaacggctctgacggtggcgaagcttcccggggtccttggaaaggcggaaatgcctccggcgagcctggcctcgatcagagggccaaacaaccgccatctacctttgtacctcaaattaacagaaacattcgcttcgccacatataccaaggaaaatggcaggaccttagtggttcaggatgaaccggtgggaggcgatacaccggctagctttactccgtattctaccgccaccggccaaacacctctggccccagaggtgggcggggcggaaaacaaggaggcgggaaagaccttggagcaagtgggccagggcattgtggcgagtgcagcagtggtcacaacagccagcagcacacctaacactgtgcgcataagcgacacaggactggctgccggaaccgtccctgagaaacagaaggggtcaaggagtcaagcttccggcgaaaacagcaggaactccatcctcgcttcatcaggctttggcgctccactgccatcttcatcacagccactgactttcggctcggggcgctcccagtcaaatggggtcttggctacagagaataagcctctaggatttagcttcggctgtagcagtgcccaggaggcccagaaagataccgatctgagcaagaatctgttttttcaatgtatgagtcagactctccctaccagtaattacttcacgactgtctctgagtcccttgcagatgactcctcttcccgcgattctttcaaacagtccttggagtcactgtccagtgggctctgcaaaggccggtcagtcttgggcacagacacgaaacccggctctaaagctggctctagcgttgatcgcaaagtgcccgccgagtctatgcctaccctcacacccgcctttcctcggagcctgttgaacgcgcggacacctgagaatcacgagaatttgtttctccagccccccaagctgtctagggaggaacccagcaaccctttccttgcctttgtggaaaaggtggaacatagccccttcagttcattcgccagtcaggcctccggcagctcctctagcgcaaccactgtgacatctaaagtggccccgtcctggccagagtcccacagtagtgctgacagtgccagtctcgcaaaaaaaaaaccgctcttcattactaccgactccagtaagctggtatccggggtgctgggatccgctctgacttccggaggaccgtcgctgtccgccatgggtaacggtagaagctcatccccaaccagttcacttactcagcccatcgaaatgcccacactcagtagcagccccaccgaagaacgccccaccgtcggcccaggacagcaggataaccctctcctgaagacatttagcaatgtcttcggccgtcatagcggaggatttttaagttcccccgccgactttagccaggagaacaaagctcccttcgaggccgtcaaacggttctcacttgacgaaagaagtctggcatgccgtcaggattccgattccagcacgaatagtgatttgtccgacctctccgatagcgaggagcagctgcaggctaaaactggactgaaagggattcccgaacaccttatgggaaaactggggccaaacggcgagagatctgcagaacttctgctcgggaagtctaagggtaaacaagcacctaagggtagacctaggactgctcccctcaaagtagggcaaagtgttcttaaggacgtgtctaaggtcaaaaagctaaaacaatcgggtgaaccgttcctccaagatggatcatgcattaacgtggcccctcacctgcacaaatgcagggagtgtaggctcgaacgataccgaaaattcaaggagcaggaacaggacgactccacagtggcttgccggtttttccatttccggcggctcatcttcaccaggaagggcgtactgcgcgtagagggattcttgagccctcagcagagcgatcccgacgccatgaatctgtggatccccagcagcagccttgccgagggcatcgacctcgagacctccaagtatattctagctaacgtgggagaccagttttgccagcttgtgatgtctgaaaaggaagcaatgatgatggttgagccccaccagaaagttgcatggaagagagccgtgagaggcgtccgggagatgtgtgacgtctgtgaaactactttattcaatatacactgggtgtgcagaaagtgcggcttcggcgtctgcctggactgctatcgtctcagaaagtcaaggcctagaagtgagactgaagagatgggcgatgaagaggtgttctcctggctcaagtgcgcaaagggtcaaagccacgagcctgagaacctcatgcccacacaaattattcccggaactgctctgtacaacatcggagacatggtgcatgctgcaagagggaaatggggcatcaaggccaactgcccctgtatttcacggcagaacaagtccgtgttaagaccagccgtcactaacggcatgagccagttaccatctatcaatcctagtgcctcgtcagggaatgagacaacctttagcggcggaggtgggcctgccccagttacaactcccgaacctgatcatgtacctaaagcagacagcactgacattcgatcagaggaaccgcttaagacggattccagcgccagtaatagtaatagcgaactgaaagctatcaggcctccatgtcctgatactgcgcctcctagcagcgccctccactggctggccgatctggcgactcagaaggctaaggaagagacaaaggaggcaggctcgcttcggagtgtgttaaacaaggaaagccatagtccctttggactcgacagctttaatagcaccgcaaaagtgtccccactgactccaaaattgtttaactcactacttctgggaccgaccgccagcaacaataaaaccgagggttcttcccttcgcgatctgctgcactccggtcccggaaaattgccccagacccccctggacacgggaatcccattccctccagtgttctcaacatcttctgccggagtcaagtctaaggcctccctgccaaactttttggaccatatcatcgccagcgtggtcgagaataaaaagacatctgatgcctccaagcgcgcctgcaatctgaccgacacccagaaggaggtgaaagaaatggttatgggccttaacgtgcttgaccctcatacaagccactcctggctgtgcgacggccggctcttatgcctacacgatccaagcaacaagaacaattggaaaatttttcgagagtgttggaagcagggccagcctgtgctggtctccggtgtccacaagaagctgaagtcggaattatggaaacctgaggcgttttcccaggagttcggagaccaggatgtggacctggtgaattgcaggaactgtgccattatttctgacgtcaaggtgcgcgacttctgggacggcttcgagataatttgcaaacgactgcgttctgaagatggccagcccatggtgctgaagctaaaagattggccaccaggtgaagacttccgcgacatgatgccgacacgatttgaagatctaatggaaaatctaccattgccagaatacaccaagcgtgacgggagactcaatctggcaagccgtttgcctagctattttgtacgacctgatctcgggcccaaaatgtacaacgcctatggcctgatcaccgccgaggatcgaagagtgggaaccacaaatttgcatctggatgtgtccgatgctgttaatgttatggtgtacgtggggattccaattggagagggggcccacgatgaggaagtgcttaagacaatcgacgaaggcgatgctgacgaagtgaccaaacaaaggattcatgacggtaaagaaaagcctggagccctctggcacatctatgctgcaaaagatgcggagaaaatccgggagctcctgcgtaaggtgggggaggaacagggacaggaaaacccccctgaccatgacccaatccacgaccagtcatggtatctcgaccagaccctcaggaagagactttatgaggagtacggagttcaaggctgggccatcgtacaatttttaggcgacgcagtgttcatccctgcaggggcgccccatcaggtccacaacctctattcttgcataaaggtggccgaggacttcgtaagtcctgagcacgtcaagcattgttttcggctgactcaggagttcagacacctgagcaatacccacacaaaccatgaggacaaactacaggtcaaaaatatcatctaccatgcagtgaaggatgctgtaggaaccctgaaggctcatgagtctaaacttgcaagatcctag

SEQ ID NO: 192346 - DNA, 4254 bp, Artificial Sequence
  derived and/or modified sequence
atgggtgcaatggagataaatcggaatattagattcgccacctatacgaaggaaaatgggcggactctcgtcgtgcaggatgaaccagtggggggggatacacccgcctctttcaccccctatagcactgcaaccggccagacacctttggcccccgaggtggggggagctgaaaacaaggaagcgggaaaaaccctagagcaggtgggacagggaatcgtggccagtgcagcagtagtgacaaccgcatcctccacgccaaacaccgtgaggatttccgacaccggcctcgccgcgggtacagttccagagaagcagaagggctctaggtcacaggcctctggagaaaactccaggaacagtatactggctagctctggattcggcgcaccactgccgagctctagccagccactgacctttggctcaggacggtctcagtctaacggagtcctggctacagagaataaaccgttgggtttttcattcggttgtagttctgctcaggaggcacagaaagacactgacctgagcaagaatctttttttccagtgcatgagccagaccctcccaacttctaactactttacgaccgtgagcgagtccttggcagatgattcatctagtagggattcttttaagcagtccctggagtccctatctagcggcttgtgtaagggtaggagtgtcctgggaactgacaccaagcctggttcaaaggctggatcatctgtcgaccgtaaagtacctgcggaaagtatgcccacactgacacccgcgtttccccggtcactgctgaacgcgcgaactccagaaaatcacgaaaacttgttcttgcaacctcccaagctgtctcgagaggagcccagtaatccattcctcgcctttgtcgagaaagtggagcactcaccgttctctagctttgcctctcaagcaagtggatcctcaagctcagctacaactgtcacttcaaaagtggcaccatcttggccagaatcccactcgagtgccgacagcgcaagtctcgcaaaaaagaaacctctgttcatcaccacagatagttcaaaactagtgtccggcgttctgggatctgccctcacttccggtggtccttctctcagtgctatggggaacggacgcagctcctccccaacatcatccttgacacagcccatcgaaatgccaactctcagctcgtctccaaccgaggagagaccaactgtgggccctggacagcaagataatcccctgctgaaaacctttagtaatgtgtttggccgccactccggggggtttctcagtagcccagcagatttcagtcaggagaacaaggcccctttcgaagcagtgaaaaggttttccttagacgaacggagtttggcttgccggcaggattctgacagttccaccaatagtgatctatctgacctgtccgattccgaggagcagctgcaggccaaaacagggttgaaggggattccagagcacctgatgggaaagctaggtcctaatggagagcgatctgcggaactgctgttgggaaaatctaagggaaaacaggcccccaaagggaggccaaggactgcacctcttaaagtggggcaatcagtgctgaaagatgtgagcaaggttaaaaagcttaagcagagcggagagccttttttacaggacgggagctgcatcaatgttgcacctcacctgcacaagtgccgggagtgtaggttagagcgctatcggaagtttaaagagcaggagcaggatgactctacagtcgcttgtaggttttttcatttcaggcgactgatcttcacccggaagggtgttctcagagtggaaggcttccttagtccccaacagtccgatcctgatgccatgaacctatggattccctcatcctccctggcagagggaatcgacctggagacaagcaaatacattctggccaacgttggcgaccagttttgccagctggtcatgtccgaaaaggaggcaatgatgatggtggaaccacaccagaaagtagcgtggaaaagggcagtgagaggggtccgggagatgtgcgacgtgtgcgagacaacactgttcaacatccactgggtgtgccgcaaatgtggtttcggagtttgcctcgactgctaccgccttcggaaaagcagacccagatcagagacagaggaaatgggtgacgaggaggtgttctcttggctgaaatgcgccaaggggcagagtcacgagcccgagaacttgatgccaacacagattatccctggcaccgcgctctacaacatcggcgatatggtgcacgccgcgcgggggaagtggggcatcaaggccaattgcccctgtatctcaaggcagaacaagtccgtactgagacctgctgttacaaatgggatgtctcagctccccagcattaatcccagcgcttcctctggcaatgagaccactttctccggcggtggaggacctgcacctgtgaccaccccggagcctgaccatgtccctaaggccgatagcactgacatcagatccgaggagccccttaaaactgactcctcagccagcaactccaatagcgagctcaaggcaatccggccaccttgcccagacactgctcccccctctagtgctttgcactggctggccgatttggccactcagaaagcaaaggaagaaactaaagaagccggctcactccgtagcgttcttaacaaggagagccattctcctttcgggctcgactcatttaactcaaccgccaaagtttccccgctgacaccaaaactctttaacagtctcctcctgggacctactgcctctaacaataagaccgagggttcctccctcagagacttgttacactctggccctgggaaattaccgcagacgcccctggatactggtattccattcccacccgtattcagcacctcctctgctggcgtgaaatctaaggcgtctctcccaaatttcttggatcacatcatagcctctgtcgtcgagaataagaaaacctctgatgcatcgaagagggcatgcaatctcaccgatactcagaaagaagtgaaagagatggtcatgggcttgaatgtgctggacccacatacaagccattcttggctgtgtgatggtagactcctgtgcttgcacgacccaagcaataagaataactggaagatctttcgtgagtgttggaaacagggccagccagtactggtctccggagtgcacaagaagctcaaatccgagctgtggaagcctgaggcattttctcaggagttcggcgaccaggacgtggatctggtgaattgtaggaactgtgccatcatctcagacgtaaaggttagagacttctgggacgggttcgagatcatctgtaagagactgagatcagaagatgggcagccaatggtgttgaagctgaaagattggcctcctggagaggactttcgcgacatgatgccaactcggttcgaagacctcatggaaaatttaccgcttccagagtacactaagcgcgatggtcggctcaatttggcatcccgacttccctcttacttcgtccggcctgaccttggaccgaaaatgtataacgcctatggccttatcacggcagaggataggcgagtggggaccaccaatctacacttagacgtgtcggatgcggtaaatgtgatggtgtatgtgggtattcctattggggaaggggcgcacgacgaagaggtgctcaaaacaatcgacgagggcgacgccgacgaggtgacgaagcagcgaatccacgatggcaaggagaaaccgggtgctctgtggcatatctatgctgctaaggatgccgagaaaataagggaactcttgcggaaggtcggggaggagcaggggcaggagaacccccctgatcacgaccccattcatgatcagtcgtggtacctggaccagactctacgaaaaagactttacgaagaatacggcgtgcagggttgggccatcgtgcagttcctaggggacgcagtgttcatcccagccggtgcccctcatcaggtgcacaacctctactcatgtatcaaggtagccgaggactttgtgtcacctgagcatgtgaagcattgctttaggctcacccaggagttccgacacctgagtaatacccataccaaccatgaagataagttacaggtgaaaaacatcatctatcacgctgtgaaagacgcggtggggacactcaaggcacacgaaagcaagctagcacggtcctag

SEQ ID NO: 192347 - DNA, 2382 bp, Artificial Sequence
  derived and/or modified sequence
atgaatctttggatccccagctccagtttggctgagggaattgacctggaaacctcaaagtatatactcgctaacgtcggggaccagttctgtcaactcgtgatgtccgagaaggaggccatgatgatggtcgagcctcatcaaaaggtcgcttggaaaagggcagttcgtggagtcagggagatgtgtgacgtatgcgagaccaccttgttcaatattcattgggtctgtcggaagtgcggattcggggtgtgccttgattgctaccgcctccgtaagtcacggcctcgcagcgagactgaggaaatgggcgacgaagaggtgtttagctggctgaagtgtgcaaagggccagagccacgagcccgaaaaccttatgccaacgcaaatcatccctggaacggctttgtacaatatcggtgacatggttcatgccgccaggggcaagtggggaataaaggcaaactgtccctgcattagcagacagaataagagtgtccttcgaccggccgtaaccaacggaatgtctcaactgccatcaattaatcctagcgctagcagcggaaatgaaactacctttagtggcggaggtggccccgctccagtgacaactcctgagcccgatcacgttcctaaagctgattcaacagacattcgatcggaggagcccctcaaaaccgacagctccgcttccaatagcaattctgagcttaaggctatcagacctccatgcccagacacagcaccgccgtcatccgcgctacactggctggcggatcttgctactcagaaggctaaggaggaaacaaaagaggccggttctcttcgatccgtcctaaataaagagagccattctccttttggactggatagctttaatagcactgctaaggtgagtcccctgactcccaaacttttcaacagcctactcctggggcccactgcatctaataacaagacagaaggtagtagtctccgtgacctcctgcactctgggcccggcaagctgccccagactccactcgacaccgggatcccgttcccacctgtttttagcacatccagtgccggggttaagtctaaagcctctttacctaactttctggatcacataatcgcttctgttgttgaaaacaagaagaccagtgatgctagcaaaagagcctgtaacctgactgacacccagaaggaggtgaaagagatggtgatgggcttgaatgtactcgatccacacacatcacactcctggctgtgcgacggacgtctgctgtgcctgcacgaccccagcaataaaaataattggaaaatatttcgagaatgttggaaacagggtcagccggtcctcgtgagcggggttcacaaaaagcttaaatcagaactgtggaagcccgaggcgttttcacaggagttcggcgaccaagatgtcgatttggtgaactgtaggaactgtgccatcatcagcgatgttaaggtcagagacttctgggacggctttgaaatcatttgtaagaggctgcgcagtgaagacggccagcccatggttctgaagctgaaggattggccccccggcgaagactttcgggatatgatgcccacacggtttgaggacttgatggaaaatttgccactgcctgaatataccaagcgcgacgggagactcaacttggcaagccggctgccgagctattttgtgcggccagacctcggtccaaagatgtacaatgcctacggactcattaccgcagaagatcgacgggtggggactaccaatctccacctcgacgtcagcgatgctgtcaacgttatggtctatgtcggaatccctatcggcgaaggagcacatgatgaggaggtgttgaagacaatcgacgaaggcgatgccgatgaagtgaccaaacagagaatccatgatggcaaagagaagccgggcgccctctggcacatttacgcagcaaaagatgcagagaagatccgcgagcttcttcgaaaggtgggcgaagagcagggtcaggagaaccccccagatcacgatccgatccacgatcaatcatggtatttggaccaaacgctgcggaagcgactttacgaggagtatggcgtgcagggttgggcaatagtgcagtttctgggagatgcagtgtttattccggcaggggcccctcatcaggtccataatctctatagttgcattaaggtcgccgaagatttcgttagccctgagcacgtcaagcactgcttcaggctgactcaggaatttaggcacttgtcaaacactcacactaaccacgaggacaagctgcaagtcaaaaatatcatttatcacgccgtcaaggatgcagtggggactctgaaggcccatgaatctaaactcgccaggtcatag

SEQ ID NO: 192348 - DNA, 5286 bp, Artificial Sequence
  derived and/or modified sequence
atggctgatgctgctgccagccctgtgggcaagaggctgctgctgctgtttgctgacacagctgccagcgccagcgccagcgccccagctgctgctgctgccagcggggaccccggccctgccctgcggacccgggcctggagggctggcaccgtgcgggccatgtctggagctgtgccccaggacctggccatctttgtggagtttgatggctgcaactggaagcagcacagctgggtgaaggtgcacgccgaggaggtgattgtgctgctgctggagggcagcctggtgtgggccccccgggaggaccctgtgctgctgcagggcatccgggtgtccatcgcccagtggccagccctgaccttcacccccctggtggacaagctgggcctgggctctgtggtgcctgtggagtacctgctggaccgggagctgcgcttcctgagtgatgccaacggcctgcacctgttccagatgggcacagacagccagaaccagatcctgctggagcacgccgccctgcgggagaccgtgaatgccctgatcagtgaccagaagctgcaggagatcttcagccggggcccctacagcgtgcagggccaccgggtgaagatctaccagcctgagggggaggagggctggctgtatggagtggtgagccaccaggacagcatcacccggctgatggaggtgtctgtgacagagagcggggagatcaagtctgtggaccccaggctcatccacgtgatgctgatggacaacagcgccccccagagcgagggcggcaccctgaaggctgtgaagagcagcaagggcaagaagaagcgggagagcattgagggcaaggatggaagaagaaggaagagcgccagtgacagcggctgtgaccctgccagcaagaagctgaagggggacagaggagaggtggacagcaatggaagtgatggaggagaggccagccggggcccctggaagggcggcaatgccagcggggagcccggcctggaccagagggccaagcagccccccagcacctttgtgccccagatcaacagaaacatccgctttgccacctacaccaaggaaaatggaagaaccctggtggtgcaggatgagcctgtgggcggggacaccccagccagcttcaccccctacagcacagccaccggccagacccccctggcccctgaggtgggcggcgctgagaacaaggaggccggcaagaccctggagcaggtgggccagggcatcgtggccagcgctgctgtggtgaccacagccagcagcacccccaacacagtgcgcatcagtgacaccggcctggccgccggcaccgtgcctgagaagcagaagggcagccgcagccaggccagcggggagaacagcagaaattccatcctggccagcagcggctttggagcccccctgcccagcagcagccagcccctgacctttggaagtggccgcagccagagcaatggagtgctggccacagagaacaagcccctgggcttctcctttggctgcagcagcgcccaggaggcccagaaggacacagacctgagcaagaacctcttcttccagtgcatgagccagaccctgcccaccagcaactacttcaccaccgtgtctgagagcctggctgatgacagcagcagccgggacagcttcaagcagagcctggagagcctgagcagcggcctgtgcaagggccgctctgtgctgggcacagacaccaagccaggcagcaaggccggcagctctgtggacaggaaggtgcctgctgagagcatgcccaccctgaccccagccttccccaggagcctgctgaatgcccggaccccagagaaccatgaaaatctcttcctgcagccccccaagctgagccgggaggagcccagcaaccccttcctggcctttgtggagaaggtggagcacagccccttcagcagctttgccagccaggccagcggcagcagcagcagcgccaccaccgtgaccagcaaggtggcccccagctggccagagagccacagcagcgctgacagcgccagcctggccaagaagaagcccctcttcatcaccacagacagcagcaagctggtgtctggagtgctgggcagcgccctgaccagcggcggccccagcctgagcgccatgggaaatggccgcagcagcagccccaccagcagcctgacccagcccatcgagatgcccaccctgagcagcagccccacagaggagcggcccaccgtgggccctggccagcaggacaaccccctgctgaagaccttcagcaatgtgtttggccgccacagcggcggcttcctgagcagccctgctgacttcagccaggagaacaaggccccctttgaagctgtgaagcgcttcagcctggatgagaggagcctggcctgccggcaggacagcgacagcagcaccaacagcgacctgagtgacctgagtgacagcgaggagcagctgcaggccaagacaggcctgaagggcatccctgagcacctgatgggcaagctgggccccaacggggagaggtctgctgagctgctgctgggcaagagcaagggcaagcaggcccccaagggccggcccaggacagcccccctgaaggtgggccagagcgtgctgaaggatgtgtccaaggtgaagaagctgaagcagagcggggagcccttcctgcaggacggcagctgcatcaacgtggccccccacctgcacaagtgccgggagtgccgcctggagcgctacaggaagttcaaggagcaggagcaggatgacagcacagtggcctgccgcttcttccacttcagaagactcatcttcaccaggaagggcgtgctgcgggtggagggcttcctgagcccccagcagagcgaccctgatgccatgaacctgtggatccccagcagcagcctggccgagggcatcgacctggagaccagcaagtacatcctggccaacgtgggggaccagttctgccagctggtgatgtctgagaaggaggccatgatgatggtggagccccaccagaaggtggcctggaagagagctgtgcggggcgtgcgggagatgtgtgatgtgtgtgagaccaccctcttcaacatccactgggtgtgcaggaaatgtggcttcggcgtgtgcctggactgctaccgcctgaggaagagccggcccaggagtgaaacagaggagatgggagatgaggaggtgttctcctggctgaagtgtgccaagggccagagccatgagcctgagaacctgatgcccacccagatcatccctggaacagccctgtacaacattggagacatggtgcatgctgcccggggcaagtggggcatcaaggccaactgcccctgcatcagccggcagaacaagtctgtgctgcggcctgctgtgaccaacggcatgagccagctgcccagcatcaaccccagcgccagcagtggaaatgagaccaccttcagcggcggcggcggccctgcccctgtgaccaccccagagccagaccacgtgcccaaggctgacagcacagacatccgctctgaggagcccctgaagacagacagcagcgccagcaacagcaacagcgagctgaaggccatccggcccccctgcccagacacagccccacccagcagcgccctgcactggctggccgacctggccacccagaaggccaaggaggagaccaaggaggccggcagcctgcggtctgtgctgaacaaggagagccacagccccttcggcctggacagcttcaacagcacagccaaggtgagccccctgacccccaagctgttcaacagcctgctgctgggccccacagccagcaacaacaagacagagggcagcagcctgcgggacctgctgcacagcggccctgggaagctgccccagacccccctggacaccggcatccccttcccccctgtgttcagcaccagcagcgctggggtgaagagcaaggccagcctgcccaacttcctggaccacatcatcgcctctgtggtggagaacaagaagaccagtgatgccagcaagagggcctgcaacctgacagacacccagaaggaggtgaaggagatggtgatgggcctgaatgtgctggacccccacaccagccacagctggctgtgtgatggccgcctgctgtgcctgcatgaccccagcaacaagaacaactggaagatcttccgggagtgctggaagcagggccagcctgtgctggtgtctggagtgcacaagaagctgaagtctgagctgtggaagccagaggccttcagccaggagtttggagaccaggatgtggacctggtgaactgcaggaactgtgccatcatcagtgatgtgaaggtgcgggacttctgggatggctttgagatcatctgcaagaggctgcggagtgaagatggccagcccatggtgctgaagctgaaggactggcccccaggagaggacttccgggacatgatgcccaccaggtttgaggacctgatggagaacctgcccctgcctgagtacaccaagagagatggccgcctgaacctggccagccggctgcccagctactttgtgcggccagacctgggccccaagatgtacaatgcctacggcctcatcacagctgaggaccggcgggtgggcaccaccaacctgcacctggatgtgtctgatgctgtgaatgtgatggtgtatgtgggcatccccatcggggagggcgcccatgatgaggaggtgctgaagaccattgatgaaggagatgctgatgaggtgaccaagcagagaattcatgatggcaaggagaagccaggggccctgtggcacatctatgctgccaaggatgctgagaagatccgggagctgctgaggaaggtgggggaggagcagggccaggagaaccccccagaccatgaccccatccatgaccagagctggtacctggaccagaccctgaggaagaggctgtatgaggagtatggagtgcagggctgggccatcgtgcagttcctgggagatgctgtgttcatcccagctggggccccccaccaggtgcacaacctgtacagctgcatcaaggtggccgaggactttgtgtccccagagcacgtgaagcactgcttccggctgacccaggagttccgccacctgagcaacacccacaccaaccacgaggacaagctgcaggtgaagaacatcatctaccacgctgtgaaggatgctgtgggcaccctgaaggcccacgagagcaagctggcccggagctag

SEQ ID NO: 192349 - DNA, 4254 bp, Artificial Sequence
  derived and/or modified sequence
atgggcgccatggagatcaacagaaacatccgctttgccacctacaccaaggaaaatggaagaaccctggtggtgcaggatgagcctgtgggcggggacaccccagccagcttcaccccctacagcacagccaccggccagacccccctggcccctgaggtgggcggcgctgagaacaaggaggccggcaagaccctggagcaggtgggccagggcatcgtggccagcgctgctgtggtgaccacagccagcagcacccccaacacagtgcgcatcagtgacaccggcctggccgccggcaccgtgcctgagaagcagaagggcagccgcagccaggccagcggggagaacagcagaaattccatcctggccagcagcggctttggagcccccctgcccagcagcagccagcccctgacctttggaagtggccgcagccagagcaatggagtgctggccacagagaacaagcccctgggcttctcctttggctgcagcagcgcccaggaggcccagaaggacacagacctgagcaagaacctcttcttccagtgcatgagccagaccctgcccaccagcaactacttcaccaccgtgtctgagagcctggctgatgacagcagcagccgggacagcttcaagcagagcctggagagcctgagcagcggcctgtgcaagggccgctctgtgctgggcacagacaccaagccaggcagcaaggccggcagctctgtggacaggaaggtgcctgctgagagcatgcccaccctgaccccagccttccccaggagcctgctgaatgcccggaccccagagaaccatgaaaatctcttcctgcagccccccaagctgagccgggaggagcccagcaaccccttcctggcctttgtggagaaggtggagcacagccccttcagcagctttgccagccaggccagcggcagcagcagcagcgccaccaccgtgaccagcaaggtggcccccagctggccagagagccacagcagcgctgacagcgccagcctggccaagaagaagcccctcttcatcaccacagacagcagcaagctggtgtctggagtgctgggcagcgccctgaccagcggcggccccagcctgagcgccatgggaaatggccgcagcagcagccccaccagcagcctgacccagcccatcgagatgcccaccctgagcagcagccccacagaggagcggcccaccgtgggccctggccagcaggacaaccccctgctgaagaccttcagcaatgtgtttggccgccacagcggcggcttcctgagcagccctgctgacttcagccaggagaacaaggccccctttgaagctgtgaagcgcttcagcctggatgagaggagcctggcctgccggcaggacagcgacagcagcaccaacagcgacctgagtgacctgagtgacagcgaggagcagctgcaggccaagacaggcctgaagggcatccctgagcacctgatgggcaagctgggccccaacggggagaggtctgctgagctgctgctgggcaagagcaagggcaagcaggcccccaagggccggcccaggacagcccccctgaaggtgggccagagcgtgctgaaggatgtgtccaaggtgaagaagctgaagcagagcggggagcccttcctgcaggacggcagctgcatcaacgtggccccccacctgcacaagtgccgggagtgccgcctggagcgctacaggaagttcaaggagcaggagcaggatgacagcacagtggcctgccgcttcttccacttcagaagactcatcttcaccaggaagggcgtgctgcgggtggagggcttcctgagcccccagcagagcgaccctgatgccatgaacctgtggatccccagcagcagcctggccgagggcatcgacctggagaccagcaagtacatcctggccaacgtgggggaccagttctgccagctggtgatgtctgagaaggaggccatgatgatggtggagccccaccagaaggtggcctggaagagagctgtgcggggcgtgcgggagatgtgtgatgtgtgtgagaccaccctcttcaacatccactgggtgtgcaggaaatgtggcttcggcgtgtgcctggactgctaccgcctgaggaagagccggcccaggagtgaaacagaggagatgggagatgaggaggtgttctcctggctgaagtgtgccaagggccagagccatgagcctgagaacctgatgcccacccagatcatccctggaacagccctgtacaacattggagacatggtgcatgctgcccggggcaagtggggcatcaaggccaactgcccctgcatcagccggcagaacaagtctgtgctgcggcctgctgtgaccaacggcatgagccagctgcccagcatcaaccccagcgccagcagtggaaatgagaccaccttcagcggcggcggcggccctgcccctgtgaccaccccagagccagaccacgtgcccaaggctgacagcacagacatccgctctgaggagcccctgaagacagacagcagcgccagcaacagcaacagcgagctgaaggccatccggcccccctgcccagacacagccccacccagcagcgccctgcactggctggccgacctggccacccagaaggccaaggaggagaccaaggaggccggcagcctgcggtctgtgctgaacaaggagagccacagccccttcggcctggacagcttcaacagcacagccaaggtgagccccctgacccccaagctgttcaacagcctgctgctgggccccacagccagcaacaacaagacagagggcagcagcctgcgggacctgctgcacagcggccctgggaagctgccccagacccccctggacaccggcatccccttcccccctgtgttcagcaccagcagcgctggggtgaagagcaaggccagcctgcccaacttcctggaccacatcatcgcctctgtggtggagaacaagaagaccagtgatgccagcaagagggcctgcaacctgacagacacccagaaggaggtgaaggagatggtgatgggcctgaatgtgctggacccccacaccagccacagctggctgtgtgatggccgcctgctgtgcctgcatgaccccagcaacaagaacaactggaagatcttccgggagtgctggaagcagggccagcctgtgctggtgtctggagtgcacaagaagctgaagtctgagctgtggaagccagaggccttcagccaggagtttggagaccaggatgtggacctggtgaactgcaggaactgtgccatcatcagtgatgtgaaggtgcgggacttctgggatggctttgagatcatctgcaagaggctgcggagtgaagatggccagcccatggtgctgaagctgaaggactggcccccaggagaggacttccgggacatgatgcccaccaggtttgaggacctgatggagaacctgcccctgcctgagtacaccaagagagatggccgcctgaacctggccagccggctgcccagctactttgtgcggccagacctgggccccaagatgtacaatgcctacggcctcatcacagctgaggaccggcgggtgggcaccaccaacctgcacctggatgtgtctgatgctgtgaatgtgatggtgtatgtgggcatccccatcggggagggcgcccatgatgaggaggtgctgaagaccattgatgaaggagatgctgatgaggtgaccaagcagagaattcatgatggcaaggagaagccaggggccctgtggcacatctatgctgccaaggatgctgagaagatccgggagctgctgaggaaggtgggggaggagcagggccaggagaaccccccagaccatgaccccatccatgaccagagctggtacctggaccagaccctgaggaagaggctgtatgaggagtatggagtgcagggctgggccatcgtgcagttcctgggagatgctgtgttcatcccagctggggccccccaccaggtgcacaacctgtacagctgcatcaaggtggccgaggactttgtgtccccagagcacgtgaagcactgcttccggctgacccaggagttccgccacctgagcaacacccacaccaaccacgaggacaagctgcaggtgaagaacatcatctaccacgctgtgaaggatgctgtgggcaccctgaaggcccacgagagcaagctggcccggagctag

SEQ ID NO: 192350 - DNA, 2382 bp, Artificial Sequence
  derived and/or modified sequence
atgaacctgtggatccccagcagcagcctggccgagggcatcgacctggagaccagcaagtacatcctggccaacgtgggggaccagttctgccagctggtgatgtctgagaaggaggccatgatgatggtggagccccaccagaaggtggcctggaagagagctgtgcggggcgtgcgggagatgtgtgatgtgtgtgagaccaccctcttcaacatccactgggtgtgcaggaaatgtggcttcggcgtgtgcctggactgctaccgcctgaggaagagccggcccaggagtgaaacagaggagatgggagatgaggaggtgttctcctggctgaagtgtgccaagggccagagccatgagcctgagaacctgatgcccacccagatcatccctggaacagccctgtacaacattggagacatggtgcatgctgcccggggcaagtggggcatcaaggccaactgcccctgcatcagccggcagaacaagtctgtgctgcggcctgctgtgaccaacggcatgagccagctgcccagcatcaaccccagcgccagcagtggaaatgagaccaccttcagcggcggcggcggccctgcccctgtgaccaccccagagccagaccacgtgcccaaggctgacagcacagacatccgctctgaggagcccctgaagacagacagcagcgccagcaacagcaacagcgagctgaaggccatccggcccccctgcccagacacagccccacccagcagcgccctgcactggctggccgacctggccacccagaaggccaaggaggagaccaaggaggccggcagcctgcggtctgtgctgaacaaggagagccacagccccttcggcctggacagcttcaacagcacagccaaggtgagccccctgacccccaagctgttcaacagcctgctgctgggccccacagccagcaacaacaagacagagggcagcagcctgcgggacctgctgcacagcggccctgggaagctgccccagacccccctggacaccggcatccccttcccccctgtgttcagcaccagcagcgctggggtgaagagcaaggccagcctgcccaacttcctggaccacatcatcgcctctgtggtggagaacaagaagaccagtgatgccagcaagagggcctgcaacctgacagacacccagaaggaggtgaaggagatggtgatgggcctgaatgtgctggacccccacaccagccacagctggctgtgtgatggccgcctgctgtgcctgcatgaccccagcaacaagaacaactggaagatcttccgggagtgctggaagcagggccagcctgtgctggtgtctggagtgcacaagaagctgaagtctgagctgtggaagccagaggccttcagccaggagtttggagaccaggatgtggacctggtgaactgcaggaactgtgccatcatcagtgatgtgaaggtgcgggacttctgggatggctttgagatcatctgcaagaggctgcggagtgaagatggccagcccatggtgctgaagctgaaggactggcccccaggagaggacttccgggacatgatgcccaccaggtttgaggacctgatggagaacctgcccctgcctgagtacaccaagagagatggccgcctgaacctggccagccggctgcccagctactttgtgcggccagacctgggccccaagatgtacaatgcctacggcctcatcacagctgaggaccggcgggtgggcaccaccaacctgcacctggatgtgtctgatgctgtgaatgtgatggtgtatgtgggcatccccatcggggagggcgcccatgatgaggaggtgctgaagaccattgatgaaggagatgctgatgaggtgaccaagcagagaattcatgatggcaaggagaagccaggggccctgtggcacatctatgctgccaaggatgctgagaagatccgggagctgctgaggaaggtgggggaggagcagggccaggagaaccccccagaccatgaccccatccatgaccagagctggtacctggaccagaccctgaggaagaggctgtatgaggagtatggagtgcagggctgggccatcgtgcagttcctgggagatgctgtgttcatcccagctggggccccccaccaggtgcacaacctgtacagctgcatcaaggtggccgaggactttgtgtccccagagcacgtgaagcactgcttccggctgacccaggagttccgccacctgagcaacacccacaccaaccacgaggacaagctgcaggtgaagaacatcatctaccacgctgtgaaggatgctgtgggcaccctgaaggcccacgagagcaagctggcccggagctag

SEQ ID NO: 192351 - DNA, 6813 bp, Artificial Sequence
  derived and/or modified sequence
gcggggcccaggctgcggctccgctcccggccacggggggcgctgcgctgcgccggtggttggtggtggctgttggggggggtgggggggaacggcggccgcgggtggtgcggagggaggccttgcgggcggatcgggcgcttggcggcggaggtggtgggaggcggcgggcgggagcgcgggtcaggccggccccggcgatggcggacgcggcggcctccccggtgggcaagcggctgctgctgctgttcgcggacactgcggcctcagcctcggcctcggctcccgcggcggcagcggcgagcggagatccggggcctgcgctgcgcactcgagcctggcgggccggcacggtgcgggccatgagcggggcggtgccccaggacctagcgatctttgtagaatttgatggctgtaactggaagcaacactcctgggtaaaagttcatgctgaggaagttatcgtgcttctgctggaagggtctcttgtatgggcgccccgtgaggacccagtccttctccagggcattcgagtctccattgcacaatggccagccctgacttttactccccttgtagataaactgggtttgggttctgtggttccagtggaatatcttctggatcgagagcttcggttcctgtcagatgccaatgggttgcatctgtttcagatgggaacagatagccaaaaccagattcttttggaacatgctgcactgagagaaacagttaatgctttgatcagtgaccaaaagctacaagagatattcagccgaggtccctacagtgttcaaggtcacagggtcaaaatatatcagccagagggggaagaagggtggctctatggtgttgtgagccatcaggactccatcactcgtcttatggaggtgtctgtaactgagagtggtgagatcaagtcggtagatcccagactaatccatgtgatgctgatggataattcagcgcctcaaagcgaggggggtacgttaaaagcagtaaaatcttccaaaggaaagaagaagagagaaagcatagaggggaaagatggccggaggaggaaaagtgcttcggactctgggtgtgaccctgcatcaaagaaattaaaaggagacaggggtgaagtagacagtaatgggagcgatggaggtgaggcaagccgagggccctggaaaggagggaatgccagtggagagccagggctggatcagagagccaagcagccaccgtctacatttgtcccccagataaaccgcaacattcgctttgccacttacaccaaagaaaacggcaggactctggtggtgcaggatgagcctgtaggtggggacacacctgcatctttcactccatattctacagccacaggtcagacacctttggccccagaggtgggtggagccgaaaacaaagaggcaggaaaaacactggaacaagttggccagggcatagtggcttccgcagctgtggtcactaccgccagctccaccccaaacacagtgaggatctcagacactggccttgcagcagggactgtgccagaaaaacagaaaggcagccggtcgcaggcctcgggagagaattcaagaaattctattctggcctcttctggatttggagcacctctccctagttcatcgcaacctttgacttttggaagtggaaggagccagtccaatggtgttctagccacagagaacaaacctttgggcttctcttttggctgtagctctgcacaagaggcacagaaagacactgatctctccaaaaacttgttttttcaatgcatgtcccaaactttacctaccagtaactacttcactactgtttcagagagtttggctgatgattcttctagtcgggactcattcaaacaaagccttgagagcctgagctcaggcctgtgtaaaggcagatccgttcttggaacagacactaagccaggctctaaggctggcagctctgtggaccggaaagtgcctgcagagtccatgcccaccctcactccagccttcccacggagcctcctaaatgcccgtaccccagagaatcatgaaaatctatttttacagccccccaaattgtcccgagaagagccttctaatcctttcctggcatttgtggagaaagttgaacacagccctttcagtagttttgcatctcaggcatcaggtagctcctcttctgctaccactgtcacctccaaggtggcacccagctggcccgagtctcactcctctgcagattcggcatctttagcaaagaagaaacccctcttcattacaactgactcctccaagctagtatctggtgttctgggctcagctcttaccagtgggggcccaagcctctctgccatggggaatggccgctccagctcgcccaccagcagcctcactcagcccattgagatgccaactctctcctctagccccacagaggagaggccaactgtggggcctgggcagcaggacaatcccctcctcaaaacctttagtaacgtctttggcaggcactcaggcggctttctgtcctccccggcagatttttcacaggagaacaaagctccttttgaagctgtgaaaaggttctcactggatgaacgaagcttggcttgcagacaagactcggactccagcaccaacagtgacctgtcagatttgagtgactctgaggagcagctgcaggctaagacaggcctgaagggaattccagagcacctgatggggaagctgggccccaatggggagcgcagtgctgagctgttgctgggcaaaagcaaagggaagcaggcccccaagggccggcctcggactgcccccctgaaagttggccagtcagtgctgaaagatgtaagcaaagtgaagaagctgaagcaatctggagagcccttcctgcaggatgggtcatgcatcaatgtggcacctcatctgcacaagtgtcgtgaatgccgcctggagcggtaccggaagtttaaggaacaggagcaagatgattctactgtagcctgccgtttctttcacttccggaggttgatcttcactcgaaaaggggtactccgtgtggaggggtttttaagcccccagcaaagtgaccctgatgccatgaacctgtggattccctcttcctccctagcagaagggatagatctagagacctcaaaatacatcctggccaatgttggggaccagttctgccagctcgtaatgtctgagaaggaggccatgatgatggtggagccacaccagaaagtggcatggaagcgagctgtgcgtggtgtacgggagatgtgtgatgtgtgtgaaacaactctcttcaacatccactgggtttgtcgcaaatgtggatttggggtctgccttgactgttaccggctcaggaaaagccggccacgcagtgagacagaagagatgggtgatgaagaagttttctcctggttgaagtgtgcaaagggacagtcccacgaaccagagaatctcatgcccacacaaattattcctggcacagctctttacaatattggagacatggtacatgctgcccggggcaagtggggaattaaagcaaactgcccttgtatcagtcgacagaacaaatctgtattgagacctgccgtcaccaatgggatgtcacagcttcctagcataaaccctagtgcctcttctggaaacgaaactaccttctctggtggaggaggaccggcaccagtaacaactccagagccggaccatgttcccaaagccgacagcactgacatcagatctgaagagcctctgaaaacagacagttcggcatcaaatagcaatagtgaactgaaagccatcaggcctccttgccctgacacggccccaccctcctccgccctgcactggttggcagatttagcaactcagaaggctaaagaagaaacaaaagaagcagggtccctgaggtcggtgctcaataaagagtctcattcaccctttgggctggactcgttcaactccactgcaaaggtctctccgctgactccaaagctttttaacagtctgttgctgggtcccactgcctccaacaacaaaaccgaagggtctagccttcgagacctccttcactccgggccgggaaaacttcctcaaacccccttggacacaggcataccctttcccccggtcttctctacatcctcagcaggagtgaagagcaaggccagcctacccaactttcttgaccacatcattgcctcagtggtagaaaataagaaaacctcagatgcttcaaagcgggcctgcaacttgactgatacccagaaggaagtgaaggagatggtgatggggttaaatgtgctagatccccatacttctcactcctggctttgtgatgggaggcttctgtgtctccatgaccccagcaacaaaaacaattggaagatcttccgggagtgttggaagcaaggtcagccagtgctggtttcgggggtacataaaaagctcaagtctgagctctggaagccagaagcctttagccaggaatttggagaccaggatgtagacttggtgaactgcaggaactgtgctataatttccgatgtgaaagttcgggatttctgggatggtttcgagatcatatgcaaacgactacggtcagaagatgggcagccaatggtgctcaaactcaaggactggcctcctggggaagattttcgagacatgatgccaaccaggtttgaagatctgatggagaaccttcctctgccagaatataccaaacgagatggcaggctcaatctggcctctaggctacctagctactttgtaaggcctgatctgggccccaagatgtacaacgcctatgggttgataacagcagaagatagaagagttggtacaacaaatcttcacttagatgtgtctgatgctgttaatgtgatggtgtatgttgggattcccatcggggagggtgctcatgatgaagaggtactcaagacaattgacgagggagatgccgatgaggtgacgaagcagaggattcatgatggaaaagagaagccaggtgctttatggcacatctatgcagccaaggatgcagagaagatccgggagctgctccgaaaggttggagaagaacaaggccaagagaacccccctgatcatgacccaattcatgaccaaagttggtacctggaccagaccctccgtaagcgactctatgaggagtatggcgtgcaaggctgggctattgtgcagttcctaggtgatgctgttttcatacctgctggagccccacaccaggttcacaatctatacagttgcataaaagtagcagaagactttgtatctccagaacatgtaaagcactgtttccgcctgactcaggaattcaggcatctctctaacactcatacaaatcatgaggataaactgcaggtgaagaacatcatttaccatgcagtgaaagatgcggttggcaccctcaaggctcatgaatccaaactggcaaggtcctaggcatggagaaactccaagctcctctgtgaagcaggtctttcactcacaacacttaacagggaacggcagggctctttgctggagcagaggcccttcacccagagccagtgtggtcagtattccaaactctccagccactctcttctacgctgcctcaacactgaaggttgacacaggaaagtcgtactgttcacacacacagtttgagactccaagccaagagtgccacatccctatcctgtggccttttggaaatccaaattgcctgaacatggcggggctttcctgcacattctcctgatttgagattcacgggcacacctttcttttcttttcctcttgtgcctagttaagtggaaatgtgtttggagataggggaaatcacataactggtacaagtatggggtaattgcttaaacatgcctggtggaagtctgatagcgtctctgcacgtgacctctgacaaagcccatcccaggagacggggtgaagctattccccacactctcctgtgaacactggagtcttgcaagacccagggagaacccactgcttttcccaggaggctccaggattaggaaatgtgtgtatttagtgaaaaataggtttgtagtgaaatagttactatttcatgaaagtagatatttttagaatttttgaaataccacagttgttttcctggattataaggaaaggcacattacatttagtcttcctttcgatataaaactctttgaagaaatatgatttttagaaatcagctacccattatagcacaaaatcagccaaagcagaatttttaaaaattggcttttttaggattctttttctccccctcccatcttagtcttaccttgagggaacagtcatatgagaaggaactttgtcacatctaagctgtggtgtgttccccatgtgtgtgtacaacactggtgactccaggaaccattttcacctattaccagtgttccctggggactcctcttaatgtttccaaatgggaaggacagttgatttccaacatgaggttttttgttttttatccagaaatattttcagcaaaactttccaactgagtggagtctgattaaggatttatttgaaaatggtgggattcattggcccataggtacattggaaaatgtatatctctccagctgtactgtagtgccctgcaggctgtttatatgttcacagttacttttttttttttttttaaataaaagtcatttaatgtagaatacttttaatttcactttctgtattttaattttgttgaagggctgattgggatttccatgttcttattaaaaatctaacaaatctg

SEQ ID NO: 192352 - DNA, 5581 bp, Artificial Sequence
  derived and/or modified sequence
atgggagcgatggagataaaccgcaacattcgctttgccacttacaccaaagaaaacggcaggactctggtggtgcaggatgagcctgtaggtggggacacacctgcatctttcactccatattctacagccacaggtcagacacctttggccccagaggtgggtggagccgaaaacaaagaggcaggaaaaacactggaacaagttggccagggcatagtggcttccgcagctgtggtcactaccgccagctccaccccaaacacagtgaggatctcagacactggccttgcagcagggactgtgccagaaaaacagaaaggcagccggtcgcaggcctcgggagagaattcaagaaattctattctggcctcttctggatttggagcacctctccctagttcatcgcaacctttgacttttggaagtggaaggagccagtccaatggtgttctagccacagagaacaaacctttgggcttctcttttggctgtagctctgcacaagaggcacagaaagacactgatctctccaaaaacttgttttttcaatgcatgtcccaaactttacctaccagtaactacttcactactgtttcagagagtttggctgatgattcttctagtcgggactcattcaaacaaagccttgagagcctgagctcaggcctgtgtaaaggcagatccgttcttggaacagacactaagccaggctctaaggctggcagctctgtggaccggaaagtgcctgcagagtccatgcccaccctcactccagccttcccacggagcctcctaaatgcccgtaccccagagaatcatgaaaatctatttttacagccccccaaattgtcccgagaagagccttctaatcctttcctggcatttgtggagaaagttgaacacagccctttcagtagttttgcatctcaggcatcaggtagctcctcttctgctaccactgtcacctccaaggtggcacccagctggcccgagtctcactcctctgcagattcggcatctttagcaaagaagaaacccctcttcattacaactgactcctccaagctagtatctggtgttctgggctcagctcttaccagtgggggcccaagcctctctgccatggggaatggccgctccagctcgcccaccagcagcctcactcagcccattgagatgccaactctctcctctagccccacagaggagaggccaactgtggggcctgggcagcaggacaatcccctcctcaaaacctttagtaacgtctttggcaggcactcaggcggctttctgtcctccccggcagatttttcacaggagaacaaagctccttttgaagctgtgaaaaggttctcactggatgaacgaagcttggcttgcagacaagactcggactccagcaccaacagtgacctgtcagatttgagtgactctgaggagcagctgcaggctaagacaggcctgaagggaattccagagcacctgatggggaagctgggccccaatggggagcgcagtgctgagctgttgctgggcaaaagcaaagggaagcaggcccccaagggccggcctcggactgcccccctgaaagttggccagtcagtgctgaaagatgtaagcaaagtgaagaagctgaagcaatctggagagcccttcctgcaggatgggtcatgcatcaatgtggcacctcatctgcacaagtgtcgtgaatgccgcctggagcggtaccggaagtttaaggaacaggagcaagatgattctactgtagcctgccgtttctttcacttccggaggttgatcttcactcgaaaaggggtactccgtgtggaggggtttttaagcccccagcaaagtgaccctgatgccatgaacctgtggattccctcttcctccctagcagaagggatagatctagagacctcaaaatacatcctggccaatgttggggaccagttctgccagctcgtaatgtctgagaaggaggccatgatgatggtggagccacaccagaaagtggcatggaagcgagctgtgcgtggtgtacgggagatgtgtgatgtgtgtgaaacaactctcttcaacatccactgggtttgtcgcaaatgtggatttggggtctgccttgactgttaccggctcaggaaaagccggccacgcagtgagacagaagagatgggtgatgaagaagttttctcctggttgaagtgtgcaaagggacagtcccacgaaccagagaatctcatgcccacacaaattattcctggcacagctctttacaatattggagacatggtacatgctgcccggggcaagtggggaattaaagcaaactgcccttgtatcagtcgacagaacaaatctgtattgagacctgccgtcaccaatgggatgtcacagcttcctagcataaaccctagtgcctcttctggaaacgaaactaccttctctggtggaggaggaccggcaccagtaacaactccagagccggaccatgttcccaaagccgacagcactgacatcagatctgaagagcctctgaaaacagacagttcggcatcaaatagcaatagtgaactgaaagccatcaggcctccttgccctgacacggccccaccctcctccgccctgcactggttggcagatttagcaactcagaaggctaaagaagaaacaaaagaagcagggtccctgaggtcggtgctcaataaagagtctcattcaccctttgggctggactcgttcaactccactgcaaaggtctctccgctgactccaaagctttttaacagtctgttgctgggtcccactgcctccaacaacaaaaccgaagggtctagccttcgagacctccttcactccgggccgggaaaacttcctcaaacccccttggacacaggcataccctttcccccggtcttctctacatcctcagcaggagtgaagagcaaggccagcctacccaactttcttgaccacatcattgcctcagtggtagaaaataagaaaacctcagatgcttcaaagcgggcctgcaacttgactgatacccagaaggaagtgaaggagatggtgatggggttaaatgtgctagatccccatacttctcactcctggctttgtgatgggaggcttctgtgtctccatgaccccagcaacaaaaacaattggaagatcttccgggagtgttggaagcaaggtcagccagtgctggtttcgggggtacataaaaagctcaagtctgagctctggaagccagaagcctttagccaggaatttggagaccaggatgtagacttggtgaactgcaggaactgtgctataatttccgatgtgaaagttcgggatttctgggatggtttcgagatcatatgcaaacgactacggtcagaagatgggcagccaatggtgctcaaactcaaggactggcctcctggggaagattttcgagacatgatgccaaccaggtttgaagatctgatggagaaccttcctctgccagaatataccaaacgagatggcaggctcaatctggcctctaggctacctagctactttgtaaggcctgatctgggccccaagatgtacaacgcctatgggttgataacagcagaagatagaagagttggtacaacaaatcttcacttagatgtgtctgatgctgttaatgtgatggtgtatgttgggattcccatcggggagggtgctcatgatgaagaggtactcaagacaattgacgagggagatgccgatgaggtgacgaagcagaggattcatgatggaaaagagaagccaggtgctttatggcacatctatgcagccaaggatgcagagaagatccgggagctgctccgaaaggttggagaagaacaaggccaagagaacccccctgatcatgacccaattcatgaccaaagttggtacctggaccagaccctccgtaagcgactctatgaggagtatggcgtgcaaggctgggctattgtgcagttcctaggtgatgctgttttcatacctgctggagccccacaccaggttcacaatctatacagttgcataaaagtagcagaagactttgtatctccagaacatgtaaagcactgtttccgcctgactcaggaattcaggcatctctctaacactcatacaaatcatgaggataaactgcaggtgaagaacatcatttaccatgcagtgaaagatgcggttggcaccctcaaggctcatgaatccaaactggcaaggtcctaggcatggagaaactccaagctcctctgtgaagcaggtctttcactcacaacacttaacagggaacggcagggctctttgctggagcagaggcccttcacccagagccagtgtggtcagtattccaaactctccagccactctcttctacgctgcctcaacactgaaggttgacacaggaaagtcgtactgttcacacacacagtttgagactccaagccaagagtgccacatccctatcctgtggccttttggaaatccaaattgcctgaacatggcggggctttcctgcacattctcctgatttgagattcacgggcacacctttcttttcttttcctcttgtgcctagttaagtggaaatgtgtttggagataggggaaatcacataactggtacaagtatggggtaattgcttaaacatgcctggtggaagtctgatagcgtctctgcacgtgacctctgacaaagcccatcccaggagacggggtgaagctattccccacactctcctgtgaacactggagtcttgcaagacccagggagaacccactgcttttcccaggaggctccaggattaggaaatgtgtgtatttagtgaaaaataggtttgtagtgaaatagttactatttcatgaaagtagatatttttagaatttttgaaataccacagttgttttcctggattataaggaaaggcacattacatttagtcttcctttcgatataaaactctttgaagaaatatgatttttagaaatcagctacccattatagcacaaaatcagccaaagcagaatttttaaaaattggcttttttaggattctttttctccccctcccatcttagtcttaccttgagggaacagtcatatgagaaggaactttgtcacatctaagctgtggtgtgttccccatgtgtgtgtacaacactggtgactccaggaaccattttcacctattaccagtgttccctggggactcctcttaatgtttccaaatgggaaggacagttgatttccaacatgaggttttttgttttttatccagaaatattttcagcaaaactttccaactgagtggagtctgattaaggatttatttgaaaatggtgggattcattggcccataggtacattggaaaatgtatatctctccagctgtactgtagtgccctgcaggctgtttatatgttcacagttacttttttttttttttttaaataaaagtcatttaatgtagaatacttttaatttcactttctgtattttaattttgttgaagggctgattgggatttccatgttcttattaaaaatctaacaaatctg

SEQ ID NO: 192353 - DNA, 3034 bp, Artificial Sequence
  derived and/or modified sequence
gtgccagaaaaacagaaaggcagccggtcgcaggcctcgggagagttggccagtcagtgctgaaagatgtaagcaaagtgaagaagctgaagcaatctggagagcccttcctgcaggatgggtcatgcatcaatgtggcacctcatctgcacaagtgtcgtgaatgccgcctggagcggtaccggaagtttaaggaacaggagcaagatgattctactgtagcctgccgtttctttcacttccggaggttgatcttcactcgaaaaggggtactccgtgtggaggggtttttaagcccccagcaaagtgaccctgatgccatgaacctgtggattccctcttcctccctagcagaagggatagatctagagacctcaaaatacatcctggccaatgttggggaccagttctgccagctcgtaatgtctgagaaggaggccatgatgatggtggagccacaccagaaagtggcatggaagcgagctgtgcgtggtgtacgggagatgtgtgatgtgtgtgaaacaactctcttcaacatccactgggtttgtcgcaaatgtggatttggggtctgccttgactgttaccggctcaggaaaagccggccacgcagtgagacagaagagatgggtgatgaagaagttttctcctggttgaagtgtgcaaagggacagtcccacgaaccagagaatctcatgcccacacaaattattcctggcacagctctttacaatattggagacatggtacatgctgcccggggcaagtggggaattaaagcaaactgcccttgtatcagtcgacagaacaaatctgtattgagacctgccgtcaccaatgggatgtcacagcttcctagcataaaccctagtgcctcttctggaaacgaaactaccttctctggtggaggaggaccggcaccagtaacaactccagagccggaccatgttcccaaagccgacagcactgacatcagatctgaagagcctctgaaaacagacagttcggcatcaaatagcaatagtgaactgaaagccatcaggcctccttgccctgacacggccccaccctcctccgccctgcactggttggcagatttagcaactcagaaggctaaagaagaaacaaaagaagcagggtccctgaggtcggtgctcaataaagagtctcattcaccctttgggctggactcgttcaactccactgcaaaggtctctccgctgactccaaagctttttaacagtctgttgctgggtcccactgcctccaacaacaaaaccgaagggtctagccttcgagacctccttcactccgggccgggaaaacttcctcaaacccccttggacacaggcataccctttcccccggtcttctctacatcctcagcaggagtgaagagcaaggccagcctacccaactttcttgaccacatcattgcctcagtggtagaaaataagaaaacctcagatgcttcaaagcgggcctgcaacttgactgatacccagaaggaagtgaaggagatggtgatggggttaaatgtgctagatccccatacttctcactcctggctttgtgatgggaggcttctgtgtctccatgaccccagcaacaaaaacaattggaagatcttccgggagtgttggaagcaaggtcagccagtgctggtttcgggggtacataaaaagctcaagtctgagctctggaagccagaagcctttagccaggaatttggagaccaggatgtagacttggtgaactgcaggaactgtgctataatttccgatgtgaaagttcgggatttctgggatggtttcgagatcatatgcaaacgactacggtcagaagatgggcagccaatggtgctcaaactcaaggactggcctcctggggaagattttcgagacatgatgccaaccaggtttgaagatctgatggagaaccttcctctgccagaatataccaaacgagatggcaggctcaatctggcctctaggctacctagctactttgtaaggcctgatctgggccccaagatgtacaacgcctatgggttgataacagcagaagatagaagagttggtacaacaaatcttcacttagatgtgtctgatgctgttaatgtgatggtgtatgttgggattcccatcggggagggtgctcatgatgaagaggtactcaagacaattgacgagggagatgccgatgaggtgacgaagcagaggattcatgatggaaaagagaagccaggtgctttatggcacatctatgcagccaaggatgcagagaagatccgggagctgctccgaaaggttggagaagaacaaggccaagagaacccccctgatcatgacccaattcatgaccaaagttggtacctggaccagaccctccgtaagcgactctatgaggagtatggcgtgcaaggctgggctattgtgcagttcctaggtgatgctgttttcatacctgctggagccccacaccaggttcacaatctatacagttgcataaaagtagcagaagactttgtatctccagaacatgtaaagcactgtttccgcctgactcaggaattcaggcatctctctaacactcatacaaatcatgaggataaactgcaggtgaagaacatcatttaccatgcagtgaaagatgcggttggcaccctcaaggctcatgaatccaaactggcaaggtcctaggcatggagaaactccaagctcctctgtgaagcaggtctttcactcacaacacttaacagggaacggcagggctctttgctggagcagaggcccttcacccagagccagtgtggtcagtattccaaactctccagccactctcttctacgctgcctcaacactgaaggttgacacaggaaagtcgtactgttcacacacacagtttgagactccaagccaagagtgccacatccctatcctgtggccttttggaaatccaaattgcctgaacatggcggggctttcctgcacattctcctgatttgagattcacgggcacacctttcttttct

SEQ ID NO: 192354 - DNA, 5286 bp, Artificial Sequence
  derived and/or modified sequence
atggccgacgccgccgccagccccgtgggcaagcggctgctgctgttatttgccgacacagctgcctcagcttccgccagtgcgcccgctgccgccgccgcaagtggcgatcctgggccagctttgcggactcgggcctggagagctggcacggtgagagcaatgtccggagcagtgccccaagacctggccatcttcgtggaatttgacggctgcaattggaagcagcactcttgggtgaaggttcacgcagaggaagtcattgtgctactcctggagggatccctggtgtgggcccctcgcgaagaccccgtgctgttacagggtatccgtgtaagcatcgcacagtggcctgccctcacatttactccactggtggacaagttaggtttgggatcagtggttcccgtggagtatctgctagatagggagttacgcttcctaagtgacgccaatgggctgcacttattccaaatgggtactgatagccagaatcagatcctgctggagcacgctgccctgcgggagacggtgaatgccctgatctcagatcagaagcttcaggagatcttctctcgcgggccttattccgtgcaggggcatcgggtgaagatttatcagccagaaggggaagaaggttggctgtacggagtggtcagccaccaggattccattacacgtttaatggaggtatccgtgactgaatctggggagatcaaatcggtggacccccgcttgatccatgtgatgttaatggacaactccgccccccagtccgagggcggcaccctgaaggctgtgaaaagcagcaaaggaaaaaaaaaacgcgagagcattgagggcaaggatgggagacggcgtaaatcggccagcgatagcgggtgcgacccagcatcaaaaaaactgaaaggagataggggcgaggttgatagtaatgggtctgacggaggagaggcctcaagggggccctggaagggcgggaatgcctcaggggaacccggactagaccaacgcgccaaacagcctccatccacattcgttcctcagataaacagaaatattcgtttcgcgacctacaccaaggaaaatggtcggactctagttgtgcaagatgaaccagtggggggcgacaccccggcttccttcaccccatactctacagcaaccggtcaaacaccactggcccctgaggtgggtggagcagagaacaaagaggcagggaagaccctcgaacaggtggggcagggcatcgttgccagcgccgcagtggttaccactgcgagcagcactcccaatacagtccggattagcgacactggcttggcagcaggtactgtcccggaaaagcagaaaggcagcaggtcccaggccagtggcgaaaacagcaggaactcaattctcgctagtagcggattcggggctccactcccttcttctagtcagcctttgacattcggaagcggcagatcgcagtcgaatggtgtgttggcaacagagaataaacccttggggttcagctttggctgctcttccgcccaagaagctcagaaagatactgacttaagtaaaaatctgttcttccaatgcatgagtcagaccctgcccacctctaattattttacaaccgtgtccgaatctctcgcagatgattcatcctcacgagattcttttaaacagtccctcgaatcattgtcgagcggactctgcaaagggagatcagtactcggcacggacacaaagcccggctctaaggccgggtccagtgtggatagaaaagtcccagccgagtctatgccaactctaacccccgcttttcccagaagcctcctgaatgcccgcacacctgagaatcatgagaacctcttcctccagcctcctaaactcagtagggaggaaccatccaaccctttcttggcatttgtggagaaggttgagcactcacctttctcatcattcgcttctcaggcctcagggtcctccagctctgccacaactgtcacctctaaggtcgccccgtcttggcccgaatcacattcttctgccgactctgccagtcttgctaaaaagaaaccactttttattactaccgactcaagcaaactggtgtcaggggtgctgggcagcgccttaacatccggtggccccagcttgagtgccatgggcaatgggaggagctcctctccaacttcttcattgacccaacccatcgagatgccaacactgtcttccagcccaacagaggagcggcccaccgtgggaccaggtcagcaggataacccactgctgaaaacattctctaacgtctttggccgccactctggcggctttctaagctctcccgccgatttttctcaggaaaacaaagccccttttgaggcagtaaagcgtttctcactggatgagcgctccctggcctgccggcaggatagtgactctagcacgaattcggacctgtcggatctctctgactccgaggaacagctacaagctaaaaccgggctgaaggggattcctgagcatctgatgggcaaactggggcccaatggtgagcgctctgcggaacttcttctgggcaaaagcaagggaaagcaggcaccgaagggccggccccgcacggcgcctcttaaggtcggccagtccgtgctgaaagacgtcagcaaggtcaaaaaattgaaacaatccggagagccattcctgcaggacggctcttgcattaacgtggcaccccatctgcataagtgtagggagtgcagattggaaaggtacaggaagttcaaagagcaggagcaggacgacagtacagtcgcatgccgcttttttcattttcgccggctcatttttacgcgaaagggggttcttcgagtcgagggatttctgagcccccagcaatcagatcccgacgccatgaatctgtggatcccctctagtagcctcgcagaaggcatagacctggagacttccaaatacattctcgccaatgtcggcgaccagttctgtcagctggtgatgagcgagaaggaagccatgatgatggtggaacctcaccaaaaagtggcctggaaaagggcagtgcgaggtgttcgggagatgtgcgatgtctgcgaaaccacgctctttaatatacactgggtttgccggaaatgcggcttcggcgtatgcctggactgttatcgcctgcggaagtctaggcccagaagcgaaactgaggagatgggggatgaggaggtgttttcctggctgaaatgtgctaaaggccagagtcatgagcccgagaacctgatgcccacacagattatcccgggaaccgctctttataatattggcgatatggtgcatgccgctcgaggcaagtggggcattaaagccaactgcccatgtatctctaggcagaataaaagcgtgctcagacctgcagttactaacggcatgtcacagctgcctagcattaatccatcagcatcgtcaggaaacgaaacgaccttcagtgggggaggcggcccggctcccgtgaccacacccgaaccagaccacgttcccaaagctgattccactgatatacggagtgaggaaccactaaagaccgatagcagtgcctcaaattccaactctgagctcaaagccattaggcccccttgccccgatacagcaccaccttccagtgcgcttcattggcttgcagacctcgcaacccagaaggctaaggaggagacaaaggaagctggctcactgcgcagtgttctgaataaggaatcccacagtccattcggactcgactccttcaacagcactgccaaggtgtccccactgaccccaaaactgtttaattcattgttgctgggcccaacagcatctaataacaaaactgaggggtctagcttaagggatcttcttcacagcggtcccggcaagctgccccagactccattggataccgggatcccttttcctccagtttttagtacatcttccgccggggttaagtcaaaggcttctctgcccaatttcctagaccacataattgccagtgtggtggagaacaaaaaaactagcgacgcttctaagcgggcttgcaatctgacagacacccagaaggaggtcaaggagatggtgatgggattgaatgtacttgatcctcataccagccatagctggctctgcgatggcagacttctgtgccttcacgacccctctaacaaaaacaactggaagatctttagagaatgttggaaacagggtcaacccgtcttggtctctggggtgcacaagaagctcaagagcgaactgtggaaaccagaggcattctctcaagagttcggcgaccaagacgtcgacttagtcaactgccgcaattgtgctatcatctctgatgtgaaggtacgcgatttctgggatgggttcgagatcatttgcaagcgcttacggtccgaagacgggcaacctatggtgctcaaactcaaggactggcccccgggcgaggacttccgagacatgatgcctacgcggttcgaggatctgatggagaacctgcctctacctgagtatacgaagcgagacggtcggcttaacttggcaagccggctgccaagttactttgtgcgacccgatctgggacccaagatgtacaacgcttatggtctgataacggctgaggatcgtcgcgtcggaactaccaatctgcatctcgacgttagtgacgcagtaaatgtgatggtatacgttggcattccaattggtgagggcgcacatgatgaggaagtgcttaagacaatagatgaaggggacgccgacgaagtgactaagcaaagaattcacgacgggaaggagaaaccgggcgctttgtggcatatctacgcggctaaggacgccgaaaaaatacgcgagctactgcgcaaagttggtgaagagcagggccaggagaatccgcctgatcacgacccaatccatgaccagtcatggtatcttgatcagacactgcgaaagaggctctacgaagaatacggtgtgcagggatgggccatcgtgcagttcctgggagacgccgtctttatcccggctggcgccccccaccaagtccacaacctctactcgtgtatcaaggtggcagaggattttgttagccccgagcatgtcaagcactgcttccggctcacccaggaatttcggcatctgtctaatactcataccaaccacgaggataaactccaggtgaaaaacatcatttatcacgctgtcaaggacgccgtgggtactctgaaggcacatgagagcaaacttgccaggtcctag

SEQ ID NO: 192355 - DNA, 4254 bp, Artificial Sequence
  derived and/or modified sequence
atgggcgccatggagatcaaccggaacatccggttcgccacctacactaaagaaaacggcagaacactcgtggtccaggacgagcccgttggaggcgatactccagccagttttaccccttactccaccgcgacggggcagactcctttggcaccggaggtgggaggcgccgagaataaggaagccggtaaaactcttgaacaagttgggcaagggatagtggctagtgcggctgtggtgactacagcgagttccacccccaatacagttaggatttctgacacagggctagctgctggtacagtgcctgagaaacagaagggttcccgaagccaggcaagtggtgaaaatagccgcaactccatcctggcttcaagtggcttcggcgcaccgttgccctcctcatcgcagcccctcaccttcggttccggacgtagccagagcaacggagtccttgccacggagaacaaacccctcggtttctcatttgggtgttcatctgcacaggaagcacaaaaagacactgatttgagtaaaaatctcttctttcagtgcatgtcacagaccctacccactagtaactatttcacaactgtgtcagaatcattagctgatgattcctcatctcgggacagctttaagcaatccctggaatctttgtctagtgggctgtgcaaaggaaggagcgtgctcggcacggataccaagcccgggtccaaggccggctccagcgtcgaccggaaggttcctgcagagagcatgccgactctcactcctgcctttcctaggagcctgctcaacgcccgcactccggaaaaccatgaaaatctgttcctacaaccacccaaactctctcgggaggagccatctaatcccttcctcgcctttgtggagaaggtagagcattcaccctttagcagctttgcttctcaagcctcaggctctagtagtagcgcaactaccgtgacctccaaggtcgcccccagctggcctgagtcacattcttccgccgattcagctagcttggccaagaaaaagcctctgttcatcaccaccgacagttcaaagctggtgtccggagtgctgggctcagccctaacatctgggggcccatctctgtccgccatggggaatggcaggagttcctcccccactagctcactgacccagccaatcgagatgccaactttaagttcttctcccaccgaggaacggcctacggtcggtcccggccaacaagacaatcccctacttaagacgtttagtaatgtgttcggcaggcatagtggagggttcttgagttctcccgctgacttcagtcaggagaacaaggccccgtttgaggcagtaaagaggttttcacttgatgaaagatctcttgcttgtcggcaggatagcgattcgtctactaattctgacctcagtgacttaagtgattcagaggaacaattgcaggccaaaaccgggcttaagggcatccctgagcacctaatgggcaaacttggccctaatggcgagaggtcagccgaattgctgctgggaaaatctaagggcaaacaggctccgaagggtcgccctagaacggctccactgaaggtcggccagtctgtgttaaaagacgttagtaaagttaaaaagctgaagcagtccggtgagccgtttctgcaagacggctcctgcataaatgttgctccacatctccataagtgtagggagtgtcgcctagagcgataccgcaagttcaaggaacaggaacaggatgactccactgtggcgtgtagattttttcacttcaggcggctgatttttacaaggaagggcgtattgagagtcgaggggtttttgtccccacaacaatccgaccctgacgcgatgaacctctggatccctagctcatctttggccgagggcattgatctggaaacttccaagtacatcctggctaatgtgggagaccagttttgtcagttggtgatgtcggaaaaggaggctatgatgatggttgagccccaccaaaaagtggcatggaagagggcagtgagaggcgtcagagagatgtgtgacgtgtgcgaaacgactctgtttaacatccactgggtctgtaggaagtgtggattcggagtgtgcctggactgctataggctgagaaagtcccgccccagatccgaaacagaagaaatgggggatgaggaggtcttctcctggctgaaatgcgctaaaggacaaagccacgagccagagaacctcatgccgactcagataatccctggaactgctctgtacaatatcggagacatggtgcatgccgcaagaggaaaatggggcattaaagcgaattgcccttgtatctcccggcaaaacaaaagcgttttgcgcccagcggtgaccaatgggatgtctcaactgcctagcataaatccatctgcctccagtggtaatgaaaccacattttcaggtgggggagggcctgcacccgtgacaacacctgagccagatcatgttccaaaggcagacagcacagatatacgttctgaagagccactgaagaccgactcgtccgcaagtaattcaaacagcgagctcaaggctattcggccaccatgccctgacaccgccccacctagctctgctctgcactggctggcagatctagccacacagaaggcgaaggaagagaccaaggaggcgggatctcttagatctgtgttgaacaaggagtctcattctcccttcggactggactcctttaattcaacagccaaggtgagccccctcacaccaaagttgttcaactctctgctgctgggacccacagcatcgaacaacaagacggagggcagttccctgcgtgacctgttacactcggggccgggaaagctgccacagacacctctggataccgggatcccattcccccctgtttttagtacttcctctgcaggcgttaagtctaaggccagtctgcctaacttcttagaccacattatcgccagtgtcgttgagaataaaaagacatccgatgccagtaagagagcatgcaatctcacagacacacagaaggaagtcaaggagatggtgatgggcctcaatgtgttggatccccatacatctcattcatggctgtgtgacggtaggttactttgcttgcatgatcccagtaacaagaataactggaagatctttcgcgagtgctggaagcaggggcaaccggtcctggtgtccggcgtacacaaaaaattgaaaagtgagttgtggaagccagaggcgtttagtcaagagtttggagatcaggatgtcgacctcgtaaactgtaggaactgcgctattataagcgacgttaaggttcgggacttttgggacggatttgagatcatctgcaagcgattgagatccgaagatgggcagcccatggtgttgaagttgaaggattggccgcccggcgaggacttccgggatatgatgccgacccgcttcgaggaccttatggagaacctgcccctgccggagtatacaaaaagggacggccgattaaatctggcctcacgattgccttcctacttcgtgaggccagatctggggcccaagatgtacaatgcctacggcctaatcacggctgaggataggcgcgtgggtaccaccaacctccatttagacgtgtccgacgctgtcaacgtgatggtgtatgtcgggatccctataggcgagggcgcccatgacgaggaggttttgaagactattgatgagggagacgcagatgaggtgaccaagcaacgaatccatgatggaaaggagaagcctggagccctgtggcacatttatgccgcgaaggacgcagaaaagatcagggaactgctgagaaaagtaggggaggaacaaggacaggaaaatccacctgatcacgacccaatccacgaccaatcctggtacctggaccaaaccctgcgaaagcgcttatacgaggaatatggtgtgcagggctgggcaatagtgcaattcttgggagatgcagttttcatccccgccggagccccccaccaggttcataacctgtatagctgcatcaaagtagcagaggacttcgtatcccctgagcatgtcaagcattgcttccgccttacacaggagttccgacatctgtcaaacacccacacgaatcacgaagataagctccaagtcaagaacataatttaccacgcagtaaaggacgcagttggcaccttaaaagcccacgaatccaaactggccagatcgtag

SEQ ID NO: 192356 - DNA, 2382 bp, Artificial Sequence
  derived and/or modified sequence
atgaacctgtggatccccagcagcagcctggccgagggcatcgacttagagaccagcaagtacattttggcgaacgtcggagatcagttctgtcagctggtcatgtctgaaaaggaggccatgatgatggttgagccccatcagaaagttgcatggaaaagagcggtaagaggcgttagagagatgtgcgatgtgtgtgaaacaaccctctttaacattcactgggtgtgcaggaagtgtggctttggagtgtgtctcgattgctatagattacgaaaatctaggccaagatccgagacggaagaaatgggggatgaggaggttttctcttggctgaaatgtgcgaaaggacagtctcatgagcccgagaatctgatgcccacacagattattcccgggacggcactgtataacattggagacatggtgcacgccgcccgtggaaaatggggcattaaggctaactgtccctgcatctcacgtcagaacaagagtgtgctgcggccagccgtcacaaacggaatgtctcaactcccctccataaacccctctgcttcgtctggtaatgagacaaccttttccggaggtggcggccctgcacctgttaccactccagagcccgatcacgtccccaaagctgactcgacagatattaggagcgaggagccactgaagaccgattccagtgcctccaactccaactccgaactgaaagccatcagacccccgtgcccagatacagctccaccctcgtctgccctccactggttggctgaccttgctacacaaaaggccaaggaggaaaccaaagaagcaggcagtttgagatctgttttaaataaagagagtcattctccgttcggtctcgattccttcaattccacggccaaggtttctccactcactcctaaattgttcaactctttactccttggtcccaccgctagtaataataagacagagggcagctcattacgcgatctactgcattctgggcccggaaagctgccacaaacgccactggacaccggaatcccattccctcccgttttctctacgagtagtgccggcgtgaagtccaaggcatccctgcccaactttctggaccacattattgcgagtgttgtggagaacaaaaagacctctgacgcaagcaagagggcctgtaacttgacagacacccagaaggaagtaaaggagatggtgatgggattgaacgttctggacccacacacctcacattcttggctgtgcgacggcaggctgctgtgcttgcatgatccatcaaacaagaataactggaaaatttttagagagtgctggaaacaaggacagcctgtccttgtgtctggtgtccataagaaactcaagtcagagctgtggaagccggaagcctttagtcaagaattcggagatcaagatgtcgacttagtgaactgtcggaactgcgctattatcagtgacgtcaaggtccgggatttctgggacggatttgagatcatctgcaaacggctgcgctctgaggacgggcagcccatggttctcaaactgaaggactggccaccgggagaggatttccgtgacatgatgcccacccggtttgaggacttgatggagaacttgccactgcctgagtacactaaacgtgacggccgtcttaatctagcctctagactgccatcctacttcgttagacctgatctcggcccaaagatgtataacgcttacggcctgatcaccgccgaggaccgcagagttggtaccactaatctccatctggatgtttcagatgccgttaatgtcatggtgtatgtcggcatacccatcggggagggtgcccacgatgaggaggtactgaaaacaatcgatgagggcgatgccgacgaggtcaccaagcagaggattcacgatggtaaggagaagccaggcgcactttggcatatatacgccgccaaagacgccgaaaagatcagggagttactcaggaaggtaggcgaggaacaagggcaagaaaatccccccgaccacgaccccattcatgatcagtcatggtacctggatcaaactcttaggaagcgtctttatgaggagtacggcgtgcaaggatgggcgatcgtccagttcctgggtgacgccgtgttcatcccggccggagcgccccatcaggtacataatctctactcttgcataaaagtggctgaggatttcgtgtccccggagcacgtgaagcattgctttagactcacacaggaatttcgccacctgtccaatacgcatactaaccatgaggacaagctgcaggtgaaaaatataatttaccacgccgtaaaagacgccgtgggtactctaaaagcccatgagtctaaattagctcgaagctag

SEQ ID NO: 192357 - DNA, 5285 bp, Artificial Sequence
  derived and/or modified sequence
atggcggacgcggcagccagcccagtaggcaaacgccttctgctgctcttcgcagatacagcggcatccgcttctgctagtgcccctgccgcagccgctgcaagtggcgacccaggacctgcccttcggacccgcgcttggcgggctggcacagtgagagccatgtcgggggcagtccctcaggacctcgccatttttgttgaattcgatggctgtaattggaaacaacacagctgggttaaagtgcatgcagaggaagtgattgtgttacttctggagggcagcctggtgtgggcacccagggaggaccccgtgctattgcagggcatccgtgtgagtatagcccagtggcccgctttaactttcaccccactagttgataaactggggctgggctccgtggtacccgtcgaatacctgttggatcgggagctgcggttcctgtcagatgccaatgggcttcacctgttccaaatgggtactgatagtcagaaccaaatccttctagagcacgcggctctgagggaaaccgttaacgccttgatctcagaccaaaaactgcaagaaatctttagcaggggcccttattcggttcagggccacagagttaagatttatcagcccgaaggcgaagagggttggttgtacggagtggtgtctcatcaggatagcatcactaggctgatggaggtgtctgtgacagagtccggcgaaataaaatcggtcgatccacgcctgattcatgtaatgctcatggacaactcggccccacagtcagagggcggaacgcttaaggctgtgaagtcctccaagggcaaaaaaaaacgggaatctatcgaaggaaaggacggacggagaagaaaatccgcatccgactccggctgcgaccccgcatcgaagaaattgaaaggggacagaggggaggtggactccaatggttcagacggtggagaggccagtcggggaccctggaagggaggtaatgcctccggggaacctgggctggaccagcgggctaaacagccacccagcacgttcgtgccacaaatcaaccgaaacattcggttcgctacatacacgaaggaaaatggtcgtacccttgtggtccaggatgaaccagtgggtggtgacactccggcaagttttacaccatattctactgcaacaggccagacacctctggcaccagaggtagggggagctgaaaacaaggaagccggaaaaaccctggaacaggttgggcagggaatcgtcgcaagtgccgcagtggtcaccactgcctcctccacaccaaataccgttaggatcagtgacaccggtctcgccgcaggcactgtgcctgagaaacagaaaggatccagatcccaggccagcggggagaactccaggaactctattctcgctagctccggctttggggctccactccctagtagctcacaaccactgaccttcggcagcggcagatctcagagtaatggggtcctcgccaccgagaacaaaccactcgggttctcattcggatgttcctcagcccaggaagctcagaaggatactgacctctcaaagaatctgttttttcagtgcatgtcccagacactcccaacttcaaattactttaccacagtctcggaatctttggctgatgattcctcttcacgcgattcctttaagcagtcgctcgaaagtctgagcagcggcctgtgcaagggtagaagcgtcctgggaaccgatacaaagcctggttcaaaggccggttccagcgttgacagaaaggtgcccgcagaatctatgccaacactcacaccagccttccctcgctcattgctgaacgcccgaacacccgaaaatcacgagaaccttttcttacagccacccaaactctcccgcgaggagcctagtaatcctttcctggctttcgtcgagaaagttgagcattcaccattttcatctttcgcatctcaggcctcaggtagttcaagttctgcaacgactgtgaccagtaaagtggccccaagctggccagaatcccatagttccgccgatagtgctagcctcgctaaaaagaagccattattcattaccaccgatagctctaagcttgtctctggagtcctggggagtgctctcacatctgggggaccaagtctatccgcgatgggcaatggcagatcttcatctcctactagttctctcactcagcccatcgagatgccgacactgagtagttcgcctaccgaggagcgacccacggtcggtcctgggcagcaagacaatccccttttgaagactttttctaacgttttcggtaggcatagcgggggatttctgtcgtctccagccgatttcagccaagagaacaaggctccttttgaggctgtgaaacggttcagtttggacgagagaagtctggcctgtcggcaggacagtgactcctccaccaactcggatctgtctgacttgagcgattccgaggagcaactccaggcaaagaccggactgaagggtatacccgaacacctcatggggaagctgggtccaaacggagagaggtctgcagagctgcttttgggcaaaagcaagggcaaacaggccccaaagggcaggcctcgaacggcacccctgaaggtgggacagtccgtactcaaagacgtaagcaaggtcaagaagctaaaacagtccggcgagccctttctgcaggacggatcttgcatcaacgtggctccacatcttcataagtgcagagaatgtagactggagagatataggaagttcaaggagcaggagcaggacgactcaacagtggcgtgccggttctttcacttccggagactcatatttacaaggaagggggtacttagggtcgaaggattcctgtcacctcagcagtctgatcccgatgcgatgaatttatggataccatccagttcattggccgagggcatagatttggagacatctaagtatatcctggctaacgtgggcgaccagttttgccagcttgttatgtccgaaaaggaagctatgatgatggtggagcctcatcagaaggtggcatggaaaagagccgtgcggggtgtgcgggaaatgtgcgatgtgtgcgaaactacactcttcaacattcattgggtgtgcagaaagtgtgggtttggagtgtgtttggactgctatcgcctgaggaagagcagaccgagatctgagaccgaagagatgggcgacgaagaagtgttcagctggctgaaatgcgctaagggccaaagccatgaaccagagaacctgatgcccacacagattatccccggaacggctctctataatattggagacatggttcacgcggctcgcggaaagtggggcattaaggccaactgcccctgcatatcccgccagaacaagtcagtgctaaggccagctgttaccaatgggatgagccaacttcctagcatcaatccaagcgcgagttcgggtaacgagacaacctttagcggcggaggcggtccagctccagtcacaactccggaacccgaccatgtccccaaggccgattctacagacatcagatcagaagagcccctcaagactgatagtagtgcatctaactcaaatagtgaactgaaggcgattaggccaccttgcccggacacagctccaccctcaagtgcattgcattggctggctgaccttgctacacagaaagccaaggaggagacaaaagaggccggatccctgcgctctgtgctgaacaaagagtcccactcccccttcggacttgacagttttaacagcacagccaaagtgtcccctctgaccccgaagctgtttaatagcctgctgctcggaccgactgcttcaaacaataaaacagagggttcctcactaagagacctgctacattccgggcctggaaagcttcctcagaccccattggacactggaatcccattccctcctgttttctctacatccagcgcaggtgtcaaaagtaaagcaagcttgcctaatttcctcgaccacatcattgcttccgtcgttgaaaataagaagacctctgacgctagtaagagagcatgtaacctgaccgacacacaaaaagaggtgaaagaaatggtcatgggtctaaatgtcctcgacccacacacgagtcactcctggctctgtgatggtaggctgctgtgcctccacgatccttcaaataaaaataattggaaaattttccgcgaatgctggaaacaaggccagcctgtccttgtgtctggcgttcataagaaactcaaatcagaactgtggaaaccagaggcgttttcgcaggaatttggggaccaagacgtggatcttgtaaactgccgcaactgtgcaatcatcagcgacgtgaaggttagggacttctgggacggattcgagataatttgtaagcgcctgcggagtgaggatggacagccaatggttctgaaattaaaagactggcctcctggagaggacttccgggacatgatgcctacaaggttcgaagatctcatggagaacctgcccctcccggagtacaccaagcgcgacgggaggcttaacctggcctcgcgtctgccttcttatttcgtacgcccagacctgggaccgaagatgtataatgcttatggcctgattacagctgaagatagacgggtggggaccaccaatcttcatctggatgtgtcagacgccgtcaacgtgatggtgtatgtaggcatccccatcggtgaaggcgctcatgacgaggaagttctgaaaaccattgatgaaggcgacgctgacgaggtcactaaacagcggatacatgacggtaaagagaagccaggtgctctgtggcacatctacgctgccaaagacgccgaaaagattagagagctcctccggaaggttggtgaggagcaggggcaggagaatcctcccgatcatgacccgatacacgaccagtcttggtatctggaccaaacacttcggaagaggttgtacgaagagtacggggtgcaagggtgggccatcgtccagttcctcggcgatgctgtttttatccctgctggtgccccacatcaagtacacaacctgtacagctgcatcaaggtcgccgaagactttgtgagccctgagcacgtcaaacactgttttcgactgacccaagagtttagacatttaagcaatactcataccaaccacgaagataaactacaggtaaagaacattatctaccatgccgtaaaagacgccgtgggaacactgaaagcacatgaaagtaaactcgctcggtcata

SEQ ID NO: 192358 - DNA, 4254 bp, Artificial Sequence
  derived and/or modified sequence
atgggtgccatggagataaatagaaacatccgttttgcaacgtacacaaaggagaacggacgcacactggtcgtgcaggacgagccagtggggggagatactccagcctctttcacaccatatagcacggcaacaggtcagacccccctggctcccgaagttggaggggcagagaataaggaggcgggaaaaacactggagcaggtggggcaaggtatcgtggccagcgcagcagtcgtgaccaccgcatccagcacccccaataccgtaaggatctcagatactgggctggcggctggtactgtgcccgagaagcagaagggctcccgatctcaagccagtggggagaacagcagaaatagcatcctcgcctccagtgggttcggagccccactgcccagcagctcccaacctcttacatttggtagtggaaggtctcagtccaacggcgtgctggctaccgagaacaaacccctgggatttagttttggctgctcttccgcccaggaggctcagaaagacactgatcttagcaagaatctttttttccagtgtatgagccagaccctccctacctccaactattttacgacagtctcagagagtctcgctgacgatagttcgtctcgcgacagctttaagcaatctttggagtccttgtctagcgggctgtgtaaaggaagatcagtcctcgggactgataccaagcccggatctaaggccggaagcagcgtggataggaaagtcccagctgagtcaatgccgacactgactcctgcttttcctcgttcactactcaacgcccgaactcctgaaaaccatgagaacctgttcctccagccaccaaaactttctagagaagagccctccaatcctttcctggccttcgtcgagaaggtggaacatagccctttttcatcttttgcttcccaagcttcggggagtagtagtagtgccaccaccgtcaccagcaaggtggccccttcgtggccggaaagccactcctcagccgatagtgcttctttagctaaaaagaaaccgttgttcatcaccaccgattctagtaagctcgtctccggagttctgggctctgccctcacaagcgggggaccgtcacttagcgctatgggaaatgggagatccagtagtcctacttcatcccttactcagcctatcgagatgcccactctgagcagcagtcccacagaagagcggccaactgttgggcctggtcagcaagacaaccccttgctaaaaactttctcaaacgtcttcggaaggcacagcggcggatttttgtcatcacccgctgacttttcccaggagaataaggcccctttcgaagcagtgaagcgatttagtctggatgagagaagtttggcttgccggcaagattcggattccagtaccaatagcgatctttccgatttgtcggattctgaggagcagctgcaggcaaaaaccggactcaaagggatccccgaacatctgatgggcaaacttgggcctaacggcgagcgtagcgccgagttgctgctgggcaagtccaagggcaagcaagccccaaagggcaggcctcggacagcgccacttaaggtcggccaaagcgtgctgaaggatgtctcgaaggtgaagaagcttaagcagtccggagaacccttcctgcaggatggatcatgtatcaatgtagccccacacttacataagtgtagagagtgccggcttgagcggtaccgcaagttcaaggagcaggagcaagacgatagcaccgtcgcgtgcagattcttccactttcggagactgatctttacgaggaagggggtccttagagtcgaaggtttcctttctccccaacaaagcgaccccgacgccatgaacctgtggataccaagtagctctttagctgagggaatcgatctagagacatcaaagtatatcctcgcaaacgtgggcgaccagttctgccagttggtcatgtccgaaaaagaagctatgatgatggtggagccacatcagaaagtggcttggaaacgcgcagtcaggggggtcagggaaatgtgcgacgtctgtgaaacgacattgtttaatatccactgggtttgtcgcaagtgtggctttggggtgtgcctcgactgctaccgccttcgaaagtctcggccacgatctgagaccgaggagatgggagacgaagaagttttttcgtggcttaagtgcgccaaaggacagagccacgaacctgagaacttgatgcccacacagatcattcccggaaccgccctgtacaacatcggagatatggttcacgctgctaggggtaagtggggtatcaaggctaattgcccctgtattagccgccaaaacaaatctgtcttgagacccgctgtgacaaacggaatgtcccaattaccctctatcaatccatctgcctcatcaggcaatgagaccaccttcagtggcggaggaggtcccgctcccgtcacaacacccgaacctgaccacgttcctaaggctgacagcacagatattaggtcagaggagccattgaaaaccgactcttccgcaagcaactcgaacagcgaactcaaagccattcgcccaccctgccctgacacagccccaccttcaagcgctttgcattggttagccgacctcgcaacccagaaagccaaggaagaaacaaaggaggccggaagccttagatccgtcctcaataaagaaagtcatagccctttcggccttgactccttcaactctacggccaaggtctcacctctgactcccaaactgttcaatagcctcctgctcgggcctacagcaagcaataacaagaccgaaggctcctcactgagagacctcctccatagcggaccagggaaactaccccagacaccactagatacgggaatcccttttcctcctgttttttcaacttctagcgctggcgtgaagtccaaggcaagcctccccaatttcctggaccacatcattgcctccgttgtggagaacaaaaaaacctctgatgccagcaaaagagcctgtaaccttaccgacacgcagaaggaagttaaggagatggtgatgggcttaaatgttctcgatccacatacctctcatagttggctgtgtgacggtagacttttgtgtctgcacgatccttccaataaaaacaactggaagatatttcgggaatgttggaaacaaggtcagcctgtgcttgtgagtggcgttcacaaaaaactgaagagtgagctctggaagcctgaggcatttagccaggagttcggcgaccaagatgtcgacttagtgaactgtagaaattgcgccatcatttctgatgtgaaagtgcgggatttctgggacggtttcgaaatcatctgtaaacgcctgagatccgaggatggtcaaccaatggtgctcaagttgaaagattggcctcccggtgaggacttccgcgatatgatgcctaccagattcgaggatctcatggagaatcttcctctacctgagtacactaagagggacggcagactcaacctggcttcaaggcttccaagctacttcgtgaggcctgacctgggtccaaagatgtacaatgcttacggactgattaccgccgaggatcgccgtgtgggcaccacaaatctgcatcttgacgttagtgatgccgtgaatgtgatggtttatgttggaatccccatcggcgaaggagcccacgatgaagaagtcctcaaaacaatcgacgagggtgacgcagatgaggtgaccaaacagcgaatccacgacggaaaggaaaagcctggagccttgtggcacatatatgccgcaaaggatgcagagaagatcagagagctcttgcgaaaggtcggcgaagaacagggtcaggaaaatccgccagaccacgacccaatccacgaccagtcttggtacctggatcaaacgttgcggaagaggctctatgaggagtatggagtgcaaggatgggccatcgtgcagtttcttggcgatgctgtgtttatccctgccggtgccccacatcaggtgcacaacttatacagctgtataaaagtggccgaagactttgtctccccggaacatgtgaaacactgctttagacttacacaggagttccgccacttgtcaaatactcatactaatcatgaggataaactccaggtgaaaaacatcatttatcatgccgtgaaagacgcagtcggaaccctcaaagctcatgagagtaaattagctcggtcttag

SEQ ID NO: 192359 - DNA, 2382 bp, Artificial Sequence
  derived and/or modified sequence
atgaacctgtggattccctcatcttctctcgcagaagggattgatttagaaactagcaagtatatccttgctaatgttggggaccaattctgccagcttgttatgagcgaaaaggaggcgatgatgatggtggaaccacaccagaaggttgcttggaaacgggcagtccgaggtgtccgggagatgtgtgacgtgtgcgagacaaccctcttcaacatccactgggtgtgtaggaagtgtgggttcggtgtctgcctggattgctaccggttacgcaagtcccgaccaagaagcgagactgaggagatgggcgacgaggaagtgtttagttggctaaagtgtgcaaaggggcaaagtcatgagcccgaaaacctgatgccaacccaaatcatcccgggaacggccctctataacattggggatatggttcatgctgcaagggggaagtggggaattaaagctaactgcccctgtatatcccgtcagaataagagcgtgttgcgaccagcagttaccaacggaatgtctcagctcccttcgatcaatccctctgcatcgagcgggaacgagacaactttctccggaggtggaggcccagcccctgttactaccccagagccagatcatgtacccaaggccgactctaccgatatccggagcgaggagcccctgaaaactgactcctctgcctctaatagtaatagcgaacttaaagcgatcaggccaccctgccccgacacagcaccgccatcatctgcccttcactggcttgcagacttggcaacacaaaaggctaaagaggaaacaaaggaagctggtagtctcagatctgttctcaataaggaaagtcactccccattcggcttggacagttttaacagcaccgcaaaggtgtcccctctgacccccaagctttttaattccctacttctcggccctactgcctcaaataataaaactgagggtagctcactgcgggacctcttgcacagtgggccagggaaactaccccagacgcccctggatactggtataccttttcctcccgtgttctccacctcatctgccggtgtcaaatccaaagcctccttgccaaacttccttgaccacataattgcctcagttgtcgaaaacaaaaagacaagcgatgccagcaaaagagcttgcaatctgactgacacacagaaggaagtgaaagaaatggtcatgggcctgaacgtcctggatccgcacacaagccacagttggctctgtgacggaagactcttgtgcttgcacgatccatcgaataaaaataactggaaaatcttccgggaatgctggaagcaaggacaacccgtactcgtcagcggggttcacaagaagctaaaatcagagttgtggaaacccgaagcattctctcaggagttcggcgatcaggacgtggaccttgtcaattgccgcaactgtgcaataataagtgatgtgaaagtgagggatttctgggatggcttcgagatcatctgcaaacgcttgaggtcagaggatggacagcctatggtcctgaagttgaaagactggcccccaggagaagatttcagggacatgatgccaactaggttcgaggatcttatggagaacctcccacttccagaatataccaaacgggatggtcggctcaatttagcgtcacgcttgcccagttacttcgtgaggccagatctcgggcctaagatgtacaacgcgtacggactcatcaccgccgaggatcggagggtgggtaccaccaatctgcatctcgacgtgtccgacgccgttaatgtaatggtatacgtggggatcccaatcggcgagggcgctcacgacgaggaagtgctgaaaacaatagatgaaggggacgcagatgaagtcacaaaacagcgcattcacgacgggaaggagaagcccggtgccctgtggcacatatacgccgctaaggacgctgagaagatccgcgaactgctgagaaaagtgggagaagagcaaggacaggagaatcctccagatcatgaccctattcacgatcagagctggtatctcgaccagacacttaggaagagactttatgaggagtatggcgtccagggatgggcaatagtacagttccttggggacgctgttttcatccctgctggggctccacatcaggtgcacaacctatactcttgtattaaggtagccgaggattttgtttctccagagcacgtaaagcattgcttcagattgactcaggaattccgacatctgtccaatacacatacgaatcatgaagataaactacaagtcaagaatataatctatcacgcagtcaaggatgcggtgggaaccctgaaagcccacgagtccaagctggccagatcctag

SEQ ID NO: 192360 - DNA, 5286 bp, Artificial Sequence
  derived and/or modified sequence
atggccgacgccgccgccagccccgtgggcaagagactgctgctgctgttcgccgacaccgccgccagcgccagcgccagcgcccccgccgccgccgccgccagcggcgaccccggccccgccctgagaaccagagcctggagagccggcaccgtgagagccatgagcggcgccgtgccccaggacctggccatcttcgtggagttcgacggctgcaactggaagcagcacagctgggtgaaggtgcacgccgaggaggtgatcgtgctgctgctggagggcagcctggtgtgggcccccagagaggaccccgtgctgctgcagggcatcagagtgagcatcgcccagtggcccgccctgaccttcacccccctggtggacaagctgggcctgggcagcgtggtgcccgtggagtacctgctggacagagagctgagattcctgagcgacgccaacggcctgcacctgttccagatgggcaccgacagccagaaccagatcctgctggagcacgccgccctgagagagaccgtgaacgccctgatcagcgaccagaagctgcaggagatcttcagcagaggcccctacagcgtgcagggccacagagtgaagatctaccagcccgagggcgaggagggctggctgtacggcgtggtgagccaccaggacagcatcaccagactgatggaggtgagcgtgaccgagagcggcgagatcaagagcgtggaccccagactgatccacgtgatgctgatggacaacagcgccccccagagcgagggcggcaccctgaaggccgtgaagagcagcaagggcaagaagaagagagagagcatcgagggcaaggacggcagaagaagaaagagcgccagcgacagcggctgcgaccccgccagcaagaagctgaagggcgacagaggcgaggtggacagcaacggcagcgacggcggcgaggccagcagaggcccctggaagggcggcaacgccagcggcgagcccggcctggaccagagagccaagcagccccccagcaccttcgtgccccagatcaacagaaacatcagattcgccacctacaccaaggagaacggcagaaccctggtggtgcaggacgagcccgtgggcggcgacacccccgccagcttcaccccctacagcaccgccaccggccagacccccctggcccccgaggtgggcggcgccgagaacaaggaggccggcaagaccctggagcaggtgggccagggcatcgtggccagcgccgccgtggtgaccaccgccagcagcacccccaacaccgtgagaatcagcgacaccggcctggccgccggcaccgtgcccgagaagcagaagggcagcagaagccaggccagcggcgagaacagcagaaacagcatcctggccagcagcggcttcggcgcccccctgcccagcagcagccagcccctgaccttcggcagcggcagaagccagagcaacggcgtgctggccaccgagaacaagcccctgggcttcagcttcggctgcagcagcgcccaggaggcccagaaggacaccgacctgagcaagaacctgttcttccagtgcatgagccagaccctgcccaccagcaactacttcaccaccgtgagcgagagcctggccgacgacagcagcagcagagacagcttcaagcagagcctggagagcctgagcagcggcctgtgcaagggcagaagcgtgctgggcaccgacaccaagcccggcagcaaggccggcagcagcgtggacagaaaggtgcccgccgagagcatgcccaccctgacccccgccttccccagaagcctgctgaacgccagaacccccgagaaccacgagaacctgttcctgcagccccccaagctgagcagagaggagcccagcaaccccttcctggccttcgtggagaaggtggagcacagccccttcagcagcttcgccagccaggccagcggcagcagcagcagcgccaccaccgtgaccagcaaggtggcccccagctggcccgagagccacagcagcgccgacagcgccagcctggccaagaagaagcccctgttcatcaccaccgacagcagcaagctggtgagcggcgtgctgggcagcgccctgaccagcggcggccccagcctgagcgccatgggcaacggcagaagcagcagccccaccagcagcctgacccagcccatcgagatgcccaccctgagcagcagccccaccgaggagagacccaccgtgggccccggccagcaggacaaccccctgctgaagaccttcagcaacgtgttcggcagacacagcggcggcttcctgagcagccccgccgacttcagccaggagaacaaggcccccttcgaggccgtgaagagattcagcctggacgagagaagcctggcctgcagacaggacagcgacagcagcaccaacagcgacctgagcgacctgagcgacagcgaggagcagctgcaggccaagaccggcctgaagggcatccccgagcacctgatgggcaagctgggccccaacggcgagagaagcgccgagctgctgctgggcaagagcaagggcaagcaggcccccaagggcagacccagaaccgcccccctgaaggtgggccagagcgtgctgaaggacgtgagcaaggtgaagaagctgaagcagagcggcgagcccttcctgcaggacggcagctgcatcaacgtggccccccacctgcacaagtgcagagagtgcagactggagagatacagaaagttcaaggagcaggagcaggacgacagcaccgtggcctgcagattcttccacttcagaagactgatcttcaccagaaagggcgtgctgagagtggagggcttcctgagcccccagcagagcgaccccgacgccatgaacctgtggatccccagcagcagcctggccgagggcatcgacctggagaccagcaagtacatcctggccaacgtgggcgaccagttctgccagctggtgatgagcgagaaggaggccatgatgatggtggagccccaccagaaggtggcctggaagagagccgtgagaggcgtgagagagatgtgcgacgtgtgcgagaccaccctgttcaacatccactgggtgtgcagaaagtgcggcttcggcgtgtgcctggactgctacagactgagaaagagcagacccagaagcgagaccgaggagatgggcgacgaggaggtgttcagctggctgaagtgcgccaagggccagagccacgagcccgagaacctgatgcccacccagatcatccccggcaccgccctgtacaacatcggcgacatggtgcacgccgccagaggcaagtggggcatcaaggccaactgcccctgcatcagcagacagaacaagagcgtgctgagacccgccgtgaccaacggcatgagccagctgcccagcatcaaccccagcgccagcagcggcaacgagaccaccttcagcggcggcggcggccccgcccccgtgaccacccccgagcccgaccacgtgcccaaggccgacagcaccgacatcagaagcgaggagcccctgaagaccgacagcagcgccagcaacagcaacagcgagctgaaggccatcagacccccctgccccgacaccgccccccccagcagcgccctgcactggctggccgacctggccacccagaaggccaaggaggagaccaaggaggccggcagcctgagaagcgtgctgaacaaggagagccacagccccttcggcctggacagcttcaacagcaccgccaaggtgagccccctgacccccaagctgttcaacagcctgctgctgggccccaccgccagcaacaacaagaccgagggcagcagcctgagagacctgctgcacagcggccccggcaagctgccccagacccccctggacaccggcatccccttcccccccgtgttcagcaccagcagcgccggcgtgaagagcaaggccagcctgcccaacttcctggaccacatcatcgccagcgtggtggagaacaagaagaccagcgacgccagcaagagagcctgcaacctgaccgacacccagaaggaggtgaaggagatggtgatgggcctgaacgtgctggacccccacaccagccacagctggctgtgcgacggcagactgctgtgcctgcacgaccccagcaacaagaacaactggaagatcttcagagagtgctggaagcagggccagcccgtgctggtgagcggcgtgcacaagaagctgaagagcgagctgtggaagcccgaggccttcagccaggagttcggcgaccaggacgtggacctggtgaactgcagaaactgcgccatcatcagcgacgtgaaggtgagagacttctgggacggcttcgagatcatctgcaagagactgagaagcgaggacggccagcccatggtgctgaagctgaaggactggccccccggcgaggacttcagagacatgatgcccaccagattcgaggacctgatggagaacctgcccctgcccgagtacaccaagagagacggcagactgaacctggccagcagactgcccagctacttcgtgagacccgacctgggccccaagatgtacaacgcctacggcctgatcaccgccgaggacagaagagtgggcaccaccaacctgcacctggacgtgagcgacgccgtgaacgtgatggtgtacgtgggcatccccatcggcgagggcgcccacgacgaggaggtgctgaagaccatcgacgagggcgacgccgacgaggtgaccaagcagagaatccacgacggcaaggagaagcccggcgccctgtggcacatctacgccgccaaggacgccgagaagatcagagagctgctgagaaaggtgggcgaggagcagggccaggagaacccccccgaccacgaccccatccacgaccagagctggtacctggaccagaccctgagaaagagactgtacgaggagtacggcgtgcagggctgggccatcgtgcagttcctgggcgacgccgtgttcatccccgccggcgccccccaccaggtgcacaacctgtacagctgcatcaaggtggccgaggacttcgtgagccccgagcacgtgaagcactgcttcagactgacccaggagttcagacacctgagcaacacccacaccaaccacgaggacaagctgcaggtgaagaacatcatctaccacgccgtgaaggacgccgtgggcaccctgaaggcccacgagagcaagctggccagaagctag

SEQ ID NO: 192361 - DNA, 4254 bp, Artificial Sequence
  derived and/or modified sequence
atgggcgccatggagatcaacagaaacatcagattcgccacctacaccaaggagaacggcagaaccctggtggtgcaggacgagcccgtgggcggcgacacccccgccagcttcaccccctacagcaccgccaccggccagacccccctggcccccgaggtgggcggcgccgagaacaaggaggccggcaagaccctggagcaggtgggccagggcatcgtggccagcgccgccgtggtgaccaccgccagcagcacccccaacaccgtgagaatcagcgacaccggcctggccgccggcaccgtgcccgagaagcagaagggcagcagaagccaggccagcggcgagaacagcagaaacagcatcctggccagcagcggcttcggcgcccccctgcccagcagcagccagcccctgaccttcggcagcggcagaagccagagcaacggcgtgctggccaccgagaacaagcccctgggcttcagcttcggctgcagcagcgcccaggaggcccagaaggacaccgacctgagcaagaacctgttcttccagtgcatgagccagaccctgcccaccagcaactacttcaccaccgtgagcgagagcctggccgacgacagcagcagcagagacagcttcaagcagagcctggagagcctgagcagcggcctgtgcaagggcagaagcgtgctgggcaccgacaccaagcccggcagcaaggccggcagcagcgtggacagaaaggtgcccgccgagagcatgcccaccctgacccccgccttccccagaagcctgctgaacgccagaacccccgagaaccacgagaacctgttcctgcagccccccaagctgagcagagaggagcccagcaaccccttcctggccttcgtggagaaggtggagcacagccccttcagcagcttcgccagccaggccagcggcagcagcagcagcgccaccaccgtgaccagcaaggtggcccccagctggcccgagagccacagcagcgccgacagcgccagcctggccaagaagaagcccctgttcatcaccaccgacagcagcaagctggtgagcggcgtgctgggcagcgccctgaccagcggcggccccagcctgagcgccatgggcaacggcagaagcagcagccccaccagcagcctgacccagcccatcgagatgcccaccctgagcagcagccccaccgaggagagacccaccgtgggccccggccagcaggacaaccccctgctgaagaccttcagcaacgtgttcggcagacacagcggcggcttcctgagcagccccgccgacttcagccaggagaacaaggcccccttcgaggccgtgaagagattcagcctggacgagagaagcctggcctgcagacaggacagcgacagcagcaccaacagcgacctgagcgacctgagcgacagcgaggagcagctgcaggccaagaccggcctgaagggcatccccgagcacctgatgggcaagctgggccccaacggcgagagaagcgccgagctgctgctgggcaagagcaagggcaagcaggcccccaagggcagacccagaaccgcccccctgaaggtgggccagagcgtgctgaaggacgtgagcaaggtgaagaagctgaagcagagcggcgagcccttcctgcaggacggcagctgcatcaacgtggccccccacctgcacaagtgcagagagtgcagactggagagatacagaaagttcaaggagcaggagcaggacgacagcaccgtggcctgcagattcttccacttcagaagactgatcttcaccagaaagggcgtgctgagagtggagggcttcctgagcccccagcagagcgaccccgacgccatgaacctgtggatccccagcagcagcctggccgagggcatcgacctggagaccagcaagtacatcctggccaacgtgggcgaccagttctgccagctggtgatgagcgagaaggaggccatgatgatggtggagccccaccagaaggtggcctggaagagagccgtgagaggcgtgagagagatgtgcgacgtgtgcgagaccaccctgttcaacatccactgggtgtgcagaaagtgcggcttcggcgtgtgcctggactgctacagactgagaaagagcagacccagaagcgagaccgaggagatgggcgacgaggaggtgttcagctggctgaagtgcgccaagggccagagccacgagcccgagaacctgatgcccacccagatcatccccggcaccgccctgtacaacatcggcgacatggtgcacgccgccagaggcaagtggggcatcaaggccaactgcccctgcatcagcagacagaacaagagcgtgctgagacccgccgtgaccaacggcatgagccagctgcccagcatcaaccccagcgccagcagcggcaacgagaccaccttcagcggcggcggcggccccgcccccgtgaccacccccgagcccgaccacgtgcccaaggccgacagcaccgacatcagaagcgaggagcccctgaagaccgacagcagcgccagcaacagcaacagcgagctgaaggccatcagacccccctgccccgacaccgccccccccagcagcgccctgcactggctggccgacctggccacccagaaggccaaggaggagaccaaggaggccggcagcctgagaagcgtgctgaacaaggagagccacagccccttcggcctggacagcttcaacagcaccgccaaggtgagccccctgacccccaagctgttcaacagcctgctgctgggccccaccgccagcaacaacaagaccgagggcagcagcctgagagacctgctgcacagcggccccggcaagctgccccagacccccctggacaccggcatccccttcccccccgtgttcagcaccagcagcgccggcgtgaagagcaaggccagcctgcccaacttcctggaccacatcatcgccagcgtggtggagaacaagaagaccagcgacgccagcaagagagcctgcaacctgaccgacacccagaaggaggtgaaggagatggtgatgggcctgaacgtgctggacccccacaccagccacagctggctgtgcgacggcagactgctgtgcctgcacgaccccagcaacaagaacaactggaagatcttcagagagtgctggaagcagggccagcccgtgctggtgagcggcgtgcacaagaagctgaagagcgagctgtggaagcccgaggccttcagccaggagttcggcgaccaggacgtggacctggtgaactgcagaaactgcgccatcatcagcgacgtgaaggtgagagacttctgggacggcttcgagatcatctgcaagagactgagaagcgaggacggccagcccatggtgctgaagctgaaggactggccccccggcgaggacttcagagacatgatgcccaccagattcgaggacctgatggagaacctgcccctgcccgagtacaccaagagagacggcagactgaacctggccagcagactgcccagctacttcgtgagacccgacctgggccccaagatgtacaacgcctacggcctgatcaccgccgaggacagaagagtgggcaccaccaacctgcacctggacgtgagcgacgccgtgaacgtgatggtgtacgtgggcatccccatcggcgagggcgcccacgacgaggaggtgctgaagaccatcgacgagggcgacgccgacgaggtgaccaagcagagaatccacgacggcaaggagaagcccggcgccctgtggcacatctacgccgccaaggacgccgagaagatcagagagctgctgagaaaggtgggcgaggagcagggccaggagaacccccccgaccacgaccccatccacgaccagagctggtacctggaccagaccctgagaaagagactgtacgaggagtacggcgtgcagggctgggccatcgtgcagttcctgggcgacgccgtgttcatccccgccggcgccccccaccaggtgcacaacctgtacagctgcatcaaggtggccgaggacttcgtgagccccgagcacgtgaagcactgcttcagactgacccaggagttcagacacctgagcaacacccacaccaaccacgaggacaagctgcaggtgaagaacatcatctaccacgccgtgaaggacgccgtgggcaccctgaaggcccacgagagcaagctggccagaagctag

SEQ ID NO: 192362 - DNA, 2382 bp, Artificial Sequence
  derived and/or modified sequence
atgaacctgtggatccccagcagcagcctggccgagggcatcgacctggagaccagcaagtacatcctggccaacgtgggcgaccagttctgccagctggtgatgagcgagaaggaggccatgatgatggtggagccccaccagaaggtggcctggaagagagccgtgagaggcgtgagagagatgtgcgacgtgtgcgagaccaccctgttcaacatccactgggtgtgcagaaagtgcggcttcggcgtgtgcctggactgctacagactgagaaagagcagacccagaagcgagaccgaggagatgggcgacgaggaggtgttcagctggctgaagtgcgccaagggccagagccacgagcccgagaacctgatgcccacccagatcatccccggcaccgccctgtacaacatcggcgacatggtgcacgccgccagaggcaagtggggcatcaaggccaactgcccctgcatcagcagacagaacaagagcgtgctgagacccgccgtgaccaacggcatgagccagctgcccagcatcaaccccagcgccagcagcggcaacgagaccaccttcagcggcggcggcggccccgcccccgtgaccacccccgagcccgaccacgtgcccaaggccgacagcaccgacatcagaagcgaggagcccctgaagaccgacagcagcgccagcaacagcaacagcgagctgaaggccatcagacccccctgccccgacaccgccccccccagcagcgccctgcactggctggccgacctggccacccagaaggccaaggaggagaccaaggaggccggcagcctgagaagcgtgctgaacaaggagagccacagccccttcggcctggacagcttcaacagcaccgccaaggtgagccccctgacccccaagctgttcaacagcctgctgctgggccccaccgccagcaacaacaagaccgagggcagcagcctgagagacctgctgcacagcggccccggcaagctgccccagacccccctggacaccggcatccccttcccccccgtgttcagcaccagcagcgccggcgtgaagagcaaggccagcctgcccaacttcctggaccacatcatcgccagcgtggtggagaacaagaagaccagcgacgccagcaagagagcctgcaacctgaccgacacccagaaggaggtgaaggagatggtgatgggcctgaacgtgctggacccccacaccagccacagctggctgtgcgacggcagactgctgtgcctgcacgaccccagcaacaagaacaactggaagatcttcagagagtgctggaagcagggccagcccgtgctggtgagcggcgtgcacaagaagctgaagagcgagctgtggaagcccgaggccttcagccaggagttcggcgaccaggacgtggacctggtgaactgcagaaactgcgccatcatcagcgacgtgaaggtgagagacttctgggacggcttcgagatcatctgcaagagactgagaagcgaggacggccagcccatggtgctgaagctgaaggactggccccccggcgaggacttcagagacatgatgcccaccagattcgaggacctgatggagaacctgcccctgcccgagtacaccaagagagacggcagactgaacctggccagcagactgcccagctacttcgtgagacccgacctgggccccaagatgtacaacgcctacggcctgatcaccgccgaggacagaagagtgggcaccaccaacctgcacctggacgtgagcgacgccgtgaacgtgatggtgtacgtgggcatccccatcggcgagggcgcccacgacgaggaggtgctgaagaccatcgacgagggcgacgccgacgaggtgaccaagcagagaatccacgacggcaaggagaagcccggcgccctgtggcacatctacgccgccaaggacgccgagaagatcagagagctgctgagaaaggtgggcgaggagcagggccaggagaacccccccgaccacgaccccatccacgaccagagctggtacctggaccagaccctgagaaagagactgtacgaggagtacggcgtgcagggctgggccatcgtgcagttcctgggcgacgccgtgttcatccccgccggcgccccccaccaggtgcacaacctgtacagctgcatcaaggtggccgaggacttcgtgagccccgagcacgtgaagcactgcttcagactgacccaggagttcagacacctgagcaacacccacaccaaccacgaggacaagctgcaggtgaagaacatcatctaccacgccgtgaaggacgccgtgggcaccctgaaggcccacgagagcaagctggccagaagctag

SEQ ID NO: 192363 - protein, 252 aa, Artificial Sequence
  derived and/or modified sequence
MVSWIISRLVVLIFGTLYPAYSSYKAVKTKNVKEYVKWMMYWIVFAFFTTAETLTDIVLSWFPFYFELKIAFVIWLLSPYTKGSSVLYRKFVHPTLSNKEKEIDEYITQARDKSYETMMRVGKRGLNLAANAAVTAAAKGVLSEKLRSFSMQDLTLIRDEDALPLQRPDGRLRPSPGSLLDTIEDLGDDPALSLRSSTNPADSRTEASEDDMGDKAPKRAKPIKKAPKAEPLASKTLKTRPKKKTSGGGDSA

SEQ ID NO: 192364 - DNA, 759 bp, Artificial Sequence
  derived and/or modified sequence
atggtgtcatggattatctcgcggctggttgtcctaatattcgggaccctgtatcccgcttactcatcatataaagccgtaaagaccaagaatgtaaaggagtatgtgaaatggatgatgtactggatagtctttgcgttttttacaacagctgagaccttaacggacatcgtgctgagctggttccctttttacttcgaactgaaaatagcctttgtcatttggctgctttcaccctatactaagggaagtagtgttctgtaccgcaagttcgttcaccccacactctctaataaagagaaggaaatcgatgagtatattacccaggcacgcgataagtcctacgagaccatgatgcgagttggcaaacgtggcctaaatctggcagctaacgcagccgtgacagccgccgccaaaggcgtactcagtgaaaaactccggtccttttcaatgcaggatctcactttgatccgggacgaggacgccctgcccctgcagaggccagatggtaggcttaggccctcccccgggagcctgcttgatacgatcgaggacttgggtgatgacccagccctctccctccgcagtagcacaaatcccgctgactctcggactgaagcctctgaggacgacatgggcgataaagcaccgaaacgcgcaaaaccaataaagaaggcccccaaggcggagccactggcttctaagacccttaagaccagacctaagaagaaaacaagcggtgggggcgatagcgcatag

SEQ ID NO: 192365 - DNA, 759 bp, Artificial Sequence
  derived and/or modified sequence
atggtgtcctggatcatcagccggctggtggtgctgatcttcggcaccctgtacccagcctacagcagctacaaggctgtgaagaccaagaatgtgaaggagtatgtgaagtggatgatgtactggatcgtgtttgccttcttcaccacagctgagaccctgacagacatcgtgctgtcctggttccccttctactttgagctgaagatcgccttcgtcatctggctgctgagcccctacaccaagggcagctctgtgctgtacaggaagtttgtgcaccccaccctgagcaacaaggagaaggagattgatgagtacatcacccaggcccgggacaagagctatgagaccatgatgagggtgggcaagaggggcctgaacctggccgccaatgctgctgtgacagctgctgccaagggcgtgctgtctgagaagctgcggagcttctccatgcaggacctgaccctcatcagagatgaagatgccctgcccctgcagaggccagatggccgcctgcggcccagccctggcagcctgctggacaccatcgaggacctgggagatgatcctgccctgagcctgcggagcagcaccaacccagctgacagcaggacagaggcctctgaagatgacatgggagacaaggcccccaagagggccaagcccatcaagaaggcccccaaggccgagcccctggccagcaagaccctgaagacccggcccaagaagaagaccagcggcggcggggacagcgcctag

SEQ ID NO: 192366 - DNA, 759 bp, Artificial Sequence
  derived and/or modified sequence
atggtgagctggatcatcagccggctggtggtgctgatcttcggcacgttgtaccccgcctactcgagctacaaggctgtgaaaaccaagaatgtaaaagaatatgttaagtggatgatgtattggatcgtgttcgctttttttaccactgccgagaccctcacagacatcgtgctcagctggttccccttttactttgaactgaagatcgcattcgtaatctggcttctatctccatacactaaggggtctagtgtgctatatcggaaattcgtccaccccaccttgagcaacaaggagaaagagatcgacgagtacatcactcaggccagggataaatcttacgagacaatgatgcgcgtgggaaagcggggactgaatttagccgctaatgctgccgttacggccgcagcaaagggggtgctcagcgagaaactcaggagcttcagcatgcaggatctgactctgatccgcgatgaggatgccctcccactacagaggcccgacggtagactgcggccttctcctgggagtttgttggacacaatcgaggatttaggtgatgaccccgcacttagcctgcggagcagtacaaatccagccgacagtagaaccgaagcatctgaagacgacatgggtgacaaagctcccaagagggccaagcccattaagaaagcgcccaaagccgagccacttgctagcaaaacacttaagacacgacccaagaagaagacatctggcgggggcgacagcgcctag

SEQ ID NO: 192367 - DNA, 759 bp, Artificial Sequence
  derived and/or modified sequence
atggttagttggattatttctcgcctagtcgttctaatcttcggaacactgtaccccgcatacagctcgtacaaagctgtcaagacaaaaaacgtcaaagaatacgtgaaatggatgatgtactggattgtcttcgccttctttaccacagccgaaacgcttactgacattgtgctgtcttggttccccttttatttcgaacttaaaatcgccttcgtaatatggttgttatcaccttacactaagggtagtagtgtgctatataggaaattcgtgcacccgaccctttccaacaaggagaaagagatagacgagtatataactcaggctagagacaagagctatgagaccatgatgagggttggaaaacgcggtttgaatctggcggctaacgccgctgttacggctgctgccaagggcgttctctctgagaagctcagaagttttagcatgcaggatctcactctcatccgagacgaggacgcgcttcccctgcagcgccctgatggaaggctaaggccctcacccggttcattattggacaccattgaagatcttggtgacgaccccgctctatcactgcgatcaagcaccaaccccgcagattccaggacagaggcctctgaagatgatatgggcgacaaagcacccaagagagccaaacccatcaaaaaggcacccaaagcggagcccttggcttctaagactctgaaaactaggccgaagaaaaagacaagcggtggtggcgattcagcttag

SEQ ID NO: 192368 - DNA, 2099 bp, Artificial Sequence
  derived and/or modified sequence
gctgctgcagcggctgctgctgctactgcggctcctgctgccgccgccgccgccgctcggcctcaggcagctgcatcctcggccgggccgggtccccgccccgcgccgcgcccggccccgccatggtgtcctggatcatctctcgcctggtggtgctcatctttggcaccctgtacccagcctattcttcctacaaggccgtgaagacaaaaaacgtgaaggaatatgtgaaatggatgatgtactggatcgtctttgccttcttcaccacggccgagacgctcacggatatagtgctctcctggttccccttctactttgaactgaagatcgccttcgtgatatggctgctgtccccttacaccaagggctccagcgtgctctaccgcaagttcgtgcacccaacgctgtccaacaaggagaaggagatcgacgagtacatcacgcaggcccgagacaagagctatgagaccatgatgagggtgggcaagaggggcctgaaccttgccgccaatgctgcagtcacagctgccgccaagggggtgctgtcagagaagctccgcagcttcagcatgcaggacctgaccctgatccgggacgaggacgcactgcccctgcagaggcctgacggccgcctccgacccagccctggcagcctcctggacaccatcgaggacttaggagatgaccctgccctgagtctaaggtccagcacaaacccggcagattcccggacagaggcttctgaggatgacatgggagacaaagctcccaagagggccaaacccatcaaaaaagcgcccaaagctgagccactggcttccaagacactgaagacccggcccaagaagaagacctctggcgggggcgactcagcttgagcccctccacccccgcaggctgcagagcaaggatgaagcctcaggaggggcctcagacccagcccctgctccacactgtgccagtagcctaggtgtctcaggcccctgggccccgcagatggccatttccggtgcctgcccagtggccactcttctggaaggggcttggaaaagaggaaggaggcccagctgtgggggttgagggtagagggtggaccagaggctgaggactgagccacccaaggaggtggggactgctcggcctccaccgctgttccgctgcagccccgccctgccccacccacccagtgccttgctgaagcccatagcaatccgcttctcagaggtcctgtcgtgtttccactgctcgccttggtttgggagcagggagggggaagtcctagcccagatggaccaaggacgggcctgaaggcacatgggggaaagggagcacacggggaggacgttggggaccctgggtggggcctccaggtgcagctgtggatggaagacagggattggcctgtgcttcagcgaccaggatggccaggccagagctgcagctgggggctcttttcctggtcattgggtggggctgagtgccacatgttcccacattaaaaaggggggtccagggctgtgtgagtgtgtctttctgggtctagggctcggggtagtttgggtcaaggactgtccctccagcagtcgcctcctcccaccctgagccccacagtcatctggccctttccctgctcaaccctccatcctaggctctgagcctcagaggacccagcccatgagagaacggggatctggggggcctctcacctgctcctatgaccttgctcccttttaggtcaccccattgccaccgtgcccctgggctggactcccgtgctcctcagggcccacccctgctctgtctggtacaggcccctgctgagtgggcccctctcctctgcccctggggtccatcccctcttgcccagggtccccatcctgtaccaagcagactgggccctaagacccctggcagaacccagcctctgctcacacccgccccagcttctgccacggcttcagtcagggccaggaggaacacgtgaaggagaaagagaaatgcaggagccgcggggctcccggttccttgggaagagggtgcccattggacctttggcactggatgagccaataaaccaaactctggcacctcattta

SEQ ID NO: 192369 - DNA, 759 bp, Artificial Sequence
  derived and/or modified sequence
atggtgagctggatcatcagcagactggtggtgctgatcttcggcaccctgtaccccgcctacagcagctacaaggccgtgaagaccaagaacgtgaaggagtacgtgaagtggatgatgtactggatcgtgttcgccttcttcaccaccgccgagaccctgaccgacatcgtgctgagctggttccccttctacttcgagctgaagatcgccttcgtgatctggctgctgagcccctacaccaagggcagcagcgtgctgtacagaaagttcgtgcaccccaccctgagcaacaaggagaaggagatcgacgagtacatcacccaggccagagacaagagctacgagaccatgatgagagtgggcaagagaggcctgaacctggccgccaacgccgccgtgaccgccgccgccaagggcgtgctgagcgagaagctgagaagcttcagcatgcaggacctgaccctgatcagagacgaggacgccctgcccctgcagagacccgacggcagactgagacccagccccggcagcctgctggacaccatcgaggacctgggcgacgaccccgccctgagcctgagaagcagcaccaaccccgccgacagcagaaccgaggccagcgaggacgacatgggcgacaaggcccccaagagagccaagcccatcaagaaggcccccaaggccgagcccctggccagcaagaccctgaagaccagacccaagaagaagaccagcggcggcggcgacagcgcctag

SEQ ID NO: 192370 - protein, 453 aa, Artificial Sequence
  derived and/or modified sequence
MGRTREAGCVAAGVVIGAGACYCVYRLAWGRDENEKIWDEDEESTDTSEIGVETVKGAKTNAGAGSGAKLQGDSEVKPEVSLGLEDCPGVKEKAHSGSHSGGGLEAKAKALFNTLKEQASAKAGKGARVGTISGNRTLAPSLPCPGGRGGGCHPTRSGSRAGGRASGKSKGKARSKSTRAPATTWPVRRGKFNFPYKIDDILSAPDLQKVLNILERTNDPFIQEVALVTLGNNAAYSFNQNAIRELGGVPIIAKLIKTKDPIIREKTYNALNNLSVNAENQGKIKTYISQVCDDTMVCRLDSAVQMAGLRLLTNMTVTNHYQHLLSYSFPDFFALLFLGNHFTKIQIMKLIINFTENPAMTRELVSCKVPSELISLFNKEWDREILLNILTLFENINDNIKNEGLASSRKEFSRSSLFFLFKESGVCVKKIKALANHNDLVVKVKVLKVLTKL

SEQ ID NO: 192371 - protein, 158 aa, Artificial Sequence
  derived and/or modified sequence
MVCRLDSAVQMAGLRLLTNMTVTNHYQHLLSYSFPDFFALLFLGNHFTKIQIMKLIINFTENPAMTRELVSCKVPSELISLFNKEWDREILLNILTLFENINDNIKNEGLASSRKEFSRSSLFFLFKESGVCVKKIKALANHNDLVVKVKVLKVLTKL

SEQ ID NO: 192372 - DNA, 1362 bp, Artificial Sequence
  derived and/or modified sequence
atgggacggacgagggaggctgggtgtgtagctgccggagtggtgatcggtgcgggagcatgttattgtgtgtaccgactcgcctggggccgagatgaaaacgaaaaaatttgggacgaagatgaagagtctacggacacatccgaaataggagttgagactgtgaagggagccaaaaccaatgccggggctggcagtggggccaaactccaaggagactctgaagtgaagcccgaggtctctctcgggttggaggactgcccgggcgtgaaagagaaggcgcacagtggtagtcatagtgggggaggactcgaggcaaaggccaaggctttgttcaataccctgaaggagcaggcctccgcaaaagctgggaagggcgcccgggtgggtaccatcagcggcaatcggactttagccccaagcctcccatgtcctggcggaagaggtggagggtgccacccaactaggtcagggagcagagccggaggccgcgcttcaggtaaatccaagggtaaggcccgctctaaaagcacccgcgcacccgcgacgacatggccggttagaagaggtaaattcaatttcccgtacaagatagacgacattctgtccgctcccgacctgcagaaagttttgaacatcttagaacgtaccaatgacccattcatccaggaggtcgcgctggtcacactaggaaataacgcggcttattcatttaatcagaacgcaattcgggagctcggaggcgtgccgatcattgccaagttaattaagaccaaagacccaattatccgggaaaaaacatacaatgctctgaataatctgagcgtgaacgccgagaatcagggaaagattaagacgtatatatcccaggtctgcgacgataccatggtgtgcagactggactccgcggtccagatggcaggtctgagactcctcaccaacatgacggtgaccaatcattaccagcatcttctgtcatactcctttccagacttctttgcccttctgttcctgggcaaccacttcaccaaaatccagattatgaagctcattatcaactttaccgaaaatcctgccatgacgagagaactggtgagctgcaaagtccctagtgaactgatcagcctcttcaataaggagtgggatcgtgagatacttctgaacatcctcactctgtttgaaaatatcaatgacaatataaaaaatgagggcctggcctcctcacggaaggagttctctaggtcatccttattcttcctattcaaggaatccggggtctgcgtgaagaaaattaaggcactggctaatcacaatgatttggtggtgaaggtgaaggtcttaaaggtcctgaccaagctctag

SEQ ID NO: 192373 - DNA, 477 bp, Artificial Sequence
  derived and/or modified sequence
atggtatgtcgactcgacagcgcagttcagatggccggactgaggctcctgaccaatatgactgttacaaaccactaccagcacctgctttcatactcattcccagacttctttgcgctgttattcctgggcaatcactttactaagattcagatcatgaaactcattatcaacttcactgagaatccagccatgacgagagagctggtctcttgcaaagttcccagtgagctgatttccctatttaacaaagaatgggacagggagatactgttgaacattcttacattgttcgagaacatcaacgacaacatcaagaatgaaggcctggcctcgtccaggaaggaattctcccggagtagccttttttttttatttaaggagagcggggtgtgcgtaaaaaagatcaaagcgttggccaaccataacgacttagttgttaaagtgaaagtgttgaaagttctcacaaaactgtag

SEQ ID NO: 192374 - DNA, 1362 bp, Artificial Sequence
  derived and/or modified sequence
atgggccgcacccgggaggccggctgtgtggccgccggcgtggtgattggagctggggcctgctactgtgtgtaccgcctggcctggggcagagatgaaaatgagaagatctgggatgaagatgaggagagcacagacaccagcgagattggagtggagaccgtgaagggggccaagaccaatgctggggccggcagcggggccaagctgcagggcgacagcgaggtgaagccagaggtgtccctgggcctggaggactgccctggggtgaaggagaaggcccacagcggcagccacagcggcggcggcctggaggccaaggccaaggccctcttcaacaccctgaaggagcaggccagcgccaaggccgggaaaggagcccgggtgggcaccatcagcggcaacagaaccctggcccccagcctgccctgccctgggggccggggcggcggctgccaccccaccaggagcggcagcagagctgggggccgggccagcggcaagagcaagggcaaggcccggagcaagagcacccgggccccagccaccacctggcctgtgcggcggggcaagttcaacttcccctacaagattgatgacatcctgagcgccccagacctgcagaaggtgctgaacatcctggagaggaccaatgaccccttcatccaggaggtggccctggtgaccctgggcaacaatgctgcctacagcttcaaccagaatgccatccgggagctgggcggcgtgcccatcatcgccaagctgatcaagaccaaggaccccatcatccgggagaagacctacaatgccctgaacaacctgtctgtgaatgctgagaaccagggcaagatcaagacctacatcagccaggtgtgtgatgacaccatggtgtgccgcctggacagcgctgtgcagatggccggcctgcggctgctgaccaacatgacagtgaccaaccactaccagcacctgctgagctacagcttcccagacttctttgccctgctcttcctgggcaaccacttcaccaagatccagatcatgaagctgatcatcaacttcacagagaacccagccatgacccgggagctggtgtcctgcaaggtgcccagcgagctgatcagcctcttcaacaaggagtgggaccgggagatcctgctgaacatcctgaccctgtttgagaacatcaatgacaacatcaagaatgaaggcctggccagcagcaggaaggagttcagccgcagcagcctcttcttcctgttcaaggagagcggcgtgtgtgtgaagaagatcaaggccctggccaaccacaatgacctggtggtgaaggtgaaggtgctgaaggtgctgaccaagctgtag

SEQ ID NO: 192375 - DNA, 477 bp, Artificial Sequence
  derived and/or modified sequence
atggtgtgccgcctggacagcgctgtgcagatggccggcctgcggctgctgaccaacatgacagtgaccaaccactaccagcacctgctgagctacagcttcccagacttctttgccctgctcttcctgggcaaccacttcaccaagatccagatcatgaagctgatcatcaacttcacagaaaatcctgccatgacccgggagctggtgtcctgcaaggtgcccagcgagctgatcagcctcttcaacaaggagtgggaccgggagatcctgctgaacatcctgaccctgtttgagaacatcaatgacaacatcaagaatgaaggcctggccagcagcaggaaggagttcagccgcagcagcctcttcttcctgttcaaggagagcggcgtgtgtgtgaagaagatcaaggccctggccaaccacaatgacctggtggtgaaggtgaaggtgctgaaggtgctgaccaagctgtag

SEQ ID NO: 192376 - DNA, 1362 bp, Artificial Sequence
  derived and/or modified sequence
atgggccggacccgggaggccggctgcgtggccgccggcgtggtgatcggtgctggggcctgttactgcgtgtatcgcctagcctggggaagagatgagaacgagaaaatatgggacgaggacgaggagagtaccgatacttcggagattggtgtggagacagtcaagggcgccaagacgaatgctggggcgggcagtggggcgaagttgcaaggcgattcagaagtaaagccagaagtgtctctgggtcttgaagactgccctggagttaaggagaaggctcacagcggttctcattcaggaggcggactggaagctaaagccaaagctctgttcaataccctgaaggagcaggcatccgctaaggcaggcaagggcgcccgggtcgggaccatcagcgggaacagaactctcgccccatcattaccctgtccgggcggacggggcggcggatgccaccctacacgctccgggtcaagggcaggcggccgagcctctggcaaaagcaaaggtaaagctcgatcaaagtccacaagggcacctgcaaccacatggccagtgcgtcgaggcaagttcaattttccctataagatcgatgatatcctgtctgcccctgatctgcaaaaggtgctgaatatactagaaaggacgaatgacccgtttatacaggaggttgccttagtgaccctcggaaataacgctgcatactcttttaaccaaaacgccatacgtgagctgggcggtgtgccgataatagctaagcttattaagaccaaagatcctatcattcgcgaaaagacctataatgctctgaataatctctcagtgaatgctgagaaccaaggcaaaatcaagacctacatatcccaggtgtgtgacgacaccatggtttgcaggctcgacagtgcagttcagatggctggacttaggctcttgactaatatgaccgtgacgaaccactatcagcatctactgagttactcctttcccgacttcttcgccctgctgttcttgggcaaccatttcacaaagattcagattatgaagctgatcattaattttactgaaaaccccgccatgaccagagaactggtctcatgcaaagtaccaagtgaattaatctcactgttcaacaaagaatgggatcgtgaaatcctgctaaacatactaaccctgttcgagaacattaatgataatatcaagaacgagggactcgcctcaagccggaaagaattctctcggagctcactgttctttctgtttaaagagtccggagtttgtgtgaagaagattaaagctctggcaaaccacaatgacttggtcgtgaaggtgaaggttttaaaggtgctcaccaagctatag

SEQ ID NO: 192377 - DNA, 477 bp, Artificial Sequence
  derived and/or modified sequence
atggtgtgccggctggacagcgccgtgcagatggccggcctgcggttgctaaccaacatgactgtgaccaaccactatcagcaccttttatcctatagcttcccggactttttcgcgctacttttcctgggcaatcattttacaaagatacagatcatgaagttgattataaattttaccgagaaccccgcaatgactcgcgagctcgtctcctgcaaggttcctagtgaactgatctctctcttcaacaaggagtgggatcgcgagatactgctcaatatcctcacgctattcgagaacatcaatgataatatcaagaatgagggattagcctctagcagaaaggaatttagtcgctcttctctcttctttttgtttaaagaaagcggggtgtgcgttaaaaaaattaaagccttggcaaatcataatgacttggtggtgaaagtgaaggtattaaaggttctgaccaagctttag

SEQ ID NO: 192378 - DNA, 1362 bp, Artificial Sequence
  derived and/or modified sequence
atgggaagaacaagggaagcgggttgcgtagcagctggggtcgtgatcggagccggagcatgttattgtgtgtatcggctggcttggggacgcgacgagaacgaaaagatctgggacgaagacgaggagtcaactgatacgtccgaaattggtgtggagaccgttaaaggcgctaagacaaatgcaggtgccggaagcggcgcaaagttacagggcgattccgaagtgaaacccgaggtaagtctggggctagaggattgccctggtgtgaaggaaaaggcacattctggaagccattcaggcggaggcttggaggcaaaagctaaggccttgtttaacacccttaaggagcaagcctccgcaaaggctggaaagggggctcgagtaggcaccatctccggcaatagaaccttagcaccatcgctgccatgccccggaggtagaggcggaggctgccacccgactcgcagtggctccagggccggaggcagagccagcggaaaaagtaaggggaaggccagatcgaagtctactcgcgctcccgcaaccacctggcccgttcggcgaggcaagtttaacttcccatacaagatagacgatattctgtctgccccagatctgcagaaggtacttaatatcctggaacggaccaatgaccctttcattcaagaagtcgcgctggtgacgctggggaacaatgccgcatactccttcaaccaaaacgcgatccgcgaactcggaggggtccctatcatagcgaagctgattaaaacaaaagatccaatcattagagagaagacatacaatgccctgaacaatttgagcgtgaatgccgagaatcaggggaaaataaaaacatatattagccaggtgtgcgatgacacaatggtgtgtaggttggatagcgccgttcagatggccggactgcggttgctcaccaacatgaccgtgacaaaccactaccaacatttgctgagctactctttccccgatttcttcgccttacttttcctgggtaaccacttcaccaagattcagataatgaaactgataattaatttcaccgaaaatccagctatgacaagggaattggtgtcatgcaaggtgcctagcgaattgatttctctcttcaacaaagagtgggacagagagatcttgctgaacatcctgaccctgttcgagaacattaatgataacatcaaaaatgagggattggcttctagtaggaaggagtttagtaggagctcactctttttcttattcaaggagtccggcgtgtgcgtgaagaagattaaagcactggccaaccataacgacctggtcgtgaaagtgaaggtgttaaaggtactcaccaagctgtag

SEQ ID NO: 192379 - DNA, 477 bp, Artificial Sequence
  derived and/or modified sequence
atggtttgtcgcttagatagcgccgtacagatggccggtctgcggttgctcaccaacatgactgtgacaaaccactaccagcatttactgtcttactccttcccagatttcttcgcactgctctttctaggcaatcacttcacaaaaatccagataatgaagctcatcataaacttcacagagaacccggctatgacacgtgaactcgtgagctgcaaagtaccctctgaactaatctctttgtttaataaagagtgggatcgtgaaatcctgctcaacatcttgaccctattcgagaatattaacgataatattaaaaatgaagggctggcctctagtcgtaaagaattttcaaggtcttcactgttcttcttgtttaaagagagtggagtctgtgttaagaagataaaggcgcttgctaaccacaatgacctggtggttaaggtgaaggtgctgaaagtgctcaccaaactgtag

SEQ ID NO: 192380 - DNA, 2141 bp, Artificial Sequence
  derived and/or modified sequence
gccgacgcgtgcagacgtccttctaatcctagtcttcgtttggtccggttgcactcttcctatagcccagagggcgagagggcctgtggcctgggggaaggaggacgaggttctgcctggatcccagcagtaggacgctgtgccatttgggaacaaaggaatagtctgcctggaatccctgcagatcttggggccggaggccagtccaacccttggagcaggaagaaacgcaaagttgtcaagaaccaagtcgagctgcctcagagccggcccgcagtagctgcagactccgcccgcgacgtgtgcgcgcttctctgggccagagcgagcctgttttgtgctcgggttaagagatttgtcccagctataccatgggccgcactcgggaagctggctgcgtggccgctggtgtggttatcggggctggtgcctgctactgtgtatacagactggcttggggaagagacgagaacgagaaaatctgggacgaagacgaggagtctacggacacctcagagattggggttgagactgtgaaaggagctaaaactaacgctggggcagggtctggggccaaacttcagggtgattcagaggtcaagcctgaggtgagtttgggactcgaggattgtccgggtgtaaaagagaaggcccattcaggatcccacagcggaggtggcctagaggccaaggccaaggcccttttcaacacgctgaaggaacaggcaagtgcaaaggcaggcaaaggggctagggtgggtaccatctctgggaacaggacccttgcaccgagtttaccctgcccaggaggcaggggtggaggctgccaccccaccaggagtggatctagggccgggggcagggcaagtggaaaatccaagggaaaggcccgaagtaagagcaccagggctccagctacaacatggcctgtccggagaggcaagttcaactttccttataaaattgatgatattctgagtgctcccgacctccaaaaggtcctcaacatcctggagcgaacaaatgatccttttattcaagaagtagccttggtcactctgggtaacaatgcagcatattcatttaaccagaatgccatacgtgaattgggtggtgtcccaattattgcaaaactgataaaaacaaaagaccccataattagggaaaagacttacaatgcccttaataacttgagtgtgaacgcagaaaatcagggcaagattaagacgtacatcagtcaagtgtgtgatgacaccatggtctgtcgcttggactcagctgtgcagatggctgggctaagactgttaaccaacatgactgtgactaatcattaccaacatttgctttcctattcttttccagacttttttgctttgttattcctgggaaatcacttcaccaagatacagattatgaaactaattataaactttactgaaaatccagccatgacaagagagctggtcagttgtaaagtaccatcagaattgatttccctctttaataaagaatgggatagagagattcttcttaatatccttaccctatttgagaatataaatgacaacataaaaaatgaagggctcgcatcatccaggaaagaattcagcagaagttcactttttttcttattcaaagagtctggagtttgtgttaagaaaatcaaagcactagcaaatcacaatgatctggtggtgaaagtaaaagtcctgaaagtattaaccaaactctaatttggagtctgtcccaaacaatattgagatatttgcagttggtacgatgtgatttgtaaattctttgtttttcattgtgcgtatatggtaaagagatcttttcagctgctattttggaataatgactatcatatatcataacagtgactgatgttggttgtaatggttgggtttaggatgaaccattttaaggatgccaaatgaaatattagtatttgtacacagaaagaatttattgatttgatcttattacctagattgagattttttaatctttcctctacctaaactgacaatgaattggttatacatcatgcataagctacacttttatattagtttatatttgttattctaagacttgtgtttcatcaataaagttgtgttttaagcagcagaaaaaaaaaa

SEQ ID NO: 192381 - DNA, 1779 bp, Artificial Sequence
  derived and/or modified sequence
cttctaatcctagtcttcgtttggtccggttgcactcttcctatagcccagagggcgagagggcctgtggcctgggggaaggaggacgaggttctgcctggatcccagcaggacgctgtgccatttgggaacaaaggaatagtctgcctggaatccctgcagatcttggggccggaggccagtccaacccttggagcaggaagaaacgcaaagttgtcaagaaccaagtcgagctgcctcagagccggcccgcagtagctgcagactccgcccgcgacgtgtgcgcgcttctctgggccagagcgagcctgttttgtgctcgggttaagagatttgtcccagctataccatgggccgcacacgctgaaggaacaggcaagtgcaaaggcaggcaaaggggctagggtgggtaccatctctgggaacaggacccttgcaccgagtttaccctgcccaggaggcaggggtggaggctgccaccccaccaggagtggatctagggccgggggcagggcaagtggaaaatccaagggaaaggcccgaagtaagagcaccagggctccagctacaacatggcctgtccggagaggcaagttcaactttccttataaaattgatgatattctgagtgctcccgacctccaaaaggtcctcaacatcctggagcgaacaaatgatccttttattcaagaagtagccttggtcactctgggtaacaatgcagcatattcatttaaccagaatgccatacgtgaattgggtggtgtcccaattattgcaaaactgataaaaacaaaagaccccataattagggaaaagacttacaatgcccttaataacttgagtgtgaacgcagaaaatcagggcaagattaagacgtacatcagtcaagtgtgtgatgacaccatggtctgtcgcttggactcagctgtgcagatggctgggctaagactgttaaccaacatgactgtgactaatcattaccaacatttgctttcctattcttttccagacttttttgctttgttattcctgggaaatcacttcaccaagatacagattatgaaactaattataaactttactgaaaatccagccatgacaagagagctggtcagttgtaaagtaccatcagaattgatttccctctttaataaagaatgggatagagagattcttcttaatatccttaccctatttgagaatataaatgacaacataaaaaatgaagggctcgcatcatccaggaaagaattcagcagaagttcactttttttcttattcaaagagtctggagtttgtgttaagaaaatcaaagcactagcaaatcacaatgatctggtggtgaaagtaaaagtcctgaaagtattaaccaaactctaatttggagtctgtcccaaacaatattgagatatttgcagttggtacgatgtgatttgtaaattctttgtttttcattgtgcgtatatggtaaagagatcttttcagctgctattttggaataatgactatcatatatcataacagtgactgatgttggttgtaatggttgggtttaggatgaaccattttaaggatgccaaatgaaatattagtatttgtacacagaaagaatttattgatttgatcttattacctagattgagattttttaatctttcctctacctaaactgacaatgaattggttatacatcatgcataagctacacttttatattagtttatatttgttattctaagacttgtgtttcatcaataaagttgtgttttaagcagc

SEQ ID NO: 192382 - DNA, 1362 bp, Artificial Sequence
  derived and/or modified sequence
atgggcagaaccagagaggccggctgcgtggccgccggcgtggtgatcggcgccggcgcctgctactgcgtgtacagactggcctggggcagagacgagaacgagaagatctgggacgaggacgaggagagcaccgacaccagcgagatcggcgtggagaccgtgaagggcgccaagaccaacgccggcgccggcagcggcgccaagctgcagggcgacagcgaggtgaagcccgaggtgagcctgggcctggaggactgccccggcgtgaaggagaaggcccacagcggcagccacagcggcggcggcctggaggccaaggccaaggccctgttcaacaccctgaaggagcaggccagcgccaaggccggcaagggcgccagagtgggcaccatcagcggcaacagaaccctggcccccagcctgccctgccccggcggcagaggcggcggctgccaccccaccagaagcggcagcagagccggcggcagagccagcggcaagagcaagggcaaggccagaagcaagagcaccagagcccccgccaccacctggcccgtgagaagaggcaagttcaacttcccctacaagatcgacgacatcctgagcgcccccgacctgcagaaggtgctgaacatcctggagagaaccaacgaccccttcatccaggaggtggccctggtgaccctgggcaacaacgccgcctacagcttcaaccagaacgccatcagagagctgggcggcgtgcccatcatcgccaagctgatcaagaccaaggaccccatcatcagagagaagacctacaacgccctgaacaacctgagcgtgaacgccgagaaccagggcaagatcaagacctacatcagccaggtgtgcgacgacaccatggtgtgcagactggacagcgccgtgcagatggccggcctgagactgctgaccaacatgaccgtgaccaaccactaccagcacctgctgagctacagcttccccgacttcttcgccctgctgttcctgggcaaccacttcaccaagatccagatcatgaagctgatcatcaacttcaccgagaaccccgccatgaccagagagctggtgagctgcaaggtgcccagcgagctgatcagcctgttcaacaaggagtgggacagagagatcctgctgaacatcctgaccctgttcgagaacatcaacgacaacatcaagaacgagggcctggccagcagcagaaaggagttcagcagaagcagcctgttcttcctgttcaaggagagcggcgtgtgcgtgaagaagatcaaggccctggccaaccacaacgacctggtggtgaaggtgaaggtgctgaaggtgctgaccaagctgtag

SEQ ID NO: 192383 - DNA, 477 bp, Artificial Sequence
  derived and/or modified sequence
atggtgtgcagactggacagcgccgtgcagatggccggcctgagactgctgaccaacatgaccgtgaccaaccactaccagcacctgctgagctacagcttccccgacttcttcgccctgctgttcctgggcaaccacttcaccaagatccagatcatgaagctgatcatcaacttcaccgagaaccccgccatgaccagagagctggtgagctgcaaggtgcccagcgagctgatcagcctgttcaacaaggagtgggacagagagatcctgctgaacatcctgaccctgttcgagaacatcaacgacaacatcaagaacgagggcctggccagcagcagaaaggagttcagcagaagcagcctgttcttcctgttcaaggagagcggcgtgtgcgtgaagaagatcaaggccctggccaaccacaacgacctggtggtgaaggtgaaggtgctgaaggtgctgaccaagctgtag

SEQ ID NO: 192384 - protein, 520 aa, Artificial Sequence
  derived and/or modified sequence
MASDPIFTLAPPLHCHYGAFPPNASGWEQPPNASGVSVASAALAASAASRVATSTDPSCSGFAPPDFNHCLKDWDYNGLPVLTTNAIGQWDLVCDLGWQVILEQILFILGFASGYLFLGYPADRFGRRGIVLLTLGLVGPCGVGGAAAGSSTGVMALRFLLGFLLAGVDLGVYLMRLELCDPTQRLRVALAGELVGVGGHFLFLGLALVSKDWRFLQRMITAPCILFLFYGWPGLFLESARWLIVKRQIEEAQSVLRILAERNRPHGQMLGEEAQEALQDLENTCPLPATSSFSFASLLNYRNIWKNLLILGFTNFIAHAIRHCYQPVGGGGSPSDFYLCSLLASGTAALACVFLGVTVDRFGRRGILLLSMTLTGIASLVLLGLWDYLNEAAITTFSVLGLFSSQAAAILSTLLAAEVIPTTVRGRGLGLIMALGALGGLSGPAQRLHMGHGAFLQHVVLAACALLCILSIMLLPETKRKLLPEVLRDGELCRRPSLLRQPPPTRCDHVPLLATPNPAL

SEQ ID NO: 192385 - DNA, 1563 bp, Artificial Sequence
  derived and/or modified sequence
atggccagcgacccaatatttaccttggccccacccctgcactgccattatggcgcctttccgcccaacgcttcggggtgggaacagcctcccaacgccagcggagtgtcagttgcatctgctgccttggccgcatcagccgcttcaagggttgctacttctactgatccctcatgcagtggattcgcgccacccgattttaatcactgcctaaaagactgggactacaatggcctgcccgtattgacgacaaatgctattggtcagtgggatttggtgtgcgatctcgggtggcaggtcatacttgagcaaattctatttattcttggcttcgccagcggctacctattcctcggctaccccgcggaccgatttggccggcgcggcatcgtcttgctgactctgggcttagtcggcccttgtggagtgggcggtgccgcagcaggctcgagcaccggtgtgatggctttgcggttcctgctgggtttcttgctggcaggcgtcgacttgggggtgtaccttatgcgcttagagctatgtgatccaacccagcggcttcgcgttgctctcgccggggaactggttggggtcggcggacatttcttattcctcggactagccctcgtttcaaaggattggaggttcctccaaaggatgatcactgcaccttgtatactcttcctcttctacggatggcctgggttattcctcgaatccgcaagatggcttattgtgaagcggcagattgaagaagctcagtccgtgctacggatcctggctgagagaaacaggccccatggacaaatgttgggggaggaggcccaagaagccttacaggatctggaaaatacatgcccactcccagccacttcctccttttcttttgcttcgttactgaattaccgcaatatttggaagaatctgctcattctaggcttcacgaactttatcgctcacgccatcagacattgttatcagccggtcggcgggggaggttcaccttctgatttttatctttgctctctcttagcatccggaaccgcagctcttgcatgcgtgtttctgggcgtcacagtggaccggtttggacgcagaggaatccttttactgtctatgacgctgactggaatcgcttcccttgtccttctggggctttgggattaccttaacgaagccgccattacaacattctccgtactcggtttgttcagctcgcaggctgctgctattttatctactcttctcgcagccgaagtgatcccaactaccgtaagaggcagaggcctgggcctgattatggcgttaggtgctctgggtggtctctctggcccagcgcagcgcctgcatatgggacacggggcctttctgcagcacgttgtgctggccgcctgtgcactgctgtgcatcctatctatcatgctacttccagaaacaaagaggaaacttttacctgaggtgttgagggatggagagctgtgcagaaggccgagcctgcttcgccagccaccgcctacacggtgtgatcacgtcccactactcgctacaccaaatcccgccttgtag

SEQ ID NO: 192386 - DNA, 1563 bp, Artificial Sequence
  derived and/or modified sequence
atggccagtgaccccatcttcaccctggccccacccctgcactgccactatggagccttccccccaaatgccagcggctgggagcagcccccaaatgccagcggcgtgtctgtggccagcgctgccctggccgccagcgctgccagccgggtggccaccagcacagaccccagctgcagcggctttgcccccccagacttcaaccactgcctgaaggactgggactacaacggcctgcctgtgctgaccaccaatgccatcggccagtgggacctggtgtgtgacctgggctggcaggtgatcctggagcagatcctcttcatcctgggctttgccagcggctacctgttcctgggctacccagctgacagatttggaagaagaggcatcgtgctgctgaccctgggcctggtgggcccctgtggggtgggcggcgctgctgctggcagcagcactggagtgatggccctgcgcttcctgctgggcttcctgctggccggcgtggacctgggcgtgtacctgatgaggctggagctgtgtgaccccacccagaggctgcgggtggccctggccggggagctggtgggcgtgggcggccacttcctgttcctgggcctggccctggtgtccaaggactggaggttcctgcagaggatgatcacagccccctgcatcctcttcctgttctacggctggccaggcctcttcctggagagcgcccgctggctgattgtgaagaggcagatcgaggaggcccagagcgtgctgcgcatcctggccgagaggaaccggccccacggccagatgctgggggaggaggcccaggaggccctgcaggacctggagaacacctgccccctgcctgccaccagcagcttctcctttgccagcctgctgaactacagaaacatctggaagaacctgctgatcctgggcttcaccaacttcatcgcccacgccatccgccactgctaccagcctgtgggcggcggcggcagccccagcgacttctacctgtgcagcctgctggccagcggcacagctgccctggcctgtgtgttcctgggcgtgacagtggaccgcttcggccggcggggcatcctgctgctgtccatgaccctgactggaattgccagcctggtgctgctgggcctgtgggactacctgaatgaggccgccatcaccaccttctctgtgctgggcctcttcagcagccaggccgccgccatcctgagcaccctgctggccgctgaggtgatccccaccaccgtgcggggccggggcctgggcctcatcatggccctgggcgccctgggcggcctgagcggccctgcccagaggctgcacatgggccacggggccttcctgcagcacgtggtgctggccgcctgtgccctgctgtgcatcctgagcatcatgctgctgcctgagaccaagaggaagctgctgcctgaggtgctgagagatggagagctgtgccggcggcccagcctgctgcggcagcccccacccacccgctgtgaccacgtgcccctgctggccacccccaacccagccctgtag

SEQ ID NO: 192387 - DNA, 1563 bp, Artificial Sequence
  derived and/or modified sequence
atggccagcgaccccatcttcaccctggccccccccctgcactgccattacggggcattcccgcctaacgctagtggctgggaacaaccgcccaacgccagtggtgtgagtgtagcaagtgcggctctcgccgcctcagctgcctctagagtggcaactagtacagacccctcctgcagcggcttcgcaccccctgattttaatcattgcttgaaggattgggactacaatgggctaccagtgctgaccaccaacgctattggacaatgggacctggtttgtgatctcggatggcaggtcatcctggagcagatcctttttatcttgggtttcgcgagcgggtacctgtttctcggataccccgccgaccgcttcggcaggagaggaattgtgctgttgactctcggcctcgtggggccatgcggggtgggaggtgctgccgcaggttcgtctaccggggtgatggccttgcgtttcctgctcggcttcctactggcaggtgttgacctgggtgtgtatttgatgaggctcgaactttgtgaccctacccaaaggttacgcgtcgcgctcgccggggaacttgttggggtaggcggccattttctgtttctgggtctggctctggtctctaaagattggaggtttctccagagaatgatcacagccccctgcatactgtttctgttttacggctggcctggactcttcctggaaagcgcccgttggctgattgtcaagaggcagatcgaagaggcccagagcgtcctcagaattctggcggaacggaatcggcctcatggccagatgctaggggaggaagcgcaagaggcactgcaggatctcgagaatacatgtccgctgccagcaacttctagttttagcttcgcctcactactgaattaccgaaacatctggaaaaatcttctcatccttggcttcacaaacttcatcgctcatgccattagacactgctatcagccagttgggggaggcggctccccttccgacttttatctatgttctctgctggcctccggaactgctgctttggcctgcgtgttcttaggagtgactgtggaccgttttggcaggagaggtattcttctgttatccatgaccttgaccggcattgcatcgctcgtgctgctcgggctgtgggattatctgaacgaggcagccatcacaacattctccgtgctgggcttgttctctagccaggctgcagccatcttatccacactattagctgccgaagtgatccccaccacggtgcgcggtaggggcctggggctgattatggcattaggcgctctagggggtctatccgggccggctcagcggctccatatgggccacggggccttccttcaacacgttgtgctggccgcctgcgctctcctatgtatcctgtctataatgctgttgcctgaaacaaaacgaaagcttttacctgaagtgttgcgagacggggagttgtgccggcggccatcactgctgaggcagcccccacctaccaggtgtgaccatgtcccccttctcgccacccctaatccagccctctag

SEQ ID NO: 192388 - DNA, 1563 bp, Artificial Sequence
  derived and/or modified sequence
atggccagcgatcccatattcactcttgccccacctctccattgtcattacggggcttttccccctaatgctagtggatgggagcagccacctaatgcttcgggtgtcagcgtcgccagtgctgcactcgctgcgtccgcggcatcccgcgtagcgacttctacggatccctcttgctctggattcgccccaccagattttaaccattgcctgaaggattgggattacaatggcctcccggtgctcaccaccaacgccatcgggcagtgggatctggtatgtgatcttggctggcaggtgatcctggaacagattctgtttattcttgggttcgcaagtggatatctgtttctgggttatccagctgaccggttcgggagaaggggaattgtgctgctgaccctgggacttgttgggccatgcggcgtggggggagccgcagccggttcgtctaccggagtcatggccctgcgttttctgctgggcttcctactggctggggtcgacctgggcgtctaccttatgcggctggaactgtgtgaccctactcagcgactgcgggtggcactagccggtgagttggttggagttggcggtcattttctgttccttggcttagccctcgtttctaaggattggaggtttctgcagagaatgatcacggccccttgtatcctgttcctgttttacgggtggccaggactgtttttagaatcagcccgttggctaatcgtgaaaaggcagatcgaggaagctcaatctgtcctcagaattctggcagaacgcaacaggcctcatggtcagatgctaggtgaggaggcacaagaggcactccaggatctggagaacacttgccctctgccggcaaccagttctttcagcttcgcaagcttgctgaactataggaacatctggaaaaatctgttgatcctgggtttcaccaatttcatagcacacgccatcaggcattgttatcagcccgtcgggggaggaggcagcccgagtgatttttacctgtgcagcctcctcgcaagcggaactgccgcactggcatgtgtcttcctgggggtaacagtggacagatttgggcgtcgtggcatcctcctgctgtccatgaccctgactgggatcgcctccctggtgctgcttgggctttgggactatctgaacgaagccgcaatcacaaccttttcagtgttaggtttatttagtagtcaggccgctgcaatcctatcaactctcctcgcagctgaggttatcccaactacggtgcgcggtagaggactcgggctgatcatggcgcttggcgcactcggcggtctctcgggccctgcccagcgcctgcatatgggacacggcgcatttctccagcacgtcgtgctggcagcttgcgcccttttgtgcatcctttccatcatgctgctgcccgaaaccaagagaaaactacttcccgaggtcctgcgagatggggaactttgtcgcagaccttccctgttgcgtcagccacctcctactcgctgtgaccacgtgcctctactggcgactcccaatcccgcactatag

SEQ ID NO: 192389 - DNA, 2409 bp, Artificial Sequence
  derived and/or modified sequence
gggaggggaaagcagcgcagagatcgcagagaccaaggaggcgcccgcggctgcagagctgcagagcgggatctcttcgagctgtctgtgtccgggcagccggcgcgcaactgagccagaggacagcgcatcctttcggcgcgggccggcagggcccctgcggtcggcaagctggctccccgggtggccaccgggacccccgagcccaatggcgggggcggcggcaaaatcgacaacactgtagagatcacccccacctccaacggacaggtcgggaccctcggagatgcggtgcccacggagcagctgcagggtgagcgggagcgcgagcgggagggggagggagacgcgggcggcgacggactgggcagcagcctgtcgctggccgtgcccccaggccccctcagctttgaggcgctgctcgcccaggtgggggcgctgggcggcggccagcagctgcagctcggcctctgctgcctgccggtgctcttcgtggctctgggcatggcctcggaccccatcttcacgctggcgcccccgctgcattgccactacggggccttcccccctaatgcctctggctgggagcagcctcccaatgccagcggcgtcagcgtcgccagcgctgccctagcagccagcgccgccagccgtgtcgccaccagtaccgacccctcgtgcagcggcttcgccccgccggacttcaaccattgcctcaaggattgggactataatggccttcctgtgctcaccaccaacgccatcggccagtgggatctggtgtgtgacctgggctggcaggtgatcctggagcagatcctcttcatcttgggctttgcctccggctacctgttcctgggttaccccgcagacagatttggccgtcgcgggattgtgctgctgaccttggggctggtgggcccctgtggagtaggaggggctgctgcaggctcctccacaggcgtcatggccctccgattcctcttgggctttctgcttgccggtgttgacctgggtgtctacctgatgcgcctggagctgtgcgacccaacccagaggcttcgggtggccctggcaggggagttggtgggggtgggagggcacttcctgttcctgggcctggcccttgtctctaaggattggcgattcctacagcgaatgatcaccgctccctgcatcctcttcctgttttatggctggcctggtttgttcctggagtccgcacggtggctgatagtgaagcggcagattgaggaggctcagtctgtgctgaggatcctggctgagcgaaaccggccccatgggcagatgctgggggaggaggcccaggaggccctgcaggacctggagaatacctgccctctccctgcaacatcctccttttcctttgcttccctcctcaactaccgcaacatctggaaaaatctgcttatcctgggcttcaccaacttcattgcccatgccattcgccactgctaccagcctgtgggaggaggagggagcccatcggacttctacctgtgctctctgctggccagcggcaccgcagccctggcctgtgtcttcctgggggtcaccgtggaccgatttggccgccggggcatccttcttctctccatgacccttaccggcattgcttccctggtcctgctgggcctgtgggattatctgaacgaggctgccatcaccactttctctgtccttgggctcttctcctcccaagctgccgccatcctcagcaccctccttgctgctgaggtcatccccaccactgtccggggccgtggcctgggcctgatcatggctctaggggcgcttggaggactgagcggcccggcccagcgcctccacatgggccatggagccttcctgcagcacgtggtgctggcggcctgcgccctcctctgcattctcagcattatgctgctgccggagaccaagcgcaagctcctgcccgaggtgctccgggacggggagctgtgtcgccggccttccctgctgcggcagccaccccctacccgctgtgaccacgtcccgctgcttgccacccccaaccctgccctctgagcggcctctgagtaccctggcgggaggctggcccacacagaaaggtggcaagaagatcgggaagactgagtagggaaggcagggctgcccagaagtctcagaggcacctcacgccagccatcgcggagagctcagagggccgtccccaccctgcctcctccctgctgctttgcattcacttccttggccagagtcaggggacagggagagagctccacactgtaaccactgggtctgggctccatcctgcgcccaaagacatccacccagacctcattatttcttgctctatcattctgtttcaataaagacatttggaataaacgagcatatcatagcctg

SEQ ID NO: 192390 - DNA, 1563 bp, Artificial Sequence
  derived and/or modified sequence
atggccagcgaccccatcttcaccctggccccccccctgcactgccactacggcgccttcccccccaacgccagcggctgggagcagccccccaacgccagcggcgtgagcgtggccagcgccgccctggccgccagcgccgccagcagagtggccaccagcaccgaccccagctgcagcggcttcgccccccccgacttcaaccactgcctgaaggactgggactacaacggcctgcccgtgctgaccaccaacgccatcggccagtgggacctggtgtgcgacctgggctggcaggtgatcctggagcagatcctgttcatcctgggcttcgccagcggctacctgttcctgggctaccccgccgacagattcggcagaagaggcatcgtgctgctgaccctgggcctggtgggcccctgcggcgtgggcggcgccgccgccggcagcagcaccggcgtgatggccctgagattcctgctgggcttcctgctggccggcgtggacctgggcgtgtacctgatgagactggagctgtgcgaccccacccagagactgagagtggccctggccggcgagctggtgggcgtgggcggccacttcctgttcctgggcctggccctggtgagcaaggactggagattcctgcagagaatgatcaccgccccctgcatcctgttcctgttctacggctggcccggcctgttcctggagagcgccagatggctgatcgtgaagagacagatcgaggaggcccagagcgtgctgagaatcctggccgagagaaacagaccccacggccagatgctgggcgaggaggcccaggaggccctgcaggacctggagaacacctgccccctgcccgccaccagcagcttcagcttcgccagcctgctgaactacagaaacatctggaagaacctgctgatcctgggcttcaccaacttcatcgcccacgccatcagacactgctaccagcccgtgggcggcggcggcagccccagcgacttctacctgtgcagcctgctggccagcggcaccgccgccctggcctgcgtgttcctgggcgtgaccgtggacagattcggcagaagaggcatcctgctgctgagcatgaccctgaccggcatcgccagcctggtgctgctgggcctgtgggactacctgaacgaggccgccatcaccaccttcagcgtgctgggcctgttcagcagccaggccgccgccatcctgagcaccctgctggccgccgaggtgatccccaccaccgtgagaggcagaggcctgggcctgatcatggccctgggcgccctgggcggcctgagcggccccgcccagagactgcacatgggccacggcgccttcctgcagcacgtggtgctggccgcctgcgccctgctgtgcatcctgagcatcatgctgctgcccgagaccaagagaaagctgctgcccgaggtgctgagagacggcgagctgtgcagaagacccagcctgctgagacagcccccccccaccagatgcgaccacgtgcccctgctggccacccccaaccccgccctgtag

SEQ ID NO: 192391 - protein, 338 aa, Artificial Sequence
  derived and/or modified sequence
MELRSGSVGSQAVARRMDGDSRDGGGGKDATGSEDYENLPTSASVSTHMTAGAMAGILEHSVMYPVDSVKTRMQSLSPDPKAQYTSIYGALKKIMRTEGFWRPLRGVNVMIMGAGPAHAMYFACYENMKRTLNDVFHHQGNSHLANGIAGSMATLLHDAVMNPAEVVKQRLQMYNSQHRSAISCIRTVWRTEGLGAFYRSYTTQLTMNIPFQSIHFITYEFLQEQVNPHRTYNPQSHIISGGLAGALAAAATTPLDVCKTLLNTQENVALSLANISGRLSGMANAFRTVYQLNGLAGYFKGIQARVIYQMPSTAISWSVYEFFKYFLTKRQLENRAPY

SEQ ID NO: 192392 - DNA, 1017 bp, Artificial Sequence
  derived and/or modified sequence
atggagctgagaagcggcagcgtgggcagccaggccgtggccagaagaatggacggcgacagcagagacggcggcggcggcaaggacgccaccggcagcgaggactacgagaacctgcccaccagcgccagcgtgagcacccacatgaccgccggcgccatggccggcatcctggagcacagcgtgatgtaccccgtggacagcgtgaagaccagaatgcagagcctgagccccgaccccaaggcccagtacaccagcatctacggcgccctgaagaagatcatgagaaccgagggcttctggagacccctgagaggcgtgaacgtgatgatcatgggcgccggccccgcccacgccatgtacttcgcctgctacgagaacatgaagagaaccctgaacgacgtgttccaccaccagggcaacagccacctggccaacggcatcgccggcagcatggccaccctgctgcacgacgccgtgatgaaccccgccgaggtggtgaagcagagactgcagatgtacaacagccagcacagaagcgccatcagctgcatcagaaccgtgtggagaaccgagggcctgggcgccttctacagaagctacaccacccagctgaccatgaacatccccttccagagcatccacttcatcacctacgagttcctgcaggagcaggtgaacccccacagaacctacaacccccagagccacatcatcagcggcggcctggccggcgccctggccgccgccgccaccacccccctggacgtgtgcaagaccctgctgaacacccaggagaacgtggccctgagcctggccaacatcagcggcagactgagcggcatggccaacgccttcagaaccgtgtaccagctgaacggcctggccggctacttcaagggcatccaggccagagtgatctaccagatgcccagcaccgccatcagctggagcgtgtacgagttcttcaagtacttcctgaccaagagacagctggagaacagagccccctactag

SEQ ID NO: 192393 - DNA, 1017 bp, Artificial Sequence
  derived and/or modified sequence
atggaactccgtagcggatccgtgggtagccaggccgtggcccggagaatggacggagactccagagatggtggagggggcaaagacgccacaggatccgaggactacgagaatcttcccacatctgcgagcgtcagcacccatatgaccgccggggccatggcaggtattctggagcattccgtcatgtatccagtagatagtgtcaagactcggatgcagtcactctccccagatcccaaagctcaatatactagtatatatggcgcattaaagaaaattatgaggactgagggtttttggcggcccttgcggggggtcaacgtcatgattatgggcgccggtcccgcccacgcaatgtattttgcctgctacgagaatatgaagagaacgctcaacgacgtattccatcatcagggtaactcccacctggctaatggcatcgccggcagcatggccactctccttcatgacgcagtgatgaaccctgccgaagtcgtgaaacagagactccagatgtataactctcagcaccggagtgctatctcctgcattcgcactgtgtggcggactgaggggctgggagcattctaccggagttacaccactcaactgaccatgaacatccctttccagtcaatccactttataacctacgagtttttgcaggagcaggtcaatccccaccgcacatacaacccacagagtcatattatatccggaggtctggcaggagcactggcagccgcggcgacaaccccgctcgacgtctgtaagaccctcctgaacacccaggagaacgtcgctctttctctggctaacataagcggcagactaagcggaatggctaacgctttccggaccgtataccagcttaatgggttggcaggctacttcaaaggcattcaggcacgtgtgatttatcaaatgccttccaccgcaatatcctggagtgtctacgagttcttcaaatattttctaaccaaacggcagctcgagaacagggcaccgtactag

SEQ ID NO: 192394 - DNA, 1017 bp, Artificial Sequence
  derived and/or modified sequence
atggagctgcggagcggctctgtgggcagccaggccgtggcccggaggatggatggagacagcagagatggcggcggcggcaaggatgccactggaagtgaggactatgagaacctgcccaccagcgcctctgtgtccacccacatgacagctggggccatggccggcatcctggagcacagcgtgatgtaccctgtggacagcgtgaagaccaggatgcagagcctgagcccagaccccaaggcccagtacaccagcatctacggggccctgaagaagatcatgaggacagagggcttctggaggcccctgcggggcgtgaatgtgatgatcatgggcgccggccctgcccacgccatgtactttgcctgctatgagaacatgaagaggaccctgaatgatgtgttccaccaccagggcaacagccacctggccaacggcattgctggctccatggccaccctgctgcatgatgctgtgatgaacccagctgaggtggtgaagcagaggctgcagatgtacaacagccagcacaggtctgccatcagctgcatcagaacagtgtggaggacagagggcctgggcgccttctaccgcagctacaccacccagctgaccatgaacatccccttccagagcatccacttcatcacctatgagttcctgcaggagcaggtgaacccccacaggacctacaacccccagagccacatcatcagcggcggcctggccggggccctggccgccgccgccaccacccccctggatgtgtgcaagaccctgctgaacacccaggagaatgtggccctgagcctggccaacatcagcggccgcctgagcggcatggccaatgccttcagaacagtgtaccagctgaatggcctggccggctacttcaagggcatccaggcccgggtcatctaccagatgcccagcacagccatctcctggagcgtgtatgagttcttcaagtacttcctgaccaagaggcagctggagaacagagccccctactag

SEQ ID NO: 192395 - DNA, 1017 bp, Artificial Sequence
  derived and/or modified sequence
atggagctgcggagcggcagcgtgggcagccaggccgtggcccggcgaatggacggagactcgcgcgacggtgggggcggtaaggacgctaccggctctgaggactatgagaacctgcctaccagcgccagtgtttccacccatatgaccgccggggcgatggcagggatcctggaacactcagtgatgtacccagtggatagtgtgaagacccgcatgcagtcactgtccccagatcccaaggctcagtatacatccatatacggcgccctgaagaaaatcatgagaacagaagggttctggaggcctcttaggggtgtgaatgtgatgattatgggggctggacctgcgcacgccatgtattttgcctgctatgaaaacatgaaacggacgcttaatgatgtgttccatcatcaaggaaattctcatcttgctaatggcatagctggatctatggctaccctgctgcacgacgctgtgatgaatcctgccgaggtagtcaaacagcgtctgcagatgtataactcacagcataggtctgcaatctcctgtatccggactgtatggaggacagagggcctcggagcgttttaccgtagctacaccactcaactgaccatgaacatcccattccagagtattcactttattacgtacgaattcttgcaggaacaggttaatccgcaccgcacctataatccacagtctcatatcatctctgggggtctcgctggagcattggcggcggccgcgaccacacctctggatgtttgtaagaccttgctgaatacccaggaaaatgttgcccttagcttggcaaacatcagcggacggctgtctgggatggctaacgcgttcagaaccgtgtaccagcttaatggattggccgggtatttcaaagggatccaggcgagagtgatctatcaaatgccatctacagccatatcttggagtgtgtacgaattctttaaatacttcctgaccaagagacagctggagaaccgcgctccctattag

SEQ ID NO: 192396 - DNA, 1017 bp, Artificial Sequence
  derived and/or modified sequence
atggaactccgatccggctctgtgggcagtcaggccgtggccagaagaatggacggtgacagtagggatggtggaggaggtaaagacgcaacgggttcagaggattacgagaacttgcccacctccgccagcgtgtcgacccacatgaccgctggagccatggccggaatactcgaacacagcgttatgtaccccgtggatagcgtgaagacacgcatgcagtctctgtcccctgacccaaaagcccagtatacctccatttacggcgcactcaagaaaattatgcgcacggagggcttctggcgcccactgaggggcgtcaatgtcatgataatgggagccggtcccgcacatgctatgtacttcgcttgttatgaaaatatgaaacgcacgctaaatgacgtctttcatcatcagggaaattcccacctggccaacgggatcgccggaagcatggccacgttactgcacgacgccgtcatgaatccagctgaggttgtgaagcagaggcttcagatgtacaatagccagcatcggagcgcaatttcttgtattagaaccgtctggcggactgagggcctgggggctttctaccgtagctacaccacgcaattaacaatgaacattccatttcagtccatccatttcataacgtacgaatttctgcaggagcaggtgaatccccacaggacctacaacccacagtcgcatataatctccggaggcctagctggcgctctggctgcagccgcaaccacacccctggatgtgtgcaagactttattaaacacacaagagaatgtggctctgagccttgcgaatatttctggacgcctatcaggtatggccaatgctttcaggactgtttatcagctaaacgggttagcaggctatttcaagggtattcaggccagagtgatttatcaaatgccgtccacagccatttcctggtctgtctacgagtttttcaaatacttcctcacgaaacgccagcttgagaaccgggctccgtactag

SEQ ID NO: 192397 - DNA, 4823 bp, Artificial Sequence
  derived and/or modified sequence
acaccaatggcgcggcggccgccggcctcttggttcccggcgattggtgtctctggccgctgcgctccaccccagcccgccatggcgtcaggcgccgcggccccggggaggtggctcccactttaagaagtgaagttttgcgcccctccccctccctgcccacctcctgcagcctcctgcgccccgccgagctggcggatggagctgcgcagcgggagcgtgggcagccaggcggtggcgcggaggatggatggggacagccgagatggcggcggcggcaaggacgccaccgggtcggaggactacgagaacctgccgactagcgcctccgtgtccacccacatgacagcaggagcgatggccgggatcctggagcactcggtcatgtacccggtggactcggtgaagacacgaatgcagagtttgagtccagatcccaaagcccagtacacaagtatctacggagccctcaagaaaatcatgcggaccgaaggcttctggaggcccttgcgaggcgtcaacgtcatgatcatgggtgcagggccggcccatgccatgtattttgcctgctatgaaaacatgaaaaggactttaaatgacgttttccaccaccaaggaaacagccacctagccaacgggatagctgggagtatggccaccctgctccacgatgcggtaatgaatccagcagaagtggtgaagcagcgcttgcagatgtacaactcgcagcaccggtcagcaatcagctgcatccggacggtgtggaggaccgaggggttgggggccttctaccggagctacaccacgcagctgaccatgaacatccccttccagtccatccacttcatcacctatgagttcctgcaggagcaggtcaacccccaccggacctacaacccgcagtcccacatcatctcaggcgggctggccggggccctcgccgcggccgccacgacccccctggacgtctgtaagacccttctgaacactcaggagaacgtggccctctcgctggccaacatcagcggccggctgtcgggtatggccaatgccttccggacggtgtaccagctcaacggcctggccggctacttcaaaggcatccaggcgcgtgtcatctaccagatgccctccaccgccatttcttggtctgtctatgagttcttcaagtactttctcaccaagcgccagctggaaaatcgagctccatactaaaggaagggatcatagaatcttttcttaaagtcattctctgcctgcatccagccccttgccctctcctcacacgtagatcattttttttttgcagggtgctgcctatgggccctctgctccccaatgccttagagagaggaggggacggcacggccgctcaccggaaggctgtgtgcggggacatccgaggtggtggtggacaggaaggacttgggaaggggagcgagaaattgctttttctcttcctccctgggcagaatgtagcttttctgcttcactgtggcagcctcctccctggatccttagatcccagaggagggaagaaaatttgcagtgactgaaaacagtaaaaaaaaaaaaaaaaaaaaaaaaaaaaaaaaaaaaaaaaaaaaatttatgtatataaaagttgcattacacagtacaaaatagatggataatgtttatcctttatttttctatgtagaagtttttgaatttgtgtgtgtgcttgtgcgtgtctacacctagtattacggctgggactctccagctgtttttgttgttgttatgtttttaagagggttgaattcttccatcaggtgaacgaaaaaggcaacaaagtaataaatcagtgaatgtggccggcagctgtgtttagcccctccagatggaagtttcacttgaatgtaaaataataaagtttatattttgaatttctcttttcatgggggaaaaaaggtacgttaaaaaaatcaaaataatgatatgtcacttgcagctacctttttttttcttttaaattcaatcagccaccttcatgtgcctttttcctttgtctttccccaaaattccaggaccagagatctggccctggcctattttctcttgctgtgtacacacacgcacacatgctgggtggcaggatctcgcccgctggagggtggtggagcccagtagaattggggtgactgggcataaacctgctgagactgcttccttccctggttgtgagtgatgtgaatgcctgccttccccggtcagcacttagaagcccttgataggcagcatttggcgacttgtggggcaggtgtttgggataaatcctaccttcatcctaggacttatttctgcatcagccttttaactcaggcacttcaggtaacgtgatctatgtgtgttttgactgaatctcatctcctgtgtttccctgtgcagtctagggaagcatgtctccagtctttgtccctgtcttgtcccaaccattaattctcatgtcacagcttctcactgcatgtgacaagagccaggcctatctgctagggccctgcggctgaggtctgacctggaccctcatgcccgagtcggaagacccctctccagaagccattctgcatccttgtctgctctgcgtcacccgagaacacaggcttcgcagcctcgctttctgaaatggtgtgtgccgagtcagattgccgctcagagaaaatacaagcccgttttccctagctgtgccatttggtgctctgccaggctgccgtgcaagggaataccgacgagacgagctgcactgtctctgatttggagccctcaccggagcttgtctttaaaaatgagcaggaagctcatgtatgtttgcatttcagtgagccgggtcctgacctgccgccacccatcacggtcagcgtggtgcatcttaccgaggaggcgcaggcctggattcttttgagtggtgctactgcctaggaagtaacacgtggagaatttccatcttgggaccatgcacacagtgccttggggagtagattttgccctaatagcgatgaagaattttatcagtcagtggagttcctttttcagatcagggatgggaaagagccaaactgggtacctcccacgtgtgccccgtgaacagccctttgcagctgggctgtggggcttggctgctgccctgtcccatctggcagttaacgccttctccctgctctgccccccactccccaaaaccagttgcagcctcaacccacatggggatgtagaaagccgtaaagtccacgctactgttgaaaatgtttacatctccgctctcaacctgccttgggttcgtgttaaatggtgttaaattctgcaaatggaggggaaaaaaatcaaattctaaatttcaaagtagaatttaaagcaaatttgtaaaaaaattatcctaccaccccttttggtccacttaagatatgccacgctgaagcaaggtatttcctactggattttgctttcactggtgtttagaaaataaacttgatttctctaggagcactcctttggttagagggatgcaagaaggagaggtgaaggtggcgtgtggtggctcatgcctgtaatcccagcactttggggaggccgaggcaggcggatcacttgaggccagcagtttgagaccagcctggccaacatgatgaaaccccatctctactaaaaatacaaaaaattagctgggcatggtggcaggcacctgtaatcccagttacttgggaggctgaggcaggagaattgcttgaacccaggaggtggaggttgcagtgagctgagattgtgccactgcacttcagcctgggcgacagagtgactctgtcaaaaaggaaaggcaaaaaccggaccctggagctctgtgggccctgattgcaggcccctccctgtgtgatgagggatgagtcagcttggggagccacttggccagcctgcatgcctggtcatcaggaggttgagaaaagccttgaaagttgtgaagcactgagcagatacaagtgtttgttaattttgtagaaattaactttcccatctggcctttatctccaaagttggtattgttgctccacgcagactgcagtccggtttcttattgtgactttgacaatgcaaagtgcaaaataggaagaggcctccccaccccactatcccaccctggtgaccaattcagtgtaacctttgcacgtactcagtcattggtgtctttggagtgacatctgcagccagttagtgccacctgagtacagcactcgtacttttacatgatgtgtgtgtgagtagctcttctgtccaaaccatgatttgaggttcaactacctgtagatcaaagctttattttagaacgataaactgattttttccaaatgggtgaaatcttctccccatgactatgttttcttaactttgcattgaatctatttactgggttacattctatgtgtagtttgctttcttcatttttttttcttttaaaatgctcatgtcttattccaagcaccttcctccaaagtccccataaagctgcatctccaacacattgttatgccaataaggttttatttaactttatttaaggatgattgtgtctttgaatgacaaatgtactgctgcttcctacctgcaagacgaacaatgtatgtttcaagggtgagcaagtgttatttcttaaatttctcaaatgcctgtagtaactattgtttctgcctctcaattgttgccagctctttgaagaaggggagaattgtgtgtttttgtgtggggatgtttctgatatgctgctacagttgcaaaacactggagctagagaaaataaagtactgatcttcgaa

SEQ ID NO: 192398 - protein, 304 aa, Artificial Sequence
  derived and/or modified sequence
MATWKSPCFLYCLFILGPRLTGQNNSVDLTNEETTDSTTSKISPSEDTQQENGSMFSLITWNIDGLDLNNLSERARGVCSYLALYSPDVIFLQEVIPPYYSYLKKRSSNYEIITGHEEGYFTAIMLKKSRVKLKSQEIIPFPSTKMMRNLLCVHVNVSGNELCLMTSHLESTRGHAAERMNQLKMVLKKMQEAPESATVIFAGDTNLRDREVTRCGGLPNNIVDVWEFLGKPKHCQYTWDTQMNSNLGITAACKLRFDRIFFRAAAEEGHIIPRSLDLLGLEKLDCGRFPSDHWGLLCNLDIIL

SEQ ID NO: 192399 - protein, 362 aa, Artificial Sequence
  derived and/or modified sequence
MELGSCLEGGREAAEEEGEPEVKKRRLLCVEFASVASCDAAVAQCFLAENDWEMERALNSYFEPPVEESALERRPETISEPKTYVDLTNEETTDSTTSKISPSEDTQQENGSMFSLITWNIDGLDLNNLSERARGVCSYLALYSPDVIFLQEVIPPYYSYLKKRSSNYEIITGHEEGYFTAIMLKKSRVKLKSQEIIPFPSTKMMRNLLCVHVNVSGNELCLMTSHLESTRGHAAERMNQLKMVLKKMQEAPESATVIFAGDTNLRDREVTRCGGLPNNIVDVWEFLGKPKHCQYTWDTQMNSNLGITAACKLRFDRIFFRAAAEEGHIIPRSLDLLGLEKLDCGRFPSDHWGLLCNLDIIL

SEQ ID NO: 192400 - protein, 284 aa, Artificial Sequence
  derived and/or modified sequence
MELGSCLEGGREAAEEEGEPEVKKRRLLCVEFASVASCDAAVAQCFLAENDWEMERALNSYFEPYSPDVIFLQEVIPPYYSYLKKRSSNYEIITGHEEGYFTAIMLKKSRVKLKSQEIIPFPSTKMMRNLLCVHVNVSGNELCLMTSHLESTRGHAAERMNQLKMVLKKMQEAPESATVIFAGDTNLRDREVTRCGGLPNNIVDVWEFLGKPKHCQYTWDTQMNSNLGITAACKLRFDRIFFRAAAEEGHIIPRSLDLLGLEKLDCGRFPSDHWGLLCNLDIIL

SEQ ID NO: 192401 - protein, 392 aa, Artificial Sequence
  derived and/or modified sequence
MRERHDTGACAEPRVGLLFRLKGRCRGGRKMELGSCLEGGREAAEEEGEPEVKKRRLLCVEFASVASCDAAVAQCFLAENDWEMERALNSYFEPPVEESALERRPETISEPKTYVDLTNEETTDSTTSKISPSEDTQQENGSMFSLITWNIDGLDLNNLSERARGVCSYLALYSPDVIFLQEVIPPYYSYLKKRSSNYEIITGHEEGYFTAIMLKKSRVKLKSQEIIPFPSTKMMRNLLCVHVNVSGNELCLMTSHLESTRGHAAERMNQLKMVLKKMQEAPESATVIFAGDTNLRDREVTRCGGLPNNIVDVWEFLGKPKHCQYTWDTQMNSNLGITAACKLRFDRIFFRAAAEEGHIIPRSLDLLGLEKLDCGRFPSDHWGLLCNLDIIL

SEQ ID NO: 192402 - DNA, 915 bp, Artificial Sequence
  derived and/or modified sequence
atggcaacctggaaatcaccatgttttttgtactgcctgtttatcctgggcccacggctgactggccagaataactccgtggatctgaccaatgaggagaccacagactctactacgtccaagattagcccatccgaggatacacaacaggaaaacggatctatgttcagcttgatcacctggaatatagacgggctcgatctcaataatctgtccgagagggcccggggtgtatgcagttacctcgcactttattctccggacgtaatcttcctccaggaagtgatccccccatattatagctatctgaaaaagcggagctctaattacgagataataacaggacatgaagaagggtacttcacagccattatgctaaaaaagtcccgtgtgaagctgaagtctcaggaaatcatcccgttccctagtacaaagatgatgcgcaatctgctgtgtgtgcacgtgaatgtgagcgggaacgagttatgccttatgacgtcacacctcgaaagtacccgcggccatgccgctgaaagaatgaaccagctgaaaatggtgctgaagaaaatgcaggaggcgcccgagagtgcaaccgtgatctttgctggggacacaaacctcagagaccgagaagtcacaagatgcgggggattgccaaacaacattgtggacgtgtgggagttcctggggaagccaaaacactgccagtacacgtgggacacacagatgaatagcaacctgggaatcacagccgcatgcaagctccggtttgatagaattttctttagagctgccgcagaagagggccatattatccctcggtcactcgacctcctagggctcgagaagctcgattgcgggagatttccttctgatcattggggtctgctgtgcaacctggacatcatactctag

SEQ ID NO: 192403 - DNA, 1089 bp, Artificial Sequence
  derived and/or modified sequence
atggaattgggatcatgcttggagggcggcagagaggctgctgaggaggaaggggaaccggaagtgaagaagcgacgtttgctgtgtgtcgagtttgcatccgtagctagctgcgatgccgccgtggctcagtgttttctggccgagaacgattgggaaatggaaagggccctcaatagctatttcgagcctcccgtagaggaaagtgccctggagcgtcggccagaaaccatatcagagcccaagacctatgttgatttgacgaacgaggaaacgaccgattccactacatccaaaattagcccgagcgaggacacccaacaagagaacgggtctatgtttagtctcataacttggaatatcgacggcctcgacttgaataatttatccgagcgggccaggggcgtatgctcttatctggctctctacagtcctgacgtgatcttcctgcaggaggtaattcccccttattactcatatctgaagaagcgctcttccaactacgaaattataactggacacgaggagggctacttcactgcaataatgctcaagaagtctcgggtgaaactgaaaagtcaggagatcattccctttccaagtaccaagatgatgagaaatctattatgcgtccatgtcaatgtgagcggaaacgaattgtgcttgatgactagtcatctggaaagcacacgcgggcacgcagccgaacggatgaatcagctgaagatggttttgaaaaagatgcaggaggcccccgagagcgctacagtcattttcgctggagataccaacctaagggacagggaggttactcgctgtggagggctccccaacaatattgttgatgtgtgggaatttctgggaaagccaaaacactgccaatacacctgggatacccagatgaattccaacttagggataacagctgcttgtaagttaagatttgacaggattttcttcagggcggcggccgaagaaggccacatcatcccccggagtctggacctgttgggactcgagaagctggactgtggaagatttcccagcgaccactggggactgctgtgtaacctggacatcattctgtag

SEQ ID NO: 192404 - DNA, 855 bp, Artificial Sequence
  derived and/or modified sequence
atggaactggggtcttgtctcgaaggagggagagaggccgccgaggaggaaggggagccagaagtgaagaagaggaggttactctgtgtcgagttcgcaagcgtggcctcatgtgacgccgccgtcgctcagtgctttctggcagaaaacgactgggaaatggaacgagctctaaatagttacttcgagccgtacagtccagatgtgatcttcttacaggaggtgatccctccatattattcgtaccttaagaaacggtcctctaattatgagattattaccggacatgaagaagggtacttcaccgccattatgcttaagaaaagtcgggtgaaactgaaaagtcaggagatcatcccgtttccatcgactaagatgatgcgaaatcttttgtgcgttcacgtaaatgtcagcggcaatgagctgtgtctaatgaccagtcaccttgaatcaactagaggtcatgcggcagagaggatgaaccaactgaagatggtattaaagaaaatgcaagaagcacccgaatcagccaccgtcatcttcgctggggatactaacctccgcgatagagaggtgacgcgctgtggcgggttgccgaacaatatcgttgatgtttgggagttcctgggcaaaccaaaacactgccagtatacttgggacactcagatgaacagcaatctgggcattacagcagcctgtaagttgcggtttgaccggatcttctttagggccgctgcagaagaaggccatattatcccacgtagcctagacctcctgggtctggaaaaacttgattgcggaaggttcccctccgaccactgggggctcttgtgcaacctcgacattattctctag

SEQ ID NO: 192405 - DNA, 1179 bp, Artificial Sequence
  derived and/or modified sequence
atgcgcgagcgccatgacactggggcctgcgccgaacccagggtgggcctcctgtttaggctgaaggggagatgcaggggtggacgcaagatggagcttggctcatgtctggaaggtgggagggaagccgccgaagaggaaggcgagcctgaggtgaaaaaaaggcgcctcctgtgcgtggagtttgcttctgtcgcttcctgtgacgctgccgtggctcaatgctttttagcggaaaatgattgggagatggagagggccctgaattcttacttcgagccgcccgtagaagagtccgcgttagaacgccgccccgaaacaatctccgagcccaagacctacgtggatctgactaacgaggaaacaacagatagtacgacttcaaaaatttccccatctgaagatactcagcaagagaatggctcaatgttttcgttgatcacgtggaacattgatggtctggacttgaataatttgtctgagcgtgctcgcggggtttgtagctatctcgccctctactcaccggatgtgatcttcctccaggaagtgataccaccctactactcttacctcaagaagaggtcatccaactatgagattatcaccggacatgaagagggctattttacggccatcatgctgaaaaagagccgagtgaaactcaagtcacaggaaatcatcccgtttccaagtacaaagatgatgcgaaacctgctctgcgtgcatgtgaacgttagcgggaatgagctttgcctcatgaccagccacctcgagagcactcgagggcacgctgcagaacgcatgaaccaattgaagatggtgctcaaaaaaatgcaggaggcacctgagagtgcaactgtcatttttgcgggcgatacaaatttgagggaccgcgaggtcacaagatgtggcgggctgccaaacaatattgtggacgtttgggagttcttgggtaagcccaagcattgccagtatacctgggatacccaaatgaatagcaacttaggcatcacggcagcgtgtaaactgcgcttcgaccgaatattcttcagagctgcagctgaagagggccacataatcccccggtctcttgatcttctgggcctggagaaattggattgcgggcgatttcccagtgaccactggggcctgttatgcaatcttgacatcattttgtag

SEQ ID NO: 192406 - DNA, 915 bp, Artificial Sequence
  derived and/or modified sequence
atggccacctggaagagcccctgcttcctgtactgcctcttcatcctgggcccccggctgaccggccagaacaacagcgtggacctgaccaatgaggagaccacagacagcaccaccagcaagatcagccccagcgaggacacccagcaggagaatggctccatgttcagcctcatcacctggaacattgatggcctggacctgaacaacctgtctgagcgggcccggggcgtgtgcagctacctggccctgtacagcccagatgtgatcttcctgcaggaggtgattcctccctactacagctacctgaagaagaggagcagcaactatgagatcatcaccggccacgaggagggctacttcaccgccatcatgctgaagaagagccgggtgaagctgaagagccaggagatcatccccttccccagcaccaagatgatgaggaacctgctgtgtgtgcacgtgaatgtgtctggaaatgagctgtgcctgatgaccagccacctggagagcacccggggccacgccgctgagaggatgaaccagctgaagatggtgctgaagaagatgcaggaggcccctgagagcgccaccgtcatctttgctggggacaccaacctgcgggaccgggaggtgacccgctgtggcggcctgcccaacaacatcgtggatgtgtgggagttcctgggcaagcccaagcactgccagtacacctgggacacccagatgaacagcaacctgggcatcacagctgcctgcaagctgcgctttgaccgcatcttcttccgggctgctgctgaggagggccacatcatccccaggagcctggacctgctgggcctggagaagctggactgtggccgcttccccagcgaccactggggcctgctgtgcaacctggacatcatcctgtag

SEQ ID NO: 192407 - DNA, 1089 bp, Artificial Sequence
  derived and/or modified sequence
atggagctgggcagctgcctggagggcggccgggaggccgctgaggaggagggggagcctgaggtgaagaagaggcggctgctgtgtgtggagtttgcctctgtggccagctgtgatgctgctgtggcccagtgcttcctggctgaaaatgactgggagatggagcgggccctgaacagctactttgagccccctgtggaggagagcgccctggagaggaggcctgagaccatcagcgagcccaagacctacgtggacctgaccaatgaggagaccacagacagcaccaccagcaagatcagccccagcgaggacacccagcaggagaatggctccatgttcagcctcatcacctggaacattgatggcctggacctgaacaacctgtctgagcgggcccggggcgtgtgcagctacctggccctgtacagcccagatgtgatcttcctgcaggaggtgattcctccctactacagctacctgaagaagaggagcagcaactatgagatcatcaccggccacgaggagggctacttcaccgccatcatgctgaagaagagccgggtgaagctgaagagccaggagatcatccccttccccagcaccaagatgatgaggaacctgctgtgtgtgcacgtgaatgtgtctggaaatgagctgtgcctgatgaccagccacctggagagcacccggggccacgccgctgagaggatgaaccagctgaagatggtgctgaagaagatgcaggaggcccctgagagcgccaccgtcatctttgctggggacaccaacctgcgggaccgggaggtgacccgctgtggcggcctgcccaacaacatcgtggatgtgtgggagttcctgggcaagcccaagcactgccagtacacctgggacacccagatgaacagcaacctgggcatcacagctgcctgcaagctgcgctttgaccgcatcttcttccgggctgctgctgaggagggccacatcatccccaggagcctggacctgctgggcctggagaagctggactgtggccgcttccccagcgaccactggggcctgctgtgcaacctggacatcatcctgtag

SEQ ID NO: 192408 - DNA, 855 bp, Artificial Sequence
  derived and/or modified sequence
atggagctgggcagctgcctggagggcggccgggaggccgctgaggaggagggggagcctgaggtgaagaagaggcggctgctgtgtgtggagtttgcctctgtggccagctgtgatgctgctgtggcccagtgcttcctggctgaaaatgactgggagatggagcgggccctgaacagctactttgagccctacagcccagatgtgatcttcctgcaggaggtgattcctccctactacagctacctgaagaagaggagcagcaactatgagatcatcaccggccacgaggagggctacttcaccgccatcatgctgaagaagagccgggtgaagctgaagagccaggagatcatccccttccccagcaccaagatgatgaggaacctgctgtgtgtgcacgtgaatgtgtctggaaatgagctgtgcctgatgaccagccacctggagagcacccggggccacgccgctgagaggatgaaccagctgaagatggtgctgaagaagatgcaggaggcccctgagagcgccaccgtcatctttgctggggacaccaacctgcgggaccgggaggtgacccgctgtggcggcctgcccaacaacatcgtggatgtgtgggagttcctgggcaagcccaagcactgccagtacacctgggacacccagatgaacagcaacctgggcatcacagctgcctgcaagctgcgctttgaccgcatcttcttccgggctgctgctgaggagggccacatcatccccaggagcctggacctgctgggcctggagaagctggactgtggccgcttccccagcgaccactggggcctgctgtgcaacctggacatcatcctgtag

SEQ ID NO: 192409 - DNA, 1179 bp, Artificial Sequence
  derived and/or modified sequence
atgagggagagacatgacacaggagcctgtgccgagccccgggtgggcctgctcttccggctgaagggccgctgccggggcggcaggaagatggagctgggcagctgcctggagggcggccgggaggccgctgaggaggagggggagcctgaggtgaagaagaggcggctgctgtgtgtggagtttgcctctgtggccagctgtgatgctgctgtggcccagtgcttcctggctgaaaatgactgggagatggagcgggccctgaacagctactttgagccccctgtggaggagagcgccctggagaggaggcctgagaccatcagcgagcccaagacctacgtggacctgaccaatgaggagaccacagacagcaccaccagcaagatcagccccagcgaggacacccagcaggagaatggctccatgttcagcctcatcacctggaacattgatggcctggacctgaacaacctgtctgagcgggcccggggcgtgtgcagctacctggccctgtacagcccagatgtgatcttcctgcaggaggtgattcctccctactacagctacctgaagaagaggagcagcaactatgagatcatcaccggccacgaggagggctacttcaccgccatcatgctgaagaagagccgggtgaagctgaagagccaggagatcatccccttccccagcaccaagatgatgaggaacctgctgtgtgtgcacgtgaatgtgtctggaaatgagctgtgcctgatgaccagccacctggagagcacccggggccacgccgctgagaggatgaaccagctgaagatggtgctgaagaagatgcaggaggcccctgagagcgccaccgtcatctttgctggggacaccaacctgcgggaccgggaggtgacccgctgtggcggcctgcccaacaacatcgtggatgtgtgggagttcctgggcaagcccaagcactgccagtacacctgggacacccagatgaacagcaacctgggcatcacagctgcctgcaagctgcgctttgaccgcatcttcttccgggctgctgctgaggagggccacatcatccccaggagcctggacctgctgggcctggagaagctggactgtggccgcttccccagcgaccactggggcctgctgtgcaacctggacatcatcctgtag

SEQ ID NO: 192410 - DNA, 915 bp, Artificial Sequence
  derived and/or modified sequence
atggccacctggaagagcccctgcttcctgtactgcctgttcatcttgggcccacggctaaccggtcagaataattcagtggatctgactaacgaagaaaccacagactcaactacatctaaaatctccccctcagaagacacccagcaggagaatgggagcatgttcagtctgatcacctggaacatagacggcctggatctcaataacctgagcgagcgcgcccggggggtgtgctcttatttggcactgtattctcccgacgtcatcttcctgcaggaggtaattcccccatactactcatatcttaaaaagcgtagttcaaactacgaaattatcactggtcacgaagaagggtattttacggcaattatgcttaagaaaagccgagtaaaattgaagagccaggagattatcccattccctagcacaaagatgatgcgcaatcttctgtgcgtacatgtgaacgtctccggtaatgagctttgtctcatgaccagtcatctcgaaagcaccagaggacacgctgccgagagaatgaaccagctcaaaatggtcttgaagaagatgcaggaggccccagaatcggcaaccgtgatttttgccggagacaccaatctgagagatcgggaggtaacgagatgtgggggtctgcctaacaatatagttgacgtctgggagttcctgggcaagccaaagcactgccaatatacatgggatacacagatgaatagcaatctcggcattacagctgcctgcaagttgcgtttcgacaggatattttttcgggctgctgctgaagagggccatatcatcccaagatcactggacttgctgggcctggaaaagctggattgcggccgcttcccaagtgaccactgggggctgctgtgtaacctcgatatcatactgtag

SEQ ID NO: 192411 - DNA, 1089 bp, Artificial Sequence
  derived and/or modified sequence
atggagctgggcagctgcctggagggcggccgggaggccgccgaggaagaaggcgaacctgaggtcaaaaagaggcgcctcttatgcgtggagttcgcatctgtcgccagctgtgatgccgctgtcgctcaatgtttcctggcagagaacgactgggagatggaacgggccctgaactcttatttcgagccccctgtagaggagtccgccttggaacggagaccagaaaccatttcggagcccaagacctacgtggatttaaccaatgaagagacgacggactcaaccaccagcaagatctccccatccgaggatacacagcaagagaacggttctatgtttagtctgattacctggaacatcgacggacttgacctgaataatcttagcgagcgtgcaaggggggtctgctcatatctggcactgtattctccagatgtgatctttctgcaggaagtaatcccaccctattatagttacctgaaaaagcggagttcgaattacgagatcattacggggcacgaagagggctatttcacggccattatgctgaagaaatccagagtcaaattaaagtctcaggaaatcattccatttccatccactaagatgatgagaaacctactctgtgtgcatgtcaatgtctctggaaatgagctgtgtcttatgacgtcacacctcgaaagtacacgcgggcacgctgcggaaagaatgaaccagcttaagatggtgctgaagaaaatgcaggaggccccagaatcagcaacggtaattttcgcgggagacactaacctgcgggacagggaggtgaccaggtgtggggggctccctaataacatcgtggatgtgtgggagtttttgggaaagcccaaacactgccaatacacttgggacacgcagatgaatagtaatctcggcattactgcagcctgcaagctgagattcgatcgcatcttctttagagccgccgcagaggaaggtcacatcattcctcgctctctggatctgctgggcctagaaaagttggattgtggaagatttccctccgaccactgggggcttttgtgcaatcttgacatcatactctag

SEQ ID NO: 192412 - DNA, 855 bp, Artificial Sequence
  derived and/or modified sequence
atggagctgggcagctgcctggagggcggccgggaggccgccgaggaggaaggcgagcctgaggtgaaaaagcggcggttgctatgcgtggaatttgcctccgtggcgagttgtgatgcagccgttgcacaatgtttcctggcggaaaatgattgggaaatggagagggccctgaacagctatttcgagccttactctcccgacgtgatctttctgcaggaagttattcccccttactatagctacctgaagaagcggtcctcgaattacgaaatcatcaccggccacgaggagggatacttcacagccataatgttaaaaaagagccgtgtaaagctaaagtctcaggagatcatccccttcccatccacaaaaatgatgcggaatcttctgtgtgtgcacgtgaatgtgtctgggaatgaattatgcctcatgacctcacacttagagtcaacacgaggacacgctgctgagcgaatgaaccagctgaagatggtgcttaaaaagatgcaggaggctcctgagtcagctaccgtcatcttcgctggagacacaaatctgcgggatcgggaagtgacccggtgtggcggactgcctaataacatagtcgatgtctgggaatttttgggaaaacccaagcattgccagtacacatgggacactcagatgaattcaaatctcggaatcaccgcagcatgcaagctgaggtttgatcggatctttttccgtgccgccgccgaagagggacacataatcccgcgtagccttgatctcctgggtctcgagaagctcgactgcggccgattcccctctgaccattggggtctgctgtgcaacttggacatcatcctgtag

SEQ ID NO: 192413 - DNA, 1179 bp, Artificial Sequence
  derived and/or modified sequence
atgcgggagcggcacgacaccggcgcctgcgccgagccccgggtgggcctgctgtttagactcaaaggccgatgccgcgggggaagaaaaatggaactgggcagctgcctggagggggggagggaagcagcagaggaggagggggaacccgaagttaagaaacgcagacttctgtgcgtggagtttgccagtgtcgcttcatgcgacgccgctgtggctcagtgttttttggcagagaatgactgggaaatggaaagggccctcaattcctactttgaacccccagttgaggaaagcgctcttgagcggaggccggagacaatttcagagcccaaaacctatgtagatctgacgaatgaagagacgacagactctactaccagcaaaatcagccccagtgaagacacccagcaggaaaacggcagtatgttcagtctgatcacttggaatatcgacggcctcgatctcaacaacctgtcggaacgggcccgtggcgtgtgcagctacctggcgctgtactcccctgatgtcatcttcctccaggaggtgatccctccctactacagttatctgaagaagagaagtagcaattatgaaatcattactgggcacgaggagggttactttaccgccatcatgttaaaaaagtcccgcgtgaaactcaaatctcaggagattattccgttcccaagtactaagatgatgcggaaccttttgtgtgtccacgtaaacgtgtccggtaatgagctgtgtctgatgacatcacatttggagtctacacgtgggcacgctgcggagagaatgaaccagttgaagatggtactgaaaaagatgcaggaagcgcctgaatctgccacggtcattttcgcaggcgatactaatttacgggaccgcgaggtcacaagatgtggcggacttccaaataacatagtggacgtgtgggagttcttgggcaagcccaagcattgccagtacacatgggacactcagatgaacagcaatcttggcatcactgcggcttgcaaactccgtttcgaccgtattttcttcagggccgctgcagaggaagggcatataattccccgcagccttgatctgctcgggttggagaagcttgattgtggaagatttccatccgatcactggggattgctctgtaaccttgatattatcctgtag

SEQ ID NO: 192414 - DNA, 915 bp, Artificial Sequence
  derived and/or modified sequence
atggcaacctggaaatctccctgctttctgtactgcctgttcattctgggccctaggttgaccggccaaaacaactctgttgacctaacaaatgaggaaactactgattctacaaccagtaagataagtccctccgaggacactcagcaagaaaacggctcgatgttctccctgatcacttggaatatcgacggcctggacctcaataacctaagcgagagggcccgaggagtgtgtagctatttggcactctacagccctgacgttatcttcctccaagaggtcattccaccctactattcgtacctgaaaaagagatctagcaattatgagataatcaccggccatgaggagggctacttcaccgcaatcatgttaaagaagagccgagtcaaattgaaaagccaagaaatcatccctttcccctccacaaagatgatgcgaaacctgctctgcgtacacgtgaatgtgtctggaaacgaactgtgtttgatgacatcacaccttgaatccacacgcggtcacgcagcagaaaggatgaaccagctgaaaatggtgttaaaaaaaatgcaggaggcccctgagagtgccactgtgattttcgctggagatacaaatctgagagacagggaggtcacacgctgtgggggactcccaaacaatatcgtagatgtctgggagttccttgggaagccaaaacattgccagtacacatgggacactcagatgaattcaaatctggggataaccgccgcttgcaaactgagatttgataggatcttctttcgtgctgccgctgaagaggggcacatcatacctaggagtctcgacctgctgggcctcgaaaagcttgactgcggccgttttcccagtgaccattgggggttgctctgcaatcttgacataatactgtag

SEQ ID NO: 192415 - DNA, 1089 bp, Artificial Sequence
  derived and/or modified sequence
atggagctgggctcatgccttgaaggtggcagagaggctgccgaggaagagggggaacccgaagtgaaaaagcggaggctgctgtgcgtagaattcgctagcgttgccagctgtgacgctgctgttgcccagtgctttctggcagagaacgattgggagatggagcgcgctctgaatagttatttcgagcctccggtggaagaatccgccctggagagacgacctgaaaccatctctgagccaaaaacttatgtggatctcactaacgaagagactaccgatagcacgacttctaaaattagcccctcagaagacacccagcaggaaaatggatcaatgttctctctaataacctggaacatcgatggtcttgatctgaataacctcagcgaacgcgctaggggcgtctgctcctatttggcgttgtattctccggatgtgattttcttacaggaggtgatccctccctattacagctacctgaagaagagatcaagcaactacgaaataatcacaggccatgaggagggctatttcacagccattatgttaaagaaatcgcgggtgaagctgaagtcgcaggagatcattccatttcccagcacaaagatgatgaggaacttgttgtgtgtacacgtgaacgttagcggcaacgagctgtgcctcatgaccagccacctcgagtcaactcgtggtcatgctgctgaacggatgaaccagttaaagatggtccttaaaaaaatgcaagaggcaccagagtctgcgactgtaatattcgccggtgacaccaacctacgcgaccgagaagtgacgcgatgcggcggacttccgaataacattgtcgatgtgtgggaattcctagggaagcctaaacactgtcaatacacttgggatacccaaatgaattcgaatcttgggatcaccgccgcatgtaaattgcgtttcgacaggatttttttccgagccgctgcggaggagggccacataattcctaggtcactggacctgttggggctagagaaactggactgtggcagattccctagtgatcattggggactcctgtgtaacctggatatcatcctttag

SEQ ID NO: 192416 - DNA, 855 bp, Artificial Sequence
  derived and/or modified sequence
atggaacttgggagctgtcttgagggaggcagagaagctgcagaagaggaaggggagccggaagttaaaaagcgcaggctgctctgcgtggaatttgctagtgtcgcctcgtgtgatgcagccgtggcccagtgttttctggcagagaacgattgggaaatggagagggcactgaattcgtatttcgagccatattcacctgatgtgatcttcttgcaggaagtcatccctccctactacagctatcttaagaaaagaagctccaactacgaaatcataactgggcacgaggagggctacttcacagccatcatgctaaaaaagtcaagggtgaaactcaagtctcaggagattataccctttccaagtaccaaaatgatgagaaacctgctgtgtgtgcacgttaatgtgagtggtaacgaattatgcttgatgacatctcatcttgaatcgactcggggacacgcagccgaaagaatgaaccaattgaagatggtgctgaagaagatgcaagaggctcccgagtctgccaccgtaatattcgctggagacactaacttgagagaccgggaggtaaccagatgtggaggcctccctaataatattgtcgacgtctgggagttcctaggcaaaccaaagcattgtcagtacacttgggatacgcaaatgaactcaaacttggggataacggctgcttgtaagctgaggttcgatcgaatattcttccgggcagccgctgaagaggggcatatcatcccaagatcgcttgacttgctgggtctcgaaaaactcgactgcggccgattcccatccgaccactggggcttactctgcaatctcgacattatactgtag

SEQ ID NO: 192417 - DNA, 1179 bp, Artificial Sequence
  derived and/or modified sequence
atgcgggaacggcatgatacaggcgcttgtgcagagcctagggtggggcttctcttcaggctcaagggtcggtgccggggagggcgaaaaatggaactcggcagctgcctggaaggaggcagagaagctgccgaggaggagggagaacccgaagtgaaaaaacggagactgctatgcgtagagttcgcaagcgtcgcatcgtgcgacgcagccgtcgctcagtgcttcttagcagagaacgactgggagatggagagagcgctaaattcctattttgagcctccggtggaggaatctgcccttgagaggcgcccagaaacgatctccgaacctaaaacctatgtggacctcaccaacgaggagactaccgacagcactacatcaaaaatatccccaagtgaggatacacagcaagagaacgggtctatgttcagcctgatcacttggaatatagatggactagacctcaataaccttagtgagagagcgaggggcgtgtgttcctacctggcgctctatagccctgacgtaattttcttgcaggaagtaatacctccctattactcctacctgaagaaacgatcctctaattacgaaatcattacggggcatgaagaggggtatttcactgcaattatgttgaagaagtcaagagtcaagctgaagagtcaggaaattatacctttccctagtactaaaatgatgagaaaccttctttgcgtccacgtcaatgtgagcgggaatgaactctgcttaatgacaagccacctggagtctacacgcggtcatgctgctgagcgcatgaatcagctaaagatggtcctgaagaaaatgcaggaggctccagaatcggccaccgtcatcttcgcaggagacacaaacctgcgtgatagggaagtcactaggtgcggaggattgcctaacaatattgtggatgtctgggagttcctaggaaaacccaagcactgtcagtatacttgggacacgcagatgaacagcaatctcggtattacagctgcttgcaaactaaggttcgaccgtatattctttcgtgcagccgctgaggagggccacattatccccagatcattagatctgctgggcctggagaaactagactgtgggaggttcccaagtgaccactggggtctactctgcaacctggacatcatcctgtag

SEQ ID NO: 192418 - DNA, 2120 bp, Artificial Sequence
  derived and/or modified sequence
cgagcctccggtggaggagagcgccttggaacgccgacctgaaaccatctctgagcccaagacctagtaagtgatgaggggagcgggagccagtccgcacggaggcagtttgataccaggtagccctgcgcgtcctgggacctgccgtggagctgggcggacgatgctgaggcagatctccaagctgcgtagccagaggagcagggcttgcgttgctgctgctgcgcggagttgcgccccagcagcggatctaacactgcaccagactgtcgcttcgaacgtgatttggggtccagggaggaaaagatggaaatgtaatgtttaactcaaatgaaaggaaataagtaagcgagaggtttgaaacaaatgaacgaaggctaaaccttctatcgaaaaatggcaacttggaagtctccttgcttcctgtattgtttatttattctaggccctaggctgaccggccagaataacagtgttgacctaaccaatgaagaaacaactgattccaccacttctaaaatcagcccatctgaagatactcagcaagaaaatggcagcatgttctctctcattacctggaatattgatggattagatctaaacaatctgtcagagagggctcgaggggtgtgttcctacttagctttgtacagcccagatgtgatatttctacaggaagttattcccccatattatagctacctaaagaagagatcaagtaattatgagattattacaggtcatgaagaaggatatttcacagctataatgttgaagaaatcaagagtgaaattaaaaagccaagagattattccttttccaagtaccaaaatgatgagaaaccttttatgtgtgcatgtgaacgtgtcaggaaatgagctttgccttatgacatcccatttggagagcaccagagggcatgctgcggaacgaatgaatcagttaaaaatggttttaaagaaaatgcaagaggctccagagtcagctacagttatatttgcaggagatacaaatctaagggatcgagaggttaccagatgtggtggtttacccaacaacattgtggatgtctgggagtttttgggcaaacctaaacattgccagtatacatgggatacacaaatgaactctaatcttggaataactgctgcttgtaaacttcgttttgatcgaatatttttcagagcagcagcagaagagggacacattattccccgaagtttggaccttcttggattagaaaaactggactgtggtagatttcctagtgatcactggggtcttctgtgcaacttagatataatattgtaaaatgcttttcaagtgtgggttttgccctgattgttgcaaatacaatttccaccttctggaaaggtaggtttgctgtggaggaaataatgtactagatcattgtcacagaaaaaccaactatgatttatggttgtgttttcagaattcaacattaaagattaatgtttatttaaacgaacacattcctgcattcaggatgtgaggccatttaataaaaagggcacaaagcctgtcagagttttcaacggtgcttatagctgccagctggattccaaacaggtaccacattgtctctgagctaatgtttatatttttccattcaggcaccgaaatagttaatatttgaaataagtcttcaaaagaaaacataagagattattgagttcttgggactggatcctttatttcataagttcagatcatcttaaatgaaaatgccatgattatctgcagttaagtagatgacagctattctacatcagacttgatttttgtcagctaattacataattggtaagctataattgaaaccttatggcttaaaattccttaactcctttttgattcatgtttgtagtcatgttgtcaacagaggcaaagttaagcttgatgatggttaaaatcggtttgatagcaccatgggacatttttctaacaaaaataaatgcatgaagagacatagccttttagttttgctaattgtgaaatggaaatgctttacaggaagtaaatgcaaattacttttaagtgtgctttaaagaaaaatattttccccacaagagaaatttaaataaagaattttatttgtt

SEQ ID NO: 192419 - DNA, 2071 bp, Artificial Sequence
  derived and/or modified sequence
gcacccaccgccccggcggctcccttgcggcgcagctgcaccagttttccgagagcagcgcatttccccgccgggcggttgatgcgggagcgccatgacacaggcgcctgcgcagagccgcgcgttggcctcctgttccgcttaaaggggcggtgcagaggcggcaggaagatggagttggggagttgcctggagggcgggagggaggcggcggaggaagagggcgagcctgaggtgaaaaagcggcgacttctgtgtgtggagtttgcctcggtcgcaagctgcgatgccgcagtggctcagtgcttcctggccgagaacgactgggagatggaaagggctctgaactcctacttcgagcctccggtggaggagagcgccttggaacgccgacctgaaaccatctctgagcccaagacctatgttgacctaaccaatgaagaaacaactgattccaccacttctaaaatcagcccatctgaagatactcagcaagaaaatggcagcatgttctctctcattacctggaatattgatggattagatctaaacaatctgtcagagagggctcgaggggtgtgttcctacttagctttgtacagcccagatgtgatatttctacaggaagttattcccccatattatagctacctaaagaagagatcaagtaattatgagattattacaggtcatgaagaaggatatttcacagctataatgttgaagaaatcaagagtgaaattaaaaagccaagagattattccttttccaagtaccaaaatgatgagaaaccttttatgtgtgcatgtgaacgtgtcaggaaatgagctttgccttatgacatcccatttggagagcaccagagggcatgctgcggaacgaatgaatcagttaaaaatggttttaaagaaaatgcaagaggctccagagtcagctacagttatatttgcaggagatacaaatctaagggatcgagaggttaccagatgtggtggtttacccaacaacattgtggatgtctgggagtttttgggcaaacctaaacattgccagtatacatgggatacacaaatgaactctaatcttggaataactgctgcttgtaaacttcgttttgatcgaatatttttcagagcagcagcagaagagggacacattattccccgaagtttggaccttcttggattagaaaaactggactgtggtagatttcctagtgatcactggggtcttctgtgcaacttagatataatattgtaaaatgcttttcaagtgtgggttttgccctgattgttgcaaatacaatttccaccttctggaaaggtaggtttgctgtggaggaaataatgtactagatcattgtcacagaaaaaccaactatgatttatggttgtgttttcagaattcaacattaaagattaatgtttatttaaacgaacacattcctgcattcaggatgtgaggccatttaataaaaagggcacaaagcctgtcagagttttcaacggtgcttatagctgccagctggattccaaacaggtaccacattgtctctgagctaatgtttatatttttccattcaggcaccgaaatagttaatatttgaaataagtcttcaaaagaaaacataagagattattgagttcttgggactggatcctttatttcataagttcagatcatcttaaatgaaaatgccatgattatctgcagttaagtagatgacagctattctacatcagacttgatttttgtcagctaattacataattggtaagctataattgaaaccttatggcttaaaattccttaactcctttttgattcatgtttgtagtcatgttgtcaacagaggcaaagttaagcttgatgatggttaaaatcggtttgatagcaccatgggacatttttctaacaaaaataaatgcatgaagagacatagccttttagttttgctaattgtgaaatggaaatgctttacaggaagtaaatgcaaattacttttaagtgtgctttaaagaaaaatattttccccacaagagaaatttaaataaagaattttatttgttta

SEQ ID NO: 192420 - DNA, 1690 bp, Artificial Sequence
  derived and/or modified sequence
ggggcggtgcagaggcggcaggaagatggagttggggagttgcctggagggcgggagggaggcggcggaggaagagggcgagcctgaggtgaaaaagcggcgacttctgtgtgtggagtttgcctcggtcgcaagctgcgatgccgcagtggctcagtgcttcctggccgagaacgactgggagatggaaagggctctgaactcctacttcgagccgtacagcccagatgtgatatttctacaggaagttattcccccatattatagctacctaaagaagagatcaagtaattatgagattattacaggtcatgaagaaggatatttcacagctataatgttgaagaaatcaagagtgaaattaaaaagccaagagattattccttttccaagtaccaaaatgatgagaaaccttttatgtgtgcatgtgaacgtgtcaggaaatgagctttgccttatgacatcccatttggagagcaccagagggcatgctgcggaacgaatgaatcagttaaaaatggttttaaagaaaatgcaagaggctccagagtcagctacagttatatttgcaggagatacaaatctaagggatcgagaggttaccagatgtggtggtttacccaacaacattgtggatgtctgggagtttttgggcaaacctaaacattgccagtatacatgggatacacaaatgaactctaatcttggaataactgctgcttgtaaacttcgttttgatcgaatatttttcagagcagcagcagaagagggacacattattccccgaagtttggaccttcttggattagaaaaactggactgtggtagatttcctagtgatcactggggtcttctgtgcaacttagatataatattgtaaaatgcttttcaagtgtgggttttgccctgattgttgcaaatacaatttccaccttctggaaaggtaggtttgctgtggaggaaataatgtactagatcattgtcacagaaaaaccaactatgatttatggttgtgttttcagaattcaacattaaagattaatgtttatttaaacgaacacattcctgcattcaggatgtgaggccatttaataaaaagggcacaaagcctgtcagagttttcaacggtgcttatagctgccagctggattccaaacaggtaccacattgtctctgagctaatgtttatatttttccattcaggcaccgaaatagttaatatttgaaataagtcttcaaaagaaaacataagagattattgagttcttgggactggatcctttatttcataagttcagatcatcttaaatgaaaatgccatgattatctgcagttaagtagatgacagctattctacatcagacttgatttttgtcagctaattacataattggtaagctataattgaaaccttatggcttaaaattccttaactcctttttgattcatgtttgtagtcatgttgtcaacagaggcaaagttaagcttgatgatggttaaaatcggtttgatagcaccatgggacatttttctaacaaaaataaatgcatgaagagacatagccttttagttttgctaattgtgaaatggaaatgctttacaggaagtaaatgcaaattacttttaagtgtgctttaaagaaaaatattttccccacaagagaaatttaaataaagaattttatttgttt

SEQ ID NO: 192421 - DNA, 1989 bp, Artificial Sequence
  derived and/or modified sequence
atgcgggagcgccatgacacaggcgcctgcgcagagccgcgcgttggcctcctgttccgcttaaaggggcggtgcagaggcggcaggaagatggagttggggagttgcctggagggcgggagggaggcggcggaggaagagggcgagcctgaggtgaaaaagcggcgacttctgtgtgtggagtttgcctcggtcgcaagctgcgatgccgcagtggctcagtgcttcctggccgagaacgactgggagatggaaagggctctgaactcctacttcgagcctccggtggaggagagcgccttggaacgccgacctgaaaccatctctgagcccaagacctatgttgacctaaccaatgaagaaacaactgattccaccacttctaaaatcagcccatctgaagatactcagcaagaaaatggcagcatgttctctctcattacctggaatattgatggattagatctaaacaatctgtcagagagggctcgaggggtgtgttcctacttagctttgtacagcccagatgtgatatttctacaggaagttattcccccatattatagctacctaaagaagagatcaagtaattatgagattattacaggtcatgaagaaggatatttcacagctataatgttgaagaaatcaagagtgaaattaaaaagccaagagattattccttttccaagtaccaaaatgatgagaaaccttttatgtgtgcatgtgaacgtgtcaggaaatgagctttgccttatgacatcccatttggagagcaccagagggcatgctgcggaacgaatgaatcagttaaaaatggttttaaagaaaatgcaagaggctccagagtcagctacagttatatttgcaggagatacaaatctaagggatcgagaggttaccagatgtggtggtttacccaacaacattgtggatgtctgggagtttttgggcaaacctaaacattgccagtatacatgggatacacaaatgaactctaatcttggaataactgctgcttgtaaacttcgttttgatcgaatatttttcagagcagcagcagaagagggacacattattccccgaagtttggaccttcttggattagaaaaactggactgtggtagatttcctagtgatcactggggtcttctgtgcaacttagatataatattgtaaaatgcttttcaagtgtgggttttgccctgattgttgcaaatacaatttccaccttctggaaaggtaggtttgctgtggaggaaataatgtactagatcattgtcacagaaaaaccaactatgatttatggttgtgttttcagaattcaacattaaagattaatgtttatttaaacgaacacattcctgcattcaggatgtgaggccatttaataaaaagggcacaaagcctgtcagagttttcaacggtgcttatagctgccagctggattccaaacaggtaccacattgtctctgagctaatgtttatatttttccattcaggcaccgaaatagttaatatttgaaataagtcttcaaaagaaaacataagagattattgagttcttgggactggatcctttatttcataagttcagatcatcttaaatgaaaatgccatgattatctgcagttaagtagatgacagctattctacatcagacttgatttttgtcagctaattacataattggtaagctataattgaaaccttatggcttaaaattccttaactcctttttgattcatgtttgtagtcatgttgtcaacagaggcaaagttaagcttgatgatggttaaaatcggtttgatagcaccatgggacatttttctaacaaaaataaatgcatgaagagacatagccttttagttttgctaattgtgaaatggaaatgctttacaggaagtaaatgcaaattacttttaagtgtgctttaaagaaaaatattttccccacaagagaaatttaaataaagaattttatttgttt

SEQ ID NO: 192422 - DNA, 915 bp, Artificial Sequence
  derived and/or modified sequence
atggccacctggaagagcccctgcttcctgtactgcctgttcatcctgggccccagactgaccggccagaacaacagcgtggacctgaccaacgaggagaccaccgacagcaccaccagcaagatcagccccagcgaggacacccagcaggagaacggcagcatgttcagcctgatcacctggaacatcgacggcctggacctgaacaacctgagcgagagagccagaggcgtgtgcagctacctggccctgtacagccccgacgtgatcttcctgcaggaggtgatccccccctactacagctacctgaagaagagaagcagcaactacgagatcatcaccggccacgaggagggctacttcaccgccatcatgctgaagaagagcagagtgaagctgaagagccaggagatcatccccttccccagcaccaagatgatgagaaacctgctgtgcgtgcacgtgaacgtgagcggcaacgagctgtgcctgatgaccagccacctggagagcaccagaggccacgccgccgagagaatgaaccagctgaagatggtgctgaagaagatgcaggaggcccccgagagcgccaccgtgatcttcgccggcgacaccaacctgagagacagagaggtgaccagatgcggcggcctgcccaacaacatcgtggacgtgtgggagttcctgggcaagcccaagcactgccagtacacctgggacacccagatgaacagcaacctgggcatcaccgccgcctgcaagctgagattcgacagaatcttcttcagagccgccgccgaggagggccacatcatccccagaagcctggacctgctgggcctggagaagctggactgcggcagattccccagcgaccactggggcctgctgtgcaacctggacatcatcctgtag

SEQ ID NO: 192423 - DNA, 1089 bp, Artificial Sequence
  derived and/or modified sequence
atggagctgggcagctgcctggagggcggcagagaggccgccgaggaggagggcgagcccgaggtgaagaagagaagactgctgtgcgtggagttcgccagcgtggccagctgcgacgccgccgtggcccagtgcttcctggccgagaacgactgggagatggagagagccctgaacagctacttcgagccccccgtggaggagagcgccctggagagaagacccgagaccatcagcgagcccaagacctacgtggacctgaccaacgaggagaccaccgacagcaccaccagcaagatcagccccagcgaggacacccagcaggagaacggcagcatgttcagcctgatcacctggaacatcgacggcctggacctgaacaacctgagcgagagagccagaggcgtgtgcagctacctggccctgtacagccccgacgtgatcttcctgcaggaggtgatccccccctactacagctacctgaagaagagaagcagcaactacgagatcatcaccggccacgaggagggctacttcaccgccatcatgctgaagaagagcagagtgaagctgaagagccaggagatcatccccttccccagcaccaagatgatgagaaacctgctgtgcgtgcacgtgaacgtgagcggcaacgagctgtgcctgatgaccagccacctggagagcaccagaggccacgccgccgagagaatgaaccagctgaagatggtgctgaagaagatgcaggaggcccccgagagcgccaccgtgatcttcgccggcgacaccaacctgagagacagagaggtgaccagatgcggcggcctgcccaacaacatcgtggacgtgtgggagttcctgggcaagcccaagcactgccagtacacctgggacacccagatgaacagcaacctgggcatcaccgccgcctgcaagctgagattcgacagaatcttcttcagagccgccgccgaggagggccacatcatccccagaagcctggacctgctgggcctggagaagctggactgcggcagattccccagcgaccactggggcctgctgtgcaacctggacatcatcctgtag

SEQ ID NO: 192424 - DNA, 855 bp, Artificial Sequence
  derived and/or modified sequence
atggagctgggcagctgcctggagggcggcagagaggccgccgaggaggagggcgagcccgaggtgaagaagagaagactgctgtgcgtggagttcgccagcgtggccagctgcgacgccgccgtggcccagtgcttcctggccgagaacgactgggagatggagagagccctgaacagctacttcgagccctacagccccgacgtgatcttcctgcaggaggtgatccccccctactacagctacctgaagaagagaagcagcaactacgagatcatcaccggccacgaggagggctacttcaccgccatcatgctgaagaagagcagagtgaagctgaagagccaggagatcatccccttccccagcaccaagatgatgagaaacctgctgtgcgtgcacgtgaacgtgagcggcaacgagctgtgcctgatgaccagccacctggagagcaccagaggccacgccgccgagagaatgaaccagctgaagatggtgctgaagaagatgcaggaggcccccgagagcgccaccgtgatcttcgccggcgacaccaacctgagagacagagaggtgaccagatgcggcggcctgcccaacaacatcgtggacgtgtgggagttcctgggcaagcccaagcactgccagtacacctgggacacccagatgaacagcaacctgggcatcaccgccgcctgcaagctgagattcgacagaatcttcttcagagccgccgccgaggagggccacatcatccccagaagcctggacctgctgggcctggagaagctggactgcggcagattccccagcgaccactggggcctgctgtgcaacctggacatcatcctgtag

SEQ ID NO: 192425 - DNA, 1179 bp, Artificial Sequence
  derived and/or modified sequence
atgagagagagacacgacaccggcgcctgcgccgagcccagagtgggcctgctgttcagactgaagggcagatgcagaggcggcagaaagatggagctgggcagctgcctggagggcggcagagaggccgccgaggaggagggcgagcccgaggtgaagaagagaagactgctgtgcgtggagttcgccagcgtggccagctgcgacgccgccgtggcccagtgcttcctggccgagaacgactgggagatggagagagccctgaacagctacttcgagccccccgtggaggagagcgccctggagagaagacccgagaccatcagcgagcccaagacctacgtggacctgaccaacgaggagaccaccgacagcaccaccagcaagatcagccccagcgaggacacccagcaggagaacggcagcatgttcagcctgatcacctggaacatcgacggcctggacctgaacaacctgagcgagagagccagaggcgtgtgcagctacctggccctgtacagccccgacgtgatcttcctgcaggaggtgatccccccctactacagctacctgaagaagagaagcagcaactacgagatcatcaccggccacgaggagggctacttcaccgccatcatgctgaagaagagcagagtgaagctgaagagccaggagatcatccccttccccagcaccaagatgatgagaaacctgctgtgcgtgcacgtgaacgtgagcggcaacgagctgtgcctgatgaccagccacctggagagcaccagaggccacgccgccgagagaatgaaccagctgaagatggtgctgaagaagatgcaggaggcccccgagagcgccaccgtgatcttcgccggcgacaccaacctgagagacagagaggtgaccagatgcggcggcctgcccaacaacatcgtggacgtgtgggagttcctgggcaagcccaagcactgccagtacacctgggacacccagatgaacagcaacctgggcatcaccgccgcctgcaagctgagattcgacagaatcttcttcagagccgccgccgaggagggccacatcatccccagaagcctggacctgctgggcctggagaagctggactgcggcagattccccagcgaccactggggcctgctgtgcaacctggacatcatcctgtag

SEQ ID NO: 192426 - DNA, 1746 bp, Artificial Sequence
  derived and/or modified sequence
atggagagacagaaccagtgcatccagagctggaagagaagaagaaagatggccccctggagcggcggcaccggcaccaccagatggagcctgtgcaacgtgtggagattcccctacctgtgctacaagaacggcggcggcgccttcttcatcccctacctggtgttcctgttcacctgcggcatccccgtgttcctgctggagaccgccctgggccagtacaccagccagggcggcgtgaccgcctggagaaagatctgccccatcttcgagggcatcggctacgccagccagatgatcgtgatcctgctgaacgtgtactacatcatcgtgctggcctgggccctgttctacctgttcagcagcttcaccatcgacctgccctggggcggctgctaccacgagtggaacaccgagcactgcatggagttccagaagaccaacggcagcctgaacggcaccagcgagaacgccaccagccccgtgatcgagttctgggagagaagagtgctgaagatcagcgacggcatccagcacctgggcgccctgagatgggagctggccctgtgcctgctgctggcctgggtgatctgctacttctgcatctggaagggcgtgaagagcaccggcaaggtggtgtacttcaccgccaccttcccctacctgatgctggtggtgctgctgatcagaggcgtgaccctgcccggcgccgcccagggcatccagttctacctgtaccccaacctgaccagactgtgggacccccaggtgtggatggacgccggcacccagatcttcttcagcttcgccatctgcctgggctgcctgaccgccctgggcagctacaacaagtaccacaacaactgctacagagactgcatcgccctgtgcttcctgaacagcggcaccagcttcgtggccggcttcgccatcttcagcatcctgggcttcatgagccaggagcagggcgtgcccatcagcgaggtggccgagagcggccccggcctggccttcatcgcctaccccagagccgtggtgatgctgcccttcagccccctgtgggcctgctgcttcttcttcatggtggtgctgctgggcctggacagccagttcgtgtgcgtggagagcctggtgaccgccctggtggacatgtacccccacgtgttcagaaagaagaacagaagagaggtgctgatcctgggcgtgagcgtggtgagcttcctggtgggcctgatcatgctgaccgagggcggcatgtacgtgttccagctgttcgactactacgccgccagcggcatgtgcctgctgttcgtggccatcttcgagagcctgtgcgtggcctgggtgtacggcgccaagagattctacgacaacatcgaggacatgatcggctacagaccctggcccctgatcaagtactgctggctgttcctgacccccgccgtgtgcaccgccaccttcctgttcagcctgatcaagtacacccccctgacctacaacaagaagtacacctacccctggtggggcgacgccctgggctggctgctggccctgagcagcatggtgtgcatccccgcctggagcctgtacagactgggcaccctgaagggccccttcagagagagaatcagacagctgatgtgccccgccgaggacctgccccagagaaaccccgccggccccagcgcccccgccacccccagaaccagcctgctgagactgaccgagctggagagccactgctag

SEQ ID NO: 192427 - DNA, 1809 bp, Artificial Sequence
  derived and/or modified sequence
atggacagcagagtgagcggcaccaccagcaacggcgagaccaagcccgtgtaccccgtgatggagaagaaggaggaggacggcaccctggagagaggccactggaacaacaagatggagttcgtgctgagcgtggccggcgagatcatcggcctgggcaacgtgtggagattcccctacctgtgctacaagaacggcggcggcgccttcttcatcccctacctggtgttcctgttcacctgcggcatccccgtgttcctgctggagaccgccctgggccagtacaccagccagggcggcgtgaccgcctggagaaagatctgccccatcttcgagggcatcggctacgccagccagatgatcgtgatcctgctgaacgtgtactacatcatcgtgctggcctgggccctgttctacctgttcagcagcttcaccatcgacctgccctggggcggctgctaccacgagtggaacaccgagcactgcatggagttccagaagaccaacggcagcctgaacggcaccagcgagaacgccaccagccccgtgatcgagttctgggagagaagagtgctgaagatcagcgacggcatccagcacctgggcgccctgagatgggagctggccctgtgcctgctgctggcctgggtgatctgctacttctgcatctggaagggcgtgaagagcaccggcaaggtggtgtacttcaccgccaccttcccctacctgatgctggtggtgctgctgatcagaggcgtgaccctgcccggcgccgcccagggcatccagttctacctgtaccccaacctgaccagactgtgggacccccaggtgtggatggacgccggcacccagatcttcttcagcttcgccatctgcctgggctgcctgaccgccctgggcagctacaacaagtaccacaacaactgctacagagactgcatcgccctgtgcttcctgaacagcggcaccagcttcgtggccggcttcgccatcttcagcatcctgggcttcatgagccaggagcagggcgtgcccatcagcgaggtggccgagagcggccccggcctggccttcatcgcctaccccagagccgtggtgatgctgcccttcagccccctgtgggcctgctgcttcttcttcatggtggtgctgctgggcctggacagccagttcgtgtgcgtggagagcctggtgaccgccctggtggacatgtacccccacgtgttcagaaagaagaacagaagagaggtgctgatcctgggcgtgagcgtggtgagcttcctggtgggcctgatcatgctgaccgagggcggcatgtacgtgttccagctgttcgactactacgccgccagcggcatgtgcctgctgttcgtggccatcttcgagagcctgtgcgtggcctgggtgtacggcgccaagagattctacgacaacatcgaggacatgatcggctacagaccctggcccctgatcaagtactgctggctgttcctgacccccgccgtgtgcaccgccaccttcctgttcagcctgatcaagtacacccccctgacctacaacaagaagtacacctacccctggtggggcgacgccctgggctggctgctggccctgagcagcatggtgtgcatccccgcctggagcctgtacagactgggcaccctgaagggccccttcagagagagaatcagacagctgatgtgccccgccgaggacctgccccagagaaaccccgccggccccagcgcccccgccacccccagaaccagcctgctgagactgaccgagctggagagccactgctag

SEQ ID NO: 192428 - DNA, 1746 bp, Artificial Sequence
  derived and/or modified sequence
atggaacgacaaaaccagtgtatccagtcttggaagaggcggcggaaaatggccccttggagcggggggaccggtacaacaagatggagcttatgcaacgtctggcggttcccatacctgtgttacaagaatgggggcggtgcgttttttatcccttaccttgtttttctcttcacttgtgggatcccggttttcctgctggaaactgccctagggcaatacacatcccaggggggcgtgacagcctggcgtaagatttgtcccatctttgaaggcattggctatgcctcccagatgattgtgattcttctgaacgtgtactatattatcgtccttgcttgggccctgttttatctattctctagcttcaccatcgatcttccttggggcgggtgctaccatgagtggaatacagaacattgcatggaatttcagaagaccaacggatctcttaatgggacgtccgagaatgcaacgagccccgtcattgaattctgggagcggagggtgcttaagatctcagatgggattcagcaccttggcgcactacggtgggaactggccctttgcctactgctagcttgggtaatttgctatttctgcatctggaagggcgtgaagtccacgggcaaggtcgtgtacttcacagctactttcccttacctaatgcttgtggttcttctcatacgcggtgtgaccctgcccggagctgcccagggaattcaattctacttgtatcccaatctgactcggttatgggaccctcaagtgtggatggatgccggcacacagattttttttagctttgccatctgcctcggttgcctcacagccctgggctcatataacaagtatcacaataactgctaccgggattgtatcgccctgtgctttctaaactccggcacttcattcgttgcgggatttgccattttctctattctggggtttatgagccaagagcaaggggtgcctatcagcgaagtggccgagtcagggccaggcctggcctttattgcttacccacgggccgttgtcatgttacctttctcaccgctgtgggcctgttgctttttctttatggtggtccttctcggactcgacagtcagttcgtctgtgtcgaatccttggtaacggcccttgttgacatgtatccccatgtgttcagaaagaaaaaccgtcgcgaagtccttatcctcggcgtcagtgtggtatccttcttagtcgggttgatcatgctgacagaaggcgggatgtacgtgttccagctgtttgattactatgccgcttccggcatgtgtctgctgttcgttgctatatttgaaagtctttgcgtcgcttgggtgtacggcgctaaaagattttacgataacatagaggacatgataggatatcgcccgtggcctcttatcaaatactgttggctctttttgactccggctgtgtgcaccgcaacatttctattcagtttgattaaatatacccccttaacttataacaaaaaatatacatatccatggtggggcgacgctctggggtggctccttgccctgagctcgatggtgtgtataccagcctggagtctgtacagactgggtacattaaaaggaccctttcgcgaaaggatacgccaactgatgtgcccagcagaggacttaccgcagagaaaccccgcaggacctagcgctccagctacaccacgtacttcactgctcaggctcaccgagttggagtctcattgctag

SEQ ID NO: 192429 - DNA, 1809 bp, Artificial Sequence
  derived and/or modified sequence
atggactcaagggtgagcggaaccacctcaaatggggaaacgaagcctgtctacccggtcatggaaaaaaaagaagaagacggaacactcgagaggggtcactggaacaataaaatggaattcgtgctgagcgtggccggtgaaattattgggctgggcaatgtctggagattcccctacctctgttataagaatgggggaggcgcgttctttatcccatatcttgtattcctgttcacctgcggaatcccagtttttctcctggaaacggccctgggtcagtacacctctcagggaggggtgactgcatggaggaagatctgccctatcttcgaaggcatcggctatgcttcacagatgatcgtgatccttctgaacgtttattatataatcgtgctcgcctgggctctgttctacttattttccagcttcaccatcgatctgccatgggggggctgctaccacgaatggaatacagagcactgcatggagttccaaaagaccaacggttcgctgaatgggactagtgagaacgccactagtcctgtaattgagttctgggagcgccgggtgctcaagatcagtgatgggatacagcatctgggtgcattgagatgggagttagccttgtgcctgcttctagcctgggtaatctgttacttctgcatttggaagggcgttaagtctacaggaaaggtggtgtatttcaccgccacattcccctatctgatgctggtggtgctgctgataaggggcgtaacattgcccggggccgcacagggcattcagttctatctctatcctaatctgacccggctgtgggaccctcaggtgtggatggatgcgggtacgcaaattttcttctccttcgctatctgcctcggctgtctgacagctctcggcagttataataaatatcacaataactgctatcgggattgcatcgccctatgttttctgaatagcggaacaagcttcgtggcggggttcgcaatttttagcatactgggcttcatgagccaagaacaaggggttcctatcagcgaagtggcggagagcggcccaggcttggcttttattgcatatcctcgcgctgtggtgatgctcccatttagtcccctatgggcttgttgcttcttcttcatggttgtgctgctggggctcgattcacaatttgtgtgtgtggagtctctggtcacagcgttggttgacatgtacccgcacgtgtttcggaaaaaaaatagaagggaagtgttgattctcggagtgtcggtggtcagttttctggtgggcctgatcatgctgaccgaaggcggcatgtatgtgttccaactgtttgactactacgcagcctcaggcatgtgcctgctgttcgtagcgatctttgaatctctttgtgtggcgtgggtatacggtgccaagagattctatgataacattgaagatatgattgggtaccgaccctggccattgataaaatattgttggctttttttgacgccagcagtctgtaccgcaacattcctcttcagcttaattaagtacacccctctaacttataataaaaaatacacttacccttggtggggcgacgcccttgggtggctgctggcacttagttcgatggtgtgtatcccagcctggtccctctatcgcttgggaaccctgaagggcccatttcgcgagcggatcaggcagttaatgtgccctgcggaggacctgccacagcggaaccccgctggcccgtcagcccccgctacccccaggactagcttactgagactgacggagctggagtcccactgttag

SEQ ID NO: 192430 - DNA, 1746 bp, Artificial Sequence
  derived and/or modified sequence
atggagcggcagaaccagtgcatccagagctggaagagaagaaggaagatggccccctggagcggcggcaccggcaccacccgctggagcctgtgcaatgtgtggaggttcccctacctgtgctacaagaatggaggaggagccttcttcatcccctacctggtgttcctgttcacctgtggcatccctgtgttcctgctggagacagccctgggccagtacaccagccagggcggcgtgacagcctggaggaagatctgccccatctttgagggcatcggctacgccagccagatgatcgtcatcctgctgaatgtgtactacatcatcgtgctggcctgggccctcttctacctgttcagcagcttcaccatcgacctgccctggggcggctgctaccacgagtggaacacagagcactgcatggagttccagaagaccaacggcagcctgaatggcaccagtgaaaatgccaccagccctgtgattgagttctgggagcggcgggtgctgaagatcagtgatggcatccagcacctgggcgccctgcgctgggagctggccctgtgcctgctgctggcctgggtgatctgctacttctgcatctggaagggcgtgaagagcacaggcaaggtggtgtacttcaccgccaccttcccctacctgatgctggtggtgctgctgatccggggcgtgaccctgcctggagctgcccagggcatccagttctacctgtaccccaacctgacccggctgtgggacccccaggtgtggatggatgctggcacccagatcttcttctcctttgccatctgcctgggctgcctgacagccctgggcagctacaacaagtaccacaacaactgctacagagactgcatcgccctgtgcttcctgaacagcggcaccagctttgtggccggctttgccatcttcagcatcctgggcttcatgagccaggagcagggcgtgcccatcagcgaggtggccgagagcggccctggcctggccttcatcgcctaccccagggctgtggtgatgctgcccttcagccccctgtgggcctgctgcttcttcttcatggtggtgctgctgggcctggacagccagtttgtgtgtgtggagagcctggtgacagccctggtggacatgtacccccacgtgttcaggaagaagaacagaagagaggtgctgatcctgggcgtgtctgtggtgtccttcctggtgggcctcatcatgctgacagaaggaggcatgtatgtgttccagctgtttgactactatgctgccagcggcatgtgcctgctgtttgtggccatctttgagagcctgtgtgtggcctgggtgtatggagccaagcgcttctatgacaacatcgaggacatgattggctaccggccctggcccctcatcaagtactgctggctgttcctgaccccagctgtgtgcacagccaccttcctgttcagcctcatcaagtacacccccctgacctacaacaagaagtacacctacccctggtggggagatgccctgggctggctgctggccctgagctccatggtgtgcatcccagcctggagcctgtaccgcctgggcaccctgaagggccccttccgggagcgcatccggcagctgatgtgcccagctgaggacctgccccagaggaacccagctggccccagcgccccagccacccccaggaccagcctgctgcggctgacagagctggagagccactgctag

SEQ ID NO: 192431 - DNA, 1809 bp, Artificial Sequence
  derived and/or modified sequence
atggacagccgggtgtctggcaccaccagcaatggagagaccaagcctgtgtaccctgtgatggagaagaaggaggaggatggcaccctggagcggggccactggaacaacaagatggagtttgtgctgtctgtggccggggagatcatcggcctgggcaatgtgtggaggttcccctacctgtgctacaagaatggaggaggagccttcttcatcccctacctggtgttcctgttcacctgtggcatccctgtgttcctgctggagacagccctgggccagtacaccagccagggcggcgtgacagcctggaggaagatctgccccatctttgagggcatcggctacgccagccagatgatcgtcatcctgctgaatgtgtactacatcatcgtgctggcctgggccctcttctacctgttcagcagcttcaccatcgacctgccctggggcggctgctaccacgagtggaacacagagcactgcatggagttccagaagaccaacggcagcctgaatggcaccagtgaaaatgccaccagccctgtgattgagttctgggagaggagagtgctgaagatcagtgatggcatccagcacctgggcgccctgcgctgggagctggccctgtgcctgctgctggcctgggtgatctgctacttctgcatctggaagggcgtgaagagcacaggcaaggtggtgtacttcaccgccaccttcccctacctgatgctggtggtgctgctgatccggggcgtgaccctgcccggggccgcccagggcatccagttctacctgtaccccaacctgacccggctgtgggacccccaggtgtggatggatgctggcacccagatcttcttctcctttgccatctgcctgggctgcctgacagccctgggcagctacaacaagtaccacaacaactgctacagagactgcatcgccctgtgcttcctgaacagcggcaccagctttgtggccggctttgccatcttcagcatcctgggcttcatgagccaggagcagggcgtgcccatcagcgaggtggccgagagcggccctggcctggccttcatcgcctaccccagggctgtggtgatgctgcccttcagccccctgtgggcctgctgcttcttcttcatggtggtgctgctgggcctggacagccagtttgtgtgtgtggagagcctggtgacagccctggtggacatgtacccccacgtgttcaggaagaagaacagaagagaggtgctgatcctgggcgtgtctgtggtgtccttcctggtgggcctcatcatgctgacagagggcggcatgtatgtgttccagctgtttgactactatgctgccagcggcatgtgcctgctgtttgtggccatctttgagagcctgtgtgtggcctgggtgtatggagccaagcgcttctatgacaacatcgaggacatgattggctaccggccctggcccctcatcaagtactgctggctgttcctgaccccagctgtgtgcacagccaccttcctgttcagcctcatcaagtacacccccctgacctacaacaagaagtacacctacccctggtggggagatgccctgggctggctgctggccctgagctccatggtgtgcatcccagcctggagcctgtaccgcctgggcaccctgaagggccccttccgggagcgcatccggcagctgatgtgcccagctgaggacctgccccagagaaatcctgctggccccagcgccccagccacccccaggaccagcctgctgcggctgacagagctggagagccactgctag

SEQ ID NO: 192432 - DNA, 1746 bp, Artificial Sequence
  derived and/or modified sequence
atggagcggcagaaccagtgcatccagagctggaagcggcggcggaagatggctccatggtcgggcggaacaggcactacgcgttggtccctctgcaacgtctggcggttcccgtacttgtgctacaagaatggcggcggggcattcttcataccatacctggtgttccttttcacgtgcggcataccggttttccttttggagacagctctgggccaatatacaagccaagggggcgtgaccgcctggagaaagatttgcccaatcttcgaaggcattgggtacgctagccagatgatcgttatcctcctcaatgtctactatattatcgtattagcttgggccctcttttacctgttttcttcattcacaattgatttgccctgggggggctgttatcatgaatggaatactgaacactgcatggaatttcagaagacgaatggaagcttgaacggtaccagcgagaatgccacaagcccagtcattgagttctgggagcgccgggtattgaagatatcggacgggattcagcaccttggcgccctcaggtgggaactggcactttgtctgctacttgcctgggtgatctgctacttttgcatatggaagggcgtaaaatctactggcaaggtggtatattttaccgccacctttccgtaccttatgctcgttgtgttactgatccgaggcgtcacactgcccggcgctgctcaggggattcagttctatttgtacccaaacctgacacggctgtgggatccccaggtgtggatggacgccgggacccagatattctttagcttcgcaatttgcctgggatgtctcactgcactggggtcttacaataaataccacaacaactgttaccgcgattgcattgccctttgttttcttaatagtggcacttcctttgttgcgggtttcgccatcttctctatcctaggtttcatgagccaggaacagggagtgccgatttcagaggtagccgagagcggccccggccttgcctttatcgcgtatccccgggcagtcgttatgctgccattcagccctctttgggcttgctgtttcttctttatggttgtgctgctgggcctcgacagccagttcgtctgtgtagaatccctggtaaccgcattggtggatatgtatccacacgtattcagaaaaaaaaaccgaagggaagttctgattctgggcgtctccgtagtgtcttttctcgtcgggttgataatgctgacggaggggggcatgtacgtcttccagctgttcgactactacgcggcctccgggatgtgcctgctgttcgtggcaatcttcgaaagcctgtgcgtagcttgggtgtatggggctaagcgtttttatgataacatcgaggatatgattggctaccggccctggccgctaattaaatattgctggctcttcctaacccccgccgtgtgcacagcaacctttttgttttctctcattaaatacacacctttaacgtataacaagaaatatacctacccctggtggggagacgcgttgggatggctcctagcactgtcgtcgatggtctgcatacctgcctggtcactgtatcggctggggacccttaagggcccgttcagggagcgaattaggcagcttatgtgcccagcggaggacttgccccagagaaatcccgccggtccttccgctcctgccactccccgcaccagcttgctacgtctcactgagctggagtcccactgctag

SEQ ID NO: 192433 - DNA, 1809 bp, Artificial Sequence
  derived and/or modified sequence
atggacagccgggtgagcggcaccaccagcaacggcgagaccaagcctgtatatcctgtcatggagaaaaaagaggaagatggaactttagaaagaggtcactggaacaacaagatggagttcgtcctttctgtcgccggtgaaatcatcggattgggaaacgtatggcgctttccttatctctgttataagaacggaggtggcgcctttttcatcccatatctggtgtttctcttcacctgcggcatcccagtgtttttgctggagacggctctaggtcaatatacatctcaggggggcgtgacagcttggcggaagatctgccctatatttgaggggattggctatgcctcccaaatgatcgtgatactccttaacgtatattacatcattgtgctcgcctgggcgctcttctacctcttcagttcgtttacaattgacttgccatgggggggttgttaccacgaatggaacactgaacattgcatggaatttcagaaaactaacgggagtttgaacggcacctccgaaaacgcaacctcacctgtgatagagttctgggaaagacgagttcttaagatttcagatggtatacagcacctgggggcactgcggtgggagcttgctctctgcctgctgctggcttgggtcatctgttacttttgtatttggaagggcgtcaagtcaactggcaaagtggtgtactttacagccacatttccttatctcatgcttgtagtcttgctgatcaggggtgttacattacctggcgcggcccagggcatccagttctatctgtatcccaatcttacacgactttgggacccccaggtttggatggatgctggcacccaaatcttttttagctttgctatctgcctaggttgcctaactgccctgggctcttataacaaatatcacaataactgttatcgagattgtatcgcactttgtttcttgaattccgggacctccttcgtggcgggttttgccatctttagcatcctaggattcatgagccaggaacagggcgtgccaatatccgaagtggcagagagcgggccaggcctggctttcattgcctatcctcgagcggtcgtgatgcttcccttctctccattatgggcttgctgtttcttctttatggtggttctgctcggactggattctcagtttgtgtgtgttgagtccctggttaccgccctcgtggacatgtacccccacgttttccggaaaaaaaatcggagagaagttctgattttaggcgtgtcagtggtctcatttcttgtgggcctaattatgctgacggagggcggaatgtacgtgtttcagctcttcgactactacgccgcatcggggatgtgtctgcttttcgtcgccatcttcgagtccctctgcgtcgcttgggtgtatggggcgaaaagattctacgataacatcgaggatatgatcgggtataggccctggccgttgattaaatattgctggctgtttttgacacctgcagtgtgtacagcgacctttctgttttccctcattaagtacacgccattgacttataacaagaagtacacctacccatggtggggggatgctttgggatggctgctggccctaagctccatggtatgtatccctgcatggtctctctaccggctgggcaccctcaaggggccatttcgcgagcgcattcgccagctgatgtgcccggcagaggatctgcctcaacggaatccagccgggccaagtgctcccgccaccccccgaacgtccctcctgcgactgactgagctggagagccattgctag

SEQ ID NO: 192434 - DNA, 1746 bp, Artificial Sequence
  derived and/or modified sequence
atggagcggcagaaccaatgcatccagtcttggaaaaggcgccgtaagatggctccatggtctggaggaacagggacaacacgctggtcgttatgcaacgtttggcgatttccatacctatgttataagaacgggggaggcgcattttttattccctatctggttttcctttttacctgcgggattccagtgttcttactggagacagcattgggccagtatacaagtcagggtggagtgaccgcctggcgcaaaatctgccccatattcgagggaattggttatgcttctcaaatgatcgtcattctgctcaacgtgtactacatcatcgttctggcctgggccttgttttatctgttttctagcttcacgatcgatctgccctggggcggttgctaccacgaatggaacacagagcactgcatggaatttcagaagactaatggatcgctgaatggcacctcggaaaacgcaaccagccctgtgatcgaattttgggaaagacgagtgctgaagataagcgacggaatccagcacttaggtgccctgagatgggaactggccctatgtctcctgcttgcatgggtcatatgttacttttgcatctggaagggagtgaaaagcactggaaaggttgtctacttcactgccacgttcccttatctgatgttggtggtactgctgatccgtggagtgaccctccctggcgcagcgcaaggcatccaattctacctgtatcccaatctaacccggctgtgggatcctcaagtgtggatggacgccggtacacagattttcttttcgttcgcgatttgtctgggctgtctcaccgctctaggctcctacaataagtaccataacaattgctaccgggattgcattgcactgtgctttttgaactcaggaacctccttcgtggcagggttcgctatttttagcatcctgggcttcatgagccaagaacagggtgttccgatttctgaggtggccgaaagtggacccggtctggctttcattgcatacccacgggcagtggtgatgctacccttctctccactatgggcatgttgtttcttttttatggttgttcttctcgggctggattcccagttcgtttgtgtagaaagtctagttaccgctctagtagatatgtatcctcacgtgtttagaaagaagaatcgaagggaagtccttatcttgggtgtttcagtagtctcttttctcgtaggtttgattatgctgacagagggaggcatgtatgtcttccagctctttgattactacgccgcttcaggaatgtgtttgctgtttgtcgccatcttcgagagtctttgtgtggcttgggtctacggagccaagagattttacgataacatagaagatatgattggatatcgcccttggccgctaatcaagtattgttggttgtttcttacacccgctgtgtgcacagccacattccttttctctctcattaaatataccccactcacctacaacaagaagtatacttatccatggtggggagacgccctgggttggctcctggcactgagctccatggtgtgcatcccggcttggagtctgtataggttgggaacactgaagggcccattcagggagcgaattagacaactgatgtgtccagctgaggatttgccccaaagaaaccctgccggaccttctgctcccgctactcctaggacctctctgctgcgcctcaccgaactcgagagccactgttag

SEQ ID NO: 192435 - DNA, 1809 bp, Artificial Sequence
  derived and/or modified sequence
atggatagccgtgtgtcgggcactaccagtaatggcgagactaaacccgtttatcccgtgatggaaaaaaaagaagaagacggcactctggaacgcggacactggaataacaagatggaattcgtgctgtccgtggctggggaaataatcggcctgggaaatgtatggaggtttccatacctgtgctacaaaaacggaggcggagctttcttcattccttatctggtcttccttttcacctgtggaatcccagtgttccttctggagactgcactgggccaatatacgtcgcagggcggagttaccgcatggcgcaaaatctgtccaattttcgaggggatcggctacgcgagtcagatgatcgtgattctgttgaatgtgtactatattatagttctcgcctgggccctgttctatttattcagctccttcacaattgatctgccctggggcggatgttatcacgagtggaatactgaacattgcatggagtttcaaaagacaaatgggtccttgaatggtacctccgagaatgccacttcccctgtgatcgaattttgggagcgcagggtccttaagatatcagatgggatccagcatcttggggctttgcgatgggagctcgcactgtgtctgctgttggcctgggtgatttgctatttctgtatttggaaaggggtcaagtcgactggaaaggtcgtttactttaccgccacgtttccttatttaatgttggtggtgcttctgattcgaggcgtgactctacctggtgcagcccagggaatacagttctatctctatcccaatctgacgagactgtgggatcctcaggtgtggatggacgctggcactcagatattcttctccttcgctatatgtctagggtgtttgactgctttgggttcttataacaagtatcacaataactgctacagagattgcattgccttgtgtttcctgaactcgggtacctccttcgtagccggatttgcaattttttcaatcctcggcttcatgtctcaagaacaaggcgtgccaatttctgaagtagcagaaagtggccctggcctcgctttcatcgcctatccgagagcagtcgtgatgttgccctttagcccactatgggcatgttgtttctttttcatggtcgttctgttaggcttagacagccagttcgtgtgtgtcgaaagtttggtcaccgcattagtcgatatgtacccacacgtgtttcgcaagaagaaccgccgtgaagtgttgatccttggcgtcagtgttgtgtcttttttggtcgggctgatcatgctgacagaagggggaatgtacgtgttccaactattcgactattatgcagcatccgggatgtgccttctgttcgtggccatctttgagtctttgtgcgtggcgtgggtgtacggggcaaagcggttttacgacaatattgaagacatgattggctacagaccctggcccctgattaagtattgttggttatttttgaccccagcagtgtgtacagcaacgttcctattttccctgattaagtatacgccacttacctataataagaaatatacgtacccctggtggggggacgcactgggctggctattggctctgtcgtcaatggtttgcattccagcctggagtctttacaggctcggtaccttgaagggaccctttcgagaaagaattagacagctgatgtgtccggcagaggacctccctcagcgcaatcctgctggcccaagtgcacctgcgacccctaggacatccctcttgcgcctgactgagctggaatcccactgttag

SEQ ID NO: 192436 - DNA, 2155 bp, Artificial Sequence
  derived and/or modified sequence
agataattcttctcccctgactggacctctggcagcagcttcactaaggtgggatggatagcagggtctcaggcacaaccagtaatggagagacaaaaccagtgtatccagtcatggaaaagaaggaggaagatggcaccctggagcgggggcactggaacaacaagatggagtttgtgcaacgtctggaggtttccctatctctgctacaaaaatgggggaggtgccttcttcatcccctacctcgtcttcctctttacctgtggcattcctgtcttccttctggagacagcactaggccagtacactagccagggaggcgtcacagcctggaggaagatctgccccatctttgagggcattggctatgcctcccagatgatcgtcatcctcctcaacgtctactacatcattgtgttggcctgggccctgttctacctcttcagcagcttcaccatcgacctgccctggggcggctgctaccatgagtggaacacagaacactgtatggagttccagaagaccaacggctccctgaatggtacctctgagaatgccacctctcctgtcatcgagttctgggagcggcgggtcttgaagatctctgatgggatccagcacctgggggccctgcgctgggagctggctctgtgcctcctgctggcctgggtcatctgctacttctgcatctggaagggggtgaagtccacaggcaaggtggtgtacttcacggccacatttccttacctcatgctggtggtcctgttaattcgaggggtgacgttgcctggggcagcccaaggaattcagttttacctgtacccaaacctcacgcgtctgtgggatccccaggtgtggatggatgcaggcacccagatattcttctccttcgccatctgtcttgggtgcctgacagccctgggcagctacaacaagtaccacaacaactgctacagggactgcatcgccctctgcttcctcaacagcggcaccagctttgtggccggctttgccatcttctccatcctgggcttcatgtctcaggagcagggggtgcccatttctgaggtggccgagtcaggccctggcctggctttcatcgcttacccgcgggctgtggtgatgctgcccttctctcctctctgggcctgctgtttcttcttcatggtcgttctcctgggactggatagccagtttgtgtgtgtagaaagcctggtgacagcgctggtggacatgtaccctcacgtgttccgcaagaagaaccggagggaagtcctcatccttggagtatctgtcgtctccttccttgtggggctgatcatgctcacagagggcggaatgtacgtgttccagctctttgactactatgcggccagtggcatgtgcctcctgttcgtggccatcttcgagtccctctgtgtggcttgggtttacggagccaagcgcttctacgacaacatcgaagacatgattgggtacaggccatggcctcttatcaaatactgttggctcttcctcacaccagctgtgtgcacagccacctttctcttctccctgataaagtacactccgctgacctacaacaagaagtacacgtacccgtggtggggcgatgccctgggctggctcctggctctgtcctccatggtctgcattcctgcctggagcctctacagactcggaaccctcaagggccccttcagagagagaatccgtcagctcatgtgcccagccgaggacctgccccagcggaacccagcaggaccctcggctcccgccacccccaggacctcactgctcagactcacagagctagagtctcactgctagggggcaggcccttggatggtgcctgtgtgcctggccttggggatggctgtggagggaacgtggcagaagcagccccatgtgcttccctgcccccgacctggagtggataagacaagaggggtattttggagtccacctgctgagctggaggcctcccactgcaacttttcagctcaggggttgttgaacagatgtgaaaggccagtgccaagagtgtccctctgagacccttgggaagctgggtgggggctggtaggtggggcgagacttgctggcttcgggccctctcatccttcattccattaaatccacattcttcccgctg

SEQ ID NO: 192437 - protein, 588 aa, Artificial Sequence
  derived and/or modified sequence
MASKKREVQLQTVINNQSLWDEMLQNKGLTVIDVYQAWCGPCRAMQPLFRKLKNELNEDEILHFAVAEADNIVTLQPFRDKCEPVFLFSVNGKIIEKIQGANAPLVNKKVINLIDEERKIAAGEMARPQYPEIPLVDSDSEVSEESPCESVQELYSIAIIKPDAVISKKVLEIKRKITKAGFIIEAEHKTVLTEEQVVNFYSRIADQCDFEEFVSFMTSGLSYILVVSQGSKHNPPSEETEPQTDTEPNERSEDQPEVEAQVTPGMMKNKQDSLQEYLERQHLAQLCDIEEDAANVAKFMDAFFPDFKKMKSMKLEKTLALLRPNLFHERKDDVLRIIKDEDFKILEQRQVVLSEKEAQALCKEYENEDYFNKLIENMTSGPSLALVLLRDNGLQYWKQLLGPRTVEEAIEYFPESLCAQFAMDSLPVNQLYGSDSLETAEREIQHFFPLQSTLGLIKPHATSEQREQILKIVKEAGFDLTQVKKMFLTPEQIEKIYPKVTGKDFYKDLLEMLSVGPSMVMILTKWNAVAEWRRLMGPTDPEEAKLLSPDSIRAQFGISKLKNIVHGASNAYEAKEVVNRLFEDPEEN

SEQ ID NO: 192438 - DNA, 1767 bp, Artificial Sequence
  derived and/or modified sequence
atggccagcaagaagagagaggtgcagctgcagaccgtgatcaacaaccagagcctgtgggacgagatgctgcagaacaagggcctgaccgtgatcgacgtgtaccaggcctggtgcggcccctgcagagccatgcagcccctgttcagaaagctgaagaacgagctgaacgaggacgagatcctgcacttcgccgtggccgaggccgacaacatcgtgaccctgcagcccttcagagacaagtgcgagcccgtgttcctgttcagcgtgaacggcaagatcatcgagaagatccagggcgccaacgcccccctggtgaacaagaaggtgatcaacctgatcgacgaggagagaaagatcgccgccggcgagatggccagaccccagtaccccgagatccccctggtggacagcgacagcgaggtgagcgaggagagcccctgcgagagcgtgcaggagctgtacagcatcgccatcatcaagcccgacgccgtgatcagcaagaaggtgctggagatcaagagaaagatcaccaaggccggcttcatcatcgaggccgagcacaagaccgtgctgaccgaggagcaggtggtgaacttctacagcagaatcgccgaccagtgcgacttcgaggagttcgtgagcttcatgaccagcggcctgagctacatcctggtggtgagccagggcagcaagcacaacccccccagcgaggagaccgagccccagaccgacaccgagcccaacgagagaagcgaggaccagcccgaggtggaggcccaggtgacccccggcatgatgaagaacaagcaggacagcctgcaggagtacctggagagacagcacctggcccagctgtgcgacatcgaggaggacgccgccaacgtggccaagttcatggacgccttcttccccgacttcaagaagatgaagagcatgaagctggagaagaccctggccctgctgagacccaacctgttccacgagagaaaggacgacgtgctgagaatcatcaaggacgaggacttcaagatcctggagcagagacaggtggtgctgagcgagaaggaggcccaggccctgtgcaaggagtacgagaacgaggactacttcaacaagctgatcgagaacatgaccagcggccccagcctggccctggtgctgctgagagacaacggcctgcagtactggaagcagctgctgggccccagaaccgtggaggaggccatcgagtacttccccgagagcctgtgcgcccagttcgccatggacagcctgcccgtgaaccagctgtacggcagcgacagcctggagaccgccgagagagagatccagcacttcttccccctgcagagcaccctgggcctgatcaagccccacgccaccagcgagcagagagagcagatcctgaagatcgtgaaggaggccggcttcgacctgacccaggtgaagaagatgttcctgacccccgagcagatcgagaagatctaccccaaggtgaccggcaaggacttctacaaggacctgctggagatgctgagcgtgggccccagcatggtgatgatcctgaccaagtggaacgccgtggccgagtggagaagactgatgggccccaccgaccccgaggaggccaagctgctgagccccgacagcatcagagcccagttcggcatcagcaagctgaagaacatcgtgcacggcgccagcaacgcctacgaggccaaggaggtggtgaacagactgttcgaggaccccgaggagaactag

SEQ ID NO: 192439 - DNA, 1767 bp, Artificial Sequence
  derived and/or modified sequence
atggcgagtaagaagcgagaagtgcagctacagacagtgatcaataaccagtctttgtgggatgaaatgctgcagaataaaggcttgaccgtgattgatgtataccaggcttggtgcgggccgtgtagagctatgcagcccttatttcggaaactcaaaaatgaattgaacgaagatgagatactgcacttcgctgtggcagaagctgacaatattgttactttacagcccttccgagacaaatgcgagccagtgttcctgttttccgtgaacggcaaaattatcgaaaagatccagggagctaacgcaccgctggtcaacaagaaggtgatcaacctgatcgacgaggagagaaagatcgctgctggggagatggcccgtccacaatatccagagatcccactggtcgatagcgatagcgaggtaagtgaggaaagcccctgcgagagcgtccaggagctgtatagcatcgctatcattaaacctgacgccgtcatttccaagaaggttctagagatcaagcggaagattaccaaggctgggtttatcatcgaggccgaacacaaaaccgtcctgaccgaggaacaggtggtgaatttttattccaggattgcagatcagtgcgacttcgaagaattcgtgagcttcatgactagcggcctctcatacatcctagtcgtgtcgcaaggctccaagcacaatcctccatccgaggagactgaaccacaaactgatacggagccaaacgagaggtctgaagatcagcccgaggtggaggcccaagtgacgccaggaatgatgaagaacaagcaggattccctgcaggaatacctggagaggcagcatttggctcagctgtgcgacattgaggaggacgcggctaacgtagctaaattcatggatgccttttttcccgacttcaaaaagatgaaatctatgaaactcgagaaaaccttggcactgctcaggcctaatctttttcacgagcggaaggacgatgtgttgagaatcattaaagacgaagacttcaaaatcctggagcagaggcaggtggtcctcagtgagaaggaggctcaggctctgtgtaaagagtacgaaaatgaggactatttcaacaagctgattgaaaacatgaccagcggcccctctttggccctcgtcttactgcgggataacggactccagtattggaaacagttacttggcccacgcacagtagaggaggcgattgagtattttccagaatcgctgtgtgcccaatttgctatggactccctgccggtaaatcagctgtatgggagcgacagccttgagacggcagaaagggagatccagcacttcttcccacttcagagcactcttgggttgattaaaccacatgccacaagtgaacagcgggagcagatcctgaaaattgtcaaggaagccggatttgacttgacccaggtcaaaaagatgtttttgaccccagagcagattgagaagatatacccaaaagtcacaggaaaggatttttataaggatctgctcgagatgctctccgtaggacccagtatggttatgattctgaccaaatggaacgccgtggcggaatggaggcggctgatgggccccaccgatcccgaggaagctaagctgctgtccccagacagcatcagggctcaatttggaatttcaaaattaaagaacatcgtgcacggcgctagcaacgcctacgaagctaaagaggtcgtaaatagactgttcgaagaccccgaggagaactag

SEQ ID NO: 192440 - DNA, 1767 bp, Artificial Sequence
  derived and/or modified sequence
atggcatctaagaagcgtgaagtgcagctccaaaccgtgatcaataatcaatcactatgggacgagatgttacagaataagggcctgaccgtgattgatgtgtaccaggcctggtgtggaccgtgccgggcgatgcagcccctgtttagaaagctaaagaacgaactcaatgaggacgaaatcctgcactttgctgtcgctgaagccgataacatcgtgacgctgcagcccttccgcgataagtgtgaacctgtgttccttttcagcgtcaatggcaaaatcatcgaaaagatccagggcgctaacgccccacttgtgaataagaaggtgataaatctgatcgacgaagagcggaaaattgcagctggcgaaatggcccgcccacagtatcccgaaattcctctggtagattccgactctgaagtaagcgaggagtctccctgtgagtccgtgcaagagctgtattccatcgcaataattaaacccgatgcggtgatctccaagaaggtgcttgaaataaaacggaagatcaccaaagccggctttatcatcgaggcagaacacaaaactgtgctgactgaagagcaggtagtgaatttttattcacgtattgccgatcaatgtgattttgaggagttcgtaagttttatgactagcggcctgagctacatactggtggtttctcagggaagcaagcacaatcccccaagcgaagagacagagccccagactgacacagagcctaatgaaaggagcgaggatcagccggaggtggaagcccaggtcacccctggaatgatgaagaacaagcaagatagcctccaggagtatctggagaggcagcatctagcgcagttatgcgacattgaggaagacgccgccaatgtggctaagtttatggatgcttttttccccgattttaagaaaatgaaatcgatgaaacttgagaaaacattggctctgcttcggccgaatttattccatgagcgaaaggatgacgtgctgcggatcataaaggatgaggattttaagatacttgagcaaaggcaggtcgttctcagtgagaaggaggcccaggcgctgtgcaaggaatatgaaaatgaagactactttaataagttgattgaaaacatgacatccggcccgagcctggcgttggtgttgctgcgcgacaacggactgcagtactggaaacagcttctcggacctaggactgtggaggaggctatagagtactttcctgagagtctttgtgctcagtttgcaatggactcccttccagttaatcagctctatggctcagatagtttggagaccgcagaacgcgagattcagcatttctttcccctgcagtccacactgggactgataaaaccgcacgccacatcagaacagcgcgaacagatcctgaaaattgttaaagaagcgggcttcgatctgacacaggttaagaagatgtttttgacccccgaacagatcgagaaaatctatccaaaggtgacaggaaaggacttttacaaggatctgcttgaaatgctgtccgtgggcccctccatggtaatgattttaacaaaatggaacgccgtagctgagtggcggcggctgatgggtcccactgacccagaggaagccaagctcttatcccctgacagcattagagcacagttcgggatcagtaagttgaagaatattgttcatggcgcaagtaacgcatacgaggctaaggaagtggtcaaccgtctgtttgaagatcccgaagaaaattag

SEQ ID NO: 192441 - DNA, 1767 bp, Artificial Sequence
  derived and/or modified sequence
atggccagcaagaagcgggaggtgcagctgcagaccgtcatcaacaaccagagcctgtgggatgagatgctgcagaacaagggcctgactgtgattgatgtgtaccaggcctggtgtggcccctgccgggccatgcagcccctcttcaggaagctgaagaatgagctgaatgaagatgagatcctgcactttgctgtggccgaggccgacaacatcgtgaccctgcagcccttccgggacaagtgtgagcccgtcttcctgttctctgtgaatggcaagatcatcgagaagatccagggcgccaatgcccccctggtgaacaagaaggtgatcaacctgattgatgaggagaggaagattgctgctggggagatggcccggccccagtacccagagatccccctggtggacagcgacagcgaggtgtctgaggagagcccctgtgagagcgtgcaggagctgtacagcatcgccatcatcaagccagatgctgtgatcagcaagaaggtgctggagatcaagaggaagatcaccaaggccggcttcatcatcgaggccgagcacaagacagtgctgacagaggagcaggtggtgaacttctacagcagaattgctgaccagtgtgactttgaggagtttgtgtccttcatgaccagcggcctgagctacatcctggtggtgtcccagggcagcaagcacaaccccccatctgaggagacagagccccagacagacacagagcccaatgaaagaagtgaggaccagcctgaggtggaggcccaggtgaccccaggcatgatgaagaacaagcaggacagcctgcaggagtacctggagcggcagcacctggcccagctgtgtgacattgaagaagatgctgccaacgtggccaagttcatggatgccttcttcccagacttcaagaagatgaagtccatgaagctggagaagaccctggccctgctgcggcccaacctcttccacgagaggaaggatgatgtgctgcgcatcatcaaggatgaggacttcaagatcctggagcagaggcaggtggtgctgtctgagaaggaggcccaggccctgtgcaaggagtatgaaaatgaagactacttcaacaagctgattgagaacatgaccagcggccccagcctggccctggtgctgctgcgggacaatggcctgcagtactggaagcagctgctgggccccaggacagtggaggaggccatcgagtacttccctgagagcctgtgtgcccagtttgccatggacagcctgcctgtgaaccagctgtatggcagtgacagcctggagacagctgagcgggagatccagcacttcttccccctgcagagcaccctgggcctcatcaagccccacgccaccagcgagcagcgggagcagatcctgaagatcgtgaaggaggccggctttgacctgacccaggtgaagaagatgttcctgaccccagagcagatcgagaagatctaccccaaggtgacaggcaaggacttctacaaggacctgctggagatgctgtctgtgggccccagcatggtgatgatcctgaccaagtggaatgctgtggccgagtggaggcggctgatgggccccacagatcctgaggaggccaagctgctgagcccagacagcatccgggcccagtttggcatcagcaagctgaagaacatcgtgcacggggccagcaatgcctatgaggccaaggaggtggtgaacagactctttgaagatcctgaagaaaattag

SEQ ID NO: 192442 - DNA, 1767 bp, Artificial Sequence
  derived and/or modified sequence
atggccagcaagaagcgggaggtgcagctgcagaccgtgatcaacaaccagtccctttgggacgagatgctgcagaataaaggcctcacagtgattgacgtataccaggcttggtgcggcccgtgtcgcgccatgcagcctctctttcgaaagttgaagaatgagctgaacgaggacgagatcttgcacttcgcagtcgcagaggcagataacatagtgaccctgcaaccgtttcgcgacaagtgcgaacctgtgttcctgttcagtgtcaacggcaaaatcattgaaaagatacagggcgccaacgcacctttggtcaacaagaaggttatcaatctgatcgatgaggaacgaaaaattgctgccggtgagatggctcggccacagtatccggagattccattggtggattctgattcagaagtgagcgaggagagtccatgtgagagcgtgcaggaactctactcaatcgcaattataaagccagatgctgtgatatccaagaaagtcctagagataaaaaggaaaattaccaaggctgggttcattatcgaggctgagcacaaaactgtactgaccgaggagcaggtcgtaaacttctactctcgtatcgcagaccagtgtgacttcgaagaatttgtgtcttttatgacctctggtctgtcttacatcctggtggtttctcagggaagtaagcacaacccaccttctgaagaaaccgagccacagaccgatacagagccaaacgagagaagtgaggatcaacctgaggtagaagctcaggtgacccctgggatgatgaagaacaagcaagactcgctgcaagagtacctcgagcgtcaacacttggcacaattatgcgatattgaagaagatgctgcgaacgtcgctaaattcatggacgcctttttccctgactttaaaaaaatgaaatccatgaagctggagaaaaccctggctctgctcagacctaacttatttcacgagcgcaaagacgacgtcctgcgcatcattaaagacgaggatttcaaaatcctcgagcagcgccaagtagtgttgtccgaaaaagaggcacaggcgctgtgtaaggaatacgaaaatgaggactactttaataagttgatcgagaatatgacttctggcccctcactggcccttgtgttactgagggacaacggactgcaatattggaaacagctgctgggccctcggaccgtggaagaggccatcgaatacttccctgaatccctgtgcgcacagttcgccatggacagtctccccgtgaatcaattatacgggagcgatagcctggaaacagctgaacgtgaaatccagcatttcttccctcttcagtccacactaggactcatcaagccgcacgccaccagcgaacagcgtgaacagatcctcaaaatcgtgaaagaggctggttttgatctaacacaggtgaagaagatgtttttgacaccagagcagatcgagaagatctaccccaaggtgaccggaaaggatttttacaaagacctgctggaaatgttgtcggtgggaccatcgatggtgatgatattgaccaaatggaatgcagttgcggagtggagacggttgatgggacctacggacccagaagaggccaagttattgtcacctgactcaatccgcgcacaattcggcatcagcaagcttaagaatatagtgcatggcgcatctaatgcatacgaggccaaagaagtcgtgaatagactgtttgaggatccggaggaaaattag

SEQ ID NO: 192443 - DNA, 1767 bp, Artificial Sequence
  derived and/or modified sequence
atggccagcaagaagcgggaggtgcagctgcagaccgtgatcaacaaccaatcactgtgggacgaaatgcttcagaataaaggcctaacggtcatcgacgtctaccaggcttggtgcggtccttgtagagccatgcagccgctgttccggaaactcaaaaacgaactgaatgaggatgaaattctgcacttcgctgtggctgaggcggacaatatagtaactctgcagccgttccgtgacaaatgtgagcccgtattcctattctccgtgaacggaaaaatcatcgagaaaatacaaggcgctaacgctccgctggtgaataaaaaagtcattaaccttattgacgaggagagaaagatcgccgcaggagagatggcacgacctcagtaccctgagatcccattggtcgactccgattccgaggtctccgaggaatctccatgcgagtcggtgcaggagttgtattccattgctattatcaaacctgatgcagtaatctcaaagaaggtgctggagattaaaagaaagatcaccaaagcaggctttatcatagaagcagaacacaagacggtcctgactgaggagcaagtcgtaaatttctattcgcgaattgccgatcagtgcgactttgaggaatttgtatctttcatgacctcaggtcttagttacattctggtcgtgagtcagggttctaagcataaccctccaagtgaagagaccgagccccagaccgacacagaacccaacgagagatccgaggaccagcccgaggtggaagctcaggttactcccgggatgatgaagaataagcaggactccctgcaggagtacctggagcgacagcatctggcccaattatgtgatatagaggaggacgcagccaacgttgcaaagttcatggatgcattttttcctgacttcaaaaaaatgaaatcaatgaaactcgagaagacgctcgcgttactacggccaaatcttttccatgagaggaaggatgacgtgttacgcatcatcaaagacgaggactttaaaatactggaacagaggcaggtggtgctgtccgagaaagaggctcaggctctgtgcaaagaatatgagaacgaagattattttaacaaactgatagagaacatgacttcgggtccgtctctcgcactggtcttactcagagataatggactgcagtattggaagcagctactgggccctagaaccgtggaggaggcaatcgagtacttccccgagtccttgtgcgctcagtttgctatggacagcctgcctgtgaaccagttatatggtagcgattcattggaaacagcagagagggagatccagcacttctttcctctgcaatctactctcggtttgatcaagccacatgcgaccagcgaacagcgcgaacaaatactcaaaattgtgaaagaggccggctttgacttgacccaggtcaagaagatgttcttgactcctgaacagattgagaaaatatacccaaaggtaacagggaaagacttttacaaagatctgctggagatgctgagcgttggaccctcaatggtgatgattttaacgaagtggaatgcagtcgctgagtggcgacgactgatgggtcccaccgaccctgaggaagccaaactcctgagccccgactctattagagcgcaatttggtatttctaaactgaagaacattgtccatggcgcaagcaacgcttatgaggcgaaagaggtggtaaacagattgtttgaggatccagaggaaaattag

SEQ ID NO: 192444 - DNA, 1767 bp, Artificial Sequence
  derived and/or modified sequence
atggccagcaagaagagagaagtccagctccagacggtcataaataatcagagcctgtgggacgagatgcttcagaataagggactgacagtgatcgacgtgtatcaggcttggtgcgggccatgtcgcgctatgcaacctctgtttagaaaacttaagaatgaactaaacgaagatgaaatcctgcactttgccgtcgccgaagcagataatattgtgacactccaaccttttagagacaagtgtgaacccgtgttcctgttttccgtgaatggaaagatcatagagaagatacaaggagccaatgccccacttgtaaataagaaggtgatcaacttaattgacgaagagcggaagatcgctgcgggtgaaatggcaagaccacagtaccctgagataccactggtcgactccgactcagaggtgagcgaggagtccccttgcgaatccgtgcaggaattgtattctatcgcaatcatcaaacctgacgccgtcatttccaagaaggtgctggagattaaaaggaagattacaaaggccggattcatcatcgaagccgagcacaaaaccgttttaactgaggagcaagtcgtaaacttttacagccggattgccgaccaatgtgattttgaggaatttgttagctttatgacttctggtttaagctacatccttgtggtttctcaaggttccaaacacaaccctccctccgaagagaccgagccccagacggatactgagcccaacgaacgaagcgaggaccagcccgaggtggaagctcaggtcacccccggtatgatgaagaacaagcaagattctttacaagaatacttggagagacagcacctcgcacagctgtgtgatatagaggaagatgccgcaaacgtggccaagtttatggacgctttttttcctgactttaagaagatgaagtcaatgaaactcgaaaaaactctcgccctattgcggccaaatctctttcatgaaaggaaagatgatgtgttgaggattattaaggatgaagatttcaagatcctggagcaacgacaggtggtgcttagtgaaaaagaggcccaggcgctgtgtaaagagtatgagaatgaggattatttcaacaagctcattgaaaatatgacaagcggtccgagcctggcactggtcctgctaagggataatggcctgcagtattggaagcagctactgggccctagaacagtagaggaggcaatcgagtacttccccgaatcgttgtgtgctcagtttgcgatggactcactccccgtgaaccagctgtacggatctgactccctggagacagcagagcgggagattcaacatttttttccgttgcagtcgaccctgggattaatcaaacctcatgcaacttctgaacaaagggagcagatactgaagattgtgaaagaagcgggatttgatctgacccaggtgaagaagatgtttcttacgcctgaacagatcgaaaagatctaccctaaagtcaccggaaaggacttttataaagacctgctggagatgctgtccgtcggaccttcgatggtcatgattctcactaagtggaatgccgtggccgagtggagacgcttaatgggtccaactgacccagaagaggcgaaactattgtctcccgatagtatccgcgcacagttcggaatctcaaaactaaaaaacatagtgcatggggcttctaacgcctatgaagctaaagaggtagtcaacagactgttcgaggaccccgaggaaaattag

SEQ ID NO: 192445 - DNA, 1767 bp, Artificial Sequence
  derived and/or modified sequence
atggctagcaagaagcgcgaagttcagctgcaaactgtgattaacaatcagtccctgtgggatgagatgctgcaaaacaagggactgactgtcattgacgtatatcaggcctggtgtggtccgtgtagggccatgcaacctttatttcgcaaactcaaaaatgaactgaatgaggacgaaatactgcactttgctgttgccgaggcagataatatcgtgacacttcagccttttcgggacaaatgtgaacccgtctttctgttctcagtgaacggaaagattatcgagaagattcagggcgcaaacgcaccccttgtcaataagaaggtcatcaatctgatcgacgaagaacgaaaaatcgcagctggcgagatggcacggcctcagtacccagaaatcccgctcgtcgattcggactcagaggtctctgaagaaagcccgtgtgagtccgtgcaggagctatatagcattgccatcattaaaccagatgccgtgatttccaagaaggtcttggaaattaagagaaagattacaaaggccggtttcattatcgaagccgaacataaaaccgtattgacggaagaacaggttgtgaacttttactccagaatcgctgatcagtgcgactttgaagaatttgttagtttcatgactagtggtctctcctacatcctggtggttagccagggaagtaaacacaatcccccttctgaggaaacagagcctcagaccgacacagaacccaacgagcggtcggaggatcaacctgaggtggaagcccaggtgacccctgggatgatgaagaacaagcaagacagtctgcaggaatacctcgaaagacagcatctggcccaactgtgcgatatcgaggaggatgctgccaatgtggctaaattcatggatgcattttttcctgacttcaaaaagatgaagtccatgaagttagagaagactcttgccctccttcgcccaaatctatttcacgaacgtaaggatgatgtgctaaggattatcaaggatgaagattttaagatcctcgaacagaggcaggttgtgctgtcagaaaaagaggcacaggcactgtgtaaagagtatgaaaatgaagactactttaacaaactgatcgagaacatgacctcaggtcctagcctggccctggttcttctcagggacaatggccttcagtactggaagcagctgcttggcccaagaacagtggaggaggccatcgagtatttcccagaaagcctgtgtgcacagtttgccatggattccctccctgtcaatcagctgtacggtagtgacagccttgagacagctgaaagggagatccaacacttcttccccctgcaatccactttaggacttatcaagcctcatgccacctcagaacagagggaacagatactgaaaatcgtgaaagaggctggattcgacctgacgcaagtgaagaagatgttcttgacgccagagcagattgaaaaaatttatccaaaggtaacgggcaaagatttttataaagacctgcttgaaatgctgagcgtcgggccttcaatggtgatgattctgaccaaatggaacgcagtcgccgagtggcgacggctcatggggccaaccgacccagaagaggcaaagctactgtcccccgattcaattcgagcccaattcgggattagcaagttaaagaacattgtgcacggcgcatcgaatgcttacgaagcaaaggaagtggtgaaccgcttgtttgaagacccagaggagaattag

SEQ ID NO: 192446 - DNA, 2312 bp, Artificial Sequence
  derived and/or modified sequence
ggagtttggggatgaggcagctgaagaacagagtcttgtgatggtggaaccaggacttcgttgttccttcattgtgtgggcagaagaggtggaggattttaggcgccacctggtcttgtccccactgcccagacaggcagggaatccctcttcttccttttgctgaatcagctggagaagaaagcccagcaggaggcctgctagcctcagcctcgggccctaccagggtcctaggtactggaatggaacttcgccgaggtcaccgctcaaacggccacaacgagggagccgatttagatcctctgggcctgttccttccttttctttaaacgtcccagtctagcttagaggaggacctgttttgttagataaatggcaagcaaaaaacgagaagtccagttacagacagtcatcaataatcaaagcctgtgggatgagatgttgcagaacaaaggcttaacagtgattgatgtttaccaagcctggtgtggaccttgcagagcaatgcaacctttattcagaaaattgaaaaatgaactgaacgaagacgaaattctgcattttgctgtcgcagaagctgacaacattgtgactttgcagccatttagagataaatgtgaacctgtttttctctttagtgttaatggcaaaattatcgaaaagattcagggtgcaaatgcaccgcttgttaataaaaaagttattaatttgatcgatgaggagagaaaaattgcagcaggtgaaatggctcgacctcagtatcctgaaattccattagtagactcagattcagaagttagtgaagaatcaccatgtgaaagtgttcaggaattatacagtattgctattatcaaaccggatgctgtgattagtaaaaaagttctagaaattaaaagaaaaattaccaaagctggatttattatagaagcagagcataagacagtgctcactgaagaacaagttgtcaacttctatagtcgaatagcagaccagtgtgacttcgaagagtttgtctcttttatgacaagtggcttaagctatattctagttgtatctcaaggaagtaaacacaatcctccctctgaagaaaccgaaccacagactgacaccgaacctaacgaacgatctgaggatcaacctgaggtcgaagcccaggttacacctggaatgatgaagaacaaacaagacagtttacaagaatatctggaaagacaacatttagctcagctctgtgacattgaagaggatgcagctaatgttgctaagttcatggatgctttcttccccgattttaaaaaaatgaaaagcatgaaattagaaaagacattggcattacttcgaccaaatctctttcatgaaaggaaagatgatgttttgcgtattattaaagatgaagacttcaaaatactggagcaaagacaagtagtattatcggaaaaagaagcacaagcactgtgcaaggaatatgaaaatgaagactattttaataaacttatagaaaacatgaccagtggtccatctctagcccttgttttattgagagacaatggcttgcaatactggaaacaattactgggaccaagaactgttgaagaagccattgaatattttccagagagtttatgtgcacagtttgcgatggacagtttgccggtcaaccagttgtatggcagcgattcattagaaaccgctgaaagggaaatacagcatttctttcctcttcaaagcactttaggcttgattaaacctcatgcaacaagtgaacaaagagagcagatcctgaagatagttaaggaggctggatttgatctgacacaggtgaagaaaatgttcctaactcctgagcaaatagagaaaatttatccaaaagtaacaggaaaagacttttataaagatttattggaaatgttatctgtgggtccatctatggtcatgattctgaccaagtggaatgctgttgcagaatggagacgattgatgggcccaacagacccagaagaagcaaaattactttcccctgactccatccgagcccagtttggaataagtaaattgaaaaacattgtccatggagcatctaacgcctatgaagcaaaagaggttgttaatagactctttgaggatcctgaggaaaactaaagtatatactgtgaaaactttgagaagataatacatatgttcacgtcaatatacaaccatttggcacagcttcctgggaggaataataagaaaaacatgctttggaggaaaactcaagatacaaaaatgaatggctatgcataataacaataagaatgtattccccaaacaaa

SEQ ID NO: 192447 - DNA, 1879 bp, Artificial Sequence
  derived and/or modified sequence
aaacgtcccagtctagcttagaggaggacctgttttgtgtaaggcttgccggagcaaccagcacctttcctggaatacagtcttgtttgtggcttttcctttgtttagataaatggcaagcaaaaaacgagaagtccagttacagacagtcatcaataatcaaagcctgtgggatgagatgttgcagaacaaaggcttaacagtgattgatgtttaccaagcctggtgtggaccttgcagagcaatgcaacctttattcagaaaattgaaaaatgaactgaacgaagacgaaattctgcattttgctgtcgcagaagctgacaacattgtgactttgcagccatttagagataaatgtgaacctgtttttctctttagtgttaatggcaaaattatcgaaaagattcagggtgcaaatgcaccgcttgttaataaaaaagttattaatttgatcgatgaggagagaaaaattgcagcaggtgaaatggctcgacctcagtatcctgaaattccattagtagactcagattcagaagttagtgaagaatcaccatgtgaaagtgttcaggaattatacagtattgctattatcaaaccggatgctgtgattagtaaaaaagttctagaaattaaaagaaaaattaccaaagctggatttattatagaagcagagcataagacagtgctcactgaagaacaagttgtcaacttctatagtcgaatagcagaccagtgtgacttcgaagagtttgtctcttttatgacaagtggcttaagctatattctagttgtatctcaaggaagtaaacacaatcctccctctgaagaaaccgaaccacagactgacaccgaacctaacgaacgatctgaggatcaacctgaggtcgaagcccaggttacacctggaatgatgaagaacaaacaagacagtttacaagaatatctggaaagacaacatttagctcagctctgtgacattgaagaggatgcagctaatgttgctaagttcatggatgctttcttccccgattttaaaaaaatgaaaagcatgaaattagaaaagacattggcattacttcgaccaaatctctttcatgaaaggaaagatgatgttttgcgtattattaaagatgaagacttcaaaatactggagcaaagacaagtagtattatcggaaaaagaagcacaagcactgtgcaaggaatatgaaaatgaagactattttaataaacttatagaaaacatgaccagtggtccatctctagcccttgttttattgagagacaatggcttgcaatactggaaacaattactgggaccaagaactgttgaagaagccattgaatattttccagagagtttatgtgcacagtttgcgatggacagtttgccggtcaaccagttgtatggcagcgattcattagaaaccgctgaaagggaaatacagcatttctttcctcttcaaagcactttaggcttgattaaacctcatgcaacaagtgaacaaagagagcagatcctgaagatagttaaggaggctggatttgatctgacacaggtgaagaaaatgttcctaactcctgagcaaatagagaaaatttatccaaaagtaacaggaaaagacttttataaagatttattggaaatgttatctgtgggtccatctatggtcatgattctgaccaagtggaatgctgttgcagaatggagacgattgatgggcccaacagacccagaagaagcaaaattactttcccctgactccatccgagcccagtttggaataagtaaattgaaaaacattgtccatggagcatctaacgcctatgaagcaaaagaggttgttaatagactctttgaggatcctgaggaaaactaa

SEQ ID NO: 192448 - protein, 85 aa, Artificial Sequence
  derived and/or modified sequence
MSKVSFKITLTSDPRLPYKVLSVPESTPFTAVLKFAAEEFKVPAATSAIITNDGIGINPAQTAGNVFLKHGSELRIIPRDRVGSC

SEQ ID NO: 192449 - DNA, 258 bp, Artificial Sequence
  derived and/or modified sequence
atgtccaaggttagttttaaaatcacacttacgtccgaccctaggcttccatataaagtgctcagtgtgcctgagagcacccccttcactgccgttcttaaattcgccgccgaggaatttaaagtgcctgctgctacgtctgccattatcaccaacgatggaatcggaattaaccccgctcagactgctggcaatgtctttctgaagcacggatcagaactccgaattattcctagggaccgcgtggggtcttgttag

SEQ ID NO: 192450 - DNA, 258 bp, Artificial Sequence
  derived and/or modified sequence
atgagcaaggtgtccttcaagatcaccctgaccagtgacccccggctgccctacaaggtgctgtctgtgcctgagagcacccccttcaccgctgtgctgaagtttgctgctgaggagttcaaggtgcctgctgccaccagcgccatcatcaccaatgatggcatcggcatcaacccagcccagacagctggaaatgtgttcctgaagcacggcagcgagctgcgcatcatcccccgggacagagtgggcagctgctag

SEQ ID NO: 192451 - DNA, 258 bp, Artificial Sequence
  derived and/or modified sequence
atgagcaaggtgagcttcaagatcaccctgaccagcgacccccggctcccatataaagttctgagtgtgccagagtctaccccctttactgctgtgcttaaatttgccgccgaggagtttaaagtgcccgcagccacaagtgccattatcaccaatgacggtattggaatcaaccccgctcagactgccggcaatgtttttcttaagcatgggtctgaactccggatcattccgagagaccgtgtggggtcttgctag

SEQ ID NO: 192452 - DNA, 2522 bp, Artificial Sequence
  derived and/or modified sequence
cggagttgtcgtgtgttctggattcattccggcaccaccatgtcgaaggtttcctttaagatcacgctgacgtcggacccacggctgccgtacaaagtactcagtgttcctgaaagtacacctttcacagcagtcttaaagtttgcagcagaagaatttaaagttcctgctgcaacaagtgcaattattaccaatgatggaataggaataaatcctgcacagactgctggaaatgtttttctaaaacatggttcagaactgcggattattcctagagatcgtgttggaagttgttaatatctgctacttggaacatacgattgcctttcagaataaatattggtattttttgttgttgtaaaattgaaatcaggcatttaacatactatgaaaacaccaggagtcaatgattaatgaaaggtgactcatctgtccctttttgttgtccatactcttcctatgaagagggaatgcgtatgaattaaggctactactgtcacagaagatcatagtctttgatgctacctcacaacacaaacaggtagttcgttgggggcaaatgaattagccaactgttaactggaagcttttgataatttttttttttagaacaatttggaacattaaaatttactgaatcgtatatattcatctgagataaaaatataaaaagaattatggaccctggatggcaatttgcttgatagcatctgatttgcagactcataatttgatttttaattaaatatataggttgtgatgaagtgaatagacatatcagtgaacagttaactatattaaatttttatcatttactttttttaagattcagacctcagttatataaatttcagtttaatatcaaccaaaaaattaaaattttaatctaacccttatgtgtataaattggtgtcccataccagcttttaatggtggacctatagaatccagtacttttaatggtgggaatttacagtagaagcatcctttgctgagttatacattcctttatcaatctcttttgatacaacatttaaaacaagtagcttcaagaaaccactggtgttttgaggatagtatttctaaatagcattcaggaacagagtattattgcacagatctgaagatcaaaaaaaagctcaaggaaatacagatcggaagtgctgatgagttatatttattgaaaacccaacttttaaggaagtgctaagatcagtcacccatgtgaataagaagccaggaaaggaaagatggggaagcccagatcaccaggcttctattaaggaggaaagcaacagaggaaacagtgaaggggaacagaagggggtagcaaagtgttacagaaaagcggactggatagacaaaactgcagaaggtgtatgttggggagaactgaaagggaaaacaaaatacttgacatagtcttaagtagaagaaggcagttagagaaaacaaagtatctactggccttgtcaacatacagacttcaaaataccccttatgagaatccaaagaatgatgtgtgtaagggaagattttatttgcccttccggaagaaatcagtatctatgcaaatcttgaaagacgaaatcaaagcccattaatgattcagaatcagtgcttgacctcctgtattctgaatggtgaactctggaagcagggattgtgtctggctctttttagagctggaaatgtagtggctttcattaaatacttgctgtaaagtctttctaagaccaattattatcttagcatgtttcagtatcttctctatcataggccctaagttcattgggggaaaaaaaataagaagattcaacagaatcagcatttgaagtgtaccattggtagttgtttatgaaattaccagatattcataaatgtgacaaatgaacagcaggattatgaattatcaaaggaaaaagtatttgctgaggtgaaaaaatctgatgtttgaggaagtttttatttttatttatttgttttgtttttttttttttgaggcagactctctgtcgccaggcttctcctgcctcagcctcacgagtagctgggactacaggcatgcaccaccacgcccagctaatttttgtatttttagcagagacagggaggaagtttttatttttataaacaaaatctgatgttcagaggccccgtttcttacaataaatgttgagtcttagttaagcaggaatttatgaacacccatttcctgactttttgctttaatttagatttttctccatcctgtttctagcacaaaaatttgcctgctgtgttacaaaaataaatttatgttgtcctgtgccataaagtgatatatttaatatttttattctttggttttgaacattgtaagttcctaaaaacattttattaaacaagtagacattttgttattaaaaaaatgtgatctgtaatttctttgtgcagaatgatttgaagtattgtattcagtttacatgcgttattggtttataattaatatctaatgaaaatacatgttgttatattgtaaa

SEQ ID NO: 192453 - DNA, 258 bp, Artificial Sequence
  derived and/or modified sequence
atgtcaaaggttagcttcaaaatcaccctgacttctgatcctagactgccatataaggttctgagtgttccagagtccacaccctttaccgccgtgctgaagtttgcagcggaagagttcaaagttcctgccgctactagtgctatcataacaaatgacgggatcggcattaatccggctcaaacagcaggaaacgtgttcctgaagcatggcagcgagctgcggattattccacgcgaccgggttggctcatgctag

SEQ ID NO: 192454 - DNA, 258 bp, Artificial Sequence
  derived and/or modified sequence
atgagcaaggtgagcttcaagatcaccctgaccagcgaccccagactgccctacaaggtgctgagcgtgcccgagagcacccccttcaccgccgtgctgaagttcgccgccgaggagttcaaggtgcccgccgccaccagcgccatcatcaccaacgacggcatcggcatcaaccccgcccagaccgccggcaacgtgttcctgaagcacggcagcgagctgagaatcatccccagagacagagtgggcagctgctag

SEQ ID NO: 192455 - protein, 634 aa, Artificial Sequence
  derived and/or modified sequence
MELQTLQEALKVEIQVHQKLVAQMKQDPQNADLKKQLHELQAKITALSEKQKRVVEQLRKNLIVKQEQPDKFQIQPLPQSENKLQTAQQQPLQQLQQQQQYHHHHAQQSAAASPNLTASQKTVTTASMITTKTLPLVLKAATATMPASVVGQRPTIAMVTAINSQKAVLSTDVQNTPVNLQTSSKVTGPGAEAVQIVAKNTVTLQVQATPPQPIKVPQFIPPPRLTPRPNFLPQVRPKPVAQNNIPIAPAPPPMLAAPQLIQRPVMLTKFTPTTLPTSQNSIHPVRVVNGQTATIAKTFPMAQLTSIVIATPGTRLAGPQTVQLSKPSLEKQTVKSHTETDEKQTESRTITPPAAPKPKREENPQKLAFMVSLGLVTHDHLEEIQSKRQERKRRTTANPVYSGAVFEPERKKSAVTYLNSTMHPGTRKRANEEHWPKGDIHEDFCSVCRKSGQLLMCDTCSRVYHLDCLDPPLKTIPKGMWICPRCQDQMLKKEEAIPWPGTLAIVHSYIAYKAAKEEEKQKLLKWSSDLKQEREQLEQKVKQLSNSISKCMEMKNTILARQKEMHSSLEKVKQLIRLIHGIDLSKPVDSEATVGAISNGPDCTPPANAATSTPAPSPSSQSCTANCNQGEETK

SEQ ID NO: 192456 - DNA, 1905 bp, Artificial Sequence
  derived and/or modified sequence
atggagctccagacgttgcaagaggccctcaaggtcgaaatacaggtgcaccaaaagttagttgcacagatgaaacaggacccacagaatgccgatctaaagaagcagctgcacgagctccaggccaaaattactgcactgtccgagaaacagaaacgagttgtcgagcagctaaggaagaacttaatcgtcaagcaggaacagcccgacaagttccagattcaacctctgcctcaaagcgagaataagctgcagacagcccaacagcaaccgctgcagcagcttcaacaacagcagcaataccaccaccatcatgcacagcaaagcgccgccgcgagtccaaacctgacagcaagccaaaagactgtgaccactgcatccatgattaccacgaaaacactgcccttagtgctgaaggcagccaccgccaccatgcccgcctcagttgtggggcagcgccctacaatcgctatggttactgcaatcaatagccagaaagcggtgctgtcgactgatgtgcaaaacactccagtgaacttgcagacctcctcaaaagtgacgggccctggggccgaagcagtccagatcgtcgccaagaatactgttacactccaagtccaggccactccacctcagccaataaaggttccacagtttataccacccccgaggctcacacctcgtccaaattttctgccccaggtccggcctaaacccgtcgctcagaacaacatcccaatagcccctgctccacctccaatgctggccgctcctcagctgatccagcgcccagtaatgttgactaagttcacccctaccactctccctacgtctcagaattctatccatcctgtgcgggtggtgaatggccagaccgccactattgcaaaaacttttccaatggctcaactgacctctatcgtaatcgcaacaccgggtaccaggcttgctggcccccagacggtacaactctctaagccatcacttgaaaagcaaacggtgaagagtcataccgagacggatgaaaagcaaacggaaagccgaacgatcacgccacccgccgcacccaagccaaaaagagaagagaacccccagaaacttgcatttatggtgtcactgggcctagtaactcatgatcatctggaagaaatccagtccaaaaggcaggaacgcaagcgacggacaactgccaatccggtttacagcggcgccgtcttcgaacccgaaagaaaaaagagtgccgtcacctacctaaactccaccatgcaccctggcacaaggaagcgcgctaacgaggagcactggcccaaaggggatatccacgaggacttctgtagcgtgtgcagaaaatccggccagctcctgatgtgcgatacatgtagccgggtgtaccacctggactgcctggaccctcccttgaagacaattcctaaaggaatgtggatctgtcccaggtgccaggatcagatgttgaagaaagaggaagccatcccatggcccgggactctagctatcgtgcacagctacatcgcatataaggccgccaaagaagaggagaaacagaagctactcaaatggagcagtgacttaaaacaggagagagagcagctcgagcaaaaagtgaagcagttatccaacagcatttctaagtgcatggagatgaagaacactatcctcgctcgacaaaaggagatgcacagttctcttgagaaggtgaagcaacttatcaggctcattcacggtatcgatttgtcaaagcccgtggattctgaggcaaccgtcggggccatcagcaacggtccagattgtacacctcctgctaatgcagcaactagcacacccgctccttcgccttctagccagtcttgcacagccaattgtaatcagggggaagagactaagtag

SEQ ID NO: 192457 - DNA, 1905 bp, Artificial Sequence
  derived and/or modified sequence
atggagctgcagaccctgcaggaggccctgaaggtggagatccaggtgcaccagaagctggtggcccagatgaagcaggacccccagaatgctgacctgaagaagcagctgcacgagctgcaggccaagatcacagccctgtctgagaagcagaagagggtggtggagcagctgaggaagaacctgattgtgaagcaggagcagcctgacaagttccagatccagcccctgccccagagcgagaacaagctgcagacagcccagcagcagcccctgcagcagctgcagcagcagcagcagtaccaccaccaccacgcccagcagagcgctgctgccagccccaacctgacagccagccagaagacagtgaccacagcctccatgatcaccaccaagaccctgcccctggtgctgaaggccgccacagccaccatgcctgcctctgtggtgggccagaggcccaccatcgccatggtgacagccatcaacagccagaaggctgtgctgagcacagatgtgcagaacacccctgtgaacctgcagaccagcagcaaggtgactggacctggagctgaggccgtgcagatcgtggccaagaacacagtgaccctgcaggtgcaggccaccccaccccagcccatcaaggtgccccagttcatccccccaccccggctgaccccccggcccaacttcctgccccaggtgcggcccaagcctgtggcccagaacaacatccccatcgccccagcccccccacccatgctggccgccccccagctgatccagaggcctgtgatgctgaccaagttcacccccaccaccctgcccaccagccagaacagcatccaccctgtgcgggtggtgaatggccagacagccaccatcgccaagaccttccccatggcccagctgaccagcatcgtgattgccaccccaggcacccggctggccggcccccagacagtgcagctgagcaagcccagcctggagaagcagacagtgaagagccacacagaaacagatgagaagcagacagagagcaggaccatcaccccacctgctgcccccaagcccaagcgggaggagaacccccagaagctggccttcatggtgtccctgggcctggtgacccatgaccacctggaggagatccagagcaagaggcaggagaggaagaggaggaccacagccaaccctgtgtacagcggggctgtgtttgagcctgagaggaagaagtctgctgtgacctacctgaacagcaccatgcaccctggcaccaggaagagggccaatgaggagcactggcccaagggggacatccacgaggacttctgcagcgtgtgcaggaagagcggccagctgctgatgtgtgacacctgcagccgggtgtaccacctggactgcctggacccccccctgaagaccatccccaagggcatgtggatctgcccccgctgccaggaccagatgctgaagaaggaggaggccatcccctggccaggcaccctggccatcgtgcacagctacatcgcctacaaggccgccaaggaggaggagaagcagaagctgctgaagtggagcagtgacctgaagcaggagcgggagcagctggagcagaaggtgaagcagctgagcaacagcatcagcaagtgcatggagatgaagaacaccatcctggcccggcagaaggagatgcacagcagcctggagaaggtgaagcagctgatccgcctcatccacggcatcgacctgagcaagcctgtggacagcgaggccaccgtgggcgccatcagcaatggaccagactgcaccccaccagccaatgctgccaccagcaccccagcccccagccccagcagccagagctgcacagccaactgcaaccagggcgaggagaccaagtag

SEQ ID NO: 192458 - DNA, 1905 bp, Artificial Sequence
  derived and/or modified sequence
atggagctgcagaccctgcaggaggccctgaaggtggagatccaggtccatcagaagctggttgctcaaatgaaacaggacccccagaatgccgacctgaagaagcagctgcatgaactccaagctaagattacggctctcagcgagaagcagaagcgagtggttgagcagcttcgtaaaaatcttatcgtcaagcaagaacagccggataagttccagatacaaccgctgcctcagtccgagaacaagctccaaacagctcagcagcaaccgttgcagcagctgcagcagcagcagcagtaccaccaccaccacgctcagcaaagcgcggccgcaagtcctaatctaaccgcaagtcagaagacggtcaccaccgcgtccatgatcaccaccaaaacattgcccttggtgttgaaggcggcaaccgccactatgccggcaagcgtggtggggcaaagacccactattgctatggttacggccatcaactcccagaaggccgtcctgagcaccgacgtacagaatacacctgtcaacctacagacatccagtaaagttacaggtccaggtgctgaggccgtgcagatcgtggcaaaaaacaccgtaacgctgcaggtacaggccactcccccccagcctataaaagtaccccagttcatcccccctcctagattaacaccaaggcccaatttcctcccccaggtgagaccgaagcccgtggcccagaacaatataccaatagcccctgcacccccacccatgttggccgctccacaattgattcagagacctgtgatgctcacaaagtttacaccaactaccctaccaacttctcagaatagcatccatcccgtgagagttgtaaacgggcagacagccacaatcgctaaaactttccccatggctcaactcacctccatcgtgattgcgacccccggaacccgcctggccggaccacagaccgtccaacttagcaagccttcccttgaaaaacaaactgtgaagagccacacagagacggatgagaagcagaccgagagccgtactattactccgcctgctgcacctaagccaaagcgggaagagaatccacagaaactagcctttatggtgtcattagggctggttacccacgaccatctggaagagattcagtctaagaggcaagaacggaagagacgaactacagctaatcccgtgtactctggtgctgtgtttgaaccagaacggaaaaaaagcgccgtgacgtaccttaactcaactatgcaccccggtacccgcaagagagcgaacgaggagcattggcctaagggggacatccatgaggatttttgtagcgtgtgtcgtaagagtggtcagttgctgatgtgcgatacctgttccagagtctatcatttggactgcctggatccccctctcaagaccatccccaagggcatgtggatctgccccaggtgtcaagaccagatgttaaagaaagaggaggccatcccctggccaggcacgctggcaattgtacactcctacattgcttacaaggctgccaaagaagaagaaaaacaaaagcttctgaagtggtccagcgacttgaagcaggagagggagcaactggagcagaaggtcaagcaactgtctaattcaatctccaaatgtatggagatgaagaacactattcttgcgagacaaaaagagatgcattccagtctcgaaaaggtcaagcaattgataaggttgatccatggaatagatctttccaaacctgtggattctgaggctaccgtcggcgccatcagcaatgggcccgactgcacccccccagctaatgccgcaactagcacacctgccccctccccatccagccagtcttgtaccgcgaactgcaaccagggagaggaaaccaaatag

SEQ ID NO: 192459 - DNA, 3675 bp, Artificial Sequence
  derived and/or modified sequence
gtgagagagagaggagaggagaggaggaggaggaggagggagaagggaacaacctaccatcttaacacactaatatctaaaaagtgcgagaggcccagagcagcagcagaagcagcagcagcagctccagcttcttccctccctccccatgaagaagagttccctcctcctcctcctcctgcttctcctgctcagagttcctgcctccagctgccaggggggacagccagccagcagcaggaggggggctagagagctgaaggagagccagtttccccaaaattgctgcagtgagaagaggagtttgttactttaaacagaggctgaagaaactatagaattagcagagaaagtggagaaggtagaggatggagttgcagactctacaggaggctcttaaagtggaaattcaggttcaccagaaactggttgctcaaatgaagcaggatccacagaatgctgacttaaagaaacagcttcatgaactccaagccaaaatcacagctttgagtgagaaacagaaaagagtagttgaacagctacggaagaacctgatagtaaagcaagaacaaccggacaagttccaaatacagccattgccacaatctgaaaacaaactacaaacagcacagcagcaaccactacagcaactacaacaacagcagcagtaccaccaccaccacgcccagcagtcagctgcagcctctcccaacctgactgcttcacagaagactgtaactacagcttctatgattaccacaaagacactacctctcgtcttgaaagcagcaactgcgaccatgcctgcctctgtggtgggccagagacctaccattgctatggtgaccgccatcaacagtcagaaggctgtgctcagcactgatgtgcagaacacaccagtcaacctccagacgtctagtaaggtcactgggcctggggcagaggctgtccaaattgtggcaaaaaacacagtcactctgcaggttcaggcaacacctcctcagcccatcaaagtaccacagtttatcccccctcctagactcactccacgtccaaactttcttccacaggttcgacccaagcctgtggcccagaataacattcctattgccccagcaccacctcccatgctcgcagctcctcagcttatccagaggcccgtcatgctgaccaagttcacccccacaacccttcccacatcccagaattccatccaccccgtccgtgtcgtcaatgggcagactgcaaccatagccaaaacgttccccatggcccagctcaccagcattgtgatagctactccagggaccagactcgctggacctcaaactgtacagcttagcaagccaagtcttgaaaaacagacagttaaatctcacacagaaacagatgagaaacaaacagagagccgcaccatcaccccacctgctgcacccaaaccaaaacgggaggagaaccctcagaaacttgccttcatggtgtctctagggttggtaacacatgaccatctagaagaaatccaaagcaagaggcaagagcgaaaaagaagaacaacagcaaatccggtctacagtggagcagtctttgagccagagcgtaagaagagtgcagtgacatacctaaacagcacaatgcaccctgggacccggaagagagccaatgaggaacactggccaaagggtgatattcatgaggatttttgcagcgtttgcagaaaaagtggccagttactgatgtgcgacacatgttcccgtgtatatcatttggactgcttagacccccctctgaaaacaattcccaagggcatgtggatctgtcccagatgtcaggaccagatgctgaagaaggaagaagcaattccatggcctggaactttagcaattgttcattcctatattgcctacaaagcagcaaaagaagaagagaaacagaagttacttaaatggagttcagatttaaaacaagaacgagaacaactagagcaaaaggtgaaacagctcagcaattccataagtaaatgcatggaaatgaagaacaccatcctggcccggcagaaggagatgcacagctccctggagaaggtaaaacagctgattcgcctcatccacggcatcgacctctccaaacctgtagactctgaggccactgtgggggccatctccaatggcccggactgcaccccccctgccaatgccgccacctccacgccggccccttccccctcctcccagagctgcacagcgaactgtaaccagggggaagagactaaataacagagcccctctaggagaagccacgggatcccggcggcaaggagaacagaacactgaagactctagaaaagcaaagccggatttctggaaagtgcagaattcttttggttctttggttccagagagagagaagatgcttgtgccaggtggcaccagagtttgccaattgatccttcttattctgtgtgtacatgcaaagattggaccatgttacatgaaatagtgccagctggaggttctttgccagcaccatgccaagtgaaataatatatttactctctctattatacaccagtgtgtgcctgcagcagcctccacagccacgatgggtttgtttctgttttcttgggtggggagcagggacgggcggagggaggagagcaggtttcagatccttacttgccgagccgtttgtttaggtagagaagacaagtccaaagagtgtgtgggctttcctgtttctaaactttcgctactataaaaccaaaaaaaggaattgagatttcaccaaccccagtgcccagaagagggaaggggagtggctggagggagcagggggtgggacagtgtatcaaataagcagtatttaatcacctctggcgggggcctcgtgcaaggggagactgacaccaagaacagccagtaggttcttctcccctgcactctgctccctgcgcggtaaccccaccactcctgaagcctgcccagtctccttccttccctgcttggtgagtcgcgcatctccgtggttatcccgctgtctcctctccaagaacaagcagagcccgggccactggcccttgcccaaggcagggaagaaggatgtgtgtgtccaggaaggaaaaaaaggtggatcagtgattttacttgaaaacaagctccatcccttttctatatttataagaagagaagatcttgagtgaagcagcacgcgacccaggtgtgtgtgaattgaatggagacgtttcttttctctttctttaatttttgtttttgttctttttttctttaaggaaagttttattttactgttcattttactttcttggtaacaaaaactaaaataaggaatagaaaagctgtttttcaggctgacagtccaattaagggtagccaagaccttgcatggtagagtaggaatcatagtgtcagtgaggtcccgtgagtctttgtgagtccttgtgtcatcgttcgggcactgtttttttatgcaagggcaaaaatctttgtatctggggaaaaaaaacttttttttaaattaaaaaggaaaataaaagatattgaggtcttcctagtgttacttaaattaagatcaaggtaagaaacattgtaaaaaaaaattacaaaagtgctatttgtttcctaaaaacagtgatttctattaaaaaggtgtcagaactgg

SEQ ID NO: 192460 - DNA, 1905 bp, Artificial Sequence
  derived and/or modified sequence
atggaactgcagactctacaggaagccttgaaggttgagatacaggtccaccagaagcttgtggcccagatgaaacaggaccctcagaatgctgatcttaagaagcagttacatgaacttcaggcgaagattaccgctctgtcggaaaagcagaagagggtggttgagcagctcaggaagaacctcattgtcaagcaggagcagcctgataagtttcagatacagccattgcctcagagtgagaataaactacagactgcacagcaacagcctctgcagcaactgcagcaacagcagcagtaccaccatcaccatgctcagcagtcagccgcagcctcccctaatctgacagcttcccagaaaacagtcacaaccgcgtctatgatcacaactaagaccttgccactggtgctaaaggccgctaccgccaccatgcccgcatctgtcgtaggtcaaaggcccacaatcgcgatggtaaccgcaataaatagccaaaaagcggttttgagtacagatgtacagaatacccccgtcaatctgcagaccagtagtaaagtaaccgggccaggtgcagaagccgtgcagatcgtggccaaaaacaccgtgaccttgcaagtgcaagccactccacctcaacccatcaaggtcccccagttcatccctccccctcgcctgacaccaagaccgaatttccttccacaggtgcggccaaaacccgtagcccagaacaacattccaatagcccctgccccacctccaatgctggccgcacctcaactgatccagcgcccagtcatgctgactaaatttacaccaacgactttgcccacgtcccaaaactccattcatcccgtccgtgttgtgaacgggcaaacagctactattgcaaaaacattccctatggcacagctcacctccatcgtgatcgcaactcctggtacccggcttgcagggccacaaaccgttcagctatcaaagccttctctcgaaaagcaaaccgtgaaatcacatactgagaccgacgagaagcagacagagtcccggaccatcacacctcccgcagcccctaaaccgaagagagaagagaacccgcaaaagctggcctttatggtgtcactggggctggtgactcatgaccacctggaggagatccagtccaagcggcaggagagaaaacggaggaccacagcgaatcccgtatacagcggggctgttttcgaaccagagagaaaaaagtccgcagtcacgtatctgaattccacaatgcaccccggtactcgaaagagagcaaatgaagaacactggccaaaaggggatatccacgaggatttttgcagcgtgtgcaggaagtcaggccagcttcttatgtgtgatacttgcagcagagtttatcaccttgattgcctcgatcctccccttaaaacaatccctaagggaatgtggatatgccccaggtgccaggaccagatgctgaaaaaggaggaggccattccctggcctgggaccctggcaatcgtgcatagttatatcgcctataaggcagctaaggaagaagaaaaacaaaagttgctgaaatggagtagtgacctgaagcaggagcgcgagcaacttgaacagaaagtgaaacagctctctaactccatctccaaatgtatggaaatgaaaaataccatactggctcggcagaaagagatgcacagcagcctagaaaaagtaaaacagcttataagacttattcatggcatagacctgtccaaacctgtggatagcgaagcaaccgttggggctatttccaacggtcccgactgtactcctcccgcaaatgctgctacatccaccccagcaccgagtcctagctcgcagagctgcaccgctaactgtaaccagggcgaggagacgaagtag

SEQ ID NO: 192461 - DNA, 1905 bp, Artificial Sequence
  derived and/or modified sequence
atggagctgcagaccctgcaggaggccctgaaggtggagatccaggtgcaccagaagctggtggcccagatgaagcaggacccccagaacgccgacctgaagaagcagctgcacgagctgcaggccaagatcaccgccctgagcgagaagcagaagagagtggtggagcagctgagaaagaacctgatcgtgaagcaggagcagcccgacaagttccagatccagcccctgccccagagcgagaacaagctgcagaccgcccagcagcagcccctgcagcagctgcagcagcagcagcagtaccaccaccaccacgcccagcagagcgccgccgccagccccaacctgaccgccagccagaagaccgtgaccaccgccagcatgatcaccaccaagaccctgcccctggtgctgaaggccgccaccgccaccatgcccgccagcgtggtgggccagagacccaccatcgccatggtgaccgccatcaacagccagaaggccgtgctgagcaccgacgtgcagaacacccccgtgaacctgcagaccagcagcaaggtgaccggccccggcgccgaggccgtgcagatcgtggccaagaacaccgtgaccctgcaggtgcaggccacccccccccagcccatcaaggtgccccagttcatccccccccccagactgacccccagacccaacttcctgccccaggtgagacccaagcccgtggcccagaacaacatccccatcgcccccgcccccccccccatgctggccgccccccagctgatccagagacccgtgatgctgaccaagttcacccccaccaccctgcccaccagccagaacagcatccaccccgtgagagtggtgaacggccagaccgccaccatcgccaagaccttccccatggcccagctgaccagcatcgtgatcgccacccccggcaccagactggccggcccccagaccgtgcagctgagcaagcccagcctggagaagcagaccgtgaagagccacaccgagaccgacgagaagcagaccgagagcagaaccatcaccccccccgccgcccccaagcccaagagagaggagaacccccagaagctggccttcatggtgagcctgggcctggtgacccacgaccacctggaggagatccagagcaagagacaggagagaaagagaagaaccaccgccaaccccgtgtacagcggcgccgtgttcgagcccgagagaaagaagagcgccgtgacctacctgaacagcaccatgcaccccggcaccagaaagagagccaacgaggagcactggcccaagggcgacatccacgaggacttctgcagcgtgtgcagaaagagcggccagctgctgatgtgcgacacctgcagcagagtgtaccacctggactgcctggacccccccctgaagaccatccccaagggcatgtggatctgccccagatgccaggaccagatgctgaagaaggaggaggccatcccctggcccggcaccctggccatcgtgcacagctacatcgcctacaaggccgccaaggaggaggagaagcagaagctgctgaagtggagcagcgacctgaagcaggagagagagcagctggagcagaaggtgaagcagctgagcaacagcatcagcaagtgcatggagatgaagaacaccatcctggccagacagaaggagatgcacagcagcctggagaaggtgaagcagctgatcagactgatccacggcatcgacctgagcaagcccgtggacagcgaggccaccgtgggcgccatcagcaacggccccgactgcaccccccccgccaacgccgccaccagcacccccgcccccagccccagcagccagagctgcaccgccaactgcaaccagggcgaggagaccaagtag

SEQ ID NO: 192462 - protein, 334 aa, Artificial Sequence
  derived and/or modified sequence
MGRRSSDTEEESRSKRKKKHRRRSSSSSSSDSRTYSRKKGGRKSRSKSRSWSRDLQPRSHSYDRRRRHRSSSSSSYGSRRKRSRSRSRGRGKSYRVQRSRSKSRTRRSRSRPRLRSHSRSSERSSHRRTRSRSRDRERRKGRDKEKREKEKDKGKDKELHNIKRGESGNIKAGLEHLPPAEQAKARLQLVLEAAAKADEALKAKERNEEEAKRRKEEDQATLVEQVKRVKEIEAIESDSFVQQTFRSSKEVKKSVEPSEVKQATSTSGPASAVADPPSTEKEIDPTSIPTAIKYQDDNSLAHPNLFIEKADAEEKWFKRLIALRQERLMGSPVA

SEQ ID NO: 192463 - protein, 203 aa, Artificial Sequence
  derived and/or modified sequence
MGRRSSDTEEESRSKRKKKHRRRSSSSSSSDSRTYSRKKGGRKSRSKSRSWSRDLQPRSHSYDRRRRHRSSSSSSYGSRRKRSRSRSRGRGKSYRVQRSRSKSRTRRSRSRPRLRSHSRSSERSSHRRTRSRSRDRERRKGRDKEKREKEKDKGKDKELHNIKRGESGNIKAGLEHLPPAEQAKARLQLVLEAAAKADEALKA

SEQ ID NO: 192464 - protein, 194 aa, Artificial Sequence
  derived and/or modified sequence
MGRRSSDTEEESRSKRKKKHRRRSSSSSSSDSRTYSRKKGGRKSRSKSRSWSRDLQPRSHSYDRRRRHRSSSSSSYGSRRKRSRSRSRGRGKSYRVQRSRSKSRTRRSRSRPRLRSHSRSSERSSHRRTRSRSRDRERRKGRDKEKREKEKDKGKDKELHNIKRGESGNIKAGLEHLPPAEQAKARLQLVLEAA

SEQ ID NO: 192465 - DNA, 1005 bp, Artificial Sequence
  derived and/or modified sequence
atgggcagaagatcttccgatacggaagaggagtcccgcagcaagcgaaagaagaagcaccgccgaagaagctcctctagcagtagctccgacagccggacctactcccggaaaaaggggggtcgtaagtcacgatctaagtctaggagctggtctcgggatcttcaaccccggtctcactcctacgacaggcggaggcggcacagatcctccagctcaagttcctatggaagcaggaggaagagaagtaggagccgatctagagggaggggtaagagctatagagtgcagcggtcaaggtccaagagccggacgcggcggtcgagatcgaggccacgacttaggtcacattcccggtctagtgagcgatccagtcaccggagaacgaggagccgttctagggaccgggagcgacgcaaggggagggacaaggagaagagggagaaggagaaagataagggcaaggataaggagctgcacaacattaagcgcggtgagagcggaaacataaaggccggcctggaacatctgccacctgccgagcaggccaaggcccgcctgcagcttgtcctagaggccgccgctaaagcggacgaagccctaaaagctaaagagaggaatgaagaagaagcgaagaggaggaaagaggaagaccaagcaactctcgtggaacaggtgaaaagagtgaaggagatcgaggctattgagtcggactcattcgtgcagcaaaccttcagatctagcaaggaagtgaagaaatctgtagagccttccgaggtgaaacaggcaactagcaccagcgggccggcatcagccgtcgccgaccccccatccaccgagaaagaaatcgatcccactagcatacctactgccattaaataccaagacgataactccctggcacatccgaatctgttcattgagaaggccgacgctgaggaaaaatggtttaagcgactgatcgcgctgcggcaggagcggctcatggggagcccagtggcttag

SEQ ID NO: 192466 - DNA, 612 bp, Artificial Sequence
  derived and/or modified sequence
atggggagaagatcctccgatacggaggaagagtccaggagtaaaagaaagaaaaaacaccggcgtcgaagctcttcaagctcgtctagtgacagccggacctacagtaggaagaagggcggcagaaagagtcgctcaaagagccggagttggtcccgagacctacagcctaggtcccactcctatgaccggcggcgccgacatcggtctagttcttcatcttcctacggatccaggagaaagagaagtcgcagccgatcaaggggccgaggtaaaagctatagggtccagcggtcccgtagtaagtccaggacgagacgctcaaggtcaaggcctcggctgagatcccatagtcggagctctgagagatcatcccaccggcggaccaggtcaaggtcccgcgacagggagcggcggaaaggcagagataaggaaaagcgggagaaggagaaggacaagggcaaggacaaagagctgcacaacataaagcgtggagagagcggtaacatcaaggccgggctggaacacctacctcccgctgagcaggccaaagcaaggttgcagctcgtcttggaagccgccgctaaggcagatgaagccctcaaagcctag

SEQ ID NO: 192467 - DNA, 585 bp, Artificial Sequence
  derived and/or modified sequence
atgggtcggagaagctcggacaccgaggaggaaagcagatcaaagaggaagaaaaagcaccgacgtagaagcagctcgtcatctagctccgactcgaggacttactcccgcaagaaagggggcagaaagtccagaagcaagtcccgcagctggtcacgtgatctccagccgcgctcacacagctacgatcggaggcggaggcatagaagctccagctcttcctcttacggaagcaggcgcaagcgctccagaagtcggagccgggggcgagggaagagttaccgggtccagaggagccggtcgaaatctagaacccgtcgcagccggtcacggccccgtttgaggtcacacagccgcagcagcgagaggtctagccatagaaggacccgttctaggagccgggatagagaacgacgcaagggccgtgacaaagagaagagagagaaggagaaagacaaagggaaggacaaggagcttcacaacatcaagcggggtgagtccggtaacatcaaagcaggcttagagcacctgccgccagccgagcaggcaaaggcaagactgcaactggtccttgaggccgcttag

SEQ ID NO: 192468 - DNA, 1005 bp, Artificial Sequence
  derived and/or modified sequence
atgggtcggcgctcctctgatactgaggaagaatcccgctccaagcgcaagaaaaagcatcgccgccgatcttccagctcctcttcgtcagactccaggacctacagccgcaaaaagggaggtcggaagtcccgttcgaagtctcgctcgtggtctcgggacctacaacccagatcacacagctatgacaggaggcgtaggcatagatctagtagttcatcatcctacggctctcgtaggaagagaagtaggtctaggtctagaggaagggggaagagctacagagttcaacgtagtcgatcgaaaagccgaacccggcggagtcgttcgagaccaagactccggagccactcccgtagtagcgagagaagcagtcataggagaacaagaagccgctccagggatagagaacgtcgcaaaggtagggataaggagaagcgagaaaaggagaaggataaaggcaaagacaaagagctccacaacatcaagagaggcgaatccggcaacatcaaggccggtttagagcatcttccccccgcggaacaggccaaggcgcggttacagctggttttggaggcggcggccaaagccgacgaggccctgaaagctaaggaaagaaatgaagaagaagccaaacgcaggaaggaggaagaccaggcaacgctcgtagaacaagtgaagagggtcaaagaaattgaagccatcgaaagcgactcttttgttcagcagacctttaggtctagcaaggaggtgaaaaagtcagtcgagcctagcgaggtcaaacaggctacgtctacgtccggacctgcctcggctgtcgccgatcctccgtcaacggagaaggagattgaccccacttcgatccccaccgcaattaagtatcaggatgacaattccctcgcccatcccaacctctttatcgagaaggcagacgcagaagaaaaatggttcaaacgcctgatcgccctgagacaggaacggctgatggggtccccagtggcctag

SEQ ID NO: 192469 - DNA, 1005 bp, Artificial Sequence
  derived and/or modified sequence
atgggcagaagaagcagtgacacagaggaggagagccgcagcaagaggaagaagaagcacagaagaagaagcagcagcagcagcagcagtgacagcaggacctacagcaggaagaagggcggcaggaagagccgcagcaagagccgctcctggagccgggacctgcagcccaggagccacagctatgacagaagaagaagacacaggagcagcagcagcagcagctatggcagcaggaggaagaggagccgcagccgcagccggggccggggcaagagctacagagtgcagaggagccgcagcaagagcaggacccggcgcagccgcagccggccccggctgcggagccacagccgcagcagcgagaggagcagccacaggaggaccaggagccgcagccgggaccgggagaggaggaagggccgggacaaggagaagcgggagaaggagaaggacaagggcaaggacaaggagctgcacaacatcaagagaggagagagcggcaacatcaaggccggcctggagcacctgcccccagctgagcaggccaaggcccggctgcagctggtgctggaggccgccgccaaggcagatgaggccctgaaggccaaggagagaaatgaggaggaggccaagaggaggaaggaggaggaccaggccaccctggtggagcaggtgaagagggtgaaggagattgaggccattgaaagtgacagctttgtgcagcagaccttccgcagcagcaaggaggtgaagaagtctgtggagcccagcgaggtgaagcaggccaccagcaccagcggccctgccagcgctgtggccgacccccccagcacagagaaggagattgaccccaccagcatccccacagccatcaagtaccaggatgacaacagcctggcccaccccaacctcttcatcgagaaggcagatgctgaggagaagtggttcaagaggctgattgccctgcggcaggagcggctgatgggcagccctgtggcctag

SEQ ID NO: 192470 - DNA, 612 bp, Artificial Sequence
  derived and/or modified sequence
atgggcagaagaagcagtgacacagaggaggagagccgcagcaagaggaagaagaagcacagaagaagaagcagcagcagcagcagcagtgacagcaggacctacagcaggaagaagggcggcaggaagagccgcagcaagagccgctcctggagccgggacctgcagcccaggagccacagctatgacagaagaagaagacacaggagcagcagcagcagcagctatggcagcaggaggaagaggagccgcagccgcagccggggccggggcaagagctacagagtgcagaggagccgcagcaagagcaggacccggcgcagccgcagccggccccggctgcggagccacagccgcagcagcgagaggagcagccacaggaggaccaggagccgcagccgggaccgggagaggaggaagggccgggacaaggagaagcgggagaaggagaaggacaagggcaaggacaaggagctgcacaacatcaagagaggagagagcggcaacatcaaggccggcctggagcacctgcccccagctgagcaggccaaggcccggctgcagctggtgctggaggccgccgccaaggcagatgaggccctgaaggcctag

SEQ ID NO: 192471 - DNA, 585 bp, Artificial Sequence
  derived and/or modified sequence
atgggcagaagaagcagtgacacagaggaggagagccgcagcaagaggaagaagaagcacagaagaagaagcagcagcagcagcagcagtgacagcaggacctacagcaggaagaagggcggcaggaagagccgcagcaagagccgctcctggagccgggacctgcagcccaggagccacagctatgacagaagaagaagacacaggagcagcagcagcagcagctatggcagcaggaggaagaggagccgcagccgcagccggggccggggcaagagctacagagtgcagaggagccgcagcaagagcaggacccggcgcagccgcagccggccccggctgcggagccacagccgcagcagcgagaggagcagccacaggaggaccaggagccgcagccgggaccgggagaggaggaagggccgggacaaggagaagcgggagaaggagaaggacaagggcaaggacaaggagctgcacaacatcaagagaggagagagcggcaacatcaaggccggcctggagcacctgcccccagctgagcaggccaaggcccggctgcagctggtgctggaggccgcctag

SEQ ID NO: 192472 - DNA, 1005 bp, Artificial Sequence
  derived and/or modified sequence
atgggccggcggagcagcgacaccgaggaggagagccggagcaagcgtaagaagaagcataggagaagaagctcatcctcatcctctagcgacagcaggacgtactcccgcaagaagggaggaaggaagagccggtccaagagtcgatcatggtctcgcgacctccagccaagatcgcattcttatgataggcgccgtagacatcgctcttcctcatcttcatcctatggcagcagacgcaagcgtagccgtagcaggagtaggggtagggggaaaagctatcgggtgcagaggtcaaggagcaagagccgaactcggcgttctcgctcccgacccaggctgagaagccacagccggagctcggaacgctctagtcaccggcgcacacgctcccgttctcgcgatcgcgaacggcgcaagggcagagataaggaaaagcgcgaaaaggaaaaggataaagggaaggacaaagagctacataatatcaagaggggggagtcaggcaatattaaggcaggattagagcacctgccacctgccgagcaagcgaaggcccgcctgcagctggtgctcgaggctgccgctaaggccgatgaggcgctgaaggccaaagagcgaaacgaagaggaggcaaagcgaaggaaagaggaggaccaggcgacacttgtggagcaagtcaaaagagtgaaggagatcgaggccattgagagcgatagctttgtgcagcagactttccggtcctccaaggaggttaaaaagtccgttgagccgagcgaagtgaagcaagctacatcgaccagtggaccagctagcgcggtggctgaccccccatcaacagaaaaggaaatcgaccccacaagcatccccacggccatcaagtaccaggatgataattcgctcgcgcaccctaacctattcattgagaaggccgatgcggaggaaaagtggtttaagaggttgatcgcactccggcaggaacggctcatgggttccccagtggcctag

SEQ ID NO: 192473 - DNA, 612 bp, Artificial Sequence
  derived and/or modified sequence
atgggccggcggagcagcgacaccgaggaggagagccggagcaagcggaagaagaagcacaggcggcgtagtagctcctcaagcagctccgatagtaggacctattcacggaaaaagggcggcaggaagtcccggagcaaatccaggtcatggtctcgtgaccttcaaccaagaagtcacagttatgacaggcggcgccgtcacaggtcttccagtagctcctcctacggtagcaggcggaagcgcagccggtcccggagcagaggacgagggaagagctacagggtccagagatctcggagcaagtcccggaccaggcggtccaggagccgccctcgcctccggtcccactcgagatcctctgagcgttcctcacaccgcagaactcgtagtagatcacgtgaccgcgagaggaggaagggccgtgacaaagaaaagcgcgagaaagaaaaagacaaggggaaggataaagaactgcacaatattaaacgtggtgagtccggcaacataaaagctggattggaacatttgccacctgcagagcaggctaaagcccgcctccagctggtgctggaggcggccgcgaaggcagatgaggcactgaaggcctag

SEQ ID NO: 192474 - DNA, 585 bp, Artificial Sequence
  derived and/or modified sequence
atgggccggcggagcagcgacaccgaggaggagagccggagcaagcgaaaaaaaaagcaccgaaggagatctagctcatctagctccagcgattcgcgtacttattcgcggaagaagggaggaagaaaaagcagatcaaaaagccggagctggtcccgggacctgcagcctcgatcacattcttatgaccgcaggaggaggcaccgctccagcagctcttcgtcttatggctcaagaagaaagaggtctcggtcaaggagcagaggtcggggtaagtcttatcgcgtgcagcggagccggtccaagtcccggacacgccggagtcgcagcaggccacgcttacgttctcacagccggagtagtgaacgatcctctcaccggcgcacaaggtcgcgctcacgagatcgggaacggaggaaaggtagagataaagagaaaagggaaaaagaaaaagacaagggcaaagacaaggaattacacaatataaaaaggggtgagagcggtaatattaaagccggtctcgagcacctacctccagccgagcaagcaaaagcccggttacagctggtgttggaggccgcatag

SEQ ID NO: 192475 - DNA, 1005 bp, Artificial Sequence
  derived and/or modified sequence
atgggccggcggagcagcgacaccgaggaggagagccggagcaagagaaaaaaaaagcatagacggcggtcttcttccagttcatcctccgacagcagaacttattcacgcaaaaagggtggtagaaaaagccggagtaaaagtagatcttggagccgagatttacagcctagaagtcattcttacgacaggcggcgccgtcatcgctcctcctccagtagcagctatggtagtaggaggaagaggagtagaagccgctcccgaggtcgcgggaagtcctaccgggtgcagagatcccgcagcaagagccgtactcgaagaagccggtcaagacctagacttaggagccatagcagatccagcgagcgaagctcccaccgacggacacggtcccgatcccgggacagagaaaggcggaaaggccgggacaaagaaaaacgcgagaaggaaaaagataagggcaaggacaaggagctccacaatatcaagcggggcgaaagcggcaacatcaaagcggggttagagcacttgcctccagcagaacaggccaaggctaggctgcagctggtgttggaagcagcagcaaaagccgacgaggccctgaaggcgaaggagcggaacgaagaggaagccaaaagaaggaaggaggaagaccaagccacacttgttgaacaggttaagcgcgtcaaggagattgaggcgatcgagtccgattcttttgtccagcagacattccgctcttctaaagaggtgaagaaatctgtcgagccctctgaggtaaagcaggcaacctctacaagtggtcctgcaagcgccgtcgctgatcccccatccaccgagaaggagattgatcccacgagtattccaactgcaattaaataccaggacgataacagccttgcccatcctaatttattcatcgaaaaggccgacgctgaagaaaagtggtttaaaaggctgatagctcttaggcaagagaggttgatgggtagtccggtggcctag

SEQ ID NO: 192476 - DNA, 1005 bp, Artificial Sequence
  derived and/or modified sequence
atgggaagacgctcctccgatacagaggaagagagccgcagcaaaagaaagaagaaacatcgcaggcgatctagttcctctagcagctccgactcccgaacctactcgagaaagaaaggaggccgaaagtcccgcagtaagtctcggagttggtccagggatctgcagcctcgcagccacagttacgaccgtaggcgcaggcatcgtagcagttctagctctagctatggttcccgcagaaaacggtcacggtctagatctcggggacgcggtaagagctaccgggtccagcgatcaagatcaaagtcacggacaagacgctctcggagcaggcccaggctgcggtcgcacagtagatcgagcgagagatcatcccatcggagaacaagaagcaggagcagggatcgcgagcgacggaagggtagagataaagagaaacgtgaaaaagaaaaagataaagggaaagataaggagctgcacaacatcaagagaggcgaatccgggaacataaaagcaggcctcgagcacctgccccctgcagagcaagcaaaagcaagactgcagctggtcctggaggccgctgccaaagccgatgaagccttgaaagccaaagagagaaatgaggaagaggccaaaagacggaaggaggaagaccaggctaccttggttgagcaggtaaagcgagttaaggagatcgaggctatcgagagcgacagctttgtgcagcagacctttcgctcgtctaaagaggtgaagaaatctgtcgaaccatcagaagtgaagcaggccactagtacctcaggtccagctagtgctgtcgccgatcctccgtcaacagagaaggaaatagacccgacaagtatccctactgcaattaagtatcaggacgacaatagtttggcacacccgaacctgttcatcgagaaggccgacgccgaagagaagtggtttaagcgcctgatcgcgctgcggcaggagcggctgatgggttctccggtcgcctag

SEQ ID NO: 192477 - DNA, 612 bp, Artificial Sequence
  derived and/or modified sequence
atggggcgacgctcttcagacacggaggaagagtctcggagcaagcgcaagaagaaacaccgaaggaggagcagctcttcttccagctcagactcccgtacttatagtagaaagaaaggcggaagaaagagtcgcagcaaatcccgctcctggtctagggacctccagcctaggagccattcatacgacagaagacgccgtcatcgaagctcctccagctccagttatggcagccggaggaaacgctccagatcacgctcccgagggagagggaagagttatagagtgcaacgctctaggagcaagtcacgaacaaggcgtagcaggagtcggccacgccttcggtcccacagccggtcctccgaaagaagtagccacaggagaacacgttccaggtctcgggaccgggagaggcgtaaggggcgtgacaaggagaaacgtgaaaaagagaaagataagggcaaggataaagaactacacaacataaaaagaggggagtccggaaacataaaagccggattggaacacttgcccccagctgaacaggccaaggctcgactccaactcgtcctcgaggccgcagctaaagctgacgaggcgctgaaagcgtag

SEQ ID NO: 192478 - DNA, 585 bp, Artificial Sequence
  derived and/or modified sequence
atgggtcgacggtcttccgatactgaggaagaatcacggtctaagcgaaaaaaaaagcaccgcaggaggagctctagctcctcttcaagtgactctaggacttattccagaaagaagggcggtcgcaagagtcgtagtaagtcgcgatcttggagcagagacctgcaaccacgcagccattcctatgatcggaggaggcggcatagatcctcttcctcttcatcctacggttcccgcaggaagaggtcacggtcgcgcagcaggggcaggggaaagtcgtatcgtgttcagcggagcagaagtaagtctagaactagaaggtctagaagccggccacgcctgcgctcccacagccgctcctccgaaaggagctctcacagacgtacgcgcagcaggtctcgggatcgcgaaaggagaaaaggtagagacaaggagaagcgtgagaaagagaaggacaaagggaaagacaaagaactgcataacattaagcgcggagaatcggggaacatcaaagctggactggagcatctgccgcctgctgagcaggcaaaggcacgactccagctggtcctcgaggcagcttag

SEQ ID NO: 192479 - DNA, 1005 bp, Artificial Sequence
  derived and/or modified sequence
atgggcagaaggtcgtccgacacagaggaggagagcagatcgaagagaaaaaaaaagcatagaagacgatcgagctcctcttcttcgagcgacagtcgcacctattccagaaaaaaaggaggcagaaaatccaggtccaaaagcagatcatggtctcgcgacttacagccccgttcccactcttatgaccgaagacgaaggcataggagctcgtctagtagcagctatggaagccgcaggaaacgcagcagaagtcgttcccgtggaagaggcaagtcctacagggtgcagcgaagcagaagcaagtctagaaccaggaggagcagatcccgacctcgcctgagatcgcatagtcgcagttccgagcgttctagtcaccggagaactagaagccgctctagagacagagaacgtcggaagggtcgggacaaagagaaaagggaaaaagagaaggacaagggtaaagacaaagagttacataacatcaaacgcggagagtccggaaatatcaaggcagggttggagcatttaccacctgccgagcaggctaaagctcgtctgcagctcgtcctcgaagccgcagcaaaggccgatgaggctcttaaagcaaaggaacgaaacgaagaagaagctaagcggagaaaggaggaggatcaggccacgctggtagagcaggtgaaacgcgtgaaagagatagaggccatcgagtccgacagtttcgtccaacaaactttcaggtcgtccaaagaagtgaagaaaagcgtcgagccatcggaggtgaagcaggctacgtcaacctctgggcctgcgtcagctgtggctgacccgccatccaccgaaaaggaaattgatcccacatcaattcccaccgcaatcaagtatcaggatgacaactccctcgcacacccaaacctctttattgaaaaggccgacgccgaggaaaagtggttcaagagactgatcgccctgcggcaagagagattaatgggcagtcctgttgcttag

SEQ ID NO: 192480 - DNA, 1727 bp, Artificial Sequence
  derived and/or modified sequence
gatgcactcgatatctcggctgaagctgcctggcgctagaaccaggaaggcgctgagcttaaactgaagcaagttcggtggacgccggcggcgccctgatctaaagaaacgactcagggactgcggcgcttgcacgtcaacgggaggtgtgagcccaaagaaatgggacgtcggtcatcagatactgaagaagaaagcagaagcaagagaaaaaagaaacaccgtagacggtcctcctcgagcagttcttcagatagtagaacatacagccgaaagaaaggaggaaggaaatcaagatcaaagtcaagatcttggtccagagatcttcagcctcgttcacattcttatgatagaagacgcaggcatcgatcaagcagtagctcttcttatggctccagaaggaaacgaagtcgaagtcgttcaaggggtcgagggaaatcctatagagttcagaggtctaggtcaaaaagcagaacaagaaggtccaggtcaagacctcgtctccgttctcatagtcgtagcagtgaaaggtccagtcacagaagaacgcgtagtcggtctcgggatagagaacgacgtaagggcagagataaagagaaaagagaaaaggagaaggataaagggaaggacaaggaattacataacatcaaacgtggggaatctggaaacatcaaagctggattagaacatctgccaccagctgaacaggccaaagccagactacagctggttcttgaagctgctgcaaaagctgatgaagcattgaaagccaaagaaagaaatgaggaagaagcaaagagaagaaaggaggaagaccaagccaccctggtagaacaagtaaaaagagtaaaagaaattgaagctattgaaagtgattcttttgttcagcagacattcagatcaagtaaagaagtcaaaaagtcagtggaacctagtgaagtgaaacaagcaacttcaacatcaggaccagcatcagcagttgctgatccacccagtactgaaaaagaaatagatcctaccagcatccctactgctatcaagtaccaagatgacaattccctggcccatccaaatttatttatcgagaaagctgatgctgaggaaaaatggttcaagagattaattgctctccgacaagaaagactaatgggcagtcctgtggcctaagtaatatacatatagttggattggattgtcagcagtaacattggaaatttaggtttttaaatcccaatattaactttttactcttaaaaagaattttgctgattatatataaaggtagtctcatttcatttgtctctcatgtaggcttgaatatttgttaatttgaattaaatcaaacattgtaaaaattaaaacaaaatttaagattgcatgaaaatgttatactgttaataaagctaaacataaataagtctgttaaaatgaatggtagacactagtgtttcttagtgcaattcaaaaaatgtcaagatgtcatttaaagacacaattttgattaattatgcatacatgagaattgaattacatgctataaatatgagatttcatcttccgtatggtattcaaccatttttaaatattttatttcaccatattgcaaatttttaggcacaataaaaagcaccctaaacaatgtaagcagaatgtgcatgttaaagaacatatttatggaaaaaaaatttttgaaacttaaataaattggtgattttgcttagagatca

SEQ ID NO: 192481 - DNA, 769 bp, Artificial Sequence
  derived and/or modified sequence
cggctgaagctgcctggcgctagaaccaggaaggcgctgagcttaaactgaagcaagttcggtggacgccggcggcgccctgatctaaagaaacgactcagggactgcggcgcttgcacgtcaacgggaggtgtgagcccaaaggtctggacccagaaatgggacgtcggtcatcagatactgaagaagaaagcagaagcaagagaaaaaagaaacaccgtagacggtcctcctcgagcagttcttcagatagtagaacatacagccgaaagaaaggaggaaggaaatcaagatcaaagtcaagatcttggtccagagatcttcagcctcgttcacattcttatgatagaagacgcaggcatcgatcaagcagtagctcttcttatggctccagaaggaaacgaagtcgaagtcgttcaaggggtcgagggaaatcctatagagttcagaggtctaggtcaaaaagcagaacaagaaggtccaggtcaagacctcgtctccgttctcatagtcgtagcagtgaaaggtccagtcacagaagaacgcgtagtcggtctcgggatagagaacgacgtaagggcagagataaagagaaaagagaaaaggagaaggataaagggaaggacaaggaattacataacatcaaacgtggggaatctggaaacatcaaagctggattagaacatctgccaccagctgaacaggccaaagccagactacagctggttcttgaagctgctgcaaaagctgatgaagcattgaaagccaa

SEQ ID NO: 192482 - DNA, 788 bp, Artificial Sequence
  derived and/or modified sequence
ggctccggactccttgggtcaaggctggtggctgtagggtgggtgggtggccgcaggcctcaagcttggccttctgtcttgaggacatgtcggagagttcgccgactcctcccctcgccccacgttcctggttcttcatagctgcttttgggtttcctggctcatcttgcaatataagcctggcgcttcctcactagctctagaaatgggacgtcggtcatcagatactgaagaagaaagcagaagcaagagaaaaaagaaacaccgtagacggtcctcctcgagcagttcttcagatagtagaacatacagccgaaagaaaggaggaaggaaatcaagatcaaagtcaagatcttggtccagagatcttcagcctcgttcacattcttatgatagaagacgcaggcatcgatcaagcagtagctcttcttatggctccagaaggaaacgaagtcgaagtcgttcaaggggtcgagggaaatcctatagagttcagaggtctaggtcaaaaagcagaacaagaaggtccaggtcaagacctcgtctccgttctcatagtcgtagcagtgaaaggtccagtcacagaagaacgcgtagtcggtctcgggatagagaacgacgtaagggcagagataaagagaaaagagaaaaggagaaggataaagggaaggacaaggaattacataacatcaaacgtggggaatctggaaacatcaaagctggattagaacatctgccaccagctgaacaggccaaagccagactacagctggttcttgaagctgctg

SEQ ID NO: 192483 - DNA, 1410 bp, Artificial Sequence
  derived and/or modified sequence
cggactgccgggctgctgcggtcgtcgcggcccgcctcggtgcagccggtcggctccttggccccgcgcagcggcccgctctccagcacctcccggtacgtgatcgcctccttcttctccttcactttctggtcaaaagacttggagacgaacgccaaatgggacgtcggtcatcagatactgaagaagaaagcagaagcaagagaaaaaagaaacaccgtagacggtcctcctcgagcagttcttcagatagtagaacatacagccgaaagaaaggaggaaggaaatcaagatcaaagtcaagatcttggtccagagatcttcagcctcgttcacattcttatgatagaagacgcaggcatcgatcaagcagtagctcttcttatggctccagaaggaaacgaagtcgaagtcgttcaaggggtcgagggaaatcctatagagttcagaggtctaggtcaaaaagcagaacaagaaggtccaggtcaagacctcgtctccgttctcatagtcgtagcagtgaaaggtccagtcacagaagaacgcgtagtcggtctcgggatagagaacgacgtaagggcagagataaagagaaaagagaaaaggagaaggataaagggaaggacaaggaattacataacatcaaacgtggggaatctggaaacatcaaagctggattagaacatctgccaccagctgaacaggccaaagccagactacagctggttcttgaagctgctgcaaaagctgatgaagcattgaaagccaaagaaagaaatgaggaagaagcaaagagaagaaaggaggaagaccaagccaccctggtagaacaagtaaaaagagtaaaagaaattgaagctattgaaagtgattcttttgttcagcagacattcagatcaagtaaagaagtcaaaaagtcagtggaacctagtgaagtgaaacaagcaacttcaacatcaggaccagcatcagcagttgctgatccacccagtactgaaaaagaaatagatcctaccagcatccctactgctatcaagtaccaagatgacaattccctggcccatccaaatttatttatcgagaaagctgatgctgaggaaaaatggttcaagagattaattgctctccgacaagaaagactaatgggcagtcctgtggcctaagtaatatacatatagttggattggattgtcagcagtaacattggaaatttaggtttttaaatcccaatattaactttttactcttaaaaagaattttgctgattatatataaaggtagtctcatttcatttgtctctcatgtaggcttgaatatttgttaatttgaattaaatcaaacattgtaaaaattaaaacaaaatttaagattgcatgaaaatgttatactgttaataaagctaaacataaa

SEQ ID NO: 192484 - DNA, 1005 bp, Artificial Sequence
  derived and/or modified sequence
atgggcagaagaagcagcgacaccgaggaggagagcagaagcaagagaaagaagaagcacagaagaagaagcagcagcagcagcagcagcgacagcagaacctacagcagaaagaagggcggcagaaagagcagaagcaagagcagaagctggagcagagacctgcagcccagaagccacagctacgacagaagaagaagacacagaagcagcagcagcagcagctacggcagcagaagaaagagaagcagaagcagaagcagaggcagaggcaagagctacagagtgcagagaagcagaagcaagagcagaaccagaagaagcagaagcagacccagactgagaagccacagcagaagcagcgagagaagcagccacagaagaaccagaagcagaagcagagacagagagagaagaaagggcagagacaaggagaagagagagaaggagaaggacaagggcaaggacaaggagctgcacaacatcaagagaggcgagagcggcaacatcaaggccggcctggagcacctgccccccgccgagcaggccaaggccagactgcagctggtgctggaggccgccgccaaggccgacgaggccctgaaggccaaggagagaaacgaggaggaggccaagagaagaaaggaggaggaccaggccaccctggtggagcaggtgaagagagtgaaggagatcgaggccatcgagagcgacagcttcgtgcagcagaccttcagaagcagcaaggaggtgaagaagagcgtggagcccagcgaggtgaagcaggccaccagcaccagcggccccgccagcgccgtggccgacccccccagcaccgagaaggagatcgaccccaccagcatccccaccgccatcaagtaccaggacgacaacagcctggcccaccccaacctgttcatcgagaaggccgacgccgaggagaagtggttcaagagactgatcgccctgagacaggagagactgatgggcagccccgtggcctag

SEQ ID NO: 192485 - DNA, 612 bp, Artificial Sequence
  derived and/or modified sequence
atgggcagaagaagcagcgacaccgaggaggagagcagaagcaagagaaagaagaagcacagaagaagaagcagcagcagcagcagcagcgacagcagaacctacagcagaaagaagggcggcagaaagagcagaagcaagagcagaagctggagcagagacctgcagcccagaagccacagctacgacagaagaagaagacacagaagcagcagcagcagcagctacggcagcagaagaaagagaagcagaagcagaagcagaggcagaggcaagagctacagagtgcagagaagcagaagcaagagcagaaccagaagaagcagaagcagacccagactgagaagccacagcagaagcagcgagagaagcagccacagaagaaccagaagcagaagcagagacagagagagaagaaagggcagagacaaggagaagagagagaaggagaaggacaagggcaaggacaaggagctgcacaacatcaagagaggcgagagcggcaacatcaaggccggcctggagcacctgccccccgccgagcaggccaaggccagactgcagctggtgctggaggccgccgccaaggccgacgaggccctgaaggcctag

SEQ ID NO: 192486 - DNA, 585 bp, Artificial Sequence
  derived and/or modified sequence
atgggcagaagaagcagcgacaccgaggaggagagcagaagcaagagaaagaagaagcacagaagaagaagcagcagcagcagcagcagcgacagcagaacctacagcagaaagaagggcggcagaaagagcagaagcaagagcagaagctggagcagagacctgcagcccagaagccacagctacgacagaagaagaagacacagaagcagcagcagcagcagctacggcagcagaagaaagagaagcagaagcagaagcagaggcagaggcaagagctacagagtgcagagaagcagaagcaagagcagaaccagaagaagcagaagcagacccagactgagaagccacagcagaagcagcgagagaagcagccacagaagaaccagaagcagaagcagagacagagagagaagaaagggcagagacaaggagaagagagagaaggagaaggacaagggcaaggacaaggagctgcacaacatcaagagaggcgagagcggcaacatcaaggccggcctggagcacctgccccccgccgagcaggccaaggccagactgcagctggtgctggaggccgcctag

SEQ ID NO: 192487 - protein, 659 aa, Artificial Sequence
  derived and/or modified sequence
MPSGSSAALALAAAPAPLPQPPPPPPPPPPPLPPPSGGPELEGDGLLLRERLAALGLDDPSPAEPGAPALRAPAAAAQGQARRAAELSPEERAPPGRPGAPEAAELELEEDEEEGEEAELDGDLLEEEELEEAEEEDRSSLLLLSPPAATASQTQQIPGGSLGSVLLPAARFDAREAAAAAAAAGVLYGGDDAQGMMAAMLSHAYGPGGCGAAAAALNGEQAALLRRKSVNTTECVPVPSSEHVAEIVGRQGCKIKALRAKTNTYIKTPVRGEEPIFVVTGRKEDVAMAKREILSAAEHFSMIRASRNKNGPALGGLSCSPNLPGQTTVQVRVPYRVVGLVVGPKGATIKRIQQQTHTYIVTPSRDKEPVFEVTGMPENVDRAREEIEMHIAMRTGNYIELNEENDFHYNGTDVSFEGGTLGSAWLSSNPVPPSRARMISNYRNDSSSSLGSGSTDSYFGSNRLADFSPTSPFSTGNFWFGDTLPSVGSEDLAVDSPAFDSLPTSAQTIWTPFEPVNPLSGFGSDPSGNMKTQRRGSQPSTPRLSPTFPESIEHPLARRVRSDPPSTGNHVGLPIYIPAFSNGTNSYSSSNGGSTSSSPPESRRKHDCVICFENEVIAALVPCGHNLFCMECANKICEKRTPSCPVCQTAVTQAIQIHS

SEQ ID NO: 192488 - DNA, 1980 bp, Artificial Sequence
  derived and/or modified sequence
atgccttcaggctcatccgcagctctcgctcttgctgccgcacccgcacctctcccgcagcccccacccccccctccgccccctcctcccccccttcccccgcccagcggcggacccgagctcgagggcgacggtttacttctccgggagagactggccgccctgggcttggacgaccccagcccagccgagcccggagctccagctctgagggcgcccgctgcagcagcacagggccaggcaagacgtgcggccgaactgagccctgaggagcgggcccctccagggagacccggcgctcccgaagctgcagagctggaacttgaagaggacgaagaagaaggggaagaggccgaactcgatggtgatttacttgaggaggaagaactcgaggaagccgaggaggaggatcggtcctccttgctgctccttagtccgccagctgccacggctagtcagacacagcagatccctggcggaagccttgggagcgttcttctccccgcagccagatttgacgcccgagaggccgccgcggccgcagctgctgcaggggttctttatgggggggatgacgcgcagggaatgatggccgcgatgctctcgcacgcgtacgggcccggcggctgcggcgccgcagccgccgccctgaacggcgaacaggcagcactacttaggcggaaaagtgtaaacaccacagagtgtgttcccgtgcccagcagcgagcatgtcgcagagatcgtgggaaggcagggttgtaagatcaaggcactgcgcgccaagacaaacacctatattaaaacacccgtacgaggtgaggagcctatcttcgttgtcacaggccggaaggaagatgtggctatggccaaacgagagatcctgagcgccgcggaacacttctcgatgattagggcatcacgaaataagaatgggccggccttggggggtctgtcatgctcacccaacctgccagggcagaccacagtgcaggtcagagtgccatatagagtagtgggcctcgtcgtgggacctaaaggtgccaccataaagagaattcaacagcagactcatacatatattgtgactccttctcgagataaagagcccgtgtttgaagtgacaggcatgcctgaaaatgttgacagggcacgggaagagatagaaatgcatattgccatgaggactggcaattacatcgagctgaatgaggaaaatgattttcattataacggcactgatgtgtcattcgagggaggaaccttaggtagcgcatggttgagctcaaatcctgtgcctccatccagggcccggatgatttcaaactatagaaacgattctagtagcagcttaggttctgggtctactgatagctactttggttccaacaggctcgctgatttcagcccaaccagccctttcagcactggaaacttctggttcggggatacgcttccctctgtaggcagtgaggacctggccgtggattcacccgcattcgactcattaccaacatcggctcagacgatctggacaccatttgaaccagtcaatcccctgtcaggttttgggagcgacccttccggaaacatgaaaacacaacggcgcgggagccaaccatctacccctcgactgtcacctaccttcccagaaagtatcgaacaccccctcgcaaggcgcgtacgaagcgaccccccgtccactggtaaccacgtcggcctgcctatttatatcccggccttctcaaatggcacaaactcctattcatccagcaacggaggcagcacctctagcagcccgccggaaagtaggcggaagcatgactgtgtcatttgtttcgagaacgaggtcatcgcagcccttgtgccatgtggacacaacttattctgtatggagtgcgcgaacaaaatatgtgagaagcggacaccctcttgtcccgtttgtcagacagccgtcacacaagccatccagattcactcttag

SEQ ID NO: 192489 - DNA, 1980 bp, Artificial Sequence
  derived and/or modified sequence
atgcccagcggcagcagcgctgccctggccctggccgccgccccagcccccctgccccagcccccacctcctcctcctcctcctcctccacccctgcccccacccagcggcggccctgagctggagggagatggcctgctgctgcgggagcggctggccgccctgggcctggatgaccccagccctgctgagcccggggccccagccctgcgggccccagctgctgctgcccagggccaggcccggcgggctgctgagctgagccctgaggagcgggcccctcctggccggcctggggcccctgaggccgctgagctggagctggaggaggatgaggaggagggggaggaggccgagctggatggagacctgctggaggaggaggagctggaggaggccgaggaggaggacaggagcagcctgctgctgctgagccccccagctgccacagccagccagacccagcagatccctgggggcagcctgggctctgtgctgctgcctgctgccaggtttgatgcccgggaggccgctgctgctgctgctgctgctggggtgctgtatggaggagatgatgcccagggcatgatggccgccatgctgagccacgcctacggccctgggggctgtggggctgctgctgctgccctgaatggagagcaggccgccctgctgcggaggaagtctgtgaacaccacagaatgtgtgcctgtgcccagcagcgagcacgtggccgagatcgtgggccggcagggctgcaagatcaaggccctgcgggccaagaccaacacctacatcaagacccctgtgcggggggaggagcccatctttgtggtgacaggcaggaaggaggatgtggccatggccaagcgggagatcctgtctgctgctgagcacttctccatgatccgggccagcaggaacaagaatggacctgccctgggcggcctgagctgcagccccaacctgcccggccagaccaccgtgcaggtgcgggtgccctacagagtggtgggcctggtggtgggccccaagggggccaccatcaagaggatccagcagcagacccacacctacatcgtgacccccagccgggacaaggagcctgtgtttgaggtgacaggcatgccagaaaatgtggaccgggcccgggaggagattgagatgcacatcgccatgaggactggaaactacatcgagctgaatgaggagaatgacttccactacaacggcacagatgtgtcctttgagggcggcaccctgggcagcgcctggctgagcagcaaccctgtgccccccagccgggccaggatgatcagcaactacagaaatgacagcagcagcagcctgggcagcggcagcacagacagctacttcggcagcaaccggctggccgacttcagccccaccagccccttcagcactggaaacttctggtttggagacaccctgcccagcgtgggcagcgaggacctggccgtggacagccctgcctttgacagcctgcccaccagcgcccagaccatctggaccccatttgagcctgtgaaccccctgagcggcttcggcagtgaccccagcggcaacatgaagacccagaggcggggcagccagcccagcaccccccggctgagccccaccttccctgagagcattgagcaccccctggcccggcgggtgcggagtgacccccccagcactggaaaccacgtgggcctgcccatctacatcccagccttcagcaatggcaccaacagctacagcagcagcaatggaggcagcaccagcagcagccccccagagagcaggaggaagcatgactgtgtgatctgctttgaaaatgaggtgattgctgccctggtgccctgtggccacaacctcttctgcatggagtgtgccaacaagatctgtgagaagaggacccccagctgccctgtgtgccagacagctgtgacccaggccatccagatccacagctag

SEQ ID NO: 192490 - DNA, 3781 bp, Artificial Sequence
  derived and/or modified sequence
atgcccagcggcagctccgcggccctggccctggcggcggccccggcccccctgccgcagccgcccccgccgccgccgccgccaccgccgcctctgccgccgccctcgggcggcccggagctcgagggggacgggctcctgctgagggagcgcttggccgcgctaggcctcgacgaccccagcccggcggagcccggcgccccggcgcttcgggccccggcagcggcggcgcagggccaggcccggcgggcggcggagctgtctccagaggagcgggctccgcccggccggcccggggccccggaggcggccgagctggagctggaagaggacgaggaggagggggaggaagcggagctggacggagacctgctggaggaggaggagctggaggaagcagaggaggaggaccggtcgtcgctgctgctgctgtcgccgcccgcggccaccgcctctcagacccagcagatcccgggcgggtccctggggtctgtgctgctgccagccgccaggttcgatgcccgggaggcggcggccgcggcggcggcggcgggggtgctgtacggaggggacgatgcccagggcatgatggcggcgatgctgtcccacgcctacggccccggcggttgtggggcggcggcggccgccctgaacggggagcaggcggccctgctccggagaaagagcgtcaacaccaccgagtgcgtcccggtgcccagctccgagcacgtcgccgagatcgtcggccgccagggttgtaaaattaaagcactgagagccaagacaaacacgtatatcaagactcctgttcgtggtgaagagcccatttttgttgtcactggaaggaaagaagatgttgccatggccaaaagagagatcctctcagctgcagagcacttctccatgattcgtgcatctcgaaacaaaaatgggcctgccctgggaggattatcatgtagtcctaatctgcccggtcaaaccaccgtccaagtcagggtcccttatcgtgtggtaggattagtggttggacccaaaggagcaactattaaaagaattcagcagcagacccacacctacatagtaactccgagcagagataaggaacctgtctttgaagtgacagggatgcctgaaaatgttgaccgagcacgggaagaaatagaaatgcatattgccatgcgtacaggaaactatatagagctcaatgaagagaatgatttccattacaatggtaccgatgtaagctttgaaggtggcactcttggctctgcgtggctctcctccaatcctgttcctcctagccgcgcaagaatgatatccaattatcgaaatgatagttccagttctctaggaagtggctctacagattcctactttggaagcaataggctggctgactttagtccaacaagcccatttagcacaggaaacttctggtttggagatacactaccatctgtaggctcagaagacctagcagttgactctcctgcctttgactctttaccaacatctgctcaaactatctggactccatttgaaccagttaacccactctctggctttgggagtgatccttctggtaacatgaagactcagcgcagaggaagtcagccatctactcctcgtctgtctcctacatttcctgagagcatagaacatccacttgctcggagggttaggagcgacccacctagtacaggcaaccatgttggccttccaatatatatccctgctttttctaatggtaccaatagttactcctcttccaatggtggttccacctctagctcacctccagaatcaagacgaaagcacgactgtgtgatttgctttgagaatgaggttattgctgccctagttccatgtggccacaacctcttctgcatggaatgtgccaacaagatctgtgaaaagagaacgccatcatgtccagtttgccagacagctgttactcaggcaatccaaattcactcttaactatatatatatacataaatactatatctctatatggactcgtaaaggcatgggtataatggtaccccccagtaaacttcctaatgatttcttatgactgttatcaggctttattgggattaggctaaagttgttagtaaacttataaaaggctgctatggtaacactaaacctaagtggtctcttgtctattagtttggtttgaattattagtactatcctgtagacccagagacatagtttatataagaattgctaaagctgaagttcaacttggctgagtgaagataatcataggttgtgtgagcctatgaaaaagtgtatacgtctaagatttcaaaacaatgggtcccaaagcctaaccactttaagagtttatggagggtacttggcattacagacgattcatacacttccagtgctgccttctttacactgccagttttgacaaaacaggtttgttttttattttacaacaacatatgcctaattctgcaggattgcaagtaactttttaatgcattgtgattacttattggtaatgatagggctgatggcagtttactagatcactggttataatttgggacaaaaactgctacatcaactttcatctcgcccagagtgctcaaggctggtatgatcagtggatcaggaatgcaattgtgaattcctgcccattgcctctcttggtgaatgtggaaatggccacctgggttttcccatatcaggaagggctttgggatggcacctatattggctgataattgaggatgcaaacattccattcattagtgtgatcgagctgttaatttttagactatagatcaaaatgtgaaacattttatgttcaatccatatttgtcttgcacattataaatatatttttattttttagtaatttaggggagggaggagggagaaagggataatgatgcccttggcataattcacaaaagcagctgtgacaacctccaatcagtttacttcatttcaaaactatttccaatcacaaggaaagatttatttaaaatatactcgtacatttcacctgtggatgtctataacttcatcctcagtatgttcccaaatctgtgctggcattgaaaggacaaaacattatactagtgggtttttctactaattattttttgaagcattattttcccaacacaaaagagcttttttctcggtataatgaaaattgaaatcctatgtgtattcaatagtaaatagacaaattttattttttatttccacttgaagagttacatttcgtataaaagtttacaaataacggtttttattttgattttttcagtataaaaaaagttgccttgatggcatattatgatgtaatgctaattgcttgtaggatagtaaatggtcagtattgaaacctaatctctagctgccgtcttgtagatatgaacgaatgttcaccaagcatgtattttgtattttgttgcattgtacactgcaactaataagccaaggaatcgacatatattaggtgcgtgtactgtttctaaaaaccacaaactaagaatgataaattatcaatatagtttagtatttgctaattttactacactcttttgttatgtatatgtagggaagtcatagggattataaattcaatttgagtaaaatttaaaaccatatattttatgataaagggcctttaacttaagatggccaaagcactgatattatatatttgctgtaaagagaattataagagttttatttttctgatattaaaagttacttaataaagacttgtttccattaacttgaa

SEQ ID NO: 192491 - DNA, 1980 bp, Artificial Sequence
  derived and/or modified sequence
atgcccagcggcagcagcgccgccctggccctggccgccgcccccgcccccttaccgcagcctccacccccccctcctcctccacctcctcccttacctccaccatctggcggaccagaattggagggcgatggcctcctgttacgcgagcgcctcgccgctctggggctggacgacccatcacccgctgagcccggcgcccctgccttacgggccccagccgctgctgcccagggccaagcaaggcgggccgcagaactgtcaccagaggagcgagctccgccagggcggccaggtgctcccgaagccgctgagctcgaactggaggaagacgaggaagaaggggaggaggccgagttggacggcgacctgctcgaagaagaagaacttgaagaggctgaggaggaagacaggagctctttgctcttgttgtctcccccggccgcgactgcttcacagacccagcaaatccctggaggcagtcttggctccgtgttacttcccgctgcccggttcgatgctagggaagccgctgccgctgccgccgccgccggggtgctgtacgggggagacgacgcccagggaatgatggccgccatgctgtcacatgcttacggcccgggaggctgcggcgcagcagccgctgctctgaacggtgagcaggccgccttgctgcggcggaagagtgtaaatacaacagaatgtgtcccagtaccctccagcgaacatgtggctgagatcgtcggcagacagggctgtaaaattaaagcactgcgtgcgaaaaccaatacttatatcaagaccccagtgcgcggggaggaacccatttttgtagtgaccgggagaaaagaggatgtcgcgatggctaaacgcgagatcttgagtgccgccgaacacttctcgatgatccgggcttctcggaataagaatggacccgccctgggcgggctgtcctgtagtccaaacctgcctggacaaacaacagtgcaggtccgggtgccttatagagtagtcggcctggtggtcggaccaaagggcgcgacaatcaagagaattcaacaacagacccatacttatattgtaacacccagtagggataaagaacccgtgttcgaagttaccggaatgcctgaaaatgtggatagggcacgagaggaaattgagatgcatatcgccatgcgcacaggtaattatatagagctcaatgaggagaatgactttcactacaacggcaccgacgtgagctttgaaggtgggactttgggatcggcctggctcagtagtaaccccgtgccaccttctagggctcggatgatttctaattataggaacgactcttcatcgtccctcgggagtggtagcacggattcatatttcggtagcaatagactcgcagacttctctccgaccagccctttctccacaggcaatttctggttcggagacacccttccttctgttggctcggaagatctggctgtcgacagcccagcattcgactcgctaccaaccagcgctcagactatatggacccctttcgagcccgtcaatcctttgtcaggtttcgggtcagacccgagcgggaatatgaagactcaacgccggggctcacaaccgtcaacacccaggctttctcctacctttccagaatccatcgagcatcccttggctcggagagtacgcagtgaccctccatccactggaaaccatgtcgggttgccgatctacattccggctttctctaacggcactaattcctacagcagctctaacggcggctcgacatcatcttctccacctgagtccagacggaaacacgattgcgtgatatgttttgaaaacgaggtgatagccgcacttgtgccctgtggccataacttattttgcatggaatgtgctaataagatttgcgaaaagaggaccccaagctgcccagtgtgtcagacggccgtcacccaggcgatccaaattcacagctag

SEQ ID NO: 192492 - DNA, 1980 bp, Artificial Sequence
  derived and/or modified sequence
atgccatccggttctagcgccgcactggcgctcgccgcagcacccgctcctcttcctcagcctcccccacccccacctccacccccaccaccccttcctcctccctcaggcggtcctgagttagaaggggacgggctcctcctgagggagcgcctggccgctctgggactcgatgatccctcacctgcagagcccggagctcctgcactgagggctcctgcagccgcagcgcaaggtcaagcccgtcgcgcagcagagctgtctcccgaagagagagcaccacctgggcgtccaggcgctccagaagcagcagagctcgaactagaggaagatgaagaggagggggaggaggctgaactcgatggcgacctgttggaagaagaggagctagaagaagccgaggaggaggaccgttcctcgttactcttgttgtcacccccagccgcaaccgcatctcagacccagcagatccctggtgggtcactgggaagtgtcctgcttccagctgccaggtttgacgctcgcgaagcggcagctgccgctgctgccgctggcgttctatacggcggtgacgacgctcaggggatgatggcagccatgctttctcatgcctacgggccaggagggtgcggagcagccgcagctgcattaaacggcgagcaggctgcactgttgcgacggaaaagcgtgaatacaacagagtgcgttccagtgccttcgagtgaacatgttgctgaaattgtcggcagacagggatgtaaaattaaggccctgcgagctaaaactaacacctatatcaagacccctgtccggggtgaagagcccatctttgttgtgacaggaaggaaggaagacgtcgcaatggctaagcgggagattctgtctgccgctgaacatttcagtatgatccgcgcatcccgcaataagaacggaccagccctcgggggactgagctgcagccccaacttgccgggtcaaacaacggttcaggtgagagttccctaccgggtggttgggctggttgtgggccctaagggtgctacaattaaaagaattcagcaacagacgcacacttatatcgttactccgtcgcgtgataaagagccggtgtttgaggtgacgggcatgcctgagaatgttgaccgagcgagggaagagattgaaatgcatatagctatgagaactggtaattatattgagcttaatgaagaaaacgacttccactacaatggaactgacgtgagcttcgaaggtggaaccctgggatctgcctggttgtctagcaatccagtgccaccaagtagggcacgcatgatttcaaactaccgtaacgacagttccagctctcttggcagtgggagcaccgactcatatttcggaagcaaccgcctggccgattttagcccgacgtcccccttctccaccgggaacttctggtttggggacactctgccctcagtgggctccgaggatctggccgtggactctcctgcattcgatagcttgcctaccagcgcacagaccatttggactcctttcgaacccgtgaaccctctgagcgggtttggtagtgatccatctggcaatatgaaaactcagcgcagaggtagccagccatctactcctagactgtcgccaacctttcctgagtctattgagcacccactggcacggcgagtgcgctcagatcccccatctactggcaaccacgtcgggctacccatctacattccagctttttcgaacggaactaattcctattcttctagtaatggtggcagcacgtcgtcctcacctccagagagtaggcgtaagcatgattgtgtgatctgctttgagaatgaagtgatagctgctctagtcccatgtggccacaatttgttctgtatggaatgcgcaaacaaaatttgcgaaaagcggactccgtcatgccctgtttgtcaaaccgccgttacacaggctatacagatacattcttag

SEQ ID NO: 192493 - DNA, 1980 bp, Artificial Sequence
  derived and/or modified sequence
atgcccagcggcagcagcgccgccctggccctggccgccgcccccgcccccctgccccagcccccccccccccccccccccccccccccccccctgcccccccccagcggcggccccgagctggagggcgacggcctgctgctgagagagagactggccgccctgggcctggacgaccccagccccgccgagcccggcgcccccgccctgagagcccccgccgccgccgcccagggccaggccagaagagccgccgagctgagccccgaggagagagccccccccggcagacccggcgcccccgaggccgccgagctggagctggaggaggacgaggaggagggcgaggaggccgagctggacggcgacctgctggaggaggaggagctggaggaggccgaggaggaggacagaagcagcctgctgctgctgagcccccccgccgccaccgccagccagacccagcagatccccggcggcagcctgggcagcgtgctgctgcccgccgccagattcgacgccagagaggccgccgccgccgccgccgccgccggcgtgctgtacggcggcgacgacgcccagggcatgatggccgccatgctgagccacgcctacggccccggcggctgcggcgccgccgccgccgccctgaacggcgagcaggccgccctgctgagaagaaagagcgtgaacaccaccgagtgcgtgcccgtgcccagcagcgagcacgtggccgagatcgtgggcagacagggctgcaagatcaaggccctgagagccaagaccaacacctacatcaagacccccgtgagaggcgaggagcccatcttcgtggtgaccggcagaaaggaggacgtggccatggccaagagagagatcctgagcgccgccgagcacttcagcatgatcagagccagcagaaacaagaacggccccgccctgggcggcctgagctgcagccccaacctgcccggccagaccaccgtgcaggtgagagtgccctacagagtggtgggcctggtggtgggccccaagggcgccaccatcaagagaatccagcagcagacccacacctacatcgtgacccccagcagagacaaggagcccgtgttcgaggtgaccggcatgcccgagaacgtggacagagccagagaggagatcgagatgcacatcgccatgagaaccggcaactacatcgagctgaacgaggagaacgacttccactacaacggcaccgacgtgagcttcgagggcggcaccctgggcagcgcctggctgagcagcaaccccgtgccccccagcagagccagaatgatcagcaactacagaaacgacagcagcagcagcctgggcagcggcagcaccgacagctacttcggcagcaacagactggccgacttcagccccaccagccccttcagcaccggcaacttctggttcggcgacaccctgcccagcgtgggcagcgaggacctggccgtggacagccccgccttcgacagcctgcccaccagcgcccagaccatctggacccccttcgagcccgtgaaccccctgagcggcttcggcagcgaccccagcggcaacatgaagacccagagaagaggcagccagcccagcacccccagactgagccccaccttccccgagagcatcgagcaccccctggccagaagagtgagaagcgacccccccagcaccggcaaccacgtgggcctgcccatctacatccccgccttcagcaacggcaccaacagctacagcagcagcaacggcggcagcaccagcagcagcccccccgagagcagaagaaagcacgactgcgtgatctgcttcgagaacgaggtgatcgccgccctggtgccctgcggccacaacctgttctgcatggagtgcgccaacaagatctgcgagaagagaacccccagctgccccgtgtgccagaccgccgtgacccaggccatccagatccacagctag

SEQ ID NO: 192494 - protein, 308 aa, Artificial Sequence
  derived and/or modified sequence
MGEIKVSPDYNWFRGTVPLKKIIVDDDDSKIWSLYDAGPRSIRCPLIFLPPVSGTADVFFRQILALTGWGYRVIALQYPVYWDHLEFCDGFRKLLDHLQLDKVHLFGASLGGFLAQKFAEYTHKSPRVHSLILCNSFSDTSIFNQTWTANSFWLMPAFMLKKIVLGNFSSGPVDPMMADAIDFMVDRLESLGQSELASRLTLNCQNSYVEPHKIRDIPVTIMDVFDQSALSTEAKEEMYKLYPNARRAHLKTGGNFPYLCRSAEVNLYVQIHLLQFHGTKYAAIDPSMVSAEELEVQKGSLGISQEEQ

SEQ ID NO: 192495 - DNA, 927 bp, Artificial Sequence
  derived and/or modified sequence
atgggcgagatcaaggtgagccccgactacaactggttcagaggcaccgtgcccctgaagaagatcatcgtggacgacgacgacagcaagatctggagcctgtacgacgccggccccagaagcatcagatgccccctgatcttcctgccccccgtgagcggcaccgccgacgtgttcttcagacagatcctggccctgaccggctggggctacagagtgatcgccctgcagtaccccgtgtactgggaccacctggagttctgcgacggcttcagaaagctgctggaccacctgcagctggacaaggtgcacctgttcggcgccagcctgggcggcttcctggcccagaagttcgccgagtacacccacaagagccccagagtgcacagcctgatcctgtgcaacagcttcagcgacaccagcatcttcaaccagacctggaccgccaacagcttctggctgatgcccgccttcatgctgaagaagatcgtgctgggcaacttcagcagcggccccgtggaccccatgatggccgacgccatcgacttcatggtggacagactggagagcctgggccagagcgagctggccagcagactgaccctgaactgccagaacagctacgtggagccccacaagatcagagacatccccgtgaccatcatggacgtgttcgaccagagcgccctgagcaccgaggccaaggaggagatgtacaagctgtaccccaacgccagaagagcccacctgaagaccggcggcaacttcccctacctgtgcagaagcgccgaggtgaacctgtacgtgcagatccacctgctgcagttccacggcaccaagtacgccgccatcgaccccagcatggtgagcgccgaggagctggaggtgcagaagggcagcctgggcatcagccaggaggagcagtag

SEQ ID NO: 192496 - DNA, 927 bp, Artificial Sequence
  derived and/or modified sequence
atgggagaaataaaagtatcacctgactataattggttccgagggacagtccctctgaagaagatcattgttgatgatgacgacagtaagatttggagcctctatgacgctgggccaaggagtatcagatgccctctgattttcctccctccagtgagtggcactgcagacgtgttctttagacagatcttggccctgactggatgggggtatagagtgattgctttgcagtatccagtgtattgggaccacctcgagttttgtgatggattcagaaagctactggaccatctgcagctggacaaggtgcacctgtttggtgctagcctgggcgggtttctggcccagaaatttgctgaatatacccataagagtcctcgagtccactctttgatactctgcaatagttttagcgatacatctatcttcaatcaaacctggactgcgaattctttttggctgatgccggcctttatgttgaagaagattgtgttgggcaacttcagctcaggcccagtcgacccaatgatggccgatgccatcgattttatggttgatcgcctcgaatctttgggccagtccgagctggcatcgcgcctgacattgaattgccagaactcctatgtggaacctcacaagattagagatatccccgtgacaattatggacgtgttcgaccagagcgctcttagcacggaggctaaggaagagatgtacaagctgtaccccaacgcccggcgtgcccatctgaaaacagggggcaacttcccttacctgtgtaggtccgctgaggttaacctgtacgtgcagatccacctgcttcagtttcacggcacaaaatacgctgcaatcgacccatcgatggtgagcgcagaggagctagaagtccaaaagggctccctaggaatctcccaggaggagcagtag

SEQ ID NO: 192497 - DNA, 927 bp, Artificial Sequence
  derived and/or modified sequence
atgggggagatcaaggtcagtcccgactataactggtttcggggaactgtgccactcaaaaagattatcgtggatgacgatgactccaagatttggtcactgtatgacgctggcccccgctctatacggtgtccattaatttttctgccacccgtttctggcaccgccgatgtcttctttagacagatccttgccttgacaggctgggggtatcgggtaattgcactgcagtaccccgtctattgggaccatctggagttctgtgatgggtttcgtaagcttttggaccacctgcagctcgataaagtacacttgtttggtgcctctctcgggggcttcctcgctcagaagttcgcggaatacactcacaaatcccccagggtgcacagcctgatcttgtgcaattcgttctcagatacatcaatcttcaaccagacctggaccgccaacagcttttggctgatgcccgccttcatgttgaagaagattgtgctcggtaacttctcatccgggcctgtggacccgatgatggcagatgccatcgactttatggtagaccgcctggagagcctggggcaaagtgaactagcttcaaggcttacactgaactgccagaactcttacgtggagccccataagatcagagacatccctgtgaccatcatggatgtttttgatcagtcagcgctttctaccgaggcaaaggaggagatgtacaagctctatccgaatgcaagacgcgcacacttgaaaactggaggcaacttcccgtacttgtgtcgaagtgccgaagttaatttgtacgtgcagatccaccttcttcagttccatggaactaagtacgccgctatcgatccgtcaatggtctctgctgaagagctagaggtgcagaaaggttcactgggtatctctcaggaggagcagtag

SEQ ID NO: 192498 - DNA, 927 bp, Artificial Sequence
  derived and/or modified sequence
atgggagagatcaaggtgtccccagactacaactggttccggggcaccgtgcccctgaagaagatcatcgtggatgatgatgacagcaagatctggagcctgtatgatgctggccccaggagcatccgctgccccctcatcttcctgccccctgtgtctggaacagcagatgtgttcttccggcagatcctggccctgaccggctggggctacagagtcatcgccctgcagtaccctgtgtactgggaccacctggagttctgtgatggcttcaggaagctgctggaccacctgcagctggacaaggtgcacctgtttggagccagcctgggcggcttcctggcccagaagtttgctgagtacacccacaagagcccccgggtgcacagcctcatcctgtgcaacagcttcagtgacaccagcatcttcaaccagacctggacagccaacagcttctggctgatgcctgccttcatgctgaagaagatcgtgctgggcaacttcagcagcggccctgtggaccccatgatggctgatgccatcgacttcatggtggaccggctggagagcctgggccagagcgagctggccagccggctgaccctgaactgccagaacagctatgtggagccccacaagatccgggacatccctgtgaccatcatggatgtgtttgaccagagcgccctgagcacagaggccaaggaggagatgtacaagctgtacccaaatgcccggcgggcccacctgaagacaggaggcaacttcccctacctgtgccgctctgctgaggtgaacctgtatgtgcagatccacctgctgcagttccacggcaccaagtatgctgccatcgaccccagcatggtgtctgctgaggagctggaggtgcagaagggcagcctgggcatcagccaggaggagcagtag

SEQ ID NO: 192499 - DNA, 927 bp, Artificial Sequence
  derived and/or modified sequence
atgggcgagatcaaggtgagccccgactacaactggttccggggcaccgtgccgcttaagaagatcattgtcgacgatgacgactctaagatctggagcctgtatgatgccggcccaagaagcattagatgccctctgatctttctgcctccagtgtccggtactgccgacgtgttctttcggcagatcctggcgctaacagggtggggataccgtgtaatcgctttgcaataccccgtgtactgggatcatctggaattttgcgatggctttcgaaaactactggaccacttacagctcgataaagttcacctctttggggcctccctgggaggctttctggcgcaaaagtttgcagaatacacccacaagagcccaagagtgcacagcctgatactgtgcaatagtttctcagatacatcaattttcaaccaaacatggactgcgaattctttctggttgatgccagcattcatgttaaagaagatagtgctgggtaattttagttctggtcccgtggaccctatgatggcggatgctatcgacttcatggtcgatcggctggaatcactgggccagtctgagctcgctagccggctcacgctaaactgccagaactcttacgtcgaaccccacaaaattcgggacataccggtgaccattatggacgtatttgatcagagcgccctgagcacagaagctaaggaggaaatgtacaaactttaccccaatgcgcggcgtgcacacttgaagactggaggcaattttccttacctgtgcagatccgccgaagtgaatctttacgtgcagatccatctgttacaattccatggcaccaagtacgcagccattgacccttcaatggtgtcagcagaagaacttgaagtgcagaaaggcagcctgggcatcagccaggaagaacagtag

SEQ ID NO: 192500 - DNA, 927 bp, Artificial Sequence
  derived and/or modified sequence
atgggcgagatcaaggtgagccccgactacaactggttccggggcaccgtgcccttgaaaaaaattatagttgacgatgacgatagtaagatctggtcgctttacgatgccggtccccgaagcatccgatgcccacttatctttctgcccccagtcagtgggacggccgatgtcttctttcgacagatccttgctctcaccgggtggggataccgcgttatagccctgcagtaccccgtgtactgggatcatctcgagttctgtgatggttttcgtaagttgctagaccacctgcagttggacaaagtgcacctttttggcgcctctctgggggggttccttgcccagaagtttgcggagtacacccataaaagtccccgagtgcacagcttaatcttatgcaatagctttagtgatacctcgatctttaaccagacttggaccgcgaactccttctggctgatgccggctttcatgctgaagaaaatcgttctcggcaactttagctcgggccccgtggatcccatgatggcagacgccattgactttatggtggaccgactggagtccttgggacagtcggagctggcctcaaggctaacactgaactgtcaaaactcatacgtggaacctcataaaatccgggatatcccagtcacaataatggacgtgttcgaccaaagcgctctgagcacagaggcgaaggaagaaatgtacaagttgtatccgaacgcccgaagggcccacttaaaaaccgggggcaacttcccctatctgtgccgatctgcagaggtgaacctgtatgttcagatccacttactgcagtttcacggaaccaaatacgctgcgattgatccaagcatggtgtccgcagaggaattagaggttcaaaagggatctctgggtatctctcaggaggagcagtag

SEQ ID NO: 192501 - DNA, 927 bp, Artificial Sequence
  derived and/or modified sequence
atgggtgaaatcaaggtcagccctgattacaactggttcagagggaccgtcccactcaagaaaataatcgttgacgatgacgactcaaagatctggagcctctatgatgcaggaccaagatctatcaggtgtccactgatctttctgccccctgtatcagggaccgcggacgtcttcttcagacagattctggctcttactgggtggggctaccgcgtgatcgcgctgcaataccccgtgtattgggatcacctggagttttgcgacggatttcggaagctcctggatcatttgcaactcgacaaggtgcacctctttggggcttctctgggcggtttcctggcccagaaattcgcggagtacacacacaagtcacccagagtgcattcgctgatcttgtgtaactcattttccgacacgtcaattttcaaccagacgtggacagctaactctttttggctaatgccggcatttatgcttaagaagatagtacttggtaatttttccagcggcccagtggaccccatgatggcagatgccatcgacttcatggtcgacaggttggaaagcttaggccagtcagaactagcaagtcgcctcactctgaattgccagaacagctatgtggagccccataagatcagagacattccagtcaccataatggacgtgtttgaccaatcagcgctctctacggaggcaaaggaggaaatgtataagctatatcctaacgcgcgaagagcacacctgaaaacagggggtaactttccctacctatgccgctcagccgaagtaaacttgtacgttcaaattcacctgctgcaattccacgggacgaaatacgccgctatcgacccatcaatggttagcgctgaggagttagaagtccagaagggctcactgggaatttcccaggaggaacaatag

SEQ ID NO: 192502 - DNA, 927 bp, Artificial Sequence
  derived and/or modified sequence
atgggggagatcaaggtgagtccggattataattggtttcgcggaaccgtccctttaaagaaaatcatcgtggacgacgacgatagcaaaatctggagtctctatgacgccggaccgaggagtattcggtgtcccctcatattcctgccacctgtaagtggcacagcagatgtgttttttagacagatactcgcactgacaggatgggggtacagagtgattgcacttcagtatcccgtctactgggatcacctggaattctgcgacggctttcggaagctcctggaccacctgcagctcgataaagtccaccttttcggagcatccttaggaggctttctcgcccaaaagttcgccgaatatacacacaaatccccccgagtgcacagtctgatattgtgcaattcgttcagtgacacaagcatcttcaatcagacatggaccgctaactccttctggctgatgcctgcgtttatgttgaagaagatcgttctgggtaactttagctcaggccctgtcgatccaatgatggctgacgccatcgacttcatggtggatcgcctggaatcgctaggccagtcggagcttgcctcacgcctcactctgaattgccagaatagctacgtcgagccccataaaattagggacattcccgtgacgatcatggacgtgtttgatcagagtgccctgtccacggaggctaaagaggaaatgtataagctgtaccccaacgctcgcagggctcatctgaagaccggcggaaacttcccctatctttgtcgttccgcagaggttaacttgtacgtgcagatccatctgctgcaatttcacggaactaagtacgcggcaatcgatccttctatggtgtcagccgaggagctcgaggtccagaagggatccttagggatctctcaggaggaacaatag

SEQ ID NO: 192503 - DNA, 1822 bp, Artificial Sequence
  derived and/or modified sequence
cgccctctgagaacccggaagcgggagtctcgcgccagctgagcggcggtcgggcggggggagcgcggcggcccaagctcgctcggccacgcgccccgccccctcagaggccggcctcccgcacgcaccgcgcagcctgctgtgcccgtgggtcccgagtgctccgccgcccgccccgacccgggcccagccgcctccacggcccgcgctcgtactggagcgaagagcggcctcctgaaggaggggaagggacgtgggggcggccacggcaggattaacctccatttcagctaatcatgggagagattaaagtctctcctgattataactggtttagaggtacagttccccttaaaaagattattgtggatgatgatgacagtaagatatggtcgctctatgacgcgggcccccgaagtatcaggtgtcctctcatattcctgccccctgtcagtggaactgcagatgtctttttccggcagattttggctctgactggatggggttaccgggttatcgctttgcagtatccagtttattgggaccatctcgagttctgtgatggattcagaaaacttttagaccatttacaattggataaagttcatctttttggcgcttctttgggaggctttttggcccagaaatttgctgaatacactcacaaatctcctagagtccattccctaatcctctgcaattccttcagtgacacctctatcttcaaccaaacttggactgcaaacagcttttggctgatgcctgcatttatgctcaaaaaaatagttcttggaaatttttcatctggcccggtggaccctatgatggctgatgccattgatttcatggtagacaggctagaaagtttgggtcagagtgaactggcttcaagacttaccttgaattgtcaaaattcttatgtggaacctcataaaattcgggacatacctgtaactattatggatgtgtttgatcagagtgcgctttcaactgaagctaaagaagaaatgtacaagctgtatcctaatgcccgaagagctcatctgaaaacaggaggcaatttcccatacctgtgcagaagtgcagaggtcaatctttatgtacagatacatttgctgcaattccatggaaccaaatacgcggccattgacccatcaatggtcagtgccgaggagcttgaggtgcagaaaggcagccttggcatcagccaggaggagcagtagtgtgtctctcgctgtcaatgatgagttgacccggtgtgttcttgtatagtcagtggcatcagcacccgtcagccggccttttccttcaggttcgtcaggctcaccggttctcactgtgtctgggaagtaggactgatggtcatcttcatgacaggcggcatctccactaagcctgtgtaactgttccctctttggttttcttagcttttgaatttgaagaagtacttttgaagactcccattttaagaaccgtgcagattttgctaccaaaagtcttcaccactgtgttcttaagtgaatgttaatttctgaggtttgggactttgtggtggtttttttcttcttttcttttccattcttctttctttctttttatgttgtttgctgtaaatgctgcacatccagattgcatatcaggacattggttattttatgctttcttggatataaccatgatcagagtgccatggccactaccccactgtttgctctcctgcaaatcaactgcttttaatttacacttaaacaaattgttttgagtgttagctactgcctttctagatattagtcatttggaataaaaattcaatttcactgag

SEQ ID NO: 192504 - DNA, 1613 bp, Artificial Sequence
  derived and/or modified sequence
gggtggtcggtgtgcttgtgaccctgcctttgtgtggctgtcaccggtgggactggcggggagctgtgtgattaacctccatttcagctaatcatgggagagattaaagtctctcctgattataactggtttagaggtacagttccccttaaaaagattattgtggatgatgatgacagtaagatatggtcgctctatgacgcgggcccccgaagtatcaggtgtcctctcatattcctgccccctgtcagtggaactgcagatgtctttttccggcagattttggctctgactggatggggttaccgggttatcgctttgcagtatccagtttattgggaccatctcgagttctgtgatggattcagaaaacttttagaccatttacaattggataaagttcatctttttggcgcttctttgggaggctttttggcccagaaatttgctgaatacactcacaaatctcctagagtccattccctaatcctctgcaattccttcagtgacacctctatcttcaaccaaacttggactgcaaacagcttttggctgatgcctgcatttatgctcaaaaaaatagttcttggaaatttttcatctggcccggtggaccctatgatggctgatgccattgatttcatggtagacaggctagaaagtttgggtcagagtgaactggcttcaagacttaccttgaattgtcaaaattcttatgtggaacctcataaaattcgggacatacctgtaactattatggatgtgtttgatcagagtgcgctttcaactgaagctaaagaagaaatgtacaagctgtatcctaatgcccgaagagctcatctgaaaacaggaggcaatttcccatacctgtgcagaagtgcagaggtcaatctttatgtacagatacatttgctgcaattccatggaaccaaatacgcggccattgacccatcaatggtcagtgccgaggagcttgaggtgcagaaaggcagccttggcatcagccaggaggagcagtagtgtgtctctcgctgtcaatgatgagttgacccggtgtgttcttgtatagtcagtggcatcagcacccgtcagccggccttttccttcaggttcgtcaggctcaccggttctcactgtgtctgggaagtaggactgatggtcatcttcatgacaggcggcatctccactaagcctgtgtaactgttccctctttggttttcttagcttttgaatttgaagaagtacttttgaagactcccattttaagaaccgtgcagattttgctaccaaaagtcttcaccactgtgttcttaagtgaatgttaatttctgaggtttgggactttgtggtggtttttttcttcttttcttttccattcttctttctttctttttatgttgtttgctgtaaatgctgcacatccagattgcatatcaggacattggttattttatgctttcttggatataaccatgatcagagtgccatggccactaccccactgtttgctctcctgcaaatcaactgcttttaatttacacttaaacaaattgttttgagtgttagctactgcctttctagatattagtcatttggaataaaaattcaatttc

SEQ ID NO: 192505 - protein, 129 aa, Artificial Sequence
  derived and/or modified sequence
MARGSLRRLLRLLVLGLWLALLRSVAGEQAPGTAPCSRGSSWSADLDKCMDCASCRARPHSDFCLGCAAAPPAPFRLLWPILGGALSLTFVLGLLSGFLVWRRCRRREKFTTPIEETGGEGCPAVALIQ

SEQ ID NO: 192506 - protein, 94 aa, Artificial Sequence
  derived and/or modified sequence
MARGSLRRLLRLLVLGLWLALLRSVAGEQAPGAAAPPAPFRLLWPILGGALSLTFVLGLLSGFLVWRRCRRREKFTTPIEETGGEGCPAVALIQ

SEQ ID NO: 192507 - DNA, 390 bp, Artificial Sequence
  derived and/or modified sequence
atggccagaggcagcctgagaagactgctgagactgctggtgctgggcctgtggctggccctgctgagaagcgtggccggcgagcaggcccccggcaccgccccctgcagcagaggcagcagctggagcgccgacctggacaagtgcatggactgcgccagctgcagagccagaccccacagcgacttctgcctgggctgcgccgccgccccccccgcccccttcagactgctgtggcccatcctgggcggcgccctgagcctgaccttcgtgctgggcctgctgagcggcttcctggtgtggagaagatgcagaagaagagagaagttcaccacccccatcgaggagaccggcggcgagggctgccccgccgtggccctgatccagtag

SEQ ID NO: 192508 - DNA, 285 bp, Artificial Sequence
  derived and/or modified sequence
atggccagaggcagcctgagaagactgctgagactgctggtgctgggcctgtggctggccctgctgagaagcgtggccggcgagcaggcccccggcgccgccgccccccccgcccccttcagactgctgtggcccatcctgggcggcgccctgagcctgaccttcgtgctgggcctgctgagcggcttcctggtgtggagaagatgcagaagaagagagaagttcaccacccccatcgaggagaccggcggcgagggctgccccgccgtggccctgatccagtag

SEQ ID NO: 192509 - DNA, 390 bp, Artificial Sequence
  derived and/or modified sequence
atggcaaggggttccctacgtcgcttgctcagacttttggtccttgggctttggttagctctgctccgctcagtagcaggcgagcaggcccctggaacagccccatgttccaggggatcttcttggagcgccgacttagataagtgtatggactgtgcttcatgtcgggcacgcccccacagcgacttctgcctgggttgtgcagctgcaccccctgctccatttaggctcctatggcccattctgggaggcgccctgtccctcaccttcgtcctcgggcttctgagcggcttcttagtgtggcgcagatgccgacgcagggagaagtttaccactcccattgaagagactgggggtgaaggatgcccggctgtggccctcatacagtag

SEQ ID NO: 192510 - DNA, 285 bp, Artificial Sequence
  derived and/or modified sequence
atggctcgcggctctctcaggcggctacttcgactcctggtattaggcctttggctggctctgctacggtctgtggcaggtgaacaggctcctggagctgccgcccctccggcaccctttcgccttctttggcccatccttggaggagcgctaagcttgacctttgtgctcggcttactctccggcttcctcgtttggagacggtgcaggcggagggaaaagtttacaactccgatcgaagaaaccggcggagagggctgtccagctgtggctctgattcagtag

SEQ ID NO: 192511 - DNA, 390 bp, Artificial Sequence
  derived and/or modified sequence
atggcccggggcagcctgcggcggctgctgcggctgctggtgctgggcctgtggctggccctgctgcggtctgtggccggggagcaggcccctggaacagccccctgcagccggggcagctcctggagcgctgacctggacaagtgcatggactgtgccagctgccgggcccggccccacagcgacttctgcctgggctgtgccgccgcccccccagcccccttccggctgctgtggcccatcctgggcggggccctgagcctgacctttgtgctgggcctgctgagcggcttcctggtgtggaggcgctgcagaagaagagagaagttcaccacccccatcgaggagactggaggagagggctgcccagctgtggccctgatccagtag

SEQ ID NO: 192512 - DNA, 285 bp, Artificial Sequence
  derived and/or modified sequence
atggcccggggcagcctgcggcggctgctgcggctgctggtgctgggcctgtggctggccctgctgcggtctgtggccggggagcaggcccctggagctgctgcccccccagcccccttccggctgctgtggcccatcctgggcggggccctgagcctgacctttgtgctgggcctgctgagcggcttcctggtgtggaggcgctgcagaagaagagagaagttcaccacccccatcgaggagaccggcggggagggctgcccagctgtggccctgatccagtag

SEQ ID NO: 192513 - DNA, 390 bp, Artificial Sequence
  derived and/or modified sequence
atggcccggggcagcctgcggcggctgctgcggctgctggtgctggggctgtggctagcactgctgcgaagtgtcgcaggcgaacaggctcctggaaccgcaccatgcagccggggaagttcatggtccgcagacctggacaagtgcatggactgcgcctcatgtagagcacgaccccattccgatttctgcctgggctgcgccgctgcaccacctgcgccttttagacttctctggcctatcttaggcggtgccttgtcactcacttttgtattgggcctcctgagcggatttcttgtctggagaaggtgtcgtaggagagagaagttcacaacaccaattgaggagacaggcggggaggggtgccctgcggtggcgttgatccagtag

SEQ ID NO: 192514 - DNA, 285 bp, Artificial Sequence
  derived and/or modified sequence
atggcccggggcagcctgcggcggctgctgcggctgctggtgctgggcctgtggctggccctccttcggagcgtggccggagaacaggctccaggtgcggctgcaccccctgcacctttccggctcctctggccaattctggggggagccctcagcctgacctttgtgctgggtctgctgtccggttttttggtgtggcgaaggtgtcgccggagagaaaagtttacgactcctatagaggagacgggtggagaaggatgtcctgcagtggccctgatccagtag

SEQ ID NO: 192515 - DNA, 390 bp, Artificial Sequence
  derived and/or modified sequence
atggctagaggctccctcaggcgactgctccgactcctcgtcctgggactttggctggcactgctgcggtcagtcgctggagagcaggcccctggcaccgctccatgctccaggggttcttcctggtctgccgacctggacaaatgcatggactgcgcctcctgtagagctaggcctcattcagacttctgcctcggctgcgcggcagctcccccagccccttttcggctgctatggccgatcctcggtggtgccctttctttgacatttgtgctgggtcttctctccggttttctggtgtggcgcaggtgccgcaggagagagaagttcactacacctatcgaagagacgggcggagaaggctgccccgctgtcgcactgatccaatag

SEQ ID NO: 192516 - DNA, 285 bp, Artificial Sequence
  derived and/or modified sequence
atggcgagaggttctctcagacggctcctgcgtttacttgtgctcggcctatggcttgcattgttgaggtcggtggccggagaacaggcaccaggtgcagcggctcctcccgcaccctttcgacttctctggcctatcctggggggtgctctgagtctgacctttgtcctgggcctgttgagcgggtttctggtgtggagaaggtgtcgtagacgcgaaaaatttaccacacctattgaggagacaggcggagaggggtgccccgctgtggcactcatccagtag

SEQ ID NO: 192517 - DNA, 1033 bp, Artificial Sequence
  derived and/or modified sequence
aaggcgggggcgggggcggggcggcggccgtgggtccctgccggccggcggcgggcgcagacagcggcgggcgcaggacgtgcactatggctcggggctcgctgcgccggttgctgcggctcctcgtgctggggctctggctggcgttgctgcgctccgtggccggggagcaagcgccaggcaccgccccctgctcccgcggcagctcctggagcgcggacctggacaagtgcatggactgcgcgtcttgcagggcgcgaccgcacagcgacttctgcctgggctgcgctgcagcacctcctgcccccttccggctgctttggcccatccttgggggcgctctgagcctgaccttcgtgctggggctgctttctggctttttggtctggagacgatgccgcaggagagagaagttcaccacccccatagaggagaccggcggagagggctgcccagctgtggcgctgatccagtgacaatgtgccccctgccagccggggctcgcccactcatcattcattcatccattctagagccagtctctgcctcccagacgcggcgggagccaagctcctccaaccacaaggggggtggggggcggtgaatcacctctgaggcctgggcccagggttcaggggaaccttccaaggtgtctggttgccctgcctctggctccagaacagaaagggagcctcacgctggctcacacaaaacagctgacactgactaaggaactgcagcatttgcacaggggaggggggtgccctccttcctagaggccctgggggccaggctgacttggggggcagacttgacactaggccccactcactcagatgtcctgaaattccaccacgggggtcaccctggggggttagggacctatttttaacactagggggctggcccactaggagggctggccctaagatacagacccccccaactccccaaagcggggaggagatatttattttggggagagtttggaggggagggagaatttattaataaaagaatctttaactttaaa

SEQ ID NO: 192518 - DNA, 839 bp, Artificial Sequence
  derived and/or modified sequence
atggctcggggctcgctgcgccggttgctgcggctcctcgtgctggggctctggctggcgttgctgcgctccgtggccggggagcaagcgccaggcgctgcagcacctcctgcccccttccggctgctttggcccatccttgggggcgctctgagcctgaccttcgtgctggggctgctttctggctttttggtctggagacgatgccgcaggagagagaagttcaccacccccatagaggagaccggcggagagggctgcccagctgtggcgctgatccagtgacaatgtgccccctgccagccggggctcgcccactcatcattcattcatccattctagagccagtctctgcctcccagacgcggcgggagccaagctcctccaaccacaaggggggtggggggcggtgaatcacctctgaggcctgggcccagggttcaggggaaccttccaaggtgtctggttgccctgcctctggctccagaacagaaagggagcctcacgctggctcacacaaaacagctgacactgactaaggaactgcagcatttgcacaggggaggggggtgccctccttcctagaggccctgggggccaggctgacttggggggcagacttgacactaggccccactcactcagatgtcctgaaattccaccacgggggtcaccctggggggttagggacctatttttaacactagggggctggcccactaggagggctggccctaagatacagacccccccaactccccaaagcggggaggagatatttattttggggagagtttggaggggagggagaatttattaataaaagaatctttaacttt

SEQ ID NO: 192519 - protein, 439 aa, Artificial Sequence
  derived and/or modified sequence
MAAARCWRPLLRGPRLSLHTAANAAATATETTCQDVAATPVARYPPIVASMTADSKAARLRRIERWQATVHAAESVDEKLRILTKMQFMKYMVYPQTFALNADRWYQYFTKTVFLSGLPPPPAEPEPEPEPEPEPALDLAALRAVACDCLLQEHFYLRRRRRVHRYEESEVISLPFLDQLVSTLVGLLSPHNPALAAAALDYRCPVHFYWVRGEEIIPRGHRRGRIDDLRYQIDDKPNNQIRISKQLAEFVPLDYSVPIEIPTIKCKPDKLPLFKRQYENHIFVGSKTADPCCYGHTQFHLLPDKLRRERLLRQNCADQIEVVFRANAIASLFAWTGAQAMYQGFWSEADVTRPFVSQAVITDGKYFSFFCYQLNTLALTTQADQNNPRKNICWGTQSKPLYETIEDNDVKGFNDDVLLQIVHFLLNRPKEEKSQLLEN

SEQ ID NO: 192520 - DNA, 1320 bp, Artificial Sequence
  derived and/or modified sequence
atggccgccgcaagatgctggaggccgctcttgagaggaccccgactcagtctccacacggcagccaatgcggctgcaaccgctacagagaccacatgtcaggacgtcgctgcgacccccgttgcacgatacccccccatcgttgctagcatgacggccgacagtaaagcagcccgactgaggcgaattgagagatggcaagccacagtgcacgccgcggagtctgtggacgagaaattgcggattttaactaagatgcaattcatgaagtacatggtctatcctcaaactttcgctctcaacgccgacagatggtatcaatacttcaccaagacagttttcctatctggcctccccccgcctccagctgaacctgagcctgagccagagcctgaacctgagcctgcacttgacctggccgcccttagggcagtggcgtgcgactgcttgctccaggagcatttttaccttcgaaggaggcggcgcgtccacaggtacgaggaatcggaggtgatcagcctgccctttctggatcagctggtttcaaccctggtgggcctgttgtctcctcacaaccctgccttggcagcagccgccttagactaccgatgcccggttcacttctactgggtgcggggggaggagatcattccacgcggccatcgccggggacgaattgacgacctccggtatcagattgatgacaaacctaacaatcagatccggatctcgaagcagctggcagagttcgtgccactcgactactctgtgccaatcgagattccaaccattaaatgtaagcctgacaaactgcccctcttcaaaaggcagtacgagaaccatatcttcgtcggaagcaagacggcagatccatgttgctacggacatacccagtttcacctcttgcctgacaagctccggagggagcgtttgctacggcaaaactgtgctgaccagattgaagtggtttttagggccaatgccattgcgtcactttttgcttggactggcgcccaggccatgtatcagggtttctggtccgaggccgacgtaacccgtccattcgttagtcaagccgttattactgacggaaagtacttcagttttttctgctatcagctgaatacgctagcccttacgacacaagccgatcagaacaatccgcgcaagaatatctgctggggtacacagtccaaacccctgtacgagacaatcgaggataacgatgtgaaggggtttaatgatgacgtgctgctgcaaatagtgcactttctgcttaataggcccaaagaagaaaagagccagctgctggagaattag

SEQ ID NO: 192521 - DNA, 1320 bp, Artificial Sequence
  derived and/or modified sequence
atggctgctgcccgctgctggaggcccctgctgcggggcccccggctgagcctgcacacagctgccaatgctgctgccacagccacagagaccacctgccaggatgtggccgccacccctgtggcccgctacccacccatcgtggcctccatgacagctgacagcaaggccgcccggctgcggagaattgagcgctggcaggccaccgtgcacgccgctgagagcgtggatgagaagctgcgcatcctgaccaagatgcagttcatgaagtacatggtgtacccccagacctttgccctgaatgctgaccgctggtaccagtacttcaccaagacagtgttcctgagcggcctgcccccacctcctgctgagcctgagcctgagcctgagcctgagcctgagcccgccctggacctggccgccctgcgggctgtggcctgtgactgcctgctgcaggagcacttctacctgcggaggagaagaagagtgcacagatatgaggagagcgaggtgatcagcctgcccttcctggaccagctggtgtccaccctggtgggcctgctgagcccccacaacccagccctggccgccgccgccctggactaccgctgccctgtgcacttctactgggtgcggggggaggagatcatcccccggggccaccggcggggcagaattgatgacctgcgctaccagattgatgacaagcccaacaaccagatccgcatcagcaagcagctggccgagtttgtgcccctggactacagcgtgcccatcgagatccccaccatcaagtgcaagccagacaagctgcccctcttcaagaggcagtatgagaaccacatctttgtgggcagcaagacagctgacccctgctgctacggccacacccagttccacctgctgcctgacaagctgcggcgggagcggctgctgcggcagaactgtgccgaccagatcgaggtggtgttccgggccaatgccatcgccagcctgtttgcctggacaggagcccaggccatgtaccagggcttctggagcgaggctgatgtgacccggccctttgtgtcccaggccgtcatcacagatggcaagtacttctccttcttctgctaccagctgaacaccctggccctgaccacccaggccgaccagaacaaccccaggaagaacatctgctggggcacccagagcaagcccctgtatgagaccatcgaggacaatgatgtgaagggcttcaatgatgatgtgctgctgcagatcgtgcacttcctgctgaaccggcccaaggaggagaagagccagctgctggagaactag

SEQ ID NO: 192522 - DNA, 1678 bp, Artificial Sequence
  derived and/or modified sequence
gcttaagttgacctctgggtccggaatcgcgggcaaagatggcggcggccaggtgttggaggcctttgctacgcggtccgaggctttcattgcacaccgcggctaatgccgccgccacggctacagaaacgacctgccaagacgtcgcggcgacccccgtcgcgcggtacccgccgattgtggcctccatgacagccgacagcaaagctgcacggctgcggcggatcgagcgctggcaggcgacggtgcacgctgcggagtcggtagacgagaagctgcgaatcctcaccaagatgcagtttatgaagtacatggtttacccgcagaccttcgcgctgaatgccgaccgctggtaccagtacttcaccaagaccgtgttcctgtcgggtctgccgccgcccccagcggagcccgagcccgagcccgaacccgaacctgaacctgcgctggacctcgcggcgctgcgtgcggtcgcctgcgactgcctgctgcaggagcacttctacctgcggcgcaggcggcgcgtgcaccgttacgaggagagcgaggtcatatctttgcccttcctggatcagctggtgtcaaccctcgtgggcctcctcagcccacacaacccggccctggccgctgccgccctcgattatagatgcccagttcatttttactgggtgcgtggtgaagaaattattcctcgtggtcatcgaagaggtcgaattgatgacttgcgataccagatagatgataaaccaaacaaccagattcgaatatccaagcaactcgcagagtttgtgccattggattattctgttcctatagaaatccccactataaaatgtaaaccagacaaacttccattattcaaacggcagtatgaaaaccacatatttgttggctcaaaaactgcagatccttgctgttacggtcacacccagtttcatctgttacctgacaaattaagaagggaaaggcttttgagacaaaactgtgctgatcagatagaagttgtttttagagctaatgctattgcaagcctttttgcttggactggagcacaagctatgtatcaaggattctggagtgaagcagatgttactcgaccttttgtctcccaggctgtgatcacagatggaaaatacttttcctttttctgctaccagctaaatactttggcactgactacacaagctgatcaaaataaccctcgtaaaaatatatgttggggtacacaaagtaagcctctttatgaaacaattgaggataatgatgtgaaaggttttaatgatgatgttctacttcagatagttcactttctactgaatagaccaaaagaagaaaaatcacagctgttggaaaactgaaaaagcatatttgattgagaactgtgggaatatttaaattttactgaaggaacaataatgatgagatttgtaactgtcaactattaaatacattgatttttgagacaaatatttcttatgtcaacctgttattagatctcttactctgctcaaattcatcactgaaagatttaattttagttaccttttgttgatttaaaaataattgcatttgtatattgctaactgataagacaaattgagttattgagctattaaatgcacattttaatataaatgcagaaatcccaaataaaatgctaacatactgaattcagtaa

SEQ ID NO: 192523 - DNA, 1320 bp, Artificial Sequence
  derived and/or modified sequence
atggccgccgcccggtgctggcggcccctgctgcggggcccccggctgtccctgcacacagccgcaaatgcggctgctactgccactgagaccacatgtcaggacgttgccgccacgcctgtggccaggtacccccccatcgtcgcctccatgactgcggactccaaagccgctcgtctcaggaggatcgagagatggcaagcgaccgtgcatgcggctgaaagcgtggacgagaaactgcgcattttgaccaagatgcaattcatgaaatatatggtctacccccagacgttcgcccttaatgccgaccgatggtaccagtattttacaaagaccgtctttcttagcgggctgccaccccctcctgccgagccagagccagaacctgagcctgagccagaacccgcgcttgatctggccgcattacgagccgtagcctgtgattgtctgttacaagaacacttctacctgagaaggagaagacgagtacacagatacgaggagagtgaggtgatttccttgccctttcttgatcagctggtaagtacgcttgtggggttactcagcccccacaatcccgctctggctgccgcggcacttgattaccggtgtcccgtgcacttctattgggtcagaggagaggaaattatcccccgaggacaccgcaggggaagaatcgacgatttgagatatcagatcgatgacaagccaaacaatcaaatccggatttcgaaacagctcgccgagtttgtgcccctggactacagcgtccccatagaaattcccactattaaatgtaaaccggacaaactgccgttgttcaaaagacaatacgagaaccatatcttcgtgggcagtaagaccgcggatccatgttgttatggccacacccagtttcatttgcttccagacaagctgcgccgggagaggctgttgcggcagaactgtgccgaccagatcgaagtggtgttccgcgctaatgccatcgctagcctttttgcctggactggagcacaggccatgtatcagggcttctggtctgaggccgacgtaacaaggccattcgtttcccaggctgttataacagatgggaagtatttctcatttttctgctaccagttgaatactctggccctcacaacccaggcagaccaaaacaacccgaggaagaatatctgctggggaacgcaatctaaaccgctttacgagacgattgaggacaatgacgtcaaaggcttcaatgacgatgttctgctgcagattgttcacttcctcctaaatagacctaaagaggaaaaatctcagcttctcgagaactag

SEQ ID NO: 192524 - DNA, 1320 bp, Artificial Sequence
  derived and/or modified sequence
atggccgcagcacgctgttggcgcccacttctccggggtccaagactctctctgcacactgcagccaacgccgcagccacagcaaccgagactacctgccaggacgtagccgcaacacccgttgcaaggtacccacctattgtagcttcaatgactgcagatagtaaggcggctaggctcagaaggatcgagcggtggcaagctaccgtccatgcggcagagtcagtcgacgagaaactcagaatcctgaccaaaatgcagttcatgaaatacatggtgtatccccagaccttcgcgttgaacgcggatagatggtaccaatattttacaaagacagtattcctcagcggcctgccccctcctcctgcggaacctgagcccgagcccgagcccgaaccggagcctgcactggatcttgccgctcttcgtgccgtcgcctgcgattgtctcctccaggagcacttttatttgaggaggcggagacgggtgcacaggtatgaagaaagcgaagtcatctccctccctttccttgaccagctcgtcagcacacttgttggattgttgagcccccacaacccagccctggcagctgcggctttggattatcgatgcccagtacacttctactgggtgagaggcgaggaaattatcccacggggtcatcgtcgtgggaggatagacgatctcagataccagatcgacgacaagccgaataaccagattcgcatctccaagcagttggccgaatttgtgccacttgattatagcgtgcccatagagatccccaccatcaaatgcaaacctgacaagttgcccctttttaaacggcaatacgaaaatcatatattcgtcggcagcaagaccgcggatccctgctgttacggtcacacacagttccatctccttcctgacaagctccgtagggaacgcttattgagacagaactgtgccgaccaaatcgaagtggtctttcgggctaatgcgatagcaagtctgttcgcctggaccggagcccaggccatgtaccaaggtttttggtccgaggcagatgtgacaagaccatttgtttcccaagccgtgataaccgatggtaaatatttttctttcttttgctaccaactcaacacgctggcattgacaactcaggccgaccagaataacccgcgaaagaatatatgttggggaactcagagcaaacccctgtacgagactatcgaggataacgatgtgaagggatttaacgatgacgtattactgcaaatcgttcatttcctcctgaacagacccaaagaggagaagtcacagctgctagagaactag

SEQ ID NO: 192525 - DNA, 1320 bp, Artificial Sequence
  derived and/or modified sequence
atggccgccgccagatgctggagacccctgctgagaggccccagactgagcctgcacaccgccgccaacgccgccgccaccgccaccgagaccacctgccaggacgtggccgccacccccgtggccagatacccccccatcgtggccagcatgaccgccgacagcaaggccgccagactgagaagaatcgagagatggcaggccaccgtgcacgccgccgagagcgtggacgagaagctgagaatcctgaccaagatgcagttcatgaagtacatggtgtacccccagaccttcgccctgaacgccgacagatggtaccagtacttcaccaagaccgtgttcctgagcggcctgccccccccccccgccgagcccgagcccgagcccgagcccgagcccgagcccgccctggacctggccgccctgagagccgtggcctgcgactgcctgctgcaggagcacttctacctgagaagaagaagaagagtgcacagatacgaggagagcgaggtgatcagcctgcccttcctggaccagctggtgagcaccctggtgggcctgctgagcccccacaaccccgccctggccgccgccgccctggactacagatgccccgtgcacttctactgggtgagaggcgaggagatcatccccagaggccacagaagaggcagaatcgacgacctgagataccagatcgacgacaagcccaacaaccagatcagaatcagcaagcagctggccgagttcgtgcccctggactacagcgtgcccatcgagatccccaccatcaagtgcaagcccgacaagctgcccctgttcaagagacagtacgagaaccacatcttcgtgggcagcaagaccgccgacccctgctgctacggccacacccagttccacctgctgcccgacaagctgagaagagagagactgctgagacagaactgcgccgaccagatcgaggtggtgttcagagccaacgccatcgccagcctgttcgcctggaccggcgcccaggccatgtaccagggcttctggagcgaggccgacgtgaccagacccttcgtgagccaggccgtgatcaccgacggcaagtacttcagcttcttctgctaccagctgaacaccctggccctgaccacccaggccgaccagaacaaccccagaaagaacatctgctggggcacccagagcaagcccctgtacgagaccatcgaggacaacgacgtgaagggcttcaacgacgacgtgctgctgcagatcgtgcacttcctgctgaacagacccaaggaggagaagagccagctgctggagaactag

SEQ ID NO: 192526 - protein, 331 aa, Artificial Sequence
  derived and/or modified sequence
MWLWEDQGGLLGPFSFLLLVLLLVTRSPVNACLLTGSLFVLLRVFSFEPVPSCRALQVLKPRDRISAIAHRGGSHDAPENTLAAIRQAAKNGATGVELDIEFTSDGIPVLMHDNTVDRTTDGTGRLCDLTFEQIRKLNPAANHRLRNDFPDEKIPTLREAVAECLNHNLTIFFDVKGHAHKATEALKKMYMEFPQLYNNSVVCSFLPEVIYKMRQTDRDVITALTHRPWSLSHTGDGKPRYDTFWKHFIFVMMDILLDWSMHNILWYLCGISAFLMQKDFVSPAYLKKWSAKGIQVVGWTVNTFDEKSYYESHLGSSYITDSMVEDCEPHF

SEQ ID NO: 192527 - DNA, 996 bp, Artificial Sequence
  derived and/or modified sequence
atgtggctttgggaggatcaggggggcttactgggtcctttcagctttttgttgcttgtcctgctgctggtgacacggagtccagtgaatgcctgcctcctgacaggctccttgttcgtgctcctgagagtattctctttcgagccagtcccatcctgcagggccctgcaggtactaaaacccagagatcggatcagcgccatcgcccacaggggcggatctcatgatgctcccgagaatacgctggccgccatccggcaagctgctaaaaatggagcaacgggtgttgaactcgacatagaatttacgtcagacggaatacccgtgctaatgcatgacaataccgtggacaggaccaccgatggtaccgggcgtctttgcgacctgacctttgagcagatcagaaaacttaacccagcagccaatcaccgactgagaaatgattttcccgacgaaaagatccccacactgcgggaggctgtcgccgagtgtctcaaccacaaccttacaattttcttcgatgtgaaagggcatgcgcacaaggccacagaagctctcaaaaaaatgtatatggaatttccacagctatacaataacagtgtggtgtgctccttcctgccagaggtgatttataagatgcgacagaccgaccgggacgtgataacagccctcactcacaggccctggagtctgtcacatactggcgatgggaaaccccgctacgacacattctggaagcatttcatctttgttatgatggatatcctcctggactggagcatgcataacattctctggtacctgtgcggtatcagcgcatttcttatgcaaaaggactttgtctcccccgcctatctcaagaaatggagcgctaaggggatccaggtagtcgggtggaccgtgaatacatttgacgaaaaatcatattacgagtcccacctcggatctagttacatcaccgacagtatggttgaggattgcgaacctcacttttag

SEQ ID NO: 192528 - DNA, 2937 bp, Artificial Sequence
  derived and/or modified sequence
actccctctctggatgtgtctgctgccgccattgtgcggcgctggtcccctcagagggttcctgctgctgccggtgccttggaccctccccctcgcttctcgttctactgccccaggagcccggcgggtccgggactcccgtccgtgccggtgcgggcgccggcatgtggctgtgggaggaccagggcggcctcctgggccctttctccttcctgctgctagtgctgctgctggtgacgcggagcccggtcaatgcctgcctcctcaccggcagcctcttcgttctactgcgcgtcttcagctttgagccggtgccctcttgcagggccctgcaggtgctcaagccccgggaccgcatttctgccatcgcccaccgtggcggcagccacgacgcgcccgagaacacgctggcggccattcggcaggcagctaagaatggagcaacaggcgtggagttggacattgagtttacttctgacgggattcctgtcttaatgcacgataacacagtagataggacgactgatgggactgggcgattgtgtgatttgacatttgaacaaattaggaagctgaatcctgcagcaaaccacagactcaggaatgatttccctgatgaaaagatccctaccctaagggaagctgttgcagagtgcctaaaccataacctcacaatcttctttgatgtcaaaggccatgcacacaaggctactgaggctctaaagaaaatgtatatggaatttcctcaactgtataataatagtgtggtctgttctttcttgccagaagttatctacaagatgagacaaacagatcgggatgtaataacagcattaactcacagaccttggagcctaagccatacaggagatgggaaaccacgctatgatactttctggaaacattttatatttgttatgatggacattttgctcgattggagcatgcataatatcttgtggtacctgtgtggaatttcagctttcctcatgcaaaaggattttgtatccccggcctacttgaagaagtggtcagctaaaggaatccaggttgttggttggactgttaatacctttgatgaaaagagttactacgaatcccatcttggttccagctatatcactgacagcatggtagaagactgcgaacctcacttctagactttcacggtgggacgaaacgggttcagaaactgccaggggcctcatacagggatatcaaaataccctttgtgctagcccaggccctggggaatcaggtgactcacacaaatgcaatagttggtcactgcatttttacctgaaccaaagctaaacccggtgttgccaccatgcaccatggcatgccagagttcaacactgttgctcttgaaaatctgggtctgaaaaaacgcacaagagcccctgccctgccctagctgaggcacacagggagacccagtgaggataagcacagattgaattgtacagtttgcagatgcagatgtaaatgcatgggacatgcatgataactcagagttgacattttaaaacttgccacacttatttcaaatatttgtactcagctatgttaacatgtactgtagacatcaaacttgtggccatactaataaaattattaaaaggagcactaaaggaaaactgtgtgccaagcatcatatcctaaggcatacggaatttggggaagccaccatgcaatccagtgaggcttcagtgtacagcaaccaaaatggtagggaggtcttgaagccaatgagggatttatagcatcttgaatagagagctgcaaaccaccagggggcagagttgcatttttccaggctttttaggaagctctgcaacagatgtgatctgatcataggcaattagaactggaagaaacttccaaaaatatctaggtttgtcctcattttacaaatgaggaaactaaactctgtggaagggaaggggttgcctcaaaagtcacagcttagctgggcacagtggctcatgccgataatcccagcaattcagaaagctgaggcaggaggattacttgaggccagactgggcaatatagcaagaccccatctctaaaaaattaggcatggtggtgcatgcctgtattcccagctactcaggaggttgaggtgggaggatcacttgagcccagaagttcaaggctgcaatgagccatgattacaccacggcactacaaccttggtggcacagtgagaacctgactcttaaaaaaaaaaaaaaaaaaaaaaaaaaaaagataactagaacttctagaacatcttgtttacagttagccagaaactatacaagtggtttaacatgcattatcttactcaatccatacaaaagtcttatggaggtgttagcactctttctactgatgaagaactgaggtacttcataaaaccacttacccaaggtgtcttgagtctggtacaactggcattcaaatctaggtcagtctgcccccagagccactacccttacccctcactgaatctgcctttatattgttgagcccatgaccccaaactgctctttccaatttgaacttccagggattttattgtgaacttacatagcaacattaaaatgaagttgaattgtttttaatggcaacgccgtctgtctcctctagcttaccgcttctcacctttcaaccccatctgtggcctttgtccaggcccacagcttagccatggcttccctcctgcatccctgccgtgggttgctggcctcacacttgcagcagctggacagtgattttagaaggccaccagtccccatagctatgtgacaatgagaagcaaacttttttgtgacagattgtattggcataggcatgatagatggggattggtacgttttgaatcagcatttgcaaaaaaattgtcttgaattttaaaataaacaacaaagatttgttcattgagtgcaa

SEQ ID NO: 192529 - DNA, 996 bp, Artificial Sequence
  derived and/or modified sequence
atgtggctgtgggaggaccagggcggcctgctgggccccttctccttcctgctgctggtgctgctgctggtgaccaggagccctgtgaatgcctgcctgctgaccggcagcctgtttgtgctgctgcgggtcttctcctttgagcctgtgcccagctgccgggccctgcaggtgctgaagccccgggaccgcatcagcgccatcgcccaccggggcggcagccatgatgcccctgagaacaccctggccgccatccggcaggccgccaagaatggagccaccggggtggagctggacatcgagttcaccagtgatggcatccctgtgctgatgcatgacaacacagtggacaggaccacagatggcaccggccgcctgtgtgacctgacctttgagcagatcaggaagctgaacccagctgccaaccaccggctgagaaatgacttcccagatgagaagatccccaccctgcgggaggccgtggctgaatgtctgaaccacaacctgaccatcttctttgatgtgaagggccacgcccacaaggccacagaggccctgaagaagatgtacatggagttcccccagctgtacaacaacagcgtggtgtgcagcttcctgcctgaggtgatctacaagatgaggcagacagacagagatgtgatcacagccctgacccaccggccctggagcctgagccacactggagatggcaagcccaggtatgacaccttctggaagcacttcatctttgtgatgatggacatcctgctggactggagcatgcacaacatcctgtggtacctgtgtggcatcagcgccttcctgatgcagaaggactttgtgtccccagcctacctgaagaagtggagcgccaagggcatccaggtggtgggctggacagtgaacacctttgatgagaagagctactatgagagccacctgggcagcagctacatcacagacagcatggtggaggactgtgagccccacttctag

SEQ ID NO: 192530 - DNA, 996 bp, Artificial Sequence
  derived and/or modified sequence
atgtggctgtgggaggaccagggcggcctgctgggccccttcagcttcctgcttctagtcctgctgcttgtcacaaggtcacctgtgaatgcctgtttgcttacaggatcccttttcgtgctgcttagagtattcagttttgaaccagtgccctcttgcagagccttacaggtgctgaaacccagagaccggattagcgccatcgcccatcgcggcggatctcacgacgcgccagagaataccctggccgccatacggcaagcagcgaaaaatggcgccaccggagtcgaacttgacatcgagtttacttcagacggaattcccgtgttaatgcacgataacactgtggacaggaccactgatggaacagggcgtctctgtgatctgacctttgagcagatccgtaagctcaatcccgcggccaaccacagactgaggaatgactttccagacgaaaagattccgactctcagggaggccgttgcagaatgtcttaatcacaatctcacaattttctttgatgttaagggccacgcccataaagccacagaggctctcaagaaaatgtatatggagttcccccagctgtataataactccgtcgtgtgttcctttctgccagaagttatatacaaaatgcgacaaaccgaccgtgatgtcataacagctctcacccaccgcccctggtcccttagtcacaccggggacggaaaacctagatacgacaccttctggaagcacttcatttttgtgatgatggatatcctgttggactggagcatgcacaatattctctggtatctatgtgggatctctgcatttctcatgcaaaaggactttgttagtcctgcatatctgaaaaagtggtctgccaaaggaatccaagtggtcgggtggactgtgaatacctttgacgaaaagtcgtactatgagagccatctgggatcttcctacataaccgattcaatggtcgaggattgcgagccccacttttag

SEQ ID NO: 192531 - DNA, 996 bp, Artificial Sequence
  derived and/or modified sequence
atgtggctctgggaggatcagggcggactcctcgggccattcagctttttactgctcgtgctgcttctggtcacccggtccccagtaaatgcatgtctgctgaccggatcattattcgtactcttgagggtcttcagctttgagccggtccctagttgcagggcactccaggtgctaaaacccagagatcggattagcgcaattgcgcatagggggggatcgcatgatgctcctgagaatacgctggccgctattagacaagctgccaagaacggtgctaccggggtggaactggacatcgagtttacatctgatggaatccccgttctcatgcacgacaatactgtcgatcgcacgactgacggaacaggacgactgtgcgatctgacatttgaacaaatacgcaaacttaatcctgcggcaaaccatcggctgaggaacgattttcccgatgagaaaatccctactctccgtgaggccgtggcggagtgtctaaaccataatctgaccattttttttgatgtgaagggacacgcccacaaggccaccgaagcattgaagaaaatgtacatggagttcccacagctgtataataacagtgtcgtgtgcagtttcctgccagaggtgatctataaaatgagacaaacagaccgtgatgtcatcacagctctgacgcacaggccctggtctctctcccatacaggagacggcaagccacgttacgataccttctggaagcactttatctttgtgatgatggacattttgttggactggagcatgcacaacatcctgtggtatctgtgtgggatatctgcttttctgatgcaaaaggacttcgtgagtcctgcttatctcaaaaagtggtctgctaagggaattcaggtggtgggctggaccgtgaatactttcgacgagaaaagttactatgagtctcatctggggagtagctacattaccgactccatggtagaggactgcgagccacatttctag

SEQ ID NO: 192532 - DNA, 996 bp, Artificial Sequence
  derived and/or modified sequence
atgtggctgtgggaggaccagggcggcctgctgggccccttcagcttcctgctgctggtgctgctgctggtgaccagaagccccgtgaacgcctgcctgctgaccggcagcctgttcgtgctgctgagagtgttcagcttcgagcccgtgcccagctgcagagccctgcaggtgctgaagcccagagacagaatcagcgccatcgcccacagaggcggcagccacgacgcccccgagaacaccctggccgccatcagacaggccgccaagaacggcgccaccggcgtggagctggacatcgagttcaccagcgacggcatccccgtgctgatgcacgacaacaccgtggacagaaccaccgacggcaccggcagactgtgcgacctgaccttcgagcagatcagaaagctgaaccccgccgccaaccacagactgagaaacgacttccccgacgagaagatccccaccctgagagaggccgtggccgagtgcctgaaccacaacctgaccatcttcttcgacgtgaagggccacgcccacaaggccaccgaggccctgaagaagatgtacatggagttcccccagctgtacaacaacagcgtggtgtgcagcttcctgcccgaggtgatctacaagatgagacagaccgacagagacgtgatcaccgccctgacccacagaccctggagcctgagccacaccggcgacggcaagcccagatacgacaccttctggaagcacttcatcttcgtgatgatggacatcctgctggactggagcatgcacaacatcctgtggtacctgtgcggcatcagcgccttcctgatgcagaaggacttcgtgagccccgcctacctgaagaagtggagcgccaagggcatccaggtggtgggctggaccgtgaacaccttcgacgagaagagctactacgagagccacctgggcagcagctacatcaccgacagcatggtggaggactgcgagccccacttctag

SEQ ID NO: 192533 - protein, 3674 aa, Artificial Sequence
  derived and/or modified sequence
MAGQPHSPRELLGAAGHRSRRPSTELRVPPSPSLTMDSQYETGHIRKLQARHMQMQEKTFTKWINNVFQCGQAGIKIRNLYTELADGIHLLRLLELISGEALPPPSRGRLRVHFLENSSRALAFLRAKVPVPLIGPENIVDGDQTLILGLIWVIILRFQISHISLDKEEFGASAALLSTKEALLVWCQRKTASYTNVNITDFSRSWSDGLGFNALIHAHRPDLLDYGSLRPDRPLHNLAFAFLVAEQELGIAQLLDPEDVAAAQPDERSIMTYVSLYYHYCSRLHQGQTVQRRLTKILLQLQETELLQTQYEQLVADLLRWIAEKQMQLEARDFPDSLPAMRQLLAAFTIFRTQEKPPRLQQRGAAEALLFRLQTALQAQNRRPFLPHEGLGLAELSQCWAGLEWAEAARSQALQQRLLQLQRLETLARRFQHKAALRESFLKDAEQVLDQARAPPASLATVEAAVQRLGMLEAGILPQEGRFQALAEIADILRQEQYHSWADVARRQEEVTVRWQRLLQHLQGQRKQVADMQAVLSLLQEVEAASHQLEELQEPARSTACGQQLAEVVELLQRHDLLEAQVSAHGAHVSHLAQQTAELDSSLGTSVEVLQAKARTLAQLQQSLVALVRARRALLEQTLQRAEFLRNCEEEEAWLKECGQRVGNAALGRDLSQIAGALQKHKALEAEVHRHQAVCVDLVRRGRDLSARRPPTQPDPGERAEAVQGGWQLLQTRVVGRGARLQTALLVLQYFADAAEAASWLRERRSSLERASCGQDQAAAETLLRRHVRLERVLRAFAAELRRLEEQGRAASARASLFTVNSALSPPGESLRNPGPWSEASCHPGPGDAWKMALPAEPDPDFDPNTILQTQDHLSQDYESLRALAQLRRARLEEAMALFGFCSSCGELQLWLEKQTVLLQRVQPQADTLEVMQLKYENFLTALAVGKGLWAEVSSSAEQLRQRYPGNSTQIQRQQEELSQRWGQLEALKREKAVQLAHSVEVCSFLQECGPTQVQLRDVLLQLEALQPGSSEDTCHALQLAQKKTLVLERRVHFLQSVVVKVEEPGYAESQPLQGQVETLQGLLKQVQEQVAQRARRQAETQARQSFLQESQQLLLWAESVQAQLRSKEVSVDVASAQRLLREHQDLLEEIHLWQERLQQLDAQSQPMAALDCPDSQEVPNTLRVLGQQGQELKVLWEQRQQWLQEGLELQKFGREVDGFTATCANHQAWLHLDNLGEDVREALSLLQQHREFGRLLSTLGPRAEALRAHGEKLVQSQHPAAHTVREQLQSIQAQWTRLQGRSEQRRRQLLASLQLQEWKQDVAELMQWMEEKGLMAAHEPSGARRNILQTLKRHEAAESELLATRRHVEALQQVGRELLSRRPCGQEDIQTRLQGLRSKWEALNRKMTERGDELQQAGQQEQLLRQLQDAKEQLEQLEGALQSSETGQDLRSSQRLQKRHQQLESESRTLAAKMAALASMAHGMAASPAILEETQKHLRRLELLQGHLAIRGLQLQASVELHQFCHLSNMELSWVAEHMPHGSPTSYTECLNGAQSLHRKHKELQVEVKAHQGQVQRVLSSGRSLAASGHPQAQHIVEQCQELEGHWAELERACEARAQCLQQAVTFQQYFLDVSELEGWVEEKRPLVSSRDYGRDEAATLRLINKHQALQEELAIYWSSMEELDQTAQTLTGPEVPEQQRVVQERLREQLRALQELAATRDRELEGTLRLHEFLREAEDLQGWLASQKQAAKGGESLGEDPEHALHLCTKFAKFQHQVEMGSQRVAACRLLAESLLERGHSAGPMVRQRQQDLQTAWSELWELTQARGHALRDTETTLRVHRDLLEVLTQVQEKATSLPNNVARDLCGLEAQLRSHQGLERELVGTERQLQELLETAGRVQKLCPGPQAHAVQQRQQAVTQAWAVLQRRMEQRRAQLERARLLARFRTAVRDYASWAARVRQDLQVEESSQEPSSGPLKLSAHQWLRAELEAREKLWQQATQLGQQALLAAGTPTKEVQEELRALQDQRDQVYQTWARKQERLQAEQQEQLFLRECGRLEEILAAQEVSLKTSALGSSVEEVEQLIRKHEVFLKVLTAQDKKEAALRERLKTLRRPRVRDRLPILLQRRMRVKELAESRGHALHASLLMASFTQAATQAEDWIQAWAQQLKEPVPPGDLRDKLKPLLKHQAFEAEVQAHEEVMTSVAKKGEALLAQSHPRAGEVSQRLQGLRKHWEDLRQAMALRGQELEDRRNFLEFLQRVDLAEAWIQEKEVKMNVGDLGQDLEHCLQLRRRLREFRGNSAGDTVGDACIRSISDLSLQLKNRDPEEVKIICQRRSQLNNRWASFHGNLLRYQQQLEGALEIHVLSRELDNVTKRIQEKEALIQALDCGKDLESVQRLLRKHEELEREVHPIQAQVESLEREVGRLCQRSPEAAHGLRHRQQEVAESWWQLRSRAQKRREALDALHQAQKLQAMLQELLVSAQRLRAQMDTSPAPRSPVEARRMLEEHQECKAELDSWTDSISLARSTGQQLLTAGHPFSSDIRQVLAGLEQELSSLEGAWQEHQLQLQQALELQLFLSSVEKMERWLCSKEDSLASEGLWDPLAPMEPLLWKHKMLEWDLEVQAGKISALEATARGLHQGGHPEAQSALGRCQAMLLRKEALFRQAGTRRHRLEELRQLQAFLQDSQEVAAWLREKNLVALEEGLLDTAMLPAQLQKQQNFQAELDASMHQQQELQREGQRLLQGGHPASEAIQERLEELGALWGELQDNSQKKVAKLQKACEALRLRRSMEELENWLEPIEVELRAPTVGQALPGVGELLGTQRELEAAVDKKARQAEALLGQAQAFVREGHCLAQDVEEQARRLLQRFKSLREPLQERRTALEARSLLLKFFRDADEEMAWVQEKLPLAAAQDYGQSLSAVRHLQEQHQNLESEMSSHEALTRVVLGTGYKLVQAGHFAAHEVAARVQQLEKAMAHLRAEAARRRLLLQQAQEAQQFLTELLEAGSWLAERGHVLDSEDMGHSAEATQALLRRLEATKRDLEAFSPRIERLQQTAALLESRKNPESPKVLAQLQAVREAHAELLRRAEARGHGLQEQLQLHQLERETLLLDAWLTTKAATAESQDYGQDLEGVKVLEEKFDAFRKEVQSLGQAKVYALRKLAGTLERGAPRRYPHIQAQRSRIEAAWERLDQAIKARTENLAAAHEVHSFQQAAAELQGRMQEKTALMKGEDGGHSLSSVRTLQQQHRRLERELEAMEKEVARLQTEACRLGQLHPAAPGGLAKVQEAWATLQAKAQERGQWLAQAAQGHAFLGRCQELLAWAQERQELASSEELAEDVAGAEQLLGQHEELGQEIRECRLQAQDLRQEGQQLVDNSHFMSAEVTECLQELEGRLQELEEAWALRWQRCAESWGLQKLRQRLEQAEAWLACWEGLLLKPDYGHSVSDVELLLHRHQDLEKLLAAQEEKFAQMQKTEMEQELLLQPQELKPGRAGSSLTSFQWRPSGHQGLGAQLAETRDPQDAKGTPTMEGSLEFKQHLLPGGRQPSSSSWDSCRGNLQGSSLSLFLDERMAAEKVASIALLDLTGARCERLRGRHGRKHTFSLRLTSGAEILFAAPSEEQAESWWRALGSTAAQSLSPKLKAKPVSSLNECTTKDARPGCLLRSDP

SEQ ID NO: 192534 - DNA, 2900 bp, Artificial Sequence
  derived and/or modified sequence
gttctgcccagtggcctggcgcaggaaaggtgacccagtagttcagcctgtcccagctgcctgccccagcaccatcccagacccctttccctggggcccaccttggccctgaggaaggccagagctcggctgctgttctccaggaagtgcacacgcaggcggccccggctcgggggtggcagggcctcccctgagatgagctccagcagccgcaggaggtggatgccgtcagccagctctgtgtacaggttccggatcttgatgcccgcctggggaggggacaggggtaagtatggggtcagcccagcctcacctgtcctcccatcctgggacctgagaggtacgacccagagcagctgctttggaagaaggagctctggcctcagcttggcctcaggcagatgaccccacagctcaccccggaggcccactggccagagctgggggcctggtatgggtgggctgtgggtcacagctggctatactcacctggccgcactggaagacgttattgatccacttggtgaaagtcttctcctgcatctgcatgtgccgggcctgtagcttgcgaatgtggcccgtctcgtactgagagtccatggtgagacttggactgggcgggacccggagttctgtgctgggcctcctgctgcggtgccctgcagccccgaggagctcccggggactgtggggctgaccagccatcagccctgcagactttggggatgaggagctgctggatggctccctaaacctggagggcatgcagattaggggatgatgtgaatggagatggcccctctaccaggggcctggggtcccgccttgccagactgtcctcacatttcatgggggttgcagcttggagcccagccaggtaagggccagtgcttctggtcccctgtgcttgaatggcccagggccccctttgccccaccccaccttccagattcttcttctcagagcccctgctgccaggtccctccaccacagtgactgggacaggtggaaggaagacaggaaactgcttaccttggtgatgcctgggtcccacagagacggctctgctggacggatggagatggtagatagcaggggctgcttaccttggtgatgcctgggttccacagaggcggcccagctggacggatggagatggcagatagcaggggctgtggagggagggagagggacatcaggagaggccaaggctggagcagggctgcaccacagccctccccttgagccagcgtgctggggtgacggcacacaggcggcattgtcctcccacctgccacagggcgtggcccagacagggagggggtggttcaggaatgctccagggccattgccagatgatgtcctccttcatcatcctcccttccccgccagcaacttctccaactccaggtgggggtcctggctcccaggacgcagaggcccatggagcggccctgccaccgcatggggtgctgcagtctgcgtaggaggtaccaaagggcagagcctctgtgggaagcctgtggacgcacttcccaatctgagactgccctctgtaccctcttggggcctctctgtgagcacccagggcgaggggatgagggagcgtcctgggccgtggtcttctcattcacccccagggaacagcccatagactgagggcctcacagaccctgggcttggctttccaggccctgccagagtgcagcctgcctagcccggggctgaagggtaggctccctggaggaaggggtgacctggaactgcgagggctgtggagtctcctccaaaattagagacacggtgttaactctgggctccacagagctggccgtggcccggggctcggaggcaggggtgcagagggagctggtgggcgcccatcccttcctccccgagcagccgtggactacatgccagagtgaaggcgagttctaattctgggggtctcacccgcctctggctaaactcagggtagcagtgtgggctggggtgtgtgtgtgtgggtgtcttccagcggccctggagcctctgaagcgacagcccgctcctcagggaggcgctcctggcagccacagcccacagcaggacagccgctcagcgcgcccttgagagctgggctagggatgagtcacacttgaaccgcctgggcccactgcaggcagtcaggggtgacgctgagaggtgccgtggtctcgggtggggtgcggcttcctgcgtctgagagacgcttcctctcctgctgtcctctccctgccaggccccttctgcagcggctggcttccagacaccctgcgtccctcccttgctcgcagcagttgctgtggcggtcctcccgtgcacccccccttctgccctcactgcccctgggggtcctcatcacggaccccctaactcggcatcctggacaccaccaccccgcacctttccacagtgcagctctgctcgtgcctgtgaagcctcccacagcctgggaaggaaaatccagacttgccagaccttgcctcagccaggccttggaagcctgccagcttacctaaccagtaagaccctcagcccatggagtcctgtgtgatgttgtgagcgtgggaggacagactgaactgctcggcccgtggagtcctgtgtgatgttgtgagcggggaggacagactgaactgcgtggtgcttcgcacatagacctcaacagggattggcattttgaagctgttggcgggggctgtggactgcttttcttcctttctagctcaacggcagctaaagccactgcatacaatgcaaggactggctcctgtttggccacgactgattgcagcccctggtgaaatgagaaccctgtgggtcggaacaaagtttggattatttatgttgcaagtaactaaaatctcaagtgaaactgg

SEQ ID NO: 192535 - DNA, 11025 bp, Artificial Sequence
  derived and/or modified sequence
atggccggccagccccacagccccagagagctgctgggcgccgccggccacagaagcagaagacccagcaccgagctgagagtgccccccagccccagcctgaccatggacagccagtacgagaccggccacatcagaaagctgcaggccagacacatgcagatgcaggagaagaccttcaccaagtggatcaacaacgtgttccagtgcggccaggccggcatcaagatcagaaacctgtacaccgagctggccgacggcatccacctgctgagactgctggagctgatcagcggcgaggccctgcccccccccagcagaggcagactgagagtgcacttcctggagaacagcagcagagccctggccttcctgagagccaaggtgcccgtgcccctgatcggccccgagaacatcgtggacggcgaccagaccctgatcctgggcctgatctgggtgatcatcctgagattccagatcagccacatcagcctggacaaggaggagttcggcgccagcgccgccctgctgagcaccaaggaggccctgctggtgtggtgccagagaaagaccgccagctacaccaacgtgaacatcaccgacttcagcagaagctggagcgacggcctgggcttcaacgccctgatccacgcccacagacccgacctgctggactacggcagcctgagacccgacagacccctgcacaacctggccttcgccttcctggtggccgagcaggagctgggcatcgcccagctgctggaccccgaggacgtggccgccgcccagcccgacgagagaagcatcatgacctacgtgagcctgtactaccactactgcagcagactgcaccagggccagaccgtgcagagaagactgaccaagatcctgctgcagctgcaggagaccgagctgctgcagacccagtacgagcagctggtggccgacctgctgagatggatcgccgagaagcagatgcagctggaggccagagacttccccgacagcctgcccgccatgagacagctgctggccgccttcaccatcttcagaacccaggagaagccccccagactgcagcagagaggcgccgccgaggccctgctgttcagactgcagaccgccctgcaggcccagaacagaagacccttcctgccccacgagggcctgggcctggccgagctgagccagtgctgggccggcctggagtgggccgaggccgccagaagccaggccctgcagcagagactgctgcagctgcagagactggagaccctggccagaagattccagcacaaggccgccctgagagagagcttcctgaaggacgccgagcaggtgctggaccaggccagagccccccccgccagcctggccaccgtggaggccgccgtgcagagactgggcatgctggaggccggcatcctgccccaggagggcagattccaggccctggccgagatcgccgacatcctgagacaggagcagtaccacagctgggccgacgtggccagaagacaggaggaggtgaccgtgagatggcagagactgctgcagcacctgcagggccagagaaagcaggtggccgacatgcaggccgtgctgagcctgctgcaggaggtggaggccgccagccaccagctggaggagctgcaggagcccgccagaagcaccgcctgcggccagcagctggccgaggtggtggagctgctgcagagacacgacctgctggaggcccaggtgagcgcccacggcgcccacgtgagccacctggcccagcagaccgccgagctggacagcagcctgggcaccagcgtggaggtgctgcaggccaaggccagaaccctggcccagctgcagcagagcctggtggccctggtgagagccagaagagccctgctggagcagaccctgcagagagccgagttcctgagaaactgcgaggaggaggaggcctggctgaaggagtgcggccagagagtgggcaacgccgccctgggcagagacctgagccagatcgccggcgccctgcagaagcacaaggccctggaggccgaggtgcacagacaccaggccgtgtgcgtggacctggtgagaagaggcagagacctgagcgccagaagaccccccacccagcccgaccccggcgagagagccgaggccgtgcagggcggctggcagctgctgcagaccagagtggtgggcagaggcgccagactgcagaccgccctgctggtgctgcagtacttcgccgacgccgccgaggccgccagctggctgagagagagaagaagcagcctggagagagccagctgcggccaggaccaggccgccgccgagaccctgctgagaagacacgtgagactggagagagtgctgagagccttcgccgccgagctgagaagactggaggagcagggcagagccgccagcgccagagccagcctgttcaccgtgaacagcgccctgagcccccccggcgagagcctgagaaaccccggcccctggagcgaggccagctgccaccccggccccggcgacgcctggaagatggccctgcccgccgagcccgaccccgacttcgaccccaacaccatcctgcagacccaggaccacctgagccaggactacgagagcctgagagccctggcccagctgagaagagccagactggaggaggccatggccctgttcggcttctgcagcagctgcggcgagctgcagctgtggctggagaagcagaccgtgctgctgcagagagtgcagccccaggccgacaccctggaggtgatgcagctgaagtacgagaacttcctgaccgccctggccgtgggcaagggcctgtgggccgaggtgagcagcagcgccgagcagctgagacagagataccccggcaacagcacccagatccagagacagcaggaggagctgagccagagatggggccagctggaggccctgaagagagagaaggccgtgcagctggcccacagcgtggaggtgtgcagcttcctgcaggagtgcggccccacccaggtgcagctgagagacgtgctgctgcagctggaggccctgcagcccggcagcagcgaggacacctgccacgccctgcagctggcccagaagaagaccctggtgctggagagaagagtgcacttcctgcagagcgtggtggtgaaggtggaggagcccggctacgccgagagccagcccctgcagggccaggtggagaccctgcagggcctgctgaagcaggtgcaggagcaggtggcccagagagccagaagacaggccgagacccaggccagacagagcttcctgcaggagagccagcagctgctgctgtgggccgagagcgtgcaggcccagctgagaagcaaggaggtgagcgtggacgtggccagcgcccagagactgctgagagagcaccaggacctgctggaggagatccacctgtggcaggagagactgcagcagctggacgcccagagccagcccatggccgccctggactgccccgacagccaggaggtgcccaacaccctgagagtgctgggccagcagggccaggagctgaaggtgctgtgggagcagagacagcagtggctgcaggagggcctggagctgcagaagttcggcagagaggtggacggcttcaccgccacctgcgccaaccaccaggcctggctgcacctggacaacctgggcgaggacgtgagagaggccctgagcctgctgcagcagcacagagagttcggcagactgctgagcaccctgggccccagagccgaggccctgagagcccacggcgagaagctggtgcagagccagcaccccgccgcccacaccgtgagagagcagctgcagagcatccaggcccagtggaccagactgcagggcagaagcgagcagagaagaagacagctgctggccagcctgcagctgcaggagtggaagcaggacgtggccgagctgatgcagtggatggaggagaagggcctgatggccgcccacgagcccagcggcgccagaagaaacatcctgcagaccctgaagagacacgaggccgccgagagcgagctgctggccaccagaagacacgtggaggccctgcagcaggtgggcagagagctgctgagcagaagaccctgcggccaggaggacatccagaccagactgcagggcctgagaagcaagtgggaggccctgaacagaaagatgaccgagagaggcgacgagctgcagcaggccggccagcaggagcagctgctgagacagctgcaggacgccaaggagcagctggagcagctggagggcgccctgcagagcagcgagaccggccaggacctgagaagcagccagagactgcagaagagacaccagcagctggagagcgagagcagaaccctggccgccaagatggccgccctggccagcatggcccacggcatggccgccagccccgccatcctggaggagacccagaagcacctgagaagactggagctgctgcagggccacctggccatcagaggcctgcagctgcaggccagcgtggagctgcaccagttctgccacctgagcaacatggagctgagctgggtggccgagcacatgccccacggcagccccaccagctacaccgagtgcctgaacggcgcccagagcctgcacagaaagcacaaggagctgcaggtggaggtgaaggcccaccagggccaggtgcagagagtgctgagcagcggcagaagcctggccgccagcggccacccccaggcccagcacatcgtggagcagtgccaggagctggagggccactgggccgagctggagagagcctgcgaggccagagcccagtgcctgcagcaggccgtgaccttccagcagtacttcctggacgtgagcgagctggagggctgggtggaggagaagagacccctggtgagcagcagagactacggcagagacgaggccgccaccctgagactgatcaacaagcaccaggccctgcaggaggagctggccatctactggagcagcatggaggagctggaccagaccgcccagaccctgaccggccccgaggtgcccgagcagcagagagtggtgcaggagagactgagagagcagctgagagccctgcaggagctggccgccaccagagacagagagctggagggcaccctgagactgcacgagttcctgagagaggccgaggacctgcagggctggctggccagccagaagcaggccgccaagggcggcgagagcctgggcgaggaccccgagcacgccctgcacctgtgcaccaagttcgccaagttccagcaccaggtggagatgggcagccagagagtggccgcctgcagactgctggccgagagcctgctggagagaggccacagcgccggccccatggtgagacagagacagcaggacctgcagaccgcctggagcgagctgtgggagctgacccaggccagaggccacgccctgagagacaccgagaccaccctgagagtgcacagagacctgctggaggtgctgacccaggtgcaggagaaggccaccagcctgcccaacaacgtggccagagacctgtgcggcctggaggcccagctgagaagccaccagggcctggagagagagctggtgggcaccgagagacagctgcaggagctgctggagaccgccggcagagtgcagaagctgtgccccggcccccaggcccacgccgtgcagcagagacagcaggccgtgacccaggcctgggccgtgctgcagagaagaatggagcagagaagagcccagctggagagagccagactgctggccagattcagaaccgccgtgagagactacgccagctgggccgccagagtgagacaggacctgcaggtggaggagagcagccaggagcccagcagcggccccctgaagctgagcgcccaccagtggctgagagccgagctggaggccagagagaagctgtggcagcaggccacccagctgggccagcaggccctgctggccgccggcacccccaccaaggaggtgcaggaggagctgagagccctgcaggaccagagagaccaggtgtaccagacctgggccagaaagcaggagagactgcaggccgagcagcaggagcagctgttcctgagagagtgcggcagactggaggagatcctggccgcccaggaggtgagcctgaagaccagcgccctgggcagcagcgtggaggaggtggagcagctgatcagaaagcacgaggtgttcctgaaggtgctgaccgcccaggacaagaaggaggccgccctgagagagagactgaagaccctgagaagacccagagtgagagacagactgcccatcctgctgcagagaagaatgagagtgaaggagctggccgagagcagaggccacgccctgcacgccagcctgctgatggccagcttcacccaggccgccacccaggccgaggactggatccaggcctgggcccagcagctgaaggagcccgtgccccccggcgacctgagagacaagctgaagcccctgctgaagcaccaggccttcgaggccgaggtgcaggcccacgaggaggtgatgaccagcgtggccaagaagggcgaggccctgctggcccagagccaccccagagccggcgaggtgagccagagactgcagggcctgagaaagcactgggaggacctgagacaggccatggccctgagaggccaggagctggaggacagaagaaacttcctggagttcctgcagagagtggacctggccgaggcctggatccaggagaaggaggtgaagatgaacgtgggcgacctgggccaggacctggagcactgcctgcagctgagaagaagactgagagagttcagaggcaacagcgccggcgacaccgtgggcgacgcctgcatcagaagcatcagcgacctgagcctgcagctgaagaacagagaccccgaggaggtgaagatcatctgccagagaagaagccagctgaacaacagatgggccagcttccacggcaacctgctgagataccagcagcagctggagggcgccctggagatccacgtgctgagcagagagctggacaacgtgaccaagagaatccaggagaaggaggccctgatccaggccctggactgcggcaaggacctggagagcgtgcagagactgctgagaaagcacgaggagctggagagagaggtgcaccccatccaggcccaggtggagagcctggagagagaggtgggcagactgtgccagagaagccccgaggccgcccacggcctgagacacagacagcaggaggtggccgagagctggtggcagctgagaagcagagcccagaagagaagagaggccctggacgccctgcaccaggcccagaagctgcaggccatgctgcaggagctgctggtgagcgcccagagactgagagcccagatggacaccagccccgcccccagaagccccgtggaggccagaagaatgctggaggagcaccaggagtgcaaggccgagctggacagctggaccgacagcatcagcctggccagaagcaccggccagcagctgctgaccgccggccaccccttcagcagcgacatcagacaggtgctggccggcctggagcaggagctgagcagcctggagggcgcctggcaggagcaccagctgcagctgcagcaggccctggagctgcagctgttcctgagcagcgtggagaagatggagagatggctgtgcagcaaggaggacagcctggccagcgagggcctgtgggaccccctggcccccatggagcccctgctgtggaagcacaagatgctggagtgggacctggaggtgcaggccggcaagatcagcgccctggaggccaccgccagaggcctgcaccagggcggccaccccgaggcccagagcgccctgggcagatgccaggccatgctgctgagaaaggaggccctgttcagacaggccggcaccagaagacacagactggaggagctgagacagctgcaggccttcctgcaggacagccaggaggtggccgcctggctgagagagaagaacctggtggccctggaggagggcctgctggacaccgccatgctgcccgcccagctgcagaagcagcagaacttccaggccgagctggacgccagcatgcaccagcagcaggagctgcagagagagggccagagactgctgcagggcggccaccccgccagcgaggccatccaggagagactggaggagctgggcgccctgtggggcgagctgcaggacaacagccagaagaaggtggccaagctgcagaaggcctgcgaggccctgagactgagaagaagcatggaggagctggagaactggctggagcccatcgaggtggagctgagagcccccaccgtgggccaggccctgcccggcgtgggcgagctgctgggcacccagagagagctggaggccgccgtggacaagaaggccagacaggccgaggccctgctgggccaggcccaggccttcgtgagagagggccactgcctggcccaggacgtggaggagcaggccagaagactgctgcagagattcaagagcctgagagagcccctgcaggagagaagaaccgccctggaggccagaagcctgctgctgaagttcttcagagacgccgacgaggagatggcctgggtgcaggagaagctgcccctggccgccgcccaggactacggccagagcctgagcgccgtgagacacctgcaggagcagcaccagaacctggagagcgagatgagcagccacgaggccctgaccagagtggtgctgggcaccggctacaagctggtgcaggccggccacttcgccgcccacgaggtggccgccagagtgcagcagctggagaaggccatggcccacctgagagccgaggccgccagaagaagactgctgctgcagcaggcccaggaggcccagcagttcctgaccgagctgctggaggccggcagctggctggccgagagaggccacgtgctggacagcgaggacatgggccacagcgccgaggccacccaggccctgctgagaagactggaggccaccaagagagacctggaggccttcagccccagaatcgagagactgcagcagaccgccgccctgctggagagcagaaagaaccccgagagccccaaggtgctggcccagctgcaggccgtgagagaggcccacgccgagctgctgagaagagccgaggccagaggccacggcctgcaggagcagctgcagctgcaccagctggagagagagaccctgctgctggacgcctggctgaccaccaaggccgccaccgccgagagccaggactacggccaggacctggagggcgtgaaggtgctggaggagaagttcgacgccttcagaaaggaggtgcagagcctgggccaggccaaggtgtacgccctgagaaagctggccggcaccctggagagaggcgcccccagaagatacccccacatccaggcccagagaagcagaatcgaggccgcctgggagagactggaccaggccatcaaggccagaaccgagaacctggccgccgcccacgaggtgcacagcttccagcaggccgccgccgagctgcagggcagaatgcaggagaagaccgccctgatgaagggcgaggacggcggccacagcctgagcagcgtgagaaccctgcagcagcagcacagaagactggagagagagctggaggccatggagaaggaggtggccagactgcagaccgaggcctgcagactgggccagctgcaccccgccgcccccggcggcctggccaaggtgcaggaggcctgggccaccctgcaggccaaggcccaggagagaggccagtggctggcccaggccgcccagggccacgccttcctgggcagatgccaggagctgctggcctgggcccaggagagacaggagctggccagcagcgaggagctggccgaggacgtggccggcgccgagcagctgctgggccagcacgaggagctgggccaggagatcagagagtgcagactgcaggcccaggacctgagacaggagggccagcagctggtggacaacagccacttcatgagcgccgaggtgaccgagtgcctgcaggagctggagggcagactgcaggagctggaggaggcctgggccctgagatggcagagatgcgccgagagctggggcctgcagaagctgagacagagactggagcaggccgaggcctggctggcctgctgggagggcctgctgctgaagcccgactacggccacagcgtgagcgacgtggagctgctgctgcacagacaccaggacctggagaagctgctggccgcccaggaggagaagttcgcccagatgcagaagaccgagatggagcaggagctgctgctgcagccccaggagctgaagcccggcagagccggcagcagcctgaccagcttccagtggagacccagcggccaccagggcctgggcgcccagctggccgagaccagagacccccaggacgccaagggcacccccaccatggagggcagcctggagttcaagcagcacctgctgcccggcggcagacagcccagcagcagcagctgggacagctgcagaggcaacctgcagggcagcagcctgagcctgttcctggacgagagaatggccgccgagaaggtggccagcatcgccctgctggacctgaccggcgccagatgcgagagactgagaggcagacacggcagaaagcacaccttcagcctgagactgaccagcggcgccgagatcctgttcgccgcccccagcgaggagcaggccgagagctggtggagagccctgggcagcaccgccgcccagagcctgagccccaagctgaaggccaagcccgtgagcagcctgaacgagtgcaccaccaaggacgccagacccggctgcctgctgagaagcgacccctag

SEQ ID NO: 192536 - DNA, 11025 bp, Artificial Sequence
  derived and/or modified sequence
atggctggccagcctcacagcccacgagaactgcttggagccgcaggacatcgctcacgcaggccaagtaccgagctgagagtgcccccttctccctccttaaccatggactcccagtacgaaacggggcacattcgcaagctccaggccagacatatgcaaatgcaagagaagacttttaccaaatggatcaataatgtatttcagtgtgggcaggccggaatcaaaataaggaacctgtatacagagctggccgatggcatccacctgctgcgcctgctggagctgatctctggggaggctttgccacccccctcaaggggacggcttcgagtccactttctcgagaactcatctcgagcgctggcctttttacgggccaaggtaccggttcctctaatcggtcccgaaaatatcgtcgacggggatcagaccctgatacttgggctgatttgggttatcatcttgcggtttcagatttcacacatctccctcgacaaggaagagtttggagcgtctgcagcacttctgtcaaccaaggaggcactgctggtctggtgtcagcgcaagacagcatcatacacgaacgtaaacattacagatttcagtcgctcatggtccgacggcctgggattcaatgcactgattcacgctcaccggcctgatctgcttgactacggctcacttaggcctgacagaccactgcacaatctcgccttcgcatttttggttgccgagcaggagctaggcatcgcccagctcctcgatcctgaggatgtcgccgccgctcagcccgatgaacggtctatcatgacctatgtcagcctctattatcactattgcagccgcctgcatcagggccagacagtgcaacggaggctgaccaagatcctattacagttgcaggaaactgagctattgcagacacagtacgagcagctggtcgcagatctccttcgctggattgcagaaaaacagatgcagttggaggcacgcgatttccccgactcattaccagccatgcgccagctgctggcagcttttactattttccggacgcaggagaaacctcctagacttcagcagagaggtgccgcagaggccctgcttttcagactacagacagctcttcaggcccagaaccgccgaccatttctgcctcacgaaggcctgggccttgccgagttgtcacaatgttgggccggtctggagtgggccgaggccgctcggtcccaggccttacagcagagacttttgcagctccagcgtcttgaaaccctggcccgtagatttcagcacaaagcagccctgcgagaatcattcctgaaagacgctgagcaagtgctcgatcaggcccgcgccccccccgcttctcttgccactgtcgaggccgctgtccagcgtctggggatgctggaagccggcatcctgcctcaggagggccgtttccaggctttggccgagattgctgatattctgaggcaggaacagtaccactcatgggcagacgtggcacgccgccaggaagaagtgaccgtgagatggcaacgattacttcagcatctgcaggggcagcgcaagcaggttgcagacatgcaggcagtcctgtctctcctgcaggaagttgaggcagccagtcatcagctcgaggagttgcaggagcccgccaggtcaaccgcctgcggacaacagcttgcggaggtggtggaactgcttcagaggcacgatcttctggaggcgcaggtctctgcccatggtgcacatgttagccacctggctcagcagactgctgagctcgacagcagtctgggcaccagtgtggaggttcttcaggcgaaagccaggaccctcgcccagctgcaacagtccttggtcgcactcgttagggcccggagagcattactagagcagactctgcagcgcgcggaatttctgaggaattgcgaagaagaagaagcatggttgaaagagtgtgggcaacgggtaggtaatgccgctctaggacgcgacctgagccagatagcaggcgcgctgcaaaaacataaggcgctagaggccgaggtgcacaggcatcaggcagtgtgcgtagatctggtgcggagaggacgagacctctccgcaagacgaccccccactcagccagaccccggcgaacgggctgaggccgtgcagggcggctggcagctgctgcaaactcgcgtggtcgggcgcggggcgcggctgcagactgctctgttggtgctacagtactttgctgatgcggctgaagccgcgagctggctcagggagagacggtcctcccttgagcgcgccagctgcggccaagatcaggccgccgctgagaccctgctacggaggcacgttaggctggagagggtccttagagccttcgctgctgaactgcgcaggcttgaggaacagggaagagccgcgagcgcccgggcttcactttttaccgtgaacagcgccttgtcaccacccggggagtctttgaggaaccccggtccctggtcggaggctagttgccatccaggccctggcgacgcttggaagatggcgctgcccgcagagcccgatcctgatttcgacccaaatacaatcctacagacccaggatcatctgtcccaggactacgagagcctcagagccctggcccagttgagaagagcaagacttgaggaggcgatggcgcttttcggcttttgcagttcatgtggtgagcttcagctctggttagagaagcaaacagtgctcctgcaaagagtacaaccacaggctgatactcttgaggtgatgcagctgaaatatgaaaactttctcactgccctggcagtggggaagggcctgtgggccgaagtttcctctagcgctgagcagctgcggcagaggtatccaggaaattcaactcagattcagcgccagcaagaagagttgtctcagcggtggggccagctggaggccctgaaaagagaaaaggctgtgcagctggcccactcagtagaggtttgctcctttttgcaggaatgcggcccaactcaggtccagttgagagacgtcctgcttcagttagaggcacttcagcctggaagcagcgaagatacttgccatgctctccagctcgcccaaaaaaagacgctagttctggagcgtagagtacatttcctgcaatctgtcgtggtgaaagtagaagagcctggctatgccgagtcccagccactccaggggcaggtggagaccttgcaaggactgctgaaacaggtgcaggaacaagtagcgcagcgcgcccggagacaggctgagacacaggccagacagtcattcttacaggagtctcagcagcttctcttgtgggctgagagtgttcaagctcaactgaggagcaaagaggtctctgtagatgtggcgtctgctcagcggctgctgcgggagcatcaagatttgctggaggagatccacctatggcaggaaagactccagcaactggacgcccagagtcagccaatggcagccctggactgcccggacagccaagaggttccgaatactctccgagtgttaggacaacagggacaggagctgaaggtgctgtgggagcagaggcaacagtggctgcaggaaggactcgaactgcaaaagttcggtcgggaagtcgacgggtttaccgccacatgcgcgaaccatcaagcatggcttcacctggacaacctcggagaagacgtcagggaggccttgagcctgctgcagcaacatcgggaattcggtaggctcctgtctaccctgggacctagggcagaagccctacgtgcacatggagaaaagctggtgcaatctcagcacccagccgcccacaccgtgcgggagcagctacagagcattcaggcgcagtggacacggttacaggggcgcagcgagcagagacgccgccagcttctggcttctctgcagctgcaggagtggaagcaggacgtcgcggaattgatgcaatggatggaggagaaggggctgatggcagctcatgagccatctggcgccagaagaaacattctgcagacgctcaaaaggcatgaagccgctgagtccgaattgctcgctaccagacggcacgtggaagccctgcagcaggtaggccgcgaactgctgagtcgtagaccatgcgggcaggaggacatccagacgaggctccagggcctgcgctccaagtgggaggcactgaatcgcaaaatgaccgagcggggtgacgaactccaacaagctggccagcaagagcagctgctgcggcagcttcaggatgcaaaggagcagcttgagcagctcgagggggctctgcagtcatcagaaaccggccaggatctgcgctctagccagcggctgcaaaaaaggcatcagcagttggaatcggaatctagaactctggcagcaaaaatggccgctctcgccagcatggctcatggaatggctgccagccccgcaattctggaggaaacacagaaacatctgcggagactcgaactgttgcaggggcacttggccataagggggttgcagcttcaggcatctgtcgaattgcaccagttctgtcacctatcaaatatggagcttagctgggtagccgaacacatgcctcacggatctcctacctcttacactgaatgcctcaacggagcacaaagccttcatagaaagcacaaagagctgcaagtcgaagtgaaggcccaccagggacaagtacaacgggtcctgagctccggcaggagcctggccgcaagtggccaccctcaggcccagcatattgtggagcagtgccaagaacttgagggtcactgggccgaactggaaagagcctgcgaggcaagagcccagtgtttgcagcaggccgtaacttttcaacagtatttccttgacgtctccgaactagaaggatgggtggaggaaaaacgaccattggtctccagcagagattacggaagggatgaagccgcgacactccgacttattaataagcaccaggctcttcaggaggagctggctatctactggagttcaatggaagagctggaccagactgctcaaacactcacgggccccgaagttccagagcaacagcgcgtagtgcaggagagacttcgtgaacaactccgggcattacaggaactcgccgcgacccgagaccgcgagttggagggcacactgagattgcacgagttcctgcgcgaggcagaggacctacagggctggctcgcctcgcaaaagcaggcggctaaaggcggcgaatcactgggggaagatcctgagcacgcccttcacctctgcaccaaatttgcaaaattccagcatcaggtggagatgggctctcagcgtgtcgctgcatgccgtctcctggctgagagcctcctggaacgcggccactctgccggtcctatggtaaggcaaagacaacaagatctgcagacggcctggtccgagctctgggagctcacccaggcacggggccacgctctgcgcgatacagagaccaccctgcgggtacacagagacctgttggaggtgctgacccaggtccaagaaaaggcaacttcattgcctaataacgtggctagagacctgtgtggcttggaggcccaattgcgcagtcatcagggactggaacgcgaactggttggaactgagcgtcagcttcaggagctgttggagaccgcaggaagggtgcagaaactctgccctggaccgcaggcccatgctgtccaacagcgccagcaggcggtgactcaggcctgggctgttctgcagcgccgaatggagcagcgcagggcgcaattggaacgggcgagactgttggcacgcttccggacagcagtgcgagactacgcatcctgggctgccagagtacgccaggaccttcaggtcgaggaatcgagccaggagccttcctctggccctctgaaacttagtgcccatcagtggctgcgggctgaacttgaggccagggaaaagttgtggcaacaggctacacaattaggccagcaggctctgctggcagcaggaactccaacaaaggaggtgcaggaagaactccgggccttgcaggaccagagagaccaggtgtaccagacctgggcccgaaagcaggagagactgcaggctgagcaacaggagcagttgtttctgagagagtgtggccgcttggaagagatactcgctgcccaagaggtctctctcaagacctccgctctgggcagctccgttgaggaggtcgagcagttgatacgaaaacacgaggtttttctgaaagtgctcactgctcaggacaagaaagaggccgcattgagggaaaggttgaagactctgcgacggcctcgggtacgggatcgccttcctattctgctacagcgtagaatgcgagtgaaagagctggccgagagtaggggtcatgctctccacgctagcttgctgatggcgagcttcacccaggctgccacacaggccgaggactggattcaggcctgggcgcagcaactgaaggaaccagtccctcctggggacctcagggataaactcaaaccactgctgaaacatcaggccttcgaagcagaagtgcaggcacacgaggaagttatgaccagtgttgcaaagaaaggcgaggccctgctggcacagagtcacccccgggcaggggaagtgagtcaaagactacagggactccgcaagcattgggaagaccttagacaagctatggctctgcgcggccaggaacttgaagatcgccggaatttcctcgagttcctgcagagagtcgacctggctgaggcctggatacaggagaaggaggtcaaaatgaacgtgggggacctaggacaagatttggaacactgcctgcaattgaggagaagattgagggaatttagaggtaattctgccggggataccgtgggcgatgcctgtattcgcagtatctccgacctgtcactgcagctgaaaaatagggaccccgaggaggtaaagatcatttgccagaggcgctcccagctgaataacagatgggcttctttccacggaaacctgttgcggtatcagcaacagctggagggcgcacttgagattcacgtgttgagtcgggagttggataacgtgactaagagaatccaggagaaggaagcactgatccaggcactggattgcgggaaggacctggaaagtgtacaaaggcttcttaggaagcacgaagagctcgagagagaggtccaccccatacaggctcaggtggagagtctggaacgagaggtgggccgtctatgtcaaaggagtcccgaggccgcacacggattgcgccatcgccaacaagaggtagcagaaagttggtggcaacttcggagtagagctcaaaaacgaagggaagctttggacgctctccaccaggcccagaagctgcaggctatgcttcaggagctgttagtatctgctcagaggttgcgggctcaaatggataccagtcccgcgcctcgcagccccgtggaggcccgacgtatgttagaggagcatcaggagtgtaaagccgaactggacagttggaccgatagcatctcgctggcaagatccaccggccagcaacttttgaccgcgggccaccccttttcctctgacatccgacaggttctcgctggattagaacaagagttgtctagtttagaaggagcttggcaggaacatcagttacagctgcaacaggcattagagctccaactatttctcagttccgtggaaaagatggagcgctggctttgttctaaagaggatagcttagcatctgaaggtctgtgggaccccctggctccaatggagcccctgctttggaaacacaaaatgctggagtgggacttggaagtccaagcgggaaagatctcagccctggaggctaccgcccgtgggctgcaccagggaggccaccctgaggcccagagcgccctgggccggtgccaagccatgctgctaagaaaggaggcgcttttccgccaggcgggcacaagacgacacagactggaggagttgaggcaactacaagcattcctacaggactctcaggaagtggccgcttggctgagagagaagaacctcgtcgctctagaggagggactgctagacactgccatgttacccgcccagctgcaaaaacagcagaactttcaagcagagctagatgcatcaatgcatcagcagcaagaattgcaaagggaaggtcagcgtttactccagggaggccatcccgcgtccgaggctatacaggaaaggctggaagaactgggcgctctctggggcgagctgcaggacaattcacagaaaaaggtggcgaaactgcagaaggcctgtgaggctctacgcctgcggcggtcgatggaggaattagagaattggcttgagcctatagaagtggaactccgtgcaccaaccgtggggcaggcccttcccggagtgggcgagctcctcgggacacagcgtgagctggaggccgccgtggataagaaggcaagacaggcagaagccctcttggggcaggcccaagccttcgtccgggaagggcattgcttagctcaagacgtggaagagcaggcacgccggctcctgcaaagattcaaaagtttgagggaacctttacaggagagaagaacagccctggaagcgcgctcgctactgctgaaattttttagggatgctgacgaggagatggcctgggtccaagaaaaattacccctggcagctgcccaggattacggccagtctctgagcgcggtccgccacctccaagaacaacaccagaatctggaatctgaaatgtcttctcacgaagcactgactcgcgtggttcttgggactgggtataagttagtgcaagccggccatttcgcagctcatgaggtggctgcaagagtgcagcagctggagaaggctatggcgcacttaagagccgaagctgcaagaaggcgcctcctgctccaacaagctcaggaagcccagcaattcctgactgaactgctcgaagctggatcttggctcgctgaacgtggtcacgtgctcgattccgaggatatgggccatagcgcagaggctactcaggcgctcctaagaagattagaggcgacaaaaagggatcttgaagcgttctcccctcggattgaacggttgcaacagactgccgccctcctggagtccagaaagaatcctgaaagccctaaggtgttggcccaattacaagcggtcagagaggcccacgccgaacttctgcggcgtgcagaggccagggggcatggcttgcaggaacagctccagcttcatcagctggagcgagagactttgttattagatgcctggctcactacaaaagccgccaccgctgagagccaagattacggccaggatctggagggcgtgaaggttctcgaagagaagtttgatgcattccgaaaggaggttcagtctctgggacaggcaaaagtatacgcgctgcgtaaactggccggcaccctcgagaggggggcacctcggcgctatccacacatccaggcacagcgctcccgcattgaggccgcctgggagcggttagaccaggccatcaaagctcggacggaaaatctcgctgctgctcacgaggtgcatagctttcagcaggccgccgccgaactgcaggggcgaatgcaagagaagacggcgctcatgaaaggcgaagacggcggccattctctgagttccgtccgcactttgcagcaacaacaccgccgactcgagcgagaattagaggccatggagaaagaggtcgctcggttgcagacagaagcgtgccgactgggccagctccatcccgccgcgcccggaggactggccaaagtgcaggaagcctgggccaccttgcaggcaaaagcacaggaaaggggccagtggctggctcaggcagcccaggggcacgcattcctcgggagatgccaagagcttttagcgtgggcgcaggagaggcaggagctggctagctctgaggaactggcggaagatgtggcaggggctgagcagctgttgggacagcacgaagagcttggccaggagattcgagaatgccgcctgcaggcccaggacctccgtcaggagggacagcaactcgtcgacaattctcattttatgagcgctgaggttactgaatgcctgcaggaactggagggccgccttcaggaactggaagaagcctgggccttgcgatggcagaggtgcgccgagtcatggggtctgcagaagttgcgtcagcgactcgagcaagccgaagcttggctcgcttgttgggaaggattgcttcttaaacctgattatggtcatagtgtatccgacgttgagctgctgctgcaccgccaccaggacctggaaaaattgctggccgcccaagaagagaagttcgctcaaatgcagaaaacggagatggagcaggaactgctactccagccccaggagctaaaacctgggagggcagggagctccctcacttccttccaatggcgaccatccggccaccagggcttgggcgcacaacttgccgaaacaagggatccccaggacgccaagggcacaccaacaatggaagggtctttagagtttaagcagcatctccttcctggcggccgacagccatcctccagttcctgggattcgtgccggggtaatttgcaggggtcctctttgtctctttttctcgatgagaggatggccgctgagaaggtggcgtccatcgccctcctggacttgactggagcccgctgcgagcggctcaggggccggcatggccgaaaacacaccttcagcctgcgtcttacatctggagctgaaattctctttgcagctccaagtgaggagcaggccgaaagctggtggagagccctggggtctactgcagcgcagagcttaagtccaaagcttaaggctaaacctgtgagctccctcaatgaatgtacaacgaaggacgcaagaccaggttgcttgttgaggagcgatccatag

SEQ ID NO: 192537 - DNA, 11025 bp, Artificial Sequence
  derived and/or modified sequence
atggccggccagccccacagcccccgggagctgctgggcgctgctggccacaggagccggcggcccagcacagagctgcgggtgccccccagccccagcctgaccatggacagccagtatgagaccggccacatcaggaagctgcaggcccggcacatgcagatgcaggagaagaccttcaccaagtggatcaacaacgtgttccagtgtggccaggccggcatcaagatccggaacctgtacacagagctggctgatggcatccacctgctgcggctgctggagctgatcagcggggaggccctgcccccacccagccggggccgcctgcgggtgcacttcctggagaacagcagccgggccctggccttcctgcgggccaaggtgcctgtgcccctcatcggcccagaaaatattgtggatggagaccagaccctcatcctgggcctcatctgggtgatcatcctgcgcttccagatcagccacatcagcctggacaaggaggagtttggagccagcgctgccctgctgagcaccaaggaggccctgctggtgtggtgccagaggaagacagccagctacaccaacgtgaacatcacagacttcagccgctcctggagcgatggcctgggcttcaatgccctgattcatgcccacaggccagacctgctggactatggcagcctgcggccagaccggcccctgcacaacctggcctttgccttcctggtggccgagcaggagctgggcatcgcccagctgctggaccctgaagatgtggccgccgcccagccagatgagaggagcatcatgacctacgtgtccctgtactaccactactgcagccggctgcaccagggccagacagtgcagaggcggctgaccaagatcctgctgcagctgcaggagacagagctgctgcagacccagtatgagcagctggtggccgacctgctgcgctggattgctgagaagcagatgcagctggaggcccgggacttcccagacagcctgcctgccatgaggcagctgctggccgccttcaccatcttccgcacccaggagaagccaccccggctgcagcagagaggagctgctgaggccctgctcttccggctgcagacagccctgcaggcccagaacagaagacccttcctgccccatgagggcctgggcctggccgagctgagccagtgctgggccggcctggagtgggccgaggccgcccggagccaggccctgcagcagaggctgctgcagctgcagaggctggagaccctggcccggcgcttccagcacaaggccgccctgcgggagagcttcctgaaggatgctgagcaggtgctggaccaggcccgggcccccccagccagcctggccaccgtggaggccgctgtgcagaggctgggcatgctggaggccggcatcctgccccaggagggccgcttccaggccctggccgagattgctgacatcctgcggcaggagcagtaccacagctgggcagatgtggcccggcggcaggaggaggtgacagtgcgctggcagaggctgctgcagcacctgcagggccagaggaagcaggtggccgacatgcaggccgtgctgagcctgctgcaggaggtggaggccgccagccaccagctggaggagctgcaggagcccgcccggagcacagcctgtggccagcagctggccgaggtggtggagctgctgcagagacatgacctgctggaggcccaggtgtctgcccatggagcccacgtgagccacctggcccagcagacagctgagctggacagcagcctgggcacctctgtggaggtgctgcaggccaaggcccggaccctggcccagctgcagcagagcctggtggccctggtgcgggcccggcgggccctgctggagcagaccctgcagagagctgagttcctgaggaactgtgaggaggaggaggcctggctgaaggaatgtggccagagggtgggcaatgctgccctgggccgggacctgagccagattgctggggccctgcagaagcacaaggccctggaggccgaggtgcaccgccaccaggccgtgtgtgtggacctggtgcggcggggccgggacctgagcgcccggcggccccccacccagcctgaccccggggagcgggcagaggccgtgcagggcggctggcagctgctgcagaccagggtggtgggccgcggggcccggctgcagacagccctgctggtgctgcagtactttgctgatgctgctgaggccgcctcctggctgcgggagcggcgcagcagcctggagcgggccagctgtggccaggaccaggccgctgctgagaccctgctgcggagacatgtgcggctggagcgggtgctgcgggcctttgctgctgagctgcggcggctggaggagcagggccgggccgccagcgcccgggccagcctcttcaccgtgaacagcgccctgagccccccaggagagagcctgaggaaccctggcccctggagcgaggccagctgccaccctggccctggagatgcctggaagatggccctgcctgctgagccagaccctgactttgaccccaacaccatcctgcagacccaggaccacctgagccaggactatgagagcctgcgggccctggcccagctgcggcgggcccggctggaggaggccatggccctgtttggcttctgcagcagctgtggggagctgcagctgtggctggagaagcagacagtgctgctgcagagggtgcagccccaggccgacaccctggaggtgatgcagctgaagtatgagaacttcctgacagccctggccgtgggcaagggcctgtgggccgaggtgagcagcagcgctgagcagctgcggcagcgctacccaggcaacagcacccagatccagaggcagcaggaggagctgagccagcgctggggccagctggaggccctgaagcgggagaaggctgtgcagctggcccacagcgtggaggtgtgcagcttcctgcaggagtgtggccccacccaggtgcagctgagagatgtgctgctgcagctggaggccctgcagcccggcagcagcgaggacacctgccacgccctgcagctggcccagaagaagaccctggtgctggagcggcgggtgcacttcctgcagagcgtggtggtgaaggtggaggagcccggctacgccgagagccagcccctgcagggccaggtggagaccctgcagggcctgctgaagcaggtgcaggagcaggtggcccagagggcccggcggcaggccgagacccaggcccggcagagcttcctgcaggagagccagcagctgctgctgtgggccgagagcgtgcaggcccagctgcggagcaaggaggtgtctgtggatgtggccagcgcccagaggctgctgcgggagcaccaggacctgctggaggagatccacctgtggcaggagcggctgcagcagctggatgcccagagccagcccatggccgccctggactgcccagacagccaggaggtgcccaacaccctgcgggtgctgggccagcagggccaggagctgaaggtgctgtgggagcagaggcagcagtggctgcaggagggcctggagctgcagaagtttggccgggaggtggatggcttcaccgccacctgtgccaaccaccaggcctggctgcacctggacaacctgggggaggatgtgcgggaggccctgagcctgctgcagcagcaccgggagtttggccgcctgctgagcaccctgggccccagggctgaggccctgcgggcccacggggagaagctggtgcagagccagcaccctgctgcccacacagtgcgggagcagctgcagagcatccaggcccagtggacccggctgcagggccgctctgagcagaggcggcggcagctgctggccagcctgcagctgcaggagtggaagcaggatgtggccgagctgatgcagtggatggaggagaagggcctgatggccgcccacgagcccagcggggcccggaggaacatcctgcagaccctgaagagacatgaagctgctgagagcgagctgctggccacccggcggcacgtggaggccctgcagcaggtgggccgggagctgctgagccggcggccctgtggccaggaggacatccagacccggctgcagggcctgcggagcaagtgggaggccctgaacaggaagatgacagaaagaggagatgagctgcagcaggccggccagcaggagcagctgctgcggcagctgcaggatgccaaggagcagctggagcagctggagggcgccctgcagagcagcgagaccggccaggacctgcggagcagccagaggctgcagaagaggcaccagcagctggagagcgagagcaggaccctggccgccaagatggccgccctggcctccatggcccacggcatggccgccagccctgccatcctggaggagacccagaagcacctgcggcggctggagctgctgcagggccacctggccatccggggcctgcagctgcaggcctctgtggagctgcaccagttctgccacctgagcaacatggagctgtcctgggtggccgagcacatgccccacggcagccccaccagctacacagagtgcctgaatggagcccagagcctgcacaggaagcacaaggagctgcaggtggaggtgaaggcccaccagggccaggtgcagagggtgctgagcagcggccgcagcctggccgccagcggccacccccaggcccagcacatcgtggagcagtgccaggagctggagggccactgggccgagctggagcgggcctgtgaggcccgggcccagtgcctgcagcaggccgtgaccttccagcagtacttcctggatgtgtctgagctggagggctgggtggaggagaagaggcccctggtgagcagccgggactatggaagagatgaagctgccaccctgcggctcatcaacaagcaccaggccctgcaggaggagctggccatctactggagctccatggaggagctggaccagacagcccagaccctgactggacctgaggtgcctgagcagcagagggtggtgcaggagcggctgcgggagcagctgcgggccctgcaggagctggccgccacccgggaccgggagctggagggcaccctgcggctgcacgagttcctgcgggaggccgaggacctgcagggctggctggccagccagaagcaggccgccaagggcggggagagcctgggagaagatcctgagcacgccctgcacctgtgcaccaagtttgccaagttccagcaccaggtggagatgggcagccagagggtggccgcctgccgcctgctggccgagagcctgctggagcggggccacagcgctggccccatggtgcggcagaggcagcaggacctgcagacagcctggagcgagctgtgggagctgacccaggcccggggccacgccctgcgggacacagagaccaccctgcgggtgcaccgggacctgctggaggtgctgacccaggtgcaggagaaggccaccagcctgcccaacaacgtggcccgggacctgtgtggcctggaggcccagctgcggagccaccagggcctggagcgggagctggtgggcacagagcggcagctgcaggagctgctggagacagctggccgggtgcagaagctgtgccccggcccccaggcccatgctgtgcagcagaggcagcaggccgtgacccaggcctgggccgtgctgcagaggaggatggagcagaggcgggcccagctggagcgggcccggctgctggcccgcttcagaacagctgtgcgggactatgcctcctgggccgcccgggtgcggcaggacctgcaggtggaggagagcagccaggagcccagcagcggccccctgaagctgagcgcccaccagtggctgcgggcagagctggaggcccgggagaagctgtggcagcaggccacccagctgggccagcaggccctgctggccgccggcacccccaccaaggaggtgcaggaggagctgcgggccctgcaggaccagagggaccaggtgtaccagacctgggccaggaagcaggagcggctgcaggccgagcagcaggagcagctgttcctgagagaatgtggccgcctggaggagatcctggccgcccaggaggtgtccctgaagaccagcgccctgggcagctctgtggaggaggtggagcagctgatcaggaagcatgaggtgttcctgaaggtgctgacagcccaggacaagaaggaggccgccctgcgggagcggctgaagaccctgcggcggccccgggtgcgggaccggctgcccatcctgctgcagaggaggatgagggtgaaggagctggccgagagccggggccacgccctgcacgccagcctgctgatggccagcttcacccaggccgccacccaggccgaggactggatccaggcctgggcccagcagctgaaggagcctgtgcccccaggggacctgcgggacaagctgaagcccctgctgaagcaccaggcctttgaggccgaggtgcaggcccacgaggaggtgatgacctctgtggccaagaagggggaggccctgctggcccagagccaccccagggctggggaggtgtcccagaggctgcagggcctgaggaagcactgggaggacctgcggcaggccatggccctgcggggccaggagctggaggacagaagaaacttcctggagttcctgcagagggtggacctggccgaggcctggatccaggagaaggaggtgaagatgaatgtgggggacctgggccaggacctggagcactgcctgcagctgcggcggcggctgcgggagttccggggcaacagcgctggggacacagtgggagatgcctgcatccgcagcatcagtgacctgagcctgcagctgaagaacagagatcctgaggaggtgaagatcatctgccagaggaggagccagctgaacaaccgctgggccagcttccacggcaacctgctgcgctaccagcagcagctggagggcgccctggagatccacgtgctgagccgggagctggacaacgtgaccaagaggatccaggagaaggaggccctgatccaggccctggactgtgggaaggacctggagagcgtgcagaggctgctgaggaagcatgaggagctggagcgggaggtgcaccccatccaggcccaggtggagagcctggagcgggaggtgggccgcctgtgccagaggagccctgaggccgcccacggcctgcggcaccggcagcaggaggtggccgagagctggtggcagctgcggagccgggcccagaagaggcgggaggccctggatgccctgcaccaggcccagaagctgcaggccatgctgcaggagctgctggtgtctgcccagaggctgcgggcccagatggacaccagccctgcccccaggagccctgtggaggcccggaggatgctggaggagcaccaggagtgcaaggccgagctggacagctggacagacagcatcagcctggcccggagcacaggccagcagctgctgacagctggccaccccttcagcagtgacatccggcaggtgctggccggcctggagcaggagctgagcagcctggagggcgcctggcaggagcaccagctgcagctgcagcaggccctggagctgcagctgttcctgagctctgtggagaagatggagcgctggctgtgcagcaaggaggacagcctggccagcgagggcctgtgggaccccctggcccccatggagcccctgctgtggaagcacaagatgctggagtgggacctggaggtgcaggccggcaagatcagcgccctggaggccacagcccggggcctgcaccagggcggccaccctgaggcccagagcgccctgggccgctgccaggccatgctgctgaggaaggaggccctcttccggcaggccggcacccggcggcaccggctggaggagctgcggcagctgcaggccttcctgcaggacagccaggaggtggccgcctggctgcgggagaagaacctggtggccctggaggagggcctgctggacacagccatgctgcctgcccagctgcagaagcagcagaacttccaggccgagctggatgcctccatgcaccagcagcaggagctgcagcgggagggccagaggctgctgcagggcggccacccagccagcgaggccatccaggagcggctggaggagctgggcgccctgtggggcgagctgcaggacaacagccagaagaaggtggccaagctgcagaaggcctgtgaggccctgcggctgcggcgctccatggaggagctggagaactggctggagcccatcgaggtggagctgcgggcccccaccgtgggccaggccctgcccggggtgggggagctgctgggcacccagcgggagctggaggccgctgtggacaagaaggcccggcaggccgaggccctgctgggccaggcccaggcctttgtgcgggagggccactgcctggcccaggatgtggaggagcaggcccggcggctgctgcagcgcttcaagagcctgcgggagcccctgcaggagaggagaacagccctggaggcccggagcctgctgctgaagttcttcagagatgctgatgaggagatggcctgggtgcaggagaagctgcccctggccgccgcccaggactatggccagagcctgtctgctgtgcgccacctgcaggagcagcaccagaacctggagagcgagatgagcagccatgaggccctgaccagggtggtgctgggcaccggctacaagctggtgcaggccggccactttgctgcccacgaggtggccgcccgggtgcagcagctggagaaggccatggcccacctgcgggcagaggccgcccggcggcggctgctgctgcagcaggcccaggaggcccagcagttcctgacagagctgctggaggccggctcctggctggccgagcggggccacgtgctggacagcgaggacatgggccacagcgctgaggccacccaggccctgctgcggcggctggaggccaccaagagggacctggaggccttcagccccagaattgagcggctgcagcagacagctgccctgctggagagcaggaagaaccctgagagccccaaggtgctggcccagctgcaggccgtgcgggaggcccacgccgagctgctgcggcgggcagaggcccggggccacggcctgcaggagcagctgcagctgcaccagctggagcgggagaccctgctgctggatgcctggctgaccaccaaggccgccacagctgagagccaggactatggccaggacctggagggcgtgaaggtgctggaggagaagtttgatgccttcaggaaggaggtgcagagcctgggccaggccaaggtgtatgccctgaggaagctggccggcaccctggagcggggggccccccggcgctacccccacatccaggcccagaggagccgcatcgaggccgcctgggagcggctggaccaggccatcaaggccaggacagagaacctggccgccgcccacgaggtgcacagcttccagcaggccgctgctgagctgcagggccgcatgcaggagaagacagccctgatgaagggggaggatggcggccacagcctgagctctgtgaggaccctgcagcagcagcaccggcggctggagcgggagctggaggccatggagaaggaggtggcccggctgcagacagaggcctgccgcctgggccagctgcaccctgctgcccctgggggcctggccaaggtgcaggaggcctgggccaccctgcaggccaaggcccaggagcggggccagtggctggcccaggccgcccagggccacgccttcctgggccgctgccaggagctgctggcctgggcccaggagcggcaggagctggccagcagcgaggagctggccgaggatgtggccggggctgagcagctgctgggccagcacgaggagctgggccaggagatcagagaatgtcggctgcaggcccaggacctgcggcaggagggccagcagctggtggacaacagccacttcatgtctgctgaggtgacagaatgtctgcaggagctggagggccgcctgcaggagctggaggaggcctgggccctgcgctggcagagatgtgccgagagctggggcctgcagaagctgcggcagaggctggagcaggccgaggcctggctggcctgctgggagggcctgctgctgaagccagactatggccacagcgtgtctgatgtggagctgctgctgcaccgccaccaggacctggagaagctgctggccgcccaggaggagaagtttgcccagatgcagaagacagagatggagcaggagctgctgctgcagccccaggagctgaagccaggccgggccggcagcagcctgaccagcttccagtggaggcccagcggccaccagggcctgggcgcccagctggccgagacccgggacccccaggatgccaagggcacccccaccatggagggcagcctggagttcaagcagcacctgctgcccggcggccggcagcccagcagcagctcctgggacagctgccggggcaacctgcagggcagcagcctgagcctcttcctggatgagaggatggctgctgagaaggtggccagcatcgccctgctggacctgaccggggcccgctgtgagcggctgcggggcagacatggcaggaagcacaccttcagcctgcggctgaccagcggggctgagatcctgtttgctgcccccagcgaggagcaggccgagagctggtggagggccctgggcagcacagctgcccagagcctgagccccaagctgaaggccaagcctgtgagcagcctgaatgaatgtaccaccaaggatgcccggcccggctgcctgctgcggagtgacccctag

SEQ ID NO: 192538 - DNA, 11025 bp, Artificial Sequence
  derived and/or modified sequence
atggccggccagccccacagcccccgggagctgctgggcgccgccggacaccgatccagaaggccatccacagaattgagggtaccccccagcccctctctgacaatggacagccaatacgagacaggccatataaggaaactgcaagcaaggcatatgcaaatgcaggagaagaccttcaccaagtggattaacaacgtcttccagtgcggacaagccggtattaagatccggaatttgtacacggagttagccgacggtatacacctgctgcgcctacttgagttgatttccggtgaggcgcttccaccaccctctcgcggtaggctaagagttcatttcctggaaaattctagccgggctctagctttcctcagagccaaggtgcccgttcctctgattgggcccgagaacattgtggacggtgatcaaaccctgatcttaggtctcatctgggtcattatactgagattccagatatcacacatcagtcttgacaaggaggagttcggagcctcagccgcgctgctgagtaccaaagaggctctgctcgtctggtgccagcgtaagaccgcatcatataccaacgtcaatatcactgactttagcagatcttggtcagatggtctcgggttcaacgcgctgatccatgcacacagaccagacctgctggattatggatctctcaggccagaccgaccgcttcataacttggcttttgcatttcttgttgcggaacaggaactgggcattgcccagcttctggaccccgaagacgttgccgcggcccagccagatgaaaggtctattatgacttacgtgagcttgtactatcattattgctcacggctccaccaaggccaaacagtgcaacgacgcctgacaaaaatactgcttcagctgcaggagaccgagctgctgcagacacagtacgagcagctggtggcggatctcctgcggtggattgcggagaaacagatgcagctggaggcccgcgattttcctgactctctcccagcgatgaggcagctcctggctgcgtttacaatttttagaacccaggagaagcccccaagactccagcagcgtggtgctgcagaggcactcttatttcgattacagacagcactgcaggcgcaaaaccgccggcccttcttaccacacgaagggcttgggttagccgagctgagccaatgctgggcggggctggagtgggcagaggccgccaggagtcaggccctacagcagaggctgctgcagcttcagagactggaaaccctagctagaaggttccaacacaaggccgctttacgggagtcattcctcaaagatgccgagcaagttctagatcaggcccgcgctcctccggcttctctggctacggtggaggccgcagtgcagagattagggatgctcgaggcgggcatcctgcctcaggagggtcgtttccaggccctggcggagattgctgatattttaagacaggaacagtaccattcctgggctgacgtggccaggcggcaagaggaggttaccgttaggtggcagagactgcttcagcacctgcagggacaacgcaagcaggttgcggacatgcaggccgtgttgtccctcctgcaggaagtagaggcagcttcacaccagctggaagaactgcaagagcccgcgcgtagcacggcttgcggacagcagctagccgaagtcgtcgaacttctgcaacgccatgacctcctagaggcacaggtgtccgctcatggggcccacgtgagccacttggcccaacaaacagctgagctagatagctccctgggtacatcggtagaagtgttgcaggccaaggccagaacactcgcccaactccagcagtcgctcgtggccctcgtcagggcgagacgcgccttacttgaacagacacttcagagagctgaatttctgcggaactgtgaggaggaggaggcgtggctcaaggaatgtgggcagagagttggtaatgcagcacttggtagggacttatctcagatcgcaggtgccctccagaaacataaagccctcgaagctgaagtccatagacaccaagctgtgtgcgtcgatctcgtgagaaggggccgggatctgtcggctagaaggccccctactcagcccgacccaggggagagagcggaggcagtacagggcggttggcagctgcttcaaaccagagttgtggggcggggggcccgccttcagactgctcttcttgtgctgcagtactttgctgacgctgcggaggccgctagttggctgcgggagaggcgatcttccctcgagcgcgcctcctgcggtcaagaccaggccgccgctgaaactctgttgcgccggcatgtgcgcttagaacgagtattgcgcgctttcgccgcggagctccgaaggctggaggagcagggtcgggccgccagcgcgcgcgcgagtcttttcacagttaatagtgccctgtccccaccgggtgaatcccttagaaacccaggtccctggtctgaagctagttgtcatcctggcccaggcgatgcctggaagatggctctcccagccgaacccgatccagactttgatccaaacaccattcttcaaacccaggatcatttatctcaggactacgagtcactcagagccctggcccaactgcgccgcgcacgtcttgaagaggccatggctctgtttggtttctgctcatcttgcggtgaattgcaactatggctggagaagcaaacggtgctcctacagagggtgcagccacaggcggatactttggaggtgatgcaactaaaatatgaaaacttcctgactgcattagctgtggggaagggactatgggcagaagtatccagctcagccgagcagttgcgtcaacgatatcccgggaatagcacccagattcaaagacagcaggaggaactgtcccagcggtggggacagctggaggctctgaaacgggagaaggctgtccaactggcccactccgtggaggtgtgttcttttctgcaggaatgcgggcccacccaggtccagctccgcgacgtacttttgcaactcgaagctctacaaccaggcagcagcgaagatacctgccacgcacttcaactggcccaaaagaagactcttgtgctggaaaggagggttcattttttgcagagcgtggtcgtcaaggtggaagaacccggctacgctgaaagccagcccctccagggccaagtcgagaccctgcaaggtctgttaaagcaagtgcaggagcaggtagcacaacgtgcccggagacaggccgaaacccaggctaggcagagcttcctgcaggaatctcagcagctgcttctctgggccgaaagtgtgcaggcccaactgcgcagcaaggaagtgagtgtggatgtggcatcagcccagagactgctgagggagcatcaggacctgctggaggaaatccacctatggcaagaacgcctccagcagctggacgcccaatcccaaccgatggccgcactggactgtcccgactctcaggaagtgccaaataccctgcgcgtgctgggacagcagggtcaggaactaaaagtactgtgggaacaaaggcagcaatggttacaagagggcctggagttacaaaaatttggccgggaagtagacggctttacggccacctgcgccaatcaccaggcgtggttgcacctggacaatcttggggaggatgtccgggaggctctctccctgctgcagcagcaccgggaatttgggcggctgctcagtactctgggccctcgcgctgaagctcttcgggcccacggcgagaagcttgtccagtctcaacatcctgcggcccacactgttcgggagcagctccaaagtattcaggctcaatggacacggcttcagggaaggagcgagcagcggcgcagacagctcttggcttcccttcagctgcaagaatggaagcaggacgtggcggaactgatgcagtggatggaggagaagggattgatggccgcccacgagcccagtggcgctaggaggaatatcctgcaaaccctcaagagacacgaggctgcagaatcagagttgctggctacccgccggcacgtggaagctttacagcaggttggtcgggagctgttgtcaagaagaccttgcggacaggaggacatccagacaagactgcagggattgcgcagcaagtgggaggcactcaaccgcaaaatgactgaaaggggggacgagttgcagcaagccgggcagcaggaacagctgctgcgtcaactgcaggacgcaaaggagcagcttgaacagctggaaggggccctgcagtccagcgaaaccggccaggatctcagaagctcccagagactgcagaagcgccatcagcagctggagtccgaatcgcgcactttggccgccaaaatggctgctcttgctagcatggcacatggtatggccgcttcacccgctatcctggaagagacccaaaagcatctccgtaggttagagctcttacagggtcacctggccatcagaggacttcaacttcaggcgagcgtggagcttcaccaattctgccacttgagcaatatggagctgtcatgggtagcagaacacatgcctcatggttcacctaccagctacacagagtgcctgaatggagctcaatccctacaccggaagcacaaggagttgcaggtcgaagtgaaagcccatcagggccaagtacagagagtactgagcagcgggaggagcctggcagcatccggtcatccccaggcacagcacattgtggaacagtgtcaggagcttgaaggccactgggctgaactcgaacgtgcctgcgaggcccgtgctcagtgtttgcaacaggcggtcacattccagcagtatttcctggatgtgagcgagctagagggctgggtggaggaaaaaagaccattggtgagctctcgggactatggacgagatgaggccgccactctgaggttgattaacaagcaccaggctcttcaggaagagcttgccatttactggagctctatggaagagctcgaccagactgctcagacgctgaccggccctgaggtgccagagcagcagcgggtcgttcaggaacgtctgcgtgagcaactcagagccctccaggagctggctgctaccagagatcgagaactagaaggaactttgaggctgcacgagtttcttcgcgaggctgaggacctgcagggatggctggctagtcaaaagcaggccgctaaaggtggcgaatcgcttggggaggatccggaacatgccctgcacctctgcaccaagttcgccaagttccaacaccaggtggagatgggcagtcagcgtgtcgctgcatgcagactcctggcagagtcactattggaacgggggcactctgctgggcctatggtacggcagcgccagcaggatctgcagacagcgtggtccgagctgtgggagctgactcaagctcgtggccacgccctgagagatacagaaaccactcttagggtccatcgagacctgttagaagtgcttactcaggtccaagagaaggcgacatccctgcccaacaacgtcgctagggatctctgcgggcttgaggcgcaactgcgatcccatcagggactagagagggagctcgttggcactgaacggcagttgcaagagctgcttgaaaccgccgggcgagtgcaaaagctgtgtcctggcccgcaggcgcatgcagtccagcaacggcagcaggccgttacacaggcctgggcggttctccagcgccgaatggagcagcgacgggcccagttggagcgggccaggctgctggcacgtttcaggactgctgtgcgggattacgcttcttgggctgcccgagttcggcaggaccttcaggttgaggagtctagccaggagccttcgtccggacccctaaaactgagcgctcatcagtggctgcgggccgaactggaagctcgggaaaaactatggcagcaggccacccagctgggccagcaggcgcttctcgcagcagggacccccactaaggaggtgcaggaggagctgagggcacttcaggaccagcgggatcaggtttaccagacctgggccagaaagcaggagcgactgcaggccgaacagcaagagcagctctttctgcgtgagtgtggtcgactggaagaaatcctggctgcgcaggaggtcagcctgaaaacttcggctctgggctcttccgtggaggaggtggagcagctgatccggaagcatgaagtcttcctgaaggtcctaaccgctcaggacaagaaagaggccgctctgcgcgaaagattgaaaacacttcggagaccaagggtgcgagatcgactgccaatcctgctacaaaggaggatgagagtgaaggagctagcggaatcccgggggcacgcattacatgccagtctccttatggcgtcatttacacaggccgctacacaggcagaagactggatccaggcatgggcgcaacaactcaaggagccagttccccccggcgacctgcgggataagctaaagccactgttaaaacatcaggctttcgaggcagaggtccaggcgcatgaagaagtcatgacctcagtggccaaaaagggtgaggctctcctcgctcagagccatccaagggctggagaagtgtctcagcgcctccagggcttgcgaaaacattgggaagacttgagacaagcaatggccctccggggacaagagttggaggatagacggaacttcttggagtttctgcagagggtagatttggcagaagcctggattcaggagaaagaggtcaagatgaacgtgggcgaccttggacaggatcttgagcattgcctgcagcttaggagacgcctgagagagtttcgtggtaactccgcaggggacaccgtgggagatgcctgtatccgcagtatatccgacttaagtttgcagctcaaaaaccgtgaccctgaggaggtgaagatcatatgtcaaaggcgttcacagctaaacaaccgttgggccagtttccacggcaacttgctccggtaccagcagcaactggagggcgctctcgaaatccacgttctgtcccgagaacttgacaacgtcacgaaacggatccaggagaaggaagccctgatccaggccctggactgcggtaaggacctggaaagtgtgcaacggctgttaaggaagcacgaagaattagaaagggaggtgcatcccatccaagcccaagtcgagagtcttgaaagagaagtgggccggttatgccagcgctcgccggaggccgctcacggactgcgacacaggcagcaagaagtggctgaatcttggtggcaactgaggagccgcgctcaaaagaggagagaggccctggacgcattacatcaggcccagaaactgcaggccatgttacaggagctcctggtgagcgcccagcgactgagagctcagatggacacctcaccggctccaaggagccccgtggaggccagaagaatgctggaggagcatcaggaatgcaaggcagaactcgacagttggaccgacagcatctcattggccagatccacaggtcagcagctcctgactgctggacatcctttttcttccgatataagacaggtactggctgggttggagcaagagttgtctagtctggagggcgcctggcaggaacaccaactccagcttcagcaggcactcgagctgcaactgtttctcagctccgtggagaagatggaacggtggctatgttctaaggaggactcgttggcgtctgaaggactctgggatcctctagcccctatggagccacttctctggaagcacaagatgctggagtgggacctcgaagtgcaggccggaaaaatttcagccttggaggccaccgcaagaggcctacaccaggggggtcatcccgaagctcagagcgcactgggcaggtgccaggccatgctcttgcggaaggaagccctgtttcggcaggcagggactcgacgtcaccgtcttgaagagttaaggcaattgcaggcctttctccaggactctcaggaggttgccgcttggcttagggaaaagaatctggtagcactggaagaagggctcttggatacggctatgctacccgctcagctgcagaaacaacagaactttcaagctgagttggacgcctcgatgcatcagcaacaggagcttcaacgagagggccaacgcctgttacagggcggacaccccgccagcgaagccatccaggagaggctagaagagctgggcgcactctggggggaactgcaggataattcccagaagaaagttgcaaaactccagaaggcctgcgaggcactaagactgcggaggagcatggaagagcttgaaaactggctggagcccatcgaagtagaactgcgcgccccgacggtaggccaggcgcttcctggcgtgggtgagcttctcggtactcaaagggaactggaagccgctgttgacaagaaggcacgccaagccgaagctctgctgggacaagcacaagcttttgtgcgcgagggccattgtctggcacaggacgtggaggagcaggcaagacgcttgctgcagaggttcaagagtctcagagagccgttgcaggagagacgcacagccctggaagctagatctctcctcctgaagttttttagagacgcagacgaggaaatggcgtgggtgcaggagaagctcccgttggccgctgcccaggattatggccagtccttgtcagcagtcaggcacctacaggaacagcaccagaacctggagagtgagatgtcaagtcacgaagctctgaccagagtcgtactcgggaccggttacaagttagtgcaagcaggccattttgcggcacacgaggtagcagccagggttcagcaactagaaaaggcaatggcacatttgcgggcagaggctgcgcggcggcggctgctcttgcagcaggcacaagaagcccagcagttcctgaccgagttgctggaggcagggtcatggctggcagagcggggtcatgtacttgattccgaggacatgggccactccgccgaggcaactcaggcactcctgcggcgactggaagccaccaagcgcgatctggaggccttctcccctcgaatagaacgacttcaacaaaccgcagcccttctcgagtcccgtaagaatcctgaaagtcccaaagtgctcgcacagctccaggctgtcagggaagctcatgctgagctcctgcgtagggcagaagcccggggccacggcctgcaagagcagttacaattgcaccagctggaaagagagaccttactgcttgatgcttggctgaccacgaaggcggctacggccgagtcacaggactacggacaggatcttgaaggagttaaggtccttgaagagaagttcgacgcctttcgaaaggaggtgcagtcgctcggccaagcgaaggtgtacgctctaagaaagctagccggcacgctggagcgtggagcccctcgccgctacccacacatacaggcacagagatcacgaattgaggctgcctgggagcggctggatcaggcaatcaaagcccggaccgagaacctagccgctgctcacgaagtccactcattccagcaggctgctgccgaattacagggtcggatgcaggagaaaactgctcttatgaaaggggaagacgggggccactctctttcctcagtcagaactctgcaacagcagcaccggaggcttgagcgagaactggaagcgatggagaaagaagttgccagactgcagacagaggcttgtaggctgggacagctgcatcccgcagcaccaggtggactggccaaggttcaggaggcgtgggcaacgctgcaggcaaaggcccaggaaagaggacagtggctggctcaggctgcacaaggacacgctttcctaggccgctgtcaggagctgttggcctgggcccaagaacggcaggagttagcttcttcagaggagttggcagaagacgtcgctggagctgagcagctgttgggtcagcacgaggagctgggccaagaaatcagggaatgcagattacaggcccaagatctgcgccaggaaggacagcaactggtggataattctcacttcatgagtgcggaggtcactgaatgcctgcaggagctggaaggacggctgcaggagctggaggaagcgtgggcattgcgctggcaacgttgtgccgagagctggggattgcagaaactccggcagagattggaacaggctgaggcctggctggcttgctgggaaggtctcctgcttaagccagactacggccatagtgtcagtgatgtggagctgctgctccacaggcatcaggatctggagaagctgctcgcggcccaggaggaaaaatttgcacaaatgcagaagacagaaatggaacaggagctgctgctgcagcctcaagaactgaaacccggaagggcgggatcctcgctcactagcttccagtggcgcccaagcggccaccaggggctcggagcacagttggccgaaacccgtgacccacaagatgccaagggcacccccaccatggaagggagcctggaattcaagcagcaccttctgcccggcggccgtcagccttctagcagtagctgggactcttgcagaggcaaccttcagggttctagcctcagcttgtttctggatgaacgcatggcagcagagaaggttgcaagcatcgccctcttggatctgaccggcgccagatgcgaaaggcttcgaggccggcacggacgtaagcatacattcagcctgcgactaacatctggggccgagatccttttcgctgctccttctgaagagcaggccgagagctggtggcgagccctgggcagtactgccgcccagtctctaagccccaaattaaaagccaaacccgtgagctctctgaatgagtgtacaacgaaagacgcccgacctggatgcctcctgcgctcggatccctag

SEQ ID NO: 192539 - DNA, 11025 bp, Artificial Sequence
  derived and/or modified sequence
atggccggtcagccccactccccacgcgagcttctcggtgcggctggccatcggagcagacggccaagcactgagctcagggtgccgcctagtcccagcctgaccatggattctcagtacgagactggacacatccggaagctgcaagctagacatatgcaaatgcaagaaaaaacttttactaaatggatcaataatgtgttccagtgtggtcaggctggtatcaagattcgcaatctgtacaccgagctcgctgatggaatccacttattacggctgctggagttgattagcggcgaggcccttcctccgccttcccgaggcaggctgcgcgttcacttcttggagaacagctcacgcgcacttgcctttctgagggcaaaggttcccgtccccctgatcgggcctgagaacatagttgatggcgatcagacactgattctggggttaatctgggtgatcattcttcggttccagataagccacattagtctagataaggaggagtttggagccagtgccgcactgttatctacaaaagaagcccttcttgtgtggtgccagcgtaaaaccgcctcctataccaatgtgaacatcaccgattttagccgctcatggtccgatggtttagggtttaacgctctgatacatgcccaccgccctgaccttctggactatggctctctgcgtcctgaccggccattgcacaaccttgcttttgcttttctggttgccgaacaagagctgggcattgctcagctactcgaccccgaggacgtcgccgctgcccaaccggacgagcgttcaatcatgacatacgtgagcctctactaccattattgctctaggctgcaccagggccaaaccgtccagaggaggttgacaaaaatactgctccagctgcaggagactgagctgctgcaaactcaatacgaacagttggtggcagacctgcttcggtggatcgcagagaaacagatgcagttagaggcaagggacttcccagattctctccctgccatgcgccagctcctggccgcttttacaatcttccgaacccaagaaaaaccacccaggctccaacaacggggagcagcagaggctctattgttccgactgcaaacggccctgcaggcacagaatcgacgaccattcctgcctcacgagggcctgggcctggcggaattgtctcagtgttgggccggtcttgagtgggctgaagcggcacggagtcaggcactccagcagaggctgcttcaactgcagaggcttgaaactctcgccagacgatttcaacacaaggcagcattgagagaatcgttcctgaaggacgcagagcaggtcctggatcaggctagagcgccacctgcctctctggccacggttgaagccgcagtgcaaagactgggcatgttagaggctggtattttacctcaggaaggaaggttccaagctctggctgagatcgcggatatccttaggcaggaacagtatcactcctgggcagatgtcgccagacgccaagaggaagttacagttcgctggcagagacttttgcaacacctgcagggccagcgtaaacaggtggccgacatgcaggccgtcttgtccttgttgcaggaagtggaggccgcaagtcaccaattagaggagcttcaagaacctgccaggtctaccgcatgcggccaacagcttgccgaggtggtggagctgcttcagaggcatgatctgcttgaggcacaagtctccgcacacggggctcacgtgagtcatcttgctcagcagactgcagagcttgactccagcctgggtactagcgtggaagtactgcaggccaaggcgagaacgttggcccagctccagcaaagcctcgtggccctggtgagggcaagacgcgctttactggagcaaacgttgcaaagagccgagtttctacgtaactgtgaggaagaggaagcttggctgaaggaatgtggccagcgtgtggggaatgccgcactgggacgcgacctttctcagattgctggcgcactccagaagcataaagctctcgaggcagaggtgcatcggcatcaggcagtgtgcgtggacctggtaagaaggggtcgagatctaagcgccagacgcccacccacacagccagacccaggtgagcgagcagaggccgtccaaggtggatggcagcttctccaaacccgcgtagtcggccgaggtgcgaggctgcagaccgccttgctggtactgcagtacttcgccgacgctgccgaagcagccagctggctaagggagagaagaagcagcctagaaagggcgagctgcggacaggaccaggcagcagccgaaacgttgctaaggaggcatgttaggctggagagggtcctgagggctttcgccgctgaactgcgcagactcgaggagcaaggcagagccgctagcgctagggcctccttgttcactgtgaattccgccctgtcaccccctggtgagagcctgagaaacccaggtccttggagtgaagcatcctgccatccaggcccaggcgacgcctggaaaatggctcttcctgcagaaccagacccagatttcgaccctaataccattcttcagacccaagatcatctaagtcaagattacgagtcgttacgagctctagcgcaattgagacgtgccaggctggaggaagccatggcactgttcgggttttgttcctcatgcggggagctgcagctgtggctggaaaaacagactgtgctgcttcagagagttcaaccacaggctgacaccctggaggtgatgcaacttaagtatgagaattttttaaccgctctggcggtcggtaaaggactttgggctgaagtatcgtcctccgcagaacagctgcgtcagcgatacccgggaaatagcactcagattcaaagacagcaggaagagctgtcacaacggtggggacagctcgaggcgcttaagagggaaaaggcagttcaactggcacatagtgtggaggtctgttcatttctccaggaatgtgggcctactcaggtccagttgagggacgtgttgctgcagctggaagcgctgcagccaggaagctccgaggacacttgtcatgcgctgcagctggcacagaaaaagaccttggtcttagaacggagagtgcactttcttcagtccgtggtagttaaggtcgaggagcccggatatgctgaaagccagccactgcaaggccaggtggagaccctccaaggtctcctgaaacaggttcaggaacaggtggctcagcgcgcaaggcggcaggctgagacacaggccagacagtcttttctccaggaatcccaacagttactactgtgggcagagtctgtccaagcacaattgaggtccaaggaagttagcgtggatgtggcctccgctcaaaggcttctcagagagcatcaggaccttctcgaggagattcacttatggcaggagaggctccaacagttggacgcccagtctcagcctatggctgcccttgactgtccagactcccaggaagtgccaaatacgctgcgggtgttagggcaacaggggcaggaactgaaggttttgtgggagcaaaggcaacagtggctgcaggaggggctggagctgcagaaattcggaagagaggttgacggattcacagctacctgtgccaaccatcaagcatggttgcacctggacaacctaggcgaagatgtgagggaagccctcagcctgctgcagcagcatcgggagtttggtaggttgctcagcaccctcggcccaagagctgaagccctccgcgctcacggtgagaagcttgttcaatcccagcaccccgctgcccacacagtgagagaacagctgcagtcgatacaggctcagtggactagactgcagggaagaagtgagcaaaggcgtcggcagctgctggcatccctgcagcttcaggaatggaagcaagacgtggccgaactgatgcagtggatggaagagaagggtctcatggcagcacacgaaccatcaggggctcggcgtaacatactgcaaactctgaaaagacacgaagccgctgaatcggaattgctcgcaacgcggaggcatgttgaagcgctgcagcaggttggaagggaattgctgtcacgcaggccttgtggccaggaggatattcagacccgattacaggggctgcgcagcaagtgggaggctctcaaccggaagatgaccgagaggggcgacgaattgcagcaagctggacagcaggaacaactgcttaggcagttgcaagatgcaaaagagcaactggagcagctggagggggcattgcagtctagcgaaacggggcaggatctgcggagcagtcaaaggctacagaaacggcaccagcaattggaatcagagagcaggactctggcagcaaaaatggccgctctggcttctatggctcatggcatggccgcatcccccgcaatacttgaagaaactcagaaacaccttcgccgactggagttgctgcagggacatctggcaattaggggcttgcagctccaggcctctgttgaattgcaccagttttgtcacctgagcaacatggaactgtcatgggtggcggagcacatgccgcacggtagccctacatcatacacagaatgtctgaatggggcacaaagtctgcatagaaagcataaagagttgcaggtcgaagtgaaggctcaccagggccaggtgcagcgggttctgtcatccggacgatcgctcgctgcgtctggtcatcctcaggcacagcatattgtggagcagtgtcaggaactagagggccattgggcggagctggagcgagcttgtgaggcacgcgctcagtgtctgcagcaggcagtcacgtttcagcaatatttcctggatgttagtgaattggagggctgggtggaggagaaaaggcctttggtgtcctcccgagactacggaagagacgaggccgctacactccgcctgatcaacaagcaccaggccctgcaggaggaattggcaatttattggtcaagcatggaagagctggaccagacagcccagaccctgacaggaccagaggtgcctgagcagcagcgggttgtccaggaacgattgcgagagcaactgcgcgctttacaggagttagccgcaacccgcgacagagaactcgaaggtacacttcgtttacacgagttccttagggaggctgaggaccttcagggttggttggcatcacaaaaacaggcagctaaggggggtgagagcctaggcgaagaccctgagcacgcactgcatctgtgcaccaagtttgctaaattccaacaccaggtggagatggggtctcagagagttgcagcatgtaggcttctggcagaatctctgctggagcgtgggcatagcgccggaccaatggttaggcagcgtcagcaggacctccagacagcctggtcggagttgtgggagttaactcaggccagaggacatgcccttcgtgacacagagaccaccttgagggtgcacagggacctattggaggtcctgacacaggtccaggaaaaagccacatcactgcccaataacgtggcaagggatttatgcgggttagaagctcagctgcgcagccaccagggccttgagagagagctggtgggcactgagcgccaacttcaggaacttctcgaaacggcagggcgtgtccagaagctgtgcccgggacctcaagcacatgcagtacagcagcgtcaacaggctgtgacacaggcctgggccgtcttacagcggaggatggagcagcgcagagcccagttggaacgggctagattgctcgcacgattccgcaccgccgtgcgggattatgccagctgggcggctagagtgcgacaggacctgcaggtcgaagagagctcacaggaaccgagctctggacctctgaagctgagcgctcatcaatggctgcgtgctgaactggaggccagagagaaattgtggcaacaagctacacagcttgggcagcaggcgctcctggcagcaggaacgcccacaaaagaagtgcaggaagaactgcgggcactccaagatcagagagatcaggtctaccagacctgggctagaaaacaggaacggctacaggccgagcagcaggagcagctcttcttacgggagtgcggacgacttgaggagattctggctgctcaggaagtgagcttaaagaccagtgccctgggttcatccgttgaagaggttgaacaactgatccggaaacacgaggtttttctgaaagttctgactgcacaggacaagaaggaggctgcccttcgtgagcgcttgaaaacacttcgcagaccacgggttagagacaggttgccgatcctcctacagcggagaatgagagtaaaagagctggccgagtcacgcggacatgcactacatgccagtctgctgatggccagttttactcaggctgcaacacaagctgaagactggatacaggcttgggcacaacagttgaaagaacctgtaccacccggagacctgagggacaaactgaagcccttactcaagcaccaggccttcgaagcagaggttcaggcgcacgaggaagtcatgacttctgtggcgaaaaagggggaggccctcctggctcagtcccaccctagggctggcgaagtgagtcaaagacttcagggccttagaaagcattgggaagacctcaggcaggccatggcgctgcggggacaggaactggaagatcgacgcaatttcctggagttcctgcagcgagtcgacttggccgaagcatggatacaggagaaggaagtgaagatgaatgtgggggatctgggccaggacttagagcattgcctgcagctgcggagaagactgagggaattcaggggcaattcagctggcgatacagtgggagatgcttgcatacgttccatttccgatctttctcttcagctgaaaaaccgtgatcccgaagaggtgaaaatcatttgtcaacggagaagccagttgaacaacagatgggcctcatttcatgggaatcttttacggtaccagcagcagcttgaaggtgctctcgagatccacgtgctatctcgggagctggataacgtcactaagagaatccaggagaaggaggctctgatacaggctctggactgcgggaaagacctcgagtcagtacagaggctgctgcgtaagcacgaagaattagagagggaagtacatccaattcaagcacaggtggagtctttggaaagagaagtggggaggctgtgtcagagaagccctgaggcagcccatggccttcggcaccggcagcaggaagtcgccgaatcttggtggcaactgagatccagggcccagaaacgcagggaggccctggacgcacttcatcaggcacaaaaactccaggctatgcttcaggaattgctggtctcggcccagcggcttagagcccaaatggatactagtcccgctcctcgttcacccgtcgaagccaggagaatgctggaagagcaccaggagtgtaaggctgagctggattcctggactgatagcatcagtttggcgcgaagcactgggcaacagcttctaaccgcagggcaccctttttccagcgacatcagacaagtgctcgccggactagagcaggaactatctagcttagaaggggcttggcaagagcatcagctccagctgcagcaagctctggaacttcagctgttcctgagtagcgtggaaaagatggagcgctggttatgctctaaagaggatagtctagcaagtgagggcctttgggatcctcttgcgcctatggagcctctgctgtggaaacacaaaatgctggagtgggacctggaagtgcaagcaggtaagatctccgcactcgaggcaaccgctcgtggcctccatcagggaggacatccagaggcccaatccgccttagggcgttgtcaggcaatgttactcaggaaagaggctctgttccggcaggccggaactagacggcacaggctggaagaacttcgtcaactacaggcgttccttcaggacagccaggaagtagctgcctggctgagggaaaaaaatctggttgccctggaggaggggctcctcgataccgccatgctgcctgcgcagctgcagaagcagcagaattttcaggccgaactggacgcttccatgcatcagcagcaagagcttcagcgtgaaggccagcgcttgctccaaggcggtcacccagcttccgaagccattcaggagcgcttagaggagctgggtgctctatggggggagctgcaagacaattcacaaaaaaaggtggccaaactgcagaaggcttgcgaggccttgcgtctgcgtcgcagcatggaggaattagagaattggctggagccaattgaagtcgaattgagggcccctactgtggggcaagcattgcctggggtcggagaactgctcggaacccagcgggaactagaggcggcagtggacaaaaaggcccgacaagcagaagccctgttgggtcaggcccaggctttcgtgagggaaggtcactgcttggcccaggatgttgaagagcaggccaggagactattgcagcggtttaagagccttagggaacctctccaggaacgcagaactgctttggaggccagatcccttctgttgaaattttttcgtgacgccgatgaagaaatggcatgggtccaggagaaattacctttggcagccgctcaggactacgggcagtcactgtccgctgtgcgccacctgcaggagcagcatcagaacttggagtctgaaatgagctctcacgaggcgctgacccgggttgttcttgggacgggctacaagctagttcaagccggacatttcgctgcccatgaagtggccgcacgcgtgcagcagctggagaaggcgatggctcacctgcgcgcagaagccgctcggcgaaggttactactgcagcaggcccaagaggcccagcaattcctaacagagctgctcgaggctggatcatggttagcagaaagggggcacgtcctggatagtgaagatatgggacatagtgcagaggctacccaggcattgcttcgtaggctggaggctacgaagagagaccttgaagcctttagtccccgtatcgagaggctgcagcaaaccgcggctctcctggaaagcaggaagaatcctgaaagcccaaaggtgctcgcccaacttcaagccgtgagagaagcacacgcagagttactgcgcagagctgaggccagggggcacggcctgcaggaacaactgcaactccatcagctggaacgggagactttactgctggacgcgtggctgaccactaaggctgccaccgctgagtcccaggactacggccaggacctggagggcgtgaaggtgctggaggagaaatttgatgcctttagaaaggaggtccagtctctcggtcaggccaaagtatacgcactcagaaaactggccggtactctagaaaggggggctcccaggcggtatccgcacatccaggcacagcggtctagaattgaggctgcctgggaacggctggatcaggccatcaaggccaggaccgagaacctcgccgcagcccacgaagtccattcttttcagcaggccgcagctgaactccaggggagaatgcaagagaagaccgcactcatgaagggagaagacggaggtcactctctttccagcgttaggaccctccagcaacagcatagaaggctggaacgggaattggaggcgatggagaaggaggttgctcggctccaaactgaggcttgtcgtcttggacaactgcacccagcggcacccggtgggctggccaaggtacaagaggcctgggccacattgcaagccaaggcgcaggagcgtggtcagtggctcgcacaggccgctcagggacacgcctttctaggaagatgccaggagttgctggcctgggctcaggagcggcaggagctggcgtcaagcgaggagctggcagaggacgtcgctggggcagaacagttgctaggtcagcatgaagagttaggacaagaaatacgggaatgccggctccaggcccaggatctgcggcaagagggccaacagctcgtggacaactcccacttcatgtctgctgaggtgaccgaatgcctgcaggagcttgagggcaggcttcaggagctggaggaggcatgggcgctgcgctggcaacggtgcgcagagagctggggcctgcagaaactccgacagcggctggaacaggcagaggcatggctggcctgttgggagggtcttctgctcaaaccagactatggccacagcgtgtctgacgtcgagctgctactccacaggcatcaggacttagagaagctccttgccgctcaggaggagaagtttgctcagatgcagaagaccgagatggaacaggagctgctgctccagccccaggagcttaagccgggtcgcgctggatcatcactcacgtcttttcaatggagaccatctggacaccagggcttgggagcccaactcgccgaaacgcgggatccccaagacgcaaagggcactcctactatggagggttcattggaatttaagcagcatcttctgccaggcggtagacagccttcttcaagttcttgggatagctgcagaggtaatctgcagggttcttccctgagcttatttctggatgagcgtatggccgcagagaaagtggctagtatcgcgcttttggatcttaccggggcacgttgtgaacgtcttcgcggacgccatgggagaaagcatacattttctcttcgtctaacctctggggctgaaatccttttcgcggctccctctgaggaacaggccgagagctggtggcgtgctttagggtccaccgctgcccagtctctgagcccaaagttaaaagctaagccagtgtcctccctgaatgagtgtactaccaaagatgccaggcctggatgcttgctcaggtctgacccctaa

SEQ ID NO: 192540 - DNA, 11722 bp, Artificial Sequence
  derived and/or modified sequence
ggacaatgccgcctgtgtgccgtcaccccagcacgctggctcaaggggagggctgtggtgcagccctgctccagccttggcctctcctgatgtccctctccctccctccacagcccctgctatctgccatctccatccgtccagctgggccgcctctgtggaacccaggcatcaccaaggtttagggagccatccagcagctcctcatccccaaagtctgcagggctgatggctggtcagccccacagtccccgggagctcctcggggctgcagggcaccgcagcaggaggcccagcacagaactccgggtcccgcccagtccaagtctcaccatggactctcagtacgagacgggccacattcgcaagctacaggcccggcacatgcagatgcaggagaagactttcaccaagtggatcaataacgtcttccagtgcggccaggcgggcatcaagatccggaacctgtacacagagctggctgacggcatccacctcctgcggctgctggagctcatctcaggggaggccctgccacccccgagccggggccgcctgcgtgtgcacttcctggagaacagcagccgagctctggccttcctcagggccaaggtgccagtaccactcatcgggccagagaacatcgtggacggagaccagacactcatcctgggactcatctgggtcatcattctgcgtttccagatctcccacatctccttggacaaggaggagtttggggccagcgcagccctgctgtccaccaaggaagccctgctggtctggtgccagcggaagacagccagctacaccaacgtgaacattacagatttctcccgaagctggagcgatgggctgggcttcaatgccctcatccatgcccacaggccagacctgttggactacggctccctgcgtccagaccgcccactgcacaaccttgcttttgctttcctggtggctgagcaggagctgggcattgctcagctgctggaccccgaggacgtggcagccgcacagccagatgagcgctctatcatgacctacgtctccctctactaccactactgctcccgcctgcatcaggggcagactgtccagaggagactcactaagatcctgcttcagctccaggagacagagctgctgcagacccagtacgagcagctggtggctgaccttctacgctggattgcagagaagcagatgcagctggaggcgcgggattttccagactcgctgcccgccatgcggcagctactggcagcattcaccatcttccgcacccaggagaagccaccccggctacagcagcgaggggccgcagaggccctgctcttccggctacagacagcactccaagcccagaaccgcaggcccttcctgcctcatgagggcctgggccttgcagagctgtcccagtgctgggcagggctggagtgggcagaggctgcaaggagccaggccctgcagcagaggctactgcagctgcagcggctagaaaccctggcccggcgcttccagcacaaggcagccctccgggagagtttccttaaggatgcagagcaggtgctagaccaggccagagccccgccagccagcctggccacagtggaggcagccgtccagaggctgggcatgctggaggctggcatcctgccccaggaggggcgcttccaggccctggctgagatcgcagacatcctccggcaggagcagtaccacagctgggcagatgtggcccgcaggcaggaggaagttaccgtgcgctggcagaggctccttcagcatctacagggacagaggaagcaggtggcagacatgcaggctgtgctgagcctgctgcaggaggtggaggctgcctcccaccagctggaggagctgcaggagccggccaggtccaccgcctgtgggcagcagctggcagaagtggtggagctgctgcagaggcatgacctgctggaggctcaagtctcggcccacggagcccatgtgagccatcttgctcagcagacagcagagctggactcctccctgggcaccagtgtggaggtgctgcaggccaaggccaggacactggcccagctccaacagagcctggtggctcttgtcagggcccggcgggccctgctggagcagaccctgcagcgggcagagttcctgcgcaactgtgaggaggaggaagcctggctgaaggagtgcggacagcgggtggggaatgcggccctgggccgggatctcagccagatcgcaggcgccctgcagaaacacaaggccctggaagctgaggtccaccgccaccaggccgtgtgcgtagatctcgtgcggaggggacgcgacctcagcgcccgcaggcccccaacgcagccggatcccggggaacgggcagaggccgttcagggagggtggcagctgctccagacccgggtggtggggcggggcgcacggctgcagacagccctgctggtcctgcagtacttcgcggacgcggcggaggcggcttcgtggctgcgcgagcggcgatcctcgctggagagagcgtcctgcggtcaggaccaggcggccgccgagaccctgctgaggcgccacgtgcggctggagcgcgtcctgcgcgccttcgcggccgagctgcggcggctggaggagcaggggcgggcggcctcggcccgggcgtcgttattcacggtgaactctgccctgagccctccaggagaaagcctgaggaacccagggccctggagtgaggcttcctgccaccctggccctggggatgcctggaagatggccctcccagctgagcctgaccctgactttgatcccaacactatactccagacacaggaccacttgagtcaggactatgagagtctgcgggccctggcacagctccgcagggcccggttggaggaggccatggccctgttcggtttctgcagttcctgtggggagctccagttgtggctggagaagcagacagtgctgctccaaagggtgcagccccaggctgacaccctggaggtcatgcagctcaaatatgagaacttcctcactgccctggctgtgggaaagggcctctgggctgaggtcagcagctctgctgagcaactgaggcagagatatcctgggaactccacacaaatccaacgacagcaggaggaactgagccagaggtgggggcagctggaggccctgaagagggagaaggccgtgcagctggcacacagtgtggaagtgtgcagttttctgcaggagtgtggacccacacaggtccagctgcgagacgtgctcctccagctggaggccctgcagccagggagctcagaggacacctgccacgccctgcagctggcccagaagaagaccctggtgctggagaggagggtccacttcctccaaagtgtggtcgtaaaggtcgaggagccaggctacgcagagagccagcctctgcaaggacaggtggagacactgcaggggctgctgaagcaagtacaggaacaagtggcccaacgggcccggcgccaggctgagactcaggcccggcagagcttcctgcaagagagccagcaactgctactgtgggcagagagtgtccaggctcagctgcgcagcaaggaggtgtcagtggatgtggcctcggctcagcggctgctgagggagcaccaagacctgctggaggagatccacctgtggcaggagaggctgcagcagctggacgctcagagccagcccatggcagccttggactgcccagactcccaagaggtgcccaacactctgagggtcctggggcagcagggccaggagctgaaggttttgtgggagcagaggcagcagtggctgcaagaggggctggagctgcagaagtttggccgagaagtggatggtttcactgccacctgtgccaaccaccaggcctggctgcacctggacaaccttggggaggacgtgagggaggccctgagcctgctgcagcagcaccgggagtttgggcggctcctgagcaccctggggcctcgggcagaggctctgcgggcacacggcgagaagctggttcagagccagcacccagctgcacacacggtcagagagcagctgcagagtatccaggcacagtggaccaggctccaggggaggagtgagcagaggaggaggcagttgctggcttccctccagctccaggagtggaagcaggatgtggcagagctgatgcagtggatggaagagaaggggctgatggctgcgcatgagccctccggagcgcgcagaaacatcctgcagacactcaagcggcacgaagcagctgagagcgagctactcgccacccgcagacacgtggaggccctgcagcaggttgggagagagctgttgagtaggaggccctgtggccaggaggacatacagaccaggcttcaaggcctgagaagcaagtgggaagctttgaaccgcaagatgactgagcgtggggacgagctccagcaggctggacagcaggagcaactcctgaggcagctgcaggatgcaaaggagcagctggagcagctcgaaggggccctacagagctcggaaacagggcaggacctgcgctccagccagaggctgcagaaacggcaccaacagctggagagtgagagccggaccctggctgccaagatggctgccctcgcctccatggcccatggcatggccgcctccccggccatcctggaagagacccagaagcacctccggaggctggagcttctgcaggggcatctggccatccggggcctgcagctgcaggcctcagtggagctgcaccagttctgccacctgagcaacatggagctctcttgggtagccgagcacatgccccatggcagccccaccagctataccgagtgcttgaatggtgcccagagccttcaccgcaagcacaaggagctccaggtggaggtaaaagctcaccaggggcaggtgcaacgggtgctgagttctgggcggagcctggcagcctcagggcacccccaagcccaacacatcgtggagcagtgccaggagctggaaggccactgggcagagctggagagggcatgtgaagcgcgggcccagtgtctgcagcaggctgtcactttccagcagtactttctggatgtgtcagagctggagggctgggtggaggagaagcggccgctggtgagcagtcgggactatggcagagacgaggcagccaccctcaggctcattaacaagcaccaggctctacaggaggaactagccatttactggagctccatggaggagcttgaccagacggcccaaaccctcactggccccgaagtccctgagcagcagcgtgtggtgcaggagaggctccgggagcagctgcgggcactgcaggagttggcggccacacgggaccgggaactggaggggaccctgaggctgcatgagttcctgagggaggctgaggacctgcagggctggctggcaagccagaagcaggcagccaaaggaggggagagcctgggagaggaccccgagcacgccctgcacctctgcaccaagtttgcaaagtttcagcaccaagtggagatgggcagccagcgggtggccgcctgccggctgctggcggagagcctgctagagcgtgggcacagtgctggccccatggtccgtcagaggcagcaggatctgcagaccgcctggtcggagctgtgggagctgacccaggcccgaggccacgcgctccgagacaccgagaccaccctcagagttcacagagatctcttggaagtcctcacccaggtccaggagaaagccacgagcctccccaacaatgtggcacgggacctgtgtgggctggaggcgcagctgagaagccaccaggggctggagcgagaactcgtgggcaccgagcggcagctgcaggaactgctggagactgcaggcagggtgcagaagctgtgtccggggcctcaggcccatgcggtgcagcagaggcagcaagctgtgacgcaggcgtgggcagtgctgcagcgacgcatggagcagcgcagggcccagctggagcgggcacgcctcctggcccgcttccgcacggcggtgcgtgactatgcctcctgggcagcccgcgtgcgccaggacctgcaggtggaggagagttcgcaagagcctagcagtggcccgctgaagctcagtgcccaccagtggctccgggcggagctggaggcccgggagaagctgtggcagcaggccacccagctggggcagcaggcacttcttgctgcagggacacccaccaaggaggtccaggaagagcttcgagccctgcaggaccagcgggaccaggtgtatcagacctgggcacggaagcaagagaggctgcaggccgagcagcaggagcagctcttcctcagagagtgcggccgcctggaggagatcctcgcggcccaggaggtctccctgaaaaccagtgccttggggagctcggtggaagaggtagagcagttgattcgcaagcacgaggtcttcctgaaggttctgactgcccaggacaagaaggaggcagccctgcgtgagcggctgaagacgctccggcgcccccgggtgcgggaccggcttcccatcctgctgcagcgccggatgagagtgaaggagctggcggagagccggggacacgccctgcatgcctccctgctgatggccagcttcacccaggccgcaacccaggctgaggactggatccaggcgtgggcccagcagctgaaggagccggtccctcctggggacctgagagataagctgaagcccctgctgaaacaccaggcctttgaggctgaagtccaggcccatgaggaggtcatgacctctgttgccaagaagggagaggctctcctggcacagagtcaccctcgagccggagaggtctcccagcggctgcagggcctgcggaagcactgggaggacctgaggcaggcaatggccctcaggggccaggagctggaggacaggcggaacttcctggagttcctgcagagagtggaccttgcagaggcctggatccaggagaaggaggtgaagatgaatgttggtgacctgggccaggacctggagcactgcctgcagctccgacggcggctccgcgagttccgaggaaactcggccggggacacagtgggtgatgcctgcatcaggagcatcagtgacttgtcactgcagctcaagaaccgggaccctgaggaagtcaagatcatctgccagcggcgaagccagctcaacaacaggtgggcgagtttccatggcaacttgctccggtaccagcagcagctcgaaggggccttggagatacacgtgttgtcccgagagctggacaatgtcaccaagaggattcaggagaaggaagccctgatccaggccctggactgtgggaaagatctggagagcgtgcagaggctgctgcggaaacacgaggagctggagcgggaagtgcaccccatccaggcccaggtggagtccctagagcgtgaagtgggccgcctctgccaaagaagccccgaggcagcccacggcctcaggcacaggcagcaggaggtggctgagagctggtggcagctccggagcagggcccagaagcggagggaggcgctggatgccttgcaccaagctcagaaactccaggcaatgctgcaggaattgctggtcagcgcccagaggctgcgggctcagatggacacgagccccgctcctcgcagccctgtggaagcccggcgtatgttagaagagcatcaggagtgcaaggccgagctggactcctggacagacagcatcagcctggcccgaagcactgggcagcaactgctcacagcggggcaccccttcagctccgacattcgccaggtgctggctggcttagaacaggagctgagcagcctggaaggggcctggcaggagcatcagctacagctgcagcaggccctggagctacagctgtttctgagctcagtggagaagatggaacgttggctttgcagcaaggaagactccctagccagtgagggtctatgggaccccttggcccccatggagccccttctgtggaagcacaagatgctggagtgggacctggaggtgcaggcgggaaagatcagtgctctggaggccacggcccgcggcctgcaccagggtgggcaccccgaggcccagagtgccctgggcaggtgccaggccatgcttctgaggaaggaggcgctcttcaggcaagccgggacccgccgccatcgcctggaggagctccggcagctgcaggccttcctgcaggactcccaggaggtggctgcgtggctgagggagaagaacctggtggccttggaggagggtttgctggacacagccatgctgccagcacagttacagaagcagcagaatttccaggcggagctggacgcgagcatgcaccaacagcaggagctgcagcgggagggacagaggctgctgcaggggggccacccagcctcggaggccatccaggagcgactggaggagctgggagcactctggggtgagctgcaagacaactcccagaagaaggtggccaagctccagaaggcctgtgaggccctgcgtctgcggcggagcatggaggaactggagaactggctggagcccatcgaggttgagctgagagcccccactgtgggccaggccctgcctggggtgggcgagctcctgggcacacagagggagctggaggcagcagtggacaagaaggccaggcaggctgaggcactgctgggccaggcccaggcctttgtgagggaaggccactgccttgcccaagatgtggaagagcaggcccggcggctgcttcagaggttcaagagcctgagggagcccctgcaggagcgcaggacggccctggaggcccggagcctcctcttgaagttcttcagggacgccgacgaggaaatggcctgggtgcaggagaagctgcctctggccgctgcccaggactatggccagagcctgagtgcggtgcggcacctgcaggagcagcaccagaacctggagagtgagatgagcagccacgaggctctgacccgggtggtgctgggcactgggtacaagctggtgcaggctgggcactttgccgcccacgaggtggccgcccgggtgcagcagctggagaaggccatggcccacctgcgggcagaggcggcgcggaggcggcttctgctgcagcaggctcaggaggcccagcagtttctgactgagctcctggaggcgggatcctggctggctgagcggggccatgtcctggacagcgaggacatgggccacagtgctgaagccacacaggcccttctgcggcggctggaggccaccaagagagacctggaagcgttcagcccacgcatcgagcggctgcagcagacagcagcactcctggagagcaggaagaacccagaaagccccaaggtgctagcccagctgcaggcagttcgggaggcccacgcagagctgctgcggagggcggaggccagggggcacggcctgcaggagcagctgcagctacaccagctggagcgagagaccctgctcctcgacgcctggctgaccaccaaggcggccaccgccgagtcccaggactacgggcaggacctggagggtgtcaaggtgctggaagagaagtttgatgctttcagaaaggaagtgcagagcctgggccaggccaaggtgtatgccctgaggaagttggcaggcaccctggagcggggtgcacccaggcgctatccccacatccaagcccagaggagccgcattgaggctgcttgggagaggttggaccaagcaataaaagcccgcacagagaacttggctgcagcccatgaggtccacagctttcagcaggcagcagctgagctccagggaaggatgcaggagaagacggccctgatgaagggggaggacggaggccacagcctgtcatctgtgcggaccctgcagcaacagcacaggcgcctggagagagagctggaagctatggagaaggaggtggcacggctacagacggaggcctgccgactgggccagctacatcctgcagctccggggggcctggccaaggtgcaggaggcctgggccaccctgcaggcgaaggcccaggagcgaggccagtggctggcgcaggctgcacagggccatgccttcctcgggcgctgccaggaactgctagcatgggcacaggagaggcaggagctggcgtcctccgaggagctggctgaggacgtggcgggggctgagcagctccttgggcagcatgaagagctggggcaagaaatcagggagtgccgccttcaagcccaggacctgcggcaggaaggacagcagctggtggacaacagccacttcatgtctgcggaggtgacagagtgcctgcaggagctggaagggcggctgcaggagctggaggaggcttgggccctgcgctggcaacgctgtgccgagagctggggcctgcagaagcttcggcagaggctggagcaggctgaggcctggctggcctgctgggagggactcctgctgaagcccgactatgggcactcagtgtcagatgtggagttgctgctgcacagacaccaggacttagaaaagctgctggcagcccaggaagagaagtttgcccaaatgcaaaagacagagatggaacaggagctcctgctgcagccacaggagctgaagcccgggagagctggcagctcgctgacatcctttcagtggaggccctctggacaccaggggctaggagcacagctggctgagacgagggacccccaggatgcaaagggtacccccaccatggaggggtctttggagttcaagcagcacctgctgcctggcgggaggcagcctagctcgagctcctgggacagctgccgcgggaacttgcagggcagctctctgagcctgttcctggatgagaggatggcagcggagaaagtagcttccatagccctccttgacctcacgggagcccggtgtgagaggctgcggggccgccacggcaggaaacacacattctccttaaggctgaccagtggggcagagatcctgtttgcagcaccgtccgaagagcaggctgagagctggtggcgagccctgggcagcactgcagcccagagtctgagcccaaaactcaaagccaaacctgtcagctctctgaatgagtgcacgaccaaggatgcccggcctggatgtctactcaggtctgatccctgaggtgaaccccagtgcaacaccaaacttcaggggcacaagcgaggacacatctaagggaccagaataagactcagctacaggcaaaagggctccttcccgtggctgcttcaacccagttccccaggcccagcttctggaatagacagttccttctggttagatgggtcctaccatgtggcaggaaacagccattgcctggcctccccctgcattcctgtctgggtgaagaggagacgtgttacggcagagcaggtgggcaaggccagggctaccccaggcccatgtggcctcctccttgcttggaaggggtgactctgagcacaggtagacgcagacgtgtgcagagaatgtgctcttcggaggaagaacactgatgagcgagctctgtaccagcccttgccatgtacagccaagagcctagaatgacatggcccttctcagcagtaataacagatggtctcagcgcctc

SEQ ID NO: 192541 - protein, 281 aa, Artificial Sequence
  derived and/or modified sequence
MAQSGLTATSASQVQAILLPQPASVRHYAWVVDQIDTLTSDLQLEDEMTDSSKTDTLNSSSSGTTASSLEKIKVQANAPLIKPPAHPSAILTVLRKPNPPPPPPRLTPVKCEDPKRVVPTANPVKTNGTLLRNGGLPGGPNKIPNGDICCIPNSNLDKAPVQLLMHRPEKDRCPQAGPRERVRFNEKVQYHGYCPDCDTRYNIKNREVHLHSEPVHPPGKIPHQGPPLPPTPHLPPFPLENGGMGISHSNSFPPIRPATVPPPTAPKPQKTILRKSTTTTV

SEQ ID NO: 192542 - protein, 142 aa, Artificial Sequence
  derived and/or modified sequence
MTDSSKTDTLNSSSSGTTASSLEKIKVQANAPLIKPPAHPSAILTVLRKPNPPPPPPRLTPVKCEDPKRVVPTANPVKTNGTLLRNGGLPGGPNKIPNGDICCIPNSNLDKAPVQLLMHRPEKDRCPQAGPRERVRFNEKVQ

SEQ ID NO: 192543 - DNA, 846 bp, Artificial Sequence
  derived and/or modified sequence
atggcccagagcggcctgaccgccaccagcgccagccaggtgcaggccatcctgctgccccagcccgccagcgtgagacactacgcctgggtggtggaccagatcgacaccctgaccagcgacctgcagctggaggacgagatgaccgacagcagcaagaccgacaccctgaacagcagcagcagcggcaccaccgccagcagcctggagaagatcaaggtgcaggccaacgcccccctgatcaagccccccgcccaccccagcgccatcctgaccgtgctgagaaagcccaacccccccccccccccccccagactgacccccgtgaagtgcgaggaccccaagagagtggtgcccaccgccaaccccgtgaagaccaacggcaccctgctgagaaacggcggcctgcccggcggccccaacaagatccccaacggcgacatctgctgcatccccaacagcaacctggacaaggcccccgtgcagctgctgatgcacagacccgagaaggacagatgcccccaggccggccccagagagagagtgagattcaacgagaaggtgcagtaccacggctactgccccgactgcgacaccagatacaacatcaagaacagagaggtgcacctgcacagcgagcccgtgcacccccccggcaagatcccccaccagggcccccccctgccccccaccccccacctgccccccttccccctggagaacggcggcatgggcatcagccacagcaacagcttcccccccatcagacccgccaccgtgcccccccccaccgcccccaagccccagaagaccatcctgagaaagagcaccaccaccaccgtgtag

SEQ ID NO: 192544 - DNA, 846 bp, Artificial Sequence
  derived and/or modified sequence
atggcccaatctgggttgacggccacttctgcatcccaggtgcaggccatccttcttcctcaacctgcgtctgtcagacactacgcatgggtggtggaccagatcgatacactgaccagtgacctccagctggaggatgaaatgactgacagctcgaaaaccgacaccttgaattcatcttcttccggaaccaccgccagttcactcgaaaaaatcaaagtgcaggccaacgcccccctgatcaaaccacctgcccatccttccgctatcctgacagtgctgaggaaacctaatccccctccccctccccccaggctcaccccggtcaaatgtgaggacccgaaaagggtcgttcccacagctaacccggtcaagacgaacgggactcttctgagaaatggaggacttccaggcggcccaaacaaaatcccgaatggcgatatctgctgtatccctaactcaaacctcgacaaggctcctgtgcagctgttaatgcacaggccggaaaaagacagatgcccacaagctgggcccagggagagggtacggttcaacgagaaggtccaatatcacgggtattgccccgactgcgatactcgttacaatattaagaaccgagaggtacacctgcattcagaacccgtccatccccctggcaaaatccctcatcagggaccccctctgccccccaccccgcatctgcccccgtttccactggagaacggcggaatgggcatttcccactccaactcttttcctcccatcagacctgctactgtgccgcctccgacagcccctaagcctcagaagaccatcttgagaaaaagcacaaccaccaccgtctag

SEQ ID NO: 192545 - DNA, 846 bp, Artificial Sequence
  derived and/or modified sequence
atggcccagagcggcctgacagccaccagcgccagccaggtgcaggccatcctgctgccccagcctgcctctgtgcgccactacgcctgggtggtggaccagattgacaccctgaccagtgacctgcagctggaggatgagatgacagacagcagcaagacagacaccctgaacagcagcagcagcggcaccacagccagcagcctggagaagatcaaggtgcaggccaatgcccccctcatcaagcccccagcccaccccagcgccatcctgactgtgctgaggaagcccaaccccccacctcctccaccccggctgacccctgtgaagtgtgaggaccccaagagggtggtgcccacagccaaccctgtgaagaccaacggcaccctgctgagaaatggaggcctgcccggcggccccaacaagatccccaatggagacatctgctgcatccccaacagcaacctggacaaggcccctgtgcagctgctgatgcacaggcctgagaaggaccgctgcccccaggccggcccccgggagcgggtgcgcttcaatgagaaggtgcagtaccacggctactgcccagactgtgacacccgctacaacatcaagaaccgggaggtgcacctgcacagcgagcctgtgcaccccccaggcaagatcccccaccagggcccccccctgccccccaccccccacctgccccccttccccctggagaatggaggcatgggcatcagccacagcaacagcttcccccccatccggcctgccaccgtgcccccacccacagcccccaagccccagaagaccatcctgaggaagagcaccaccaccaccgtgtag

SEQ ID NO: 192546 - DNA, 846 bp, Artificial Sequence
  derived and/or modified sequence
atggcccagagcggcctgaccgccaccagcgccagccaggtgcaggccatcctgctcccccaaccggcttccgtccgccactacgcatgggtcgtggaccagatagatacactgaccagcgatctgcagctggaagatgaaatgaccgactccagtaagactgacactctgaactctagctcgagcggtacaaccgccagctcccttgagaaaataaaagtgcaggccaatgctcccctgataaaacccccagcccacccatctgccatcctgacggttctgcggaaacctaatccacccccgcctcccccccgcctgacaccggtcaaatgcgaggaccccaaaagggtggttccaacagccaaccccgtgaagacaaatgggacgttgcttaggaatggaggcttaccgggtggccctaacaagatacccaacggggatatctgctgcattcctaactccaacttggataaggcacccgtgcagctgctgatgcacagaccagagaaggatagatgtccgcaagcaggacctcgagagcgcgttaggttcaacgagaaggtacagtaccacggctactgccctgactgcgatactcgctacaacatcaaaaacagagaagtccacctgcactccgagcctgtccatccccctggtaaaattccccatcagggaccccccctgcccccaactccccatctacccccttttcctctggagaatggcggaatgggcatttctcattccaattcttttccaccaataaggcccgctaccgtgcctccccctacagcacccaagccacagaagactatactaaggaagtctactactacaactgtgtag

SEQ ID NO: 192547 - DNA, 846 bp, Artificial Sequence
  derived and/or modified sequence
atggcgcagtcaggcctgacggctactagcgcttcacaggtgcaggccatcctgcttccccagcctgcgtctgtgagacactatgcctgggtcgtcgaccagatcgatactctcacctcggacctgcagctggaggacgagatgaccgactcttcaaaaaccgatacactcaactcttcgtcaagtgggaccactgcctcatcacttgagaagattaaggtccaagccaatgcccctttgataaagcctccagcccatcctagcgcgatcctgactgtcctacggaagcccaatccccctcctccccctcctcgactaacgcccgtaaagtgtgaggatccaaagcgtgtcgtccctactgccaacccagttaagaccaatggcaccctcttaaggaatggaggcctacccggaggacctaataagattcctaacggcgatatctgctgcatccccaacagcaatttggataaggcacctgtccagctgttgatgcaccgcccagaaaaggacaggtgtccccaggccggtcctcgcgagagagttcggttcaatgaaaaggtccaatatcatggttattgtcctgattgcgacactaggtataatatcaaaaatagggaagtacatctgcacagcgagcctgtgcacccaccaggaaagatcccacatcagggccctcccctgcctcctaccccccatctgcccccatttcctttagagaacggaggaatgggaatttctcacagtaattccttccctccaattagacctgccaccgtcccaccacctactgctcccaagccccagaagactattcttcgtaaaagtacaacaacaacagtgtag

SEQ ID NO: 192548 - DNA, 1826 bp, Artificial Sequence
  derived and/or modified sequence
gccgcccggccgagcgcggagcgcagccactcgccgctgcccagggagcgcccaagatgtggggggaccggggcggcagcggccgtagcagcgccagggacgggggcacgcagcagcctccgctcgcccgcctgtcctgacctgcctcgcttgcccccaaagaatgtcagccaagtccaaggggaacccctcctcgtcctgtccagccgagggaccgccggcagcctccaaaaccaaggtgaaggaacagatcaagatcatcgtggaggatttggaattagtcctgggcgacctgaaggacgtggccaaggaacttaaggagatgaagtcccactctgttgcccaggctagagtgcaatggcacaatctgggctcactgcaacctctgcctcccaggttcaagctattctcctgcctcagcctgcctcagtgcgccactacgcctgggtggttgaccagattgacaccctgacctctgacctacagctggaggatgagatgactgacagctccaaaacggacacgctgaatagtagctcaagtggcacaacagcctccagcctagagaagatcaaagtgcaggctaatgcaccgcttattaaacccccagcacacccgtctgctatcctcacggtcctgagaaagccaaaccctccaccacctcctccaaggttgacacctgtgaagtgtgaagaccccaaaagggtggttccaactgccaatcctgtaaaaaccaatggcacccttctacgaaatggaggcttaccaggtggacctaacaaaattccaaatggagatatctgctgcatacccaacagtaacttggacaaggctccagtccagcttctgatgcatagacctgaaaaagacagatgtccccaggcagggcctcgagaacgagttcggtttaatgaaaaagtacagtaccatggctattgtcctgactgtgatacccggtataacataaaaaacagggaggtccacttacacagtgaacctgtccacccaccgggaaagattcctcaccaaggccctcccctccctcctacaccccatctccctcctttcccactagaaaatgggggaatgggaataagccacagtaacagcttcccccctatcagacctgcaactgtgcctcctcccactgcaccaaaaccacagaagacgatcttgaggaagtcaaccactacaaccgtgtgatgtatgccattaaaaaaattgtttttttaattttctatattataaacataaaataagtaatgagcactttctactcaagcaataaaaagcccaaatatattaatcctgcattcagcaaagtggcataaaaatcacctggtaagtatgcagcacattgcttatatcctgggtatgcattattttaaatgttgtatcattaaaaacctcagaatgatgaaaaatatgaatgatgcattgtttttgcaattgacctatgacaaactgtgaacctgcagatttcacctattttgatttactataagagctgggatttgattcattttatttatgcctaagtcatctatgcattaacatgtcatattcttaactttgatctaatgctttttactaggaaattttaatactgaaggactattttattatttttttctaaagatgtttgtcactagtttttcattattaaatgctgaggccaataccaagaagtttattttctatattatacaattatgaattacatgctcagctatatatgtaataaaatactttggtctgtggaaatattgttaaatcaataaacaatagtaaataatgacaaaagcaaatgttcctcagaattaaaa

SEQ ID NO: 192549 - protein, 208 aa, Artificial Sequence
  derived and/or modified sequence
MLGLLVALLALGLAVFALLDVWYLVRLPCAVLRARLLQPRVRDLLAEQRFPGRVLPSDLDLLLHMNNARYLREADFARVAHLTRCGVLGALRELRAHTVLAASCARHRRSLRLLEPFEVRTRLLGWDDRAFYLEARFVSLRDGFVCALLRFRQHLLGTSPERVVQHLCQRRVEPPELPADLQHWISYNEASSQLLRMESGLSDVTKDQ

SEQ ID NO: 192550 - DNA, 627 bp, Artificial Sequence
  derived and/or modified sequence
atgttagggctgttggtggccttacttgcattgggtctcgcggtattcgccctgctggacgtttggtatctggtaaggcttccgtgtgccgttttgagagcacgtcttctccaacccagagttagggacctgctggccgagcagagattccccggacgagtgctacccagtgatctggacctgctactgcacatgaataatgcgaggtacctcagagaggccgacttcgcgagggtagcccacctcacgaggtgcggcgtcctcggggctctacgcgaattaagggcccacaccgtgctggccgctagctgcgcccgacaccggagatccctgaggctgctcgaacccttcgaggtccgcacaaggctcctgggctgggatgatcgggcattctacctcgaggcccgattcgtctccctgcgggatgggttcgtttgcgctctgcttcgttttagacagcacctcttagggacctcccctgagcgtgtcgtccaacacctgtgtcagcgcagagttgaaccaccagaactgcctgcagatctgcagcattggatcagttacaacgaagcctcttctcaacttctgcgaatggagtctggtttatctgacgtgacgaaggatcagtag

SEQ ID NO: 192551 - DNA, 627 bp, Artificial Sequence
  derived and/or modified sequence
atgcttgggttgctggttgctctgctggcccttggcctggccgtgttcgccctcttagatgtgtggtatctggtgcgcctaccctgtgctgtcctgcgcgctcgccttctgcagccacgcgtaagagatcttcttgccgagcagagattccccggaagagttctgccttcagacctggatcttttactgcacatgaacaacgcaaggtatttacgggaagccgactttgcaagagtcgcccatctgacccgttgtggggtgctgggagccctcagggagttgcgcgcacacacagtcctcgccgcgagctgtgcacgccacaggcgctcactgcgccttctggagcccttcgaagtcaggactcggctattaggctgggacgatcgagccttctatctcgaggcaagatttgtaagtctgagggacggttttgtatgcgcactcttgcgttttcgccaacatctgctaggaaccagcccagagagagtagtgcagcatctgtgccaaagacgcgtcgaacctccagaactgcctgccgatttgcaacactggatcagttacaatgaggcatctagtcagcttttgcgcatggaatcagggctgtcagatgtcactaaggatcagtag

SEQ ID NO: 192552 - DNA, 627 bp, Artificial Sequence
  derived and/or modified sequence
atgttaggacttttggtagccctgctggccttgggacttgctgtgtttgccctgctggatgtctggtacctagtccgactgccctgtgctgttctgcgcgcacgcctccttcagccccgggttcgcgatcttctagccgaacaaagattccccgggcgtgtcctcccttcagatctcgacctcctgcttcatatgaacaacgctcgctacctgcgagaggccgactttgcaagagtagcacatctaactcggtgcggcgtgttaggcgcgctgagagagctgagagcgcacaccgtccttgccgctagctgcgccagacaccgtaggtcactcagactactcgaacctttcgaggtgcgcacccgcctgttgggttgggacgatcgtgccttttatttggaggcccggtttgtgtcattaagggatggctttgtgtgtgcattgcttcggtttcgccagcacctattggggaccagtcctgaaagggtcgtacaacacctttgccaacgacgggtggagccccccgagctgccagccgaccttcaacactggatttcttacaatgaggcctcgtctcagctgctgagaatggaatcaggattatctgacgtgaccaaggaccaatag

SEQ ID NO: 192553 - DNA, 627 bp, Artificial Sequence
  derived and/or modified sequence
atgctgggcctgctggtggccctgctggccctgggcctggccgtgttcgccctgctggacgtgtggtacctggtgagactgccctgcgccgtgctgagagccagactgctgcagcccagagtgagagacctgctggccgagcagagattccccggcagagtgctgcccagcgacctggacctgctgctgcacatgaacaacgccagatacctgagagaggccgacttcgccagagtggcccacctgaccagatgcggcgtgctgggcgccctgagagagctgagagcccacaccgtgctggccgccagctgcgccagacacagaagaagcctgagactgctggagcccttcgaggtgagaaccagactgctgggctgggacgacagagccttctacctggaggccagattcgtgagcctgagagacggcttcgtgtgcgccctgctgagattcagacagcacctgctgggcaccagccccgagagagtggtgcagcacctgtgccagagaagagtggagccccccgagctgcccgccgacctgcagcactggatcagctacaacgaggccagcagccagctgctgagaatggagagcggcctgagcgacgtgaccaaggaccagtag

SEQ ID NO: 192554 - DNA, 2259 bp, Artificial Sequence
  derived and/or modified sequence
ctcggccgccctcgcgctgtggttcgctccgggcgcgctgcgctcgtgagttcccaggaggcctggcgggcaccgtaaccagcgccgcggacaccggcaccggcgccacggactccgcaggaccccgcgcccgccgccgccgctatgctggggctgctggtggcgttgctggccctggggctcgctgtctttgcgctgctggacgtctggtacctggtgcgccttccgtgcgccgtgctgcgcgcgcgcctgctgcagccgcgcgtccgtgacctgctagctgagcagcgcttcccgggccgcgtgctgccctcggacttggacctgctgctgcacatgaacaacgcgcgctacctgcgcgaggccgactttgcgcgcgtcgcgcacctgacccgctgcggggtgctcggggcgctgagggagttgcgggcgcacacggtgctggcggcctcgtgcgcgcgccaccgccgctcgctgcgcctgctggagcccttcgaggtgcgcacccgcctgctgggctgggacgaccgcgcgttctacctggaggcgcgctttgtcagcctgcgggacggcttcgtgtgcgcgctgctgcgcttccggcagcacctgctgggcacctcacccgagcgcgtcgtgcagcacctgtgccagcgcagggtggagccccctgagctgcccgctgatctgcagcactggatctcctacaacgaggccagcagccagctgctccgcatggagagtgggctcagtgatgtcaccaaggaccagtgaccgccaccttcacaccgtctgccctggccaccatcctgggcctgggggctgcccacagatgggcagtctcagccatactctgttccagctggagtagcctcctgaccagcctggcccaccctgctccacccactgggcccccccagttattgatacccctctgtgctgggctccacgctaggcagaaggaggagtggcattggcatcctgacccagctctgccctcaaggtggggatggatgggcaaaggagagtcctgcctggccctacgatgaggccactcatgtgggcctaggtaggggaggatggtgcctggagcagagggacccacaagtgcctcccgagcctagatcctggctcggaccactgcaagggccgaggcagggccagaccagagcatcctgggtacaggcctgggctctccagggcctgggcctgattcaggtgcagtgggcactcctgaagggtcagagcggcatctgccaggcagcccctctggcttccgctgaggtggttgcaggcctggggcagagcctgggtggtcagaggccggggctagaggcagatggaagggaggcatttgctgacagaggacggggcacccgggctccccactgcagtcggccttgcctcctcctcctcctctacctccagtcaggctggacgggagggtagccttgtggctgagaggggtcagactaggtggcacaggggctcctggaaagacagcaggcttcctgctgggcgttcccttgttggagggaatagagtgggggtgggactctgcaggggtgtccttgtccactcgcacccctcgccgcccaccagggccatgctctgtgacttgggctgatccccaccctttctgggcctacagcaccacaggccgctgtacccccttagagctgcccctctctggcctggccggcaggcgtcttcttaactcctctgtcctctatattcagcatgttccttgtcagctgctgggccggccctgccttgcgctagcagagcctctcctggcagcttctcaggtctccctaatggagacaccaggctactaggacactggctggggccaccccctcctgcctaatgcctcaccttacagctggggaaactgaggcctggaatggcccagagtcaccaaggcaaagttggggctggtcccagcctgaggctccagctgatgccctcagctcccagagagggggtgccccatctagctgggtgcaggggtcactgcttgtcagctcagggccctgtgcccgcttgcctgttcccctacatctgtgcctgcacatccagaactgcctccttgccgctgcctccaggaagcccaccttgagccagagtcaagggctgcagcactgcccgatagaacacgcccgccctcactgctgttcttgccttacagccaccatgggaaagctgcaacctttctgttttatttaaagaaagcccaacattaaagggttttcattgcaa

SEQ ID NO: 192555 - DNA, 627 bp, Artificial Sequence
  derived and/or modified sequence
atgctggggctgctcgtggccctactagcactcggcctagctgtgtttgcactcctcgatgtttggtatctcgtacgcctcccctgcgccgtcttacgagcaagactgctccagccccgggtgagagatctgcttgcggaacagagattccccggacgagtacttcctagcgatctcgatcttctgctgcatatgaacaatgccagataccttcgggaagctgatttcgcgagggtggctcatcttactcgttgcggcgtgttgggcgccctccgcgagctcagggctcacactgtgttggccgccagctgcgctcggcataggcggagcctcaggctgttagagcccttcgaagtccgcacccgtctgctgggctgggacgacagggcattctatttagaagctaggttcgtttcccttagggacggcttcgtctgcgcactactgaggtttaggcagcacctcctcggcacctctccggagagggtggtgcaacatctctgtcaaagaagggtggaacctcctgagctccctgccgatctccaacactggatctcctacaatgaggcttccagccagctcctcaggatggagagtgggctgtctgatgtaactaaggaccagtag

SEQ ID NO: 192556 - DNA, 627 bp, Artificial Sequence
  derived and/or modified sequence
atgctgggcctgctggtggccctgctggccctgggcctggccgtgtttgccctgctggatgtgtggtacctggtgcggctgccctgtgctgtgctgcgggcccggctgctgcagccccgggtgcgggacctgctggccgagcagcgcttccctggccgggtgctgcccagcgacctggacctgctgctgcacatgaacaatgcccgctacctgcgggaggccgactttgcccgggtggcccacctgacccgctgtggggtgctgggcgccctgcgggagctgcgggcccacacagtgctggccgccagctgtgcccggcaccggcgcagcctgcggctgctggagccctttgaggtgaggacccggctgctgggctgggatgaccgggccttctacctggaggccaggtttgtgtccctgagagatggctttgtgtgtgccctgctgcgcttccggcagcacctgctgggcaccagccctgagcgggtggtgcagcacctgtgccagaggagagtggagcccccagagctgcctgctgacctgcagcactggatctcctacaatgaggccagcagccagctgctgaggatggagagcggcctgagtgatgtgaccaaggaccagtag

SEQ ID NO: 192557 - DNA, 627 bp, Artificial Sequence
  derived and/or modified sequence
atgctgggcctgctggtggccctgctggccctgggcctggccgtgttcgccctcctggatgtgtggtacctggttcggcttccgtgcgctgtgctgcgtgcacggctcctgcagcccagggttagagacttgctggccgaacagcggttcccaggacgcgtccttcctagcgatttggatctactgcttcacatgaacaacgcacggtatcttagagaggcggatttcgctcgagtggctcacttgacaagatgcggggttcttggggccttacgggagctccgcgcccacactgtgctcgctgcgagctgtgccaggcaccgtaggtcccttcgactcctcgaacctttcgaggtaaggactcgcctgctggggtgggatgacagagccttctatttggaagctcgcttcgtcagcctgcgcgatggattcgtctgcgccctgctgcggttcaggcagcatttgcttgggacaagccccgagcgcgtcgtgcaacatctgtgtcagagaagagtcgagccccccgagctgcctgcagacctccaacattggatttcctacaatgaggcgtcgagtcagctgcttcggatggagagcgggctgtccgacgtgaccaaagatcagtag

SEQ ID NO: 192558 - RNA, 627 nt, Artificial Sequence
  derived and/or modified sequence
augcuuggguugcugguugcucugcuggcccuuggccuggccguguucgcccucuuagaugugugguaucuggugcgccuacccugugcuguccugcgcgcucgccuucugcagccacgcguaagagaucuucuugccgagcagagauuccccggaagaguucugccuucagaccuggaucuuuuacugcacaugaacaacgcaagguauuuacgggaagccgacuuugcaagagucgcccaucugacccguuguggggugcugggagcccucagggaguugcgcgcacacacaguccucgccgcgagcugugcacgccacaggcgcucacugcgccuucuggagcccuucgaagucaggacucggcuauuaggcugggacgaucgagccuucuaucucgaggcaagauuuguaagucugagggacgguuuuguaugcgcacucuugcguuuucgccaacaucugcuaggaaccagcccagagagaguagugcagcaucugugccaaagacgcgucgaaccuccagaacugccugccgauuugcaacacuggaucaguuacaaugaggcaucuagucagcuuuugcgcauggaaucagggcugucagaugucacuaaggaucaguag

SEQ ID NO: 192559 - RNA, 627 nt, Artificial Sequence
  derived and/or modified sequence
auguuaggacuuuugguagcccugcuggccuugggacuugcuguguuugcccugcuggaugucugguaccuaguccgacugcccugugcuguucugcgcgcacgccuccuucagccccggguucgcgaucuucuagccgaacaaagauuccccgggcguguccucccuucagaucucgaccuccugcuucauaugaacaacgcucgcuaccugcgagaggccgacuuugcaagaguagcacaucuaacucggugcggcguguuaggcgcgcugagagagcugagagcgcacaccguccuugccgcuagcugcgccagacaccguaggucacucagacuacucgaaccuuucgaggugcgcacccgccuguuggguugggacgaucgugccuuuuauuuggaggcccgguuugugucauuaagggauggcuuugugugugcauugcuucgguuucgccagcaccuauuggggaccaguccugaaagggucguacaacaccuuugccaacgacggguggagccccccgagcugccagccgaccuucaacacuggauuucuuacaaugaggccucgucucagcugcugagaauggaaucaggauuaucugacgugaccaaggaccaauag

SEQ ID NO: 192560 - protein, 299 aa, Artificial Sequence
  derived and/or modified sequence
METESGNQEKVMEEESTEKKKEVEKKKRSRVKQVLADIAKQVDFWFGDANLHKDRFLREQIEKSRDGYVDISLLVSFNKMKKLTTDGKLIARALRSSAVVELDLEGTRIRRKKPLGERPKDEDERTVYVELLPKNVNHSWIERVFGKCGNVVYISIPHYKSTGDPKGFAFVEFETKEQAAKAIEFLNNPPEEAPRKPGIFPKTVKNKPIPALRVVEEKKKKKKKKGRMKKEDNIQAKEENMDTSNTSISKMKRSRPTSEGSDIESTEPQKQCSKKKKKRDRVEASSLPEVRTGKRKRSS

SEQ ID NO: 192561 - protein, 129 aa, Artificial Sequence
  derived and/or modified sequence
METESGNQEKVMEEESTEKKKEVEKKKRSRVKQVLADIAKQVDFWFGDANLHKDRFLREQIEKSRDGYVDISLLVSFNKMKKLTTDGKLIARALRSSAVVELDLEGTRIRRKKPLGERPKDEDERTVYV

SEQ ID NO: 192562 - protein, 119 aa, Artificial Sequence
  derived and/or modified sequence
METESGNQEKVMEEESTEKKKEVEKKKRSRVKQVLADIAKQVDFWFGDANLHKDRFLREQIEKSRDGYVDISLLVSFNKMKKLTTDGKLIARALRSSAVVELDLEGTRIRRKKPLGERP

SEQ ID NO: 192563 - DNA, 900 bp, Artificial Sequence
  derived and/or modified sequence
atggagaccgagtcaggtaatcaagaaaaagtcatggaagaggagtccactgagaagaaaaaagaagttgagaagaaaaaacgctctcgggttaaacaggtcctagccgacattgcgaaacaggtcgatttctggtttggggatgctaacctgcacaaggaccgttttctgcgagaacaaattgaaaagtcacgggatggctacgtcgacatcagtctgctggtatctttcaataagatgaaaaagctgactaccgacgggaagctgatcgcaagggcactaagatcttctgcggtggtggaattggatctggagggcacaagaataaggcgaaagaagcccctgggcgagagacccaaggacgaagacgagagaaccgtctacgtagagctgctgcctaaaaatgtgaatcacagctggattgagagggtcttcggcaaatgcgggaatgtggtttacatctccatacctcactacaagagcacgggggatcccaaaggcttcgcctttgtggagtttgagaccaaggaacaggcagcaaaagccatcgagttcctgaataacccgcccgaagaggcgcctagaaagccagggattttccccaaaaccgtcaagaacaagccaatccccgctctgcgagtcgtggaggagaagaagaaaaagaagaagaagaaggggaggatgaagaaagaagacaatatacaggctaaggaggaaaatatggatacctcaaacacgagtatcagcaagatgaaacgatcccggcccacttccgaaggatcagatatagaatcaaccgagccacagaagcagtgttctaagaagaagaaaaaaagggacagagttgaggcctctagcttgccagaggtacgtaccggaaaacggaaacgcagctcttag

SEQ ID NO: 192564 - DNA, 390 bp, Artificial Sequence
  derived and/or modified sequence
atggagactgagtcaggcaaccaggagaaagttatggaggaggagtctaccgagaaaaagaaagaagtggagaagaagaagaggtcccgagttaagcaggtgttagctgatattgccaagcaggtcgacttttggtttggagatgctaacttgcacaaggatcgctttttaagagaacagatagagaagagccgtgacggctacgtcgacatatccttgctcgtttcgtttaacaagatgaaaaagttgactaccgacggaaagctaatagctcgggctttgcgatcctcggcagtcgtagagttggatctggagggaacgcgcattaggaggaagaaaccactcggtgagcgcccaaaggacgaggatgagaggacagtctacgtgtag

SEQ ID NO: 192565 - DNA, 360 bp, Artificial Sequence
  derived and/or modified sequence
atggagactgaatcaggcaatcaggaaaaggtgatggaggaagaaagtaccgaaaagaaaaaagaagtggagaaaaagaagcggtcaagggtcaagcaggtgctcgcagatatcgcaaagcaagtagacttctggtttggcgatgctaatctgcacaaggataggttcttaagggagcagatcgagaagagtcgggacggttatgtggacatttctctgctcgtgagcttcaacaaaatgaagaaactgacaacggacggcaaactgatcgctagagcgctgagatcttccgcagttgtggagctggatttagaaggtactcggatccgtcgcaaaaagccgttaggtgagagaccttag

SEQ ID NO: 192566 - DNA, 579 bp, Artificial Sequence
  derived and/or modified sequence
gagactatcaggatccggagacggaaatgtccgaaggccgcagtacttgaccctgtattttgggagtcgaacggagactctgccatcgtcctcaaagagtaaaaaatccagttacggaagggaactaacacttgctagatatggtgtgcagagtgcgtttgcaaagaaacttaagagaaaacaaatgataggacacagggtggtggaagatctcaaagagaatggaaactgaaagtggaaatcaggaaaaggtaatggaagaagaaagcactgaaaagaaaaaagaagttgaaaaaaagaaacggtcacgagttaaacaggtgcttgcagatattgctaagcaagtggacttctggtttggggatgcaaatcttcacaaggatagatttcttcgagaacagatagaaaaatctagagatggatatgttgatatatcactacttgtgtcttttaacaaaatgaaaaaattgactactgatgggaagttaattgccagagcattgagaagttcagctgttgtagagcttgatttggaaggcaccagaatccggaggaaaaaacctctgggggaaagaccaa

SEQ ID NO: 192567 - DNA, 900 bp, Artificial Sequence
  derived and/or modified sequence
atggagacagaaagtggcaaccaggagaaggtgatggaggaggagagcacagagaagaagaaggaggtggagaagaagaagaggagccgggtgaagcaggtgctggccgacatcgccaagcaggtggacttctggtttggagatgccaacctgcacaaggaccgcttcctgcgggagcagatcgagaagagcagagatggctacgtggacatcagcctgctggtgtccttcaacaagatgaagaagctgaccacagatggcaagctgattgcccgggccctgcggagcagcgctgtggtggagctggacctggagggcacccgcatccggaggaagaagcccctgggggagcggcccaaggatgaagatgagaggacagtgtatgtggagctgctgcccaagaatgtgaaccacagctggattgagcgggtgtttggaaaatgtggaaatgtggtgtacatcagcatcccccactacaagagcactggagaccccaagggctttgcctttgtggagtttgagaccaaggagcaggccgccaaggccatcgagttcctgaacaaccccccagaggaggcccccaggaagccaggcatcttccccaagacagtgaagaacaagcccatcccagccctgcgggtggtggaggagaagaagaagaagaagaagaagaagggccgcatgaagaaggaggacaacatccaggccaaggaggagaacatggacaccagcaacaccagcatcagcaagatgaagaggagccggcccaccagcgagggcagtgacatcgagagcacagagccccagaagcagtgcagcaagaagaagaagaagagggacagagtggaggccagcagcctgcctgaggtgaggacaggcaagaggaagaggagcagctag

SEQ ID NO: 192568 - DNA, 390 bp, Artificial Sequence
  derived and/or modified sequence
atggagacagaaagtggcaaccaggagaaggtgatggaggaggagagcacagagaagaagaaggaggtggagaagaagaagaggagccgggtgaagcaggtgctggccgacatcgccaagcaggtggacttctggtttggagatgccaacctgcacaaggaccgcttcctgcgggagcagatcgagaagagcagagatggctacgtggacatcagcctgctggtgtccttcaacaagatgaagaagctgaccacagatggcaagctgattgcccgggccctgcggagcagcgctgtggtggagctggacctggagggcacccgcatccggaggaagaagcccctgggggagcggcccaaggatgaagatgagaggacagtgtatgtgtag

SEQ ID NO: 192569 - DNA, 360 bp, Artificial Sequence
  derived and/or modified sequence
atggagacagaaagtggcaaccaggagaaggtgatggaggaggagagcacagagaagaagaaggaggtggagaagaagaagaggagccgggtgaagcaggtgctggccgacatcgccaagcaggtggacttctggtttggagatgccaacctgcacaaggaccgcttcctgcgggagcagatcgagaagagcagagatggctacgtggacatcagcctgctggtgtccttcaacaagatgaagaagctgaccacagatggcaagctgattgcccgggccctgcggagcagcgctgtggtggagctggacctggagggcacccgcatccggaggaagaagcccctgggggagcggccctag

SEQ ID NO: 192570 - DNA, 900 bp, Artificial Sequence
  derived and/or modified sequence
atggagaccgagagcggcaaccaggagaaggtgatggaggaggagtcaaccgaaaaaaagaaggaggtggagaagaagaaaagaagcagggtaaaacaggtgttagccgacatcgctaagcaggtggatttctggttcggtgacgccaatctgcacaaagacagattcctgcgggagcagatcgagaagagccgagacggctacgtggatatttcccttctggtaagttttaacaagatgaagaagctcacgacagacggcaaactgatcgccagagcactgcgatcctctgcggtcgtcgagcttgacctggagggcactcgaatcagacgcaaaaagccccttggggagcgaccgaaggatgaggatgaacggacagtatacgttgagctgcttcccaaaaacgtgaatcactcctggattgagcgggtttttggcaagtgtgggaatgtggtgtatatctcaatccctcattataagagcacaggtgacccaaagggcttcgccttcgtggaattcgagaccaaggaacaggctgccaaagccatcgagttcctaaataatcctcccgaggaagctcctaggaaaccagggatctttcccaagaccgtgaagaataagccgatcccagccctacgggtggtggaagagaaaaaaaagaaaaagaagaaaaaaggcagaatgaaaaaggaagataacattcaggctaaggaggaaaacatggatactagtaacacatcaatcagtaaaatgaaacggtcaagaccgacttcagagggctcagatatcgaatcgaccgaaccccagaagcagtgttctaagaagaagaaaaagcgggatagggtggaagcttcctctctacccgaggtacgtacagggaagaggaaaagaagtagctag

SEQ ID NO: 192571 - DNA, 390 bp, Artificial Sequence
  derived and/or modified sequence
atggagaccgagagcggcaaccaggagaaggtgatggaggaggagtcaactgagaagaaaaaggaggtagaaaagaagaagagaagccgcgttaaacaggtgctggcagacattgccaagcaagtggacttttggtttggcgatgctaacctgcacaaagatagattcctgagggaacagatcgagaagtctagggatgggtatgtcgatatcagcctccttgtaagttttaacaagatgaaaaaattgacaacggacgggaaactcattgctcgcgcgctgcgttcatctgctgtagttgagctcgatcttgaggggacgcggatcagaaggaagaaacctctcggggagcggcccaaggacgaggacgaaagaacagtctacgtatag

SEQ ID NO: 192572 - DNA, 360 bp, Artificial Sequence
  derived and/or modified sequence
atggagaccgagagcggcaaccaggagaaggtgatggaggaggagagcaccgagaaaaaaaaggaagttgaaaaaaagaagagaagtcgggtaaagcaggttctcgccgacattgctaagcaagtcgacttctggtttggcgacgcaaacctccacaaggaccgcttcctgagggaacagattgaaaaatctcgagacggctacgtggacatttcactgctggtgagcttcaacaagatgaaaaagttgaccacagacgggaagctcattgcccgtgccttgcggtcgtctgcagttgtcgaattggacctggaaggtacacgaattcgacgaaaaaaaccccttggcgagcgcccctag

SEQ ID NO: 192573 - DNA, 900 bp, Artificial Sequence
  derived and/or modified sequence
atggaaacagagagcggtaaccaggagaaagttatggaggaagagtccaccgaaaaaaaaaaggaggtggagaagaaaaaaagaagccgggtaaagcaggtcctggcagatatcgcgaagcaggtcgatttttggtttggcgacgccaaccttcataaggatcgtttcttaagggaacagatcgaaaaatctagggatggctacgtggacatatcactgttggtgtctttcaataagatgaaaaagctaacaacagacggtaaattaattgccagggccctcagatcatcagcagtggtggaacttgaccttgagggaacacgcatccggaggaagaagcctctcggggagaggcctaaagatgaagacgaacggacagtctatgtggagctgcttccaaaaaatgttaatcactcctggatcgaaagggtgtttggaaagtgtggcaacgtagtgtacatttctatcccacactacaaatctacaggagaccctaaagggtttgcctttgttgaatttgaaaccaaagaacaggccgcaaaagccatcgaattcttaaacaaccccccagaggaggccccacgcaagcccggaatctttccgaagacggtcaaaaacaagcccatccctgctctgagggtggtcgaagagaagaagaaaaaaaaaaagaaaaagggaagaatgaagaaagaagataacatccaggcaaaggaggaaaacatggatacgtcaaatacgagcatcagtaagatgaagcgctcgagaccaactagcgagggcagcgatatagagtcgaccgagccgcagaaacagtgctccaagaagaagaaaaaaagggatcgggttgaggcatcttccctacctgaggtcaggactggaaaacgtaagagatcttcttag

SEQ ID NO: 192574 - DNA, 390 bp, Artificial Sequence
  derived and/or modified sequence
atggagaccgagtcagggaaccaggaaaaagtaatggaagaggagagcacagaaaagaaaaaagaggtcgaaaaaaagaagagaagcagagttaagcaagtcctggctgacattgccaagcaagtcgacttttggttcggtgacgccaatctccataaggacagatttttacgggaacaaatagaaaaaagtcgcgatggctacgtagacatctcactactggtctcctttaataaaatgaagaagcttacgactgatggcaagctgatcgccagagcccttcgttccagtgcggtggtggaattggacctcgaaggcacgaggatccgtcggaaaaagcctctgggggagcggcctaaggacgaagacgagagaaccgtatacgtctag

SEQ ID NO: 192575 - DNA, 360 bp, Artificial Sequence
  derived and/or modified sequence
atggagaccgagtccggtaaccaggaaaaagttatggaagaggagtcaaccgaaaagaaaaaagaggtggagaaaaaaaagagatctcgagttaagcaggtgctggcggatatagctaaacaggtagatttttggtttggagacgcaaacctgcacaaagacaggtttctgagggagcagatcgagaaaagccgggacgggtatgtggacattagcctgctggtgtccttcaacaaaatgaagaaactgacaacagacgggaaattaattgcaagggctctgcgctcctccgcagtggtcgaactggatctcgagggaacccgtataagacgaaaaaagcccctgggagagcgcccatag

SEQ ID NO: 192576 - DNA, 900 bp, Artificial Sequence
  derived and/or modified sequence
atggagaccgagagcggcaaccaggagaaggtgatggaggaggagagcaccgagaagaagaaggaggtggagaagaagaagagaagcagagtgaagcaggtgctggccgacatcgccaagcaggtggacttctggttcggcgacgccaacctgcacaaggacagattcctgagagagcagatcgagaagagcagagacggctacgtggacatcagcctgctggtgagcttcaacaagatgaagaagctgaccaccgacggcaagctgatcgccagagccctgagaagcagcgccgtggtggagctggacctggagggcaccagaatcagaagaaagaagcccctgggcgagagacccaaggacgaggacgagagaaccgtgtacgtggagctgctgcccaagaacgtgaaccacagctggatcgagagagtgttcggcaagtgcggcaacgtggtgtacatcagcatcccccactacaagagcaccggcgaccccaagggcttcgccttcgtggagttcgagaccaaggagcaggccgccaaggccatcgagttcctgaacaacccccccgaggaggcccccagaaagcccggcatcttccccaagaccgtgaagaacaagcccatccccgccctgagagtggtggaggagaagaagaagaagaagaagaagaagggcagaatgaagaaggaggacaacatccaggccaaggaggagaacatggacaccagcaacaccagcatcagcaagatgaagagaagcagacccaccagcgagggcagcgacatcgagagcaccgagccccagaagcagtgcagcaagaagaagaagaagagagacagagtggaggccagcagcctgcccgaggtgagaaccggcaagagaaagagaagcagctag

SEQ ID NO: 192577 - DNA, 390 bp, Artificial Sequence
  derived and/or modified sequence
atggagaccgagagcggcaaccaggagaaggtgatggaggaggagagcaccgagaagaagaaggaggtggagaagaagaagagaagcagagtgaagcaggtgctggccgacatcgccaagcaggtggacttctggttcggcgacgccaacctgcacaaggacagattcctgagagagcagatcgagaagagcagagacggctacgtggacatcagcctgctggtgagcttcaacaagatgaagaagctgaccaccgacggcaagctgatcgccagagccctgagaagcagcgccgtggtggagctggacctggagggcaccagaatcagaagaaagaagcccctgggcgagagacccaaggacgaggacgagagaaccgtgtacgtgtag

SEQ ID NO: 192578 - DNA, 360 bp, Artificial Sequence
  derived and/or modified sequence
atggagaccgagagcggcaaccaggagaaggtgatggaggaggagagcaccgagaagaagaaggaggtggagaagaagaagagaagcagagtgaagcaggtgctggccgacatcgccaagcaggtggacttctggttcggcgacgccaacctgcacaaggacagattcctgagagagcagatcgagaagagcagagacggctacgtggacatcagcctgctggtgagcttcaacaagatgaagaagctgaccaccgacggcaagctgatcgccagagccctgagaagcagcgccgtggtggagctggacctggagggcaccagaatcagaagaaagaagcccctgggcgagagaccctag

SEQ ID NO: 192579 - protein, 836 aa, Artificial Sequence
  derived and/or modified sequence
MKPSPAGTAKELEPPAPARGEQRTAEPEGRWREKGEADTERQRTRERQEATLAGLAELEYLRQRQELLVRGALRGAGGAGAAAPRAGELLGEAAQRSRLEEKFLEENILLLRKQLNCLRRRDAGLLNQLQELDKQISDLRLDVEKTSEEHLETDSRPSSGFYELSDGASGSLSNSSNSVFSECLSSCHSSTCFCSPLEATLSLSDGCPKSADLIGLLEYKEGHCEDQASGAVCRSLSTPQFNSLDVIADVNPKYQCDLVSKNGNDVYRYPSPLHAVAVQSPMFLLCLTGNPLREEDRLGNHASDICGGSELDAVKTDSSLPSPSSLWSASHPSSSKKMDGYILSLVQKKTHPVRTNKPRTSVNADPTKGLLRNGSVCVRAPGGVSQGNSVNLKNSKQACLPSGGIPSLNNGTFSPPKQWSKESKAEQAESKRVPLPEGCPSGAASDLQSKHLPKTAKPASQEHARCSAIGTGESPKESAQLSGASPKESPSRGPAPPQENKVVQPLKKMSQKNSLQGVPPATPPLLSTAFPVEERPALDFKSEGSSQSLEEAHLVKAQFIPGQQPSVRLHRGHRNMGVVKNSSLKHRGPALQGLENGLPTVREKTRAGSKKCRFPDDLDTNKKLKKASSKGRKSGGGPEAGVPGRPAGGGHRAGSRAHGHGREAVVAKPKHKRTDYRRWKSSAEISYEEALRRARRGRRENVGLYPAPVPLPYASPYAYVASDSEYSAECESLFHSTVVDTSEDEQSNYTTNCFGDSESSVSEGEFVGESTTTSDSEESGGLIWSQFVQTLPIQTVTAPDLHNHPAKTFVKIKASHNLKKKILRFRSGSLKLMTTV

SEQ ID NO: 192580 - DNA, 2511 bp, Artificial Sequence
  derived and/or modified sequence
atgaaaccctcccctgcggggactgcaaaggaacttgaaccccctgcaccagcgcggggtgaacaaaggacagccgagcccgagggccgttggagggagaagggtgaggccgatacagaacggcagcgtacacgggaaaggcaggaggctacgctggctggactggccgagctagaataccttagacaacggcaagagctgctcgtgagaggcgccttgcggggcgccggtggcgcaggtgctgccgctccgcgtgcaggcgagctcctaggcgaggcggctcagcgatctcgactagaagaaaagtttctcgaagagaatatactactcctgcgtaaacagttaaattgtctacgacgcagggacgccgggctgctgaatcaactgcaagagttagataaacaaatcagcgacttacgcctcgatgtcgaaaagacgtccgaagagcacctggagactgattctcggccatcttctgggttctatgagctgagcgacggcgcaagcggaagtctgtccaacagctccaattccgtcttttctgaatgcctttcctcctgccactcttcaacgtgcttctgctcgcctttggaagctaccttgtccctgtcagatgggtgcccgaagagcgccgatctgattggcctcttggagtacaaggagggacactgcgaggatcaggcctcaggagcagtgtgccgatcgctgtccacaccccagttcaactctctggacgtgatagctgatgtgaatcccaaataccagtgcgatttggtaagtaagaatgggaacgacgtgtatcgctatcctagcccgcttcacgcagttgcggttcagtcacctatgttccttctttgcctgactggaaaccctctgcgtgaggaggatcgcctcggtaatcacgcgtctgatatatgtgggggttcagagctcgatgcagtgaagaccgattccagccttccatccccatccagtctctggtctgctagtcaccctagcagctctaagaagatggatgggtatattctgtccctggtgcaaaaaaaaacgcaccctgtgcgtaccaacaagcctcgaaccagcgtgaacgctgatcctacaaaaggcctgttacgaaacggctccgtttgtgttcgagcgccaggaggggtgtcgcagggtaacagcgtgaatcttaagaattcgaagcaggcctgtttgccgtcagggggaattccttctctgaacaacggcacattctctccacctaaacaatggagcaaagaatcaaaagcagaacaggccgagtctaagagggtaccactgccggaggggtgcccaagcggcgctgcttccgacctgcaatctaaacacctgccaaagacagccaaaccagctagccaggagcacgccagatgttctgccataggaactggggagtctcctaaggagtcggcccagctcagcggggcgagccctaaggaaagtccatctcgtggaccagcacccccccaggagaataaagtcgttcagccgctgaagaaaatgtcccaaaaaaatagcttgcagggcgtgccacccgccacacctccgctgctgtccaccgcttttccagtcgaagaaagacccgccctcgatttcaaaagtgaggggagcagtcagtcgctggaggaagcccaccttgttaaagctcagtttatccctggccagcagcccagcgtgagactgcatagagggcaccgcaacatgggtgtcgtaaagaacagttcattaaagcaccgaggccccgccttgcaggggctcgaaaacggcttacccactgttagagagaaaacaagggccggttctaaaaaatgtcgatttccagatgatctcgataccaacaaaaaattgaagaaggctagcagcaagggcaggaagtctggaggtgggcctgaggccggggtgccgggaagacccgccgggggaggccatcgggcgggaagccgcgcccatggacacggccgggaagccgtagtggctaaacctaagcacaaacgaacggactacagacggtggaagagttcagcagagataagttatgaagaggcccttcgccgagctcgccgagggcggcgcgagaatgtcgggctctatccagccccggtgccgctcccatatgctagtccctacgcctacgtggccagcgactcggaatactccgcggagtgcgagtcattgtttcactccaccgtcgtcgatacctctgaggacgaacaaagcaactacaccacaaactgttttggagatagcgagagttcggtctctgagggagagttcgtgggagagagcacaaccactagcgatagtgaagagagcggtgggttgatatggtcgcagtttgtgcagacactgcccatccagaccgttaccgctcccgacctgcacaaccaccctgcgaagacgttcgtgaaaattaaggcttcacataacttgaagaagaaaatcttgagatttaggtctggttcgcttaaactcatgactactgtctag

SEQ ID NO: 192581 - DNA, 2511 bp, Artificial Sequence
  derived and/or modified sequence
atgaagcccagccctgctggaacagccaaggagctggagcccccagccccagcccggggggagcagaggacagctgagcctgagggccgctggagggagaagggggaggccgacacagagcggcagaggacccgggagcggcaggaggccaccctggccggcctggccgagctggagtacctgcggcagaggcaggagctgctggtgcggggggccctgcggggggccggcggggccggggccgccgccccccgggccggggagctgctgggggaggccgcccagaggagccggctggaggagaagttcctggaggagaacatcctgctgctgaggaagcagctgaactgcctgcggaggagagatgctggcctgctgaaccagctgcaggagctggacaagcagatcagtgacctgcggctggatgtggagaagaccagcgaggagcacctggagacagacagccggcccagcagcggcttctatgagctgagtgatggagccagcggcagcctgagcaacagcagcaacagcgtcttcagcgagtgcctgagcagctgccacagcagcacctgcttctgcagccccctggaggccaccctgagcctgagtgatggctgccccaagtctgctgacctgattggcctgctggagtacaaggagggccactgtgaggaccaggccagcggggctgtgtgccgcagcctgagcaccccccagttcaacagcctggatgtgattgctgatgtgaaccccaagtaccagtgtgacctggtgtccaagaatggaaatgatgtgtaccgctaccccagccccctgcatgctgtggccgtgcagagccccatgttcctgctgtgcctgaccggcaaccccctgcgggaggaggaccggctgggcaaccacgccagtgacatctgtggcggcagcgagctggatgctgtgaagacagacagcagcctgcccagccccagcagcctgtggagcgccagccaccccagcagcagcaagaagatggatggctacatcctgagcctggtgcagaagaagacccaccctgtgaggaccaacaagcccaggacctctgtgaatgctgaccccaccaagggcctgctgagaaatggatctgtgtgtgtgcgggcccctggaggagtgtcccagggcaacagcgtgaacctgaagaacagcaagcaggcctgcctgcccagcggcggcatccccagcctgaacaacggcaccttcagcccccccaagcagtggagcaaggagagcaaggccgagcaggccgagagcaagagggtgcccctgcctgagggctgccccagcggggccgccagtgacctgcagagcaagcacctgcccaagacagccaagccagccagccaggagcacgcccgctgcagcgccatcggcactggagagagccccaaggagagcgcccagctgagcggggccagccccaaggagagccccagccggggccctgccccaccccaggagaacaaggtggtgcagcccctgaagaagatgagccagaagaacagcctgcagggcgtgcccccagccaccccacccctgctgagcacagccttccctgtggaggagaggcctgccctggacttcaagtctgagggcagcagccagagcctggaggaggcccacctggtgaaggcccagttcatccctggccagcagcccagcgtgcggctgcaccggggccacaggaacatgggcgtggtgaagaacagcagcctgaagcaccggggccctgccctgcagggcctggagaatggcctgcccaccgtgcgggagaagaccagggctggcagcaagaagtgccgcttcccagatgacctggacaccaacaagaagctgaagaaggccagcagcaagggcaggaagagcggcggcggccctgaggccggcgtgcccggccggcctgctgggggcggccacagagctggcagccgggcccacggccacggccgggaggccgtggtggccaagcccaagcacaagaggacagactaccgccgctggaagagcagcgctgagatctcctatgaggaggccctgcggcgggcccggcggggccggcgggagaatgtgggcctgtacccagcccctgtgcccctgccctatgccagcccctatgcctacgtggccagtgacagcgagtacagcgcagaatgtgagagcctcttccacagcacagtggtggacaccagtgaagatgagcagagcaactacaccaccaactgcttcggggacagcgagagctctgtgtctgagggggagtttgtgggggagagcaccaccaccagtgacagcgaggagagcggcggcctcatctggagccagtttgtgcagaccctgcccatccagacagtgacagccccagacctgcacaaccacccagccaagacctttgtgaagatcaaggccagccacaacctgaagaagaagatcctgcgcttccgcagcggcagcctgaagctgatgaccaccgtgtag

SEQ ID NO: 192582 - DNA, 2511 bp, Artificial Sequence
  derived and/or modified sequence
atgaagcccagccccgccggcaccgccaaggagctggagccccccgccccggctaggggagaacagaggacagctgagcctgagggccgctggcgagagaagggcgaagcggacaccgaacgtcaacgcactcgcgaaaggcaggaggccacccttgctggactggccgagctggaatatctccgacagcgacaagagctgcttgtccggggggccctgcgcggagccgggggagcaggggctgccgcgccaagagctggggaacttctcggagaggccgcccagagaagcagacttgaagagaaatttctcgaagagaatatactcctgttgaggaagcagctgaattgtctgcgcaggcgggacgccgggctgctcaaccagcttcaggagttggataagcaaatatccgacctccggcttgacgttgagaagacaagcgaggaacacttggagaccgattcccgacctagctcaggcttttacgagctcagtgatggcgcctctggtagcctgtctaatagttcgaattcagtgttcagtgagtgtttgagttcttgtcacagttctacctgcttctgtagcccactggaggcaactctgagcttgtcagacggatgccctaagtcggccgatctaattgggctgctggagtataaagaagggcactgcgaggaccaggcatcgggcgcggtatgccggtccctgagcaccccgcagttcaacagcctggatgtgatcgccgatgttaacccgaagtaccaatgcgaccttgtctccaaaaacggcaatgacgtatatcgatatcccagcccactgcacgctgtagccgttcagtccccaatgtttttgctatgtctcactggaaaccctctgagagaagaagaccgtctaggcaatcacgcctcggatatctgcggaggaagtgagttagacgcagtcaaaaccgactccagccttccctcaccatcttccctttggtctgcgagccatccctcttccagcaagaaaatggatgggtacattctgtctttggtgcagaagaaaacccatcctgtccgtactaacaaacccaggacatcagtgaacgccgacccgactaagggcctcctcagaaatggctctgtatgtgtccgggcacctggtggagtctcacagggcaatagcgtcaatcttaagaatagtaaacaggcctgcctccccagtggggggatcccgtccttgaataacggaacttttagccctcccaaacagtggagtaaggagtcgaaggccgagcaggctgaatccaaacgcgtgcccctacctgaagggtgtccatcgggagcagcaagtgatctgcagagcaagcatctgccaaaaaccgccaaaccagcatcacaggaacatgcacggtgctccgcaattggtaccggcgagagtccgaaagagtccgctcaactatccggagcctcgcccaaggagtcccctagccgagggcccgccccccctcaggagaacaaggtagttcagccgttgaaaaaaatgtctcagaaaaattcactgcagggggtccccccagccacacctcccctgctcagtacagcatttcctgtagaagagcggcctgcccttgattttaagagcgaagggtcgtcacagtcccttgaagaagcacatctggtgaaggcccagtttatacctgggcagcagccctcagtgaggttgcatcgtggacaccgcaacatgggtgtggtgaaaaacagttctctaaagcacagggggccagctctccagggcttggaaaatggactgcccacggtacgggagaaaacacgggctgggtccaagaagtgccggtttccagacgatttagacacgaataaaaaactcaagaaggcatcatctaagggtagaaagtcaggcggcggaccggaggccggcgtgcccggccgccctgccgggggcgggcaccgtgcaggcagtcgggcccatggccatggacgggaggcagtggtagcgaagcccaagcataagagaacagactatcgccgctggaaatcttcagccgagatatcttacgaggaggccttgagaagagctagacggggaaggcgcgagaatgtaggcctgtatcccgcccctgttccgctaccgtacgcttccccatatgcctatgtggctagcgatagcgagtattcggccgagtgcgagtccctgttccactccaccgtggtcgatacgagtgaagatgagcagagcaactacaccacaaactgctttggggattccgaatccagtgtgtcagaaggagagttcgtgggcgaatcgactaccacatccgattcagaggaaagtggcggactgatctggtcccagttcgttcagaccctgcccatccagaccgtgaccgccccggacttgcacaatcacccagccaagacattcgtgaagatcaaggcctcccacaaccttaaaaaaaaaatcctgcgcttcaggtcaggatcactgaagctcatgactacagtttag

SEQ ID NO: 192583 - DNA, 2511 bp, Artificial Sequence
  derived and/or modified sequence
atgaaaccgtcccctgcgggtacagctaaggagctggagcccccagctcctgcccgaggggagcaacgtactgccgagcctgaaggccgatggcgcgagaagggagaggctgacaccgagagacagaggacacgtgaaaggcaggaggccacgctggccggactggcagagcttgagtatctacgtcagcgccaggagctgctcgtgaggggtgcgctgcggggagccggaggagcgggagccgctgcacctagggctggggagctgctgggggaggcagcacagagaagcaggctcgaggagaagttcctggaggagaacattctcctgttgcggaagcagttaaattgtcttagacgacgcgacgccggactgttgaaccagctccaagagttggataagcagatctcagatctgcggctggacgtcgagaaaacctccgaggagcatctggaaaccgatagccgtcctagctccggcttctatgagcttagtgacggtgctagcggcagtttgtccaatagctccaacagcgtttttagcgagtgtctcagttcttgccacagctccacatgtttctgttcgcccttggaagctactctgagcctgagcgacggctgtccaaagagtgccgacctgataggactgcttgagtataaagaagggcattgcgaggatcaggcttccggcgcagtctgccgctcgctgtctacgcctcaattcaattctcttgatgtcatagcggacgtaaacccaaagtatcagtgtgacctggttagtaagaacgggaacgacgtgtatcgctacccgagtccactacatgccgtagctgtccaaagtcccatgtttctgctgtgcctgacggggaatcctctcagggaggaggataggctagggaatcatgcctcagacatatgtgggggatccgaactcgacgccgtgaaaacagactcatctctccccagccccagcagcctgtggagtgcttctcacccgtcaagctctaaaaagatggatggctatatcctatcgctcgttcagaaaaaaacccacccagtgaggaccaataagccgagaacttccgtaaacgctgaccccacaaaaggattactgcggaacgggtccgtatgtgttcgggctcccggtggcgttagccaaggaaatagtgtgaacctgaaaaattccaaacaggcctgcctccctagcgggggtataccaagcctaaataatggcaccttctccccgcctaagcagtggtctaaagagagcaaagctgagcaggcagaaagcaaacgcgtacccctgccagagggttgcccttcaggcgctgcctcagacctacagtctaaacacctccccaaaactgcaaagccagccagtcaggaacatgccagatgttctgctatcggaaccggtgaatctcccaaggagagtgcacagctgagcggggctagtccgaaggaaagtccctcaagggggcctgctcctccccaagaaaacaaggtcgttcagcctctgaagaagatgtcacagaaaaactccttgcagggcgtgcctccagcgaccccccctctgctgtctactgcctttcccgtggaagagaggcctgctctggacttcaagagtgaaggcagctcacagagcctggaggaggcccacctggtgaaggcacagtttatccccggacagcaacccagcgtcagactgcaccgtggccaccgtaatatgggtgttgtgaagaactcaagcttgaagcacaggggtcccgctttacaagggttagagaatggcctgcccacagtgagggaaaagacccgagcgggttccaaaaagtgtcgctttcccgatgacctcgataccaacaaaaaactgaagaaggccagctcaaagggcaggaaatctggaggcggtcccgaggcaggggtgccaggaagaccagcgggaggaggccatagggcaggttcgcgggctcatggccatggcagagaagccgttgtggccaagcccaagcacaaaagaacagattatagaaggtggaagagttccgcagaaattagttatgaagaagcactccgaagggctagacgcggtcgtcgggagaacgtggggctgtaccctgctccggtcccacttccatacgcttcaccctatgcatatgttgccagcgactcagagtattccgccgaatgtgaaagcctgtttcactcgacagttgttgatacctctgaggacgaacaatctaattacaccaccaattgttttggcgactccgaaagctccgtgtccgagggggaattcgttggcgaaagcacaacgacatcggactctgaagagtcaggaggattaatttggtcccaattcgtacagaccctccccattcaaactgtcacagcccctgacctccataaccatccggctaaaacatttgtgaagattaaggccagccataatctcaagaagaaaattctgcggttcaggagcggaagcctgaaattaatgaccaccgtgtag

SEQ ID NO: 192584 - DNA, 2571 bp, Artificial Sequence
  derived and/or modified sequence
gctctcgctgcccgactgggggccatgaagccgagtccggccgggacggcgaaggagctggagcctccggcgccggcccgaggcgagcagcgcacggcggagcccgaggggcgctggcgggagaagggcgaggcagacaccgagcggcagcgcacccgggagcggcaggaggccacgctggccgggctggcggagctggagtacctgcgccagcgccaagagctgctggtcaggggcgccctgcgcggcgccgggggtgcgggagccgctgcgccccgcgctggggagctactgggggaggcggcgcagcgcagtcgcctggaggagaagttcttggaggagaacatcttgctgctaagaaagcaattgaactgtttgaggcgaagagatgctggtttgttgaatcagttgcaagagcttgacaagcagataagtgacctgagactggatgtagaaaagacatctgaagagcacctggagacagacagtcggcctagctcagggttttatgagctgagtgatggggcttcaggatccctttccaattcctctaactcggtgttcagtgagtgtttatccagttgtcattccagcacctgcttttgcagccccttggaggcgaccttgagtctctcagatggttgccccaaatctgcagatctcataggattgttggaatataaagaaggccactgtgaagaccaggcctcaggggcagtttgccgttccctctccacaccacaatttaattcccttgatgtcattgcagatgtgaatcccaagtaccagtgtgatctggtgtctaaaaacgggaatgatgtatatcgctatcccagtccacttcatgctgtggctgtgcagagcccaatgtttctcctttgtctgacgggcaaccctctgagggaagaggacaggcttggaaaccatgccagtgacatttgcggtggatctgagctagatgccgtcaaaacagacagttccttaccgtccccaagcagtctgtggtctgcttcccatccttcatccagcaagaaaatggatggctacattctgagcctggtccagaaaaaaacacaccctgtaaggaccaacaaaccaagaaccagcgtgaacgctgaccccacgaaagggcttctgaggaacgggagcgtttgtgtcagagccccgggcggtgtctcacagggcaacagtgtgaaccttaagaattcgaaacaggcgtgtctgccctctggcgggataccttctctgaacaatgggacattctccccaccgaagcagtggtcgaaagaatcaaaggccgaacaagccgaaagcaagagggtgcccctgccagagggctgcccctcaggcgctgcctccgaccttcagagtaagcacctgccaaaaacggccaagccagcctcgcaagaacatgctcggtgttccgccattgggacaggggagtcccctaaggaaagcgctcagctctcaggggcctctccaaaagagagtcctagcagaggccctgccccgccgcaggagaacaaagttgtacagcccctgaaaaagatgtcacagaaaaacagcctgcagggcgtccccccggccactcctcccctgctgtctacagctttccccgtggaagagaggcctgccttggatttcaagagcgagggctcttcccaaagcctggaggaagcgcacctggtcaaggcccagtttatcccggggcagcagcccagtgtcaggctccaccggggccacaggaacatgggcgtcgtgaagaactccagcctgaagcaccgcggcccagccctccaggggctggagaacggcttgcccaccgtcagggagaaaacgcgggccgggagcaagaagtgtcgcttcccagatgacttggatacaaataagaaactcaagaaagcctcctccaaggggaggaagagtgggggcgggcccgaggctggtgttcccggcaggcccgcgggcgggggccacagggcggggagcagggcgcatggccacggacgggaggcggtggtggccaaacctaagcacaagcgaactgactaccggcggtggaagtcctcggccgagatttcctacgaagaggccctgaggagggcccggcgcggtcgccgggagaatgtggggctgtaccccgcgcctgtgcctctgccctacgccagcccctacgcctacgtggctagcgactccgagtactcggccgagtgcgagtccctgttccactccaccgtggtggacaccagtgaggacgagcagagcaattacaccaccaactgcttcggggacagcgagtcgagtgtgagcgagggcgagttcgtgggggagagcacaaccaccagcgactctgaagaaagcgggggcttaatttggtcccagtttgtccagactctgcccattcaaacggtaacggccccagaccttcacaaccaccccgcaaaaacctttgtcaaaattaaggcctcacataacctcaagaagaagatcctccgctttcggtctggctctttgaaactgatgacgacggtttgagtgacatcattggtgtagaaagtttgtgtgtttttt

SEQ ID NO: 192585 - DNA, 2511 bp, Artificial Sequence
  derived and/or modified sequence
atgaagcccagccccgccggcaccgccaaggagctggagccccccgcccccgccagaggcgagcagagaaccgccgagcccgagggcagatggagagagaagggcgaggccgacaccgagagacagagaaccagagagagacaggaggccaccctggccggcctggccgagctggagtacctgagacagagacaggagctgctggtgagaggcgccctgagaggcgccggcggcgccggcgccgccgcccccagagccggcgagctgctgggcgaggccgcccagagaagcagactggaggagaagttcctggaggagaacatcctgctgctgagaaagcagctgaactgcctgagaagaagagacgccggcctgctgaaccagctgcaggagctggacaagcagatcagcgacctgagactggacgtggagaagaccagcgaggagcacctggagaccgacagcagacccagcagcggcttctacgagctgagcgacggcgccagcggcagcctgagcaacagcagcaacagcgtgttcagcgagtgcctgagcagctgccacagcagcacctgcttctgcagccccctggaggccaccctgagcctgagcgacggctgccccaagagcgccgacctgatcggcctgctggagtacaaggagggccactgcgaggaccaggccagcggcgccgtgtgcagaagcctgagcaccccccagttcaacagcctggacgtgatcgccgacgtgaaccccaagtaccagtgcgacctggtgagcaagaacggcaacgacgtgtacagataccccagccccctgcacgccgtggccgtgcagagccccatgttcctgctgtgcctgaccggcaaccccctgagagaggaggacagactgggcaaccacgccagcgacatctgcggcggcagcgagctggacgccgtgaagaccgacagcagcctgcccagccccagcagcctgtggagcgccagccaccccagcagcagcaagaagatggacggctacatcctgagcctggtgcagaagaagacccaccccgtgagaaccaacaagcccagaaccagcgtgaacgccgaccccaccaagggcctgctgagaaacggcagcgtgtgcgtgagagcccccggcggcgtgagccagggcaacagcgtgaacctgaagaacagcaagcaggcctgcctgcccagcggcggcatccccagcctgaacaacggcaccttcagcccccccaagcagtggagcaaggagagcaaggccgagcaggccgagagcaagagagtgcccctgcccgagggctgccccagcggcgccgccagcgacctgcagagcaagcacctgcccaagaccgccaagcccgccagccaggagcacgccagatgcagcgccatcggcaccggcgagagccccaaggagagcgcccagctgagcggcgccagccccaaggagagccccagcagaggccccgcccccccccaggagaacaaggtggtgcagcccctgaagaagatgagccagaagaacagcctgcagggcgtgccccccgccaccccccccctgctgagcaccgccttccccgtggaggagagacccgccctggacttcaagagcgagggcagcagccagagcctggaggaggcccacctggtgaaggcccagttcatccccggccagcagcccagcgtgagactgcacagaggccacagaaacatgggcgtggtgaagaacagcagcctgaagcacagaggccccgccctgcagggcctggagaacggcctgcccaccgtgagagagaagaccagagccggcagcaagaagtgcagattccccgacgacctggacaccaacaagaagctgaagaaggccagcagcaagggcagaaagagcggcggcggccccgaggccggcgtgcccggcagacccgccggcggcggccacagagccggcagcagagcccacggccacggcagagaggccgtggtggccaagcccaagcacaagagaaccgactacagaagatggaagagcagcgccgagatcagctacgaggaggccctgagaagagccagaagaggcagaagagagaacgtgggcctgtaccccgcccccgtgcccctgccctacgccagcccctacgcctacgtggccagcgacagcgagtacagcgccgagtgcgagagcctgttccacagcaccgtggtggacaccagcgaggacgagcagagcaactacaccaccaactgcttcggcgacagcgagagcagcgtgagcgagggcgagttcgtgggcgagagcaccaccaccagcgacagcgaggagagcggcggcctgatctggagccagttcgtgcagaccctgcccatccagaccgtgaccgcccccgacctgcacaaccaccccgccaagaccttcgtgaagatcaaggccagccacaacctgaagaagaagatcctgagattcagaagcggcagcctgaagctgatgaccaccgtgtag

SEQ ID NO: 192586 - protein, 848 aa, Artificial Sequence
  derived and/or modified sequence
MTATVENLTFQKDTLGNAVDKNTSRLELRSYSLAGRHGSTEPLVLAWSSQFRRLTWGCALDALHRSPCVAASQHGVTHLIRSSRTPHSTRCRKEDAQPGHHGNGAASVTAQARGQRSVLQVPLPVPRSCLFSESFVVSVSSQSRFLASVPGTGVQRSTAADMAASTAAGKQRIPKVAKVKNKAPAEVQITAEQLLREAKERELELLPPPPQQKITDEEELNDYKLRKRKTFEDNIRKNRTVISNWIKYAQWEESLKEIQRARSIYERALDVDYRNITLWLKYAEMEMKNRQVNHARNIWDRAITTLPRVNQFWYKYTYMEEMLGNVAGARQVFERWMEWQPEEQAWHSYINFELRYKEVDRARTIYERFVLVHPDVKNWIKYARFEEKHAYFAHARKVYERAVEFFGDEHMDEHLYVAFAKFEENQKEFERVRVIYKYALDRISKQDAQELFKNYTIFEKKFGDRRGIEDIIVSKRRFQYEEEVKANPHNYDAWFDYLRLVESDAEAEAVREVYERAIANVPPIQEKRHWKRYIYLWINYALYEELEAKDPERTRQVYQASLELIPHKKFTFAKMWILYAQFEIRQKNLSLARRALGTSIGKCPKNKLFKVYIELELQLREFDRCRKLYEKFLEFGPENCTSWIKFAELETILGDIDRARAIYELAISQPRLDMPEVLWKSYIDFEIEQEETERTRNLYRRLLQRTQHVKVWISFAQFELSSGKEGSLTKCRQIYEEANKTMRNCEEKEERLMLLESWRSFEEEFGTASDKERVDKLMPEKVKKRRKVQTDDGSDAGWEEYFDYIFPEDAANQPNLKLLAMAKLWKKQQQEKEDAEHHPDEDVDESES

SEQ ID NO: 192587 - DNA, 2547 bp, Artificial Sequence
  derived and/or modified sequence
atgaccgcaaccgttgagaatttgacatttcagaaggataccctgggcaacgcggtcgataaaaacacatcccgtctcgaacttcgtagttattccctggccggacggcacggctctaccgagcctcttgtgctggcttggtcatcccagtttcggagactgacctgggggtgtgcactagatgcccttcaccgctctccatgtgtggcagcctcccagcatggcgttacccatctgattagaagttctagaactcctcactccacgcgctgcaggaaagaggacgcacagccagggcaccacggcaatggcgcagccagcgtgacggctcaggccagggggcagcgtagtgtgctacaggtgcctttacctgtgcctagatcttgtcttttctctgaatccttcgttgtatccgtgagttcacagagccgatttctggcctcggtgcctggcaccggtgtacagagaagtaccgccgccgatatggccgcctctaccgctgcaggaaagcaacggattccaaaagtcgccaaggtgaaaaacaaggcacccgccgaggtgcagataactgctgaacagctgctacgcgaagcaaaggagagggagctggaactgctgcctccccccccccagcaaaaaataaccgatgaagaggaattgaatgactataaactccggaagaggaagacgttcgaagacaacattagaaaaaataggacggtgatctccaactggatcaagtatgcccaatgggaggagagcctgaaggaaatccaacgcgcacgtagtatttacgagcgggctttagatgtggactaccggaatatcacattgtggttaaagtacgccgagatggaaatgaagaacagacaggtgaaccatgcacgaaatatttgggaccgggcaatcacgacattacctcgggtgaaccagttttggtacaagtacacatacatggaggagatgctcggcaacgtggctggggcacggcaggttttcgagagatggatggaatggcagcctgaagagcaagcgtggcatagttacattaacttcgagcttcgatataaagaagttgatcgggctcggactatatacgaacggtttgtgctggtacaccccgatgtgaagaactggatcaaatacgcccgcttcgaggagaagcacgcctatttcgcccacgccagaaaggtttatgaaagagccgtggagttttttggagatgaacatatggacgagcacctgtatgttgctttcgcaaaatttgaggagaatcaaaaagaattcgaaagggtaagggtcatctataagtacgccctcgacagaatctcaaaacaggacgctcaggagctctttaagaactacacaattttcgaaaaaaaattcggggaccgaaggggaatcgaggacatcatagtgtcgaagaggcggttccaatacgaggaggaagtgaaggccaatccgcacaattacgacgcctggttcgattacctgcgcttagtggaatccgacgcggaagcagaagcggtgcgagaggtctacgaacgagccattgctaacgtccccccaatccaagaaaagcggcactggaaacgctacatttacctgtggattaactacgccctttatgaggagcttgaagccaaggacccagagcggaccaggcaggtgtaccaagccagcttagaactgataccacacaaaaaattcacatttgctaagatgtggattctctatgcccagttcgagatccgacagaagaatctgtctctggctcgtagggcgctcggaaccagcatcgggaagtgtccgaaaaataagctctttaaagtgtatatcgaattggagttacaactaagggagttcgacaggtgcaggaagctgtacgagaaattcttggaattcggtccggaaaattgtacaagctggattaagttcgccgagctagaaaccatcctcggcgatattgatcgcgcgagagcaatatacgaactcgctatctcacagcctagactcgatatgcccgaggtgctctggaaatcctacatcgattttgaaatcgagcaggaagagaccgagcggactcgaaacctttacagaagacttcttcagaggactcagcacgtgaaagtttggatcagcttcgcccagtttgagctgagttccggaaaggaaggttccctcaccaaatgcaggcagatctatgaggaggccaataagactatgcgaaactgcgaagagaaggaggaacggttgatgttgcttgagagctggcggtccttcgaagaagagttcggtacggcaagcgacaaggaacgggtcgacaagctgatgccagaaaaggtgaagaaaagaaggaaggttcagactgacgacgggagcgacgcggggtgggaggaatatttcgattacattttccccgaagatgccgctaaccagccgaatttgaagctcttggccatggctaaactatggaaaaaacaacaacaggagaaagaggacgcagaacaccacccagatgaggacgtcgatgagtcagagtcctag

SEQ ID NO: 192588 - DNA, 2547 bp, Artificial Sequence
  derived and/or modified sequence
atgacagccaccgtggagaacctgaccttccagaaggacaccctgggcaatgctgtggacaagaacaccagccggctggagctgcggagctacagcctggccggcagacatggcagcacagagcccctggtgctggcctggagcagccagttccggcggctgacctggggctgtgccctggatgccctgcacaggagcccctgtgtggccgccagccagcacggcgtgacccacctgatccgcagcagcaggaccccccacagcacccgctgcaggaaggaggatgcccagcccggccaccacggcaatggagctgcctctgtgacagcccaggcccggggccagaggtctgtgctgcaggtgcccctgcctgtgcccaggagctgcctcttcagcgagagctttgtggtgtctgtgagcagccagagccgcttcctggcctctgtgcccggcaccggggtgcagaggagcacagctgctgacatggccgccagcacagctgctgggaagcagaggatccccaaggtggccaaggtgaagaacaaggccccagctgaggtgcagatcacagctgagcagctgctgcgggaggccaaggagcgggagctggagctgctgcccccaccaccccagcagaagatcacagatgaggaggagctgaatgactacaagctgaggaagaggaagacctttgaggacaacatcaggaagaacagaactgtcatcagcaactggatcaagtatgcccagtgggaggagagcctgaaggagatccagagggcccggagcatctatgagcgggccctggatgtggactacagaaacatcaccctgtggctgaagtatgcagagatggagatgaagaaccggcaggtgaaccacgccaggaacatctgggaccgggccatcaccaccctgccccgggtgaaccagttctggtacaagtacacctacatggaggagatgctgggcaatgtggccggggcccggcaggtgtttgagcgctggatggagtggcagcctgaggagcaggcctggcacagctacatcaactttgagctgcgctacaaggaggtggaccgggcccggaccatctatgaaagatttgtgctggtgcacccagatgtgaagaactggatcaagtatgccaggtttgaggagaagcacgcctactttgcccacgccaggaaggtgtatgaaagagctgtggagttctttggagatgagcacatggatgagcacctgtatgtggcctttgccaagtttgaggagaaccagaaggagtttgagcgggtgcgggtcatctacaagtatgccctggaccgcatcagcaagcaggatgcccaggagctgttcaagaactacaccatctttgagaagaagtttggagacagaagaggaattgaggacatcatcgtgtccaagaggcgcttccagtatgaggaggaggtgaaggccaacccccacaactatgatgcctggtttgactacctgcggctggtggagagtgatgctgaggccgaggccgtgcgggaggtgtatgaaagagccatcgccaacgtgccccccatccaggagaagaggcactggaagcgctacatctacctgtggatcaactatgccctgtatgaggagctggaggccaaggaccctgagaggacccggcaggtgtaccaggccagcctggagctgatcccccacaagaagttcacctttgccaagatgtggatcctgtatgcccagtttgagatccggcagaagaacctgagcctggcccggcgggccctgggcaccagcatcggcaagtgccccaagaacaagctgttcaaggtgtacatcgagctggagctgcagctgcgggagtttgaccgctgcaggaagctgtatgagaagttcctggagtttggacctgagaactgcacctcctggatcaagtttgctgagctggagaccatcctgggggacatcgaccgggcccgggccatctatgagctggccatcagccagccccggctggacatgcctgaggtgctgtggaagagctacatcgactttgaaattgagcaggaggagacagagaggaccaggaacctgtaccgccgcctgctgcagaggacccagcacgtgaaggtgtggatcagctttgcccagtttgagctgagcagcggcaaggagggcagcctgaccaagtgccggcagatctatgaggaggccaacaagaccatgaggaactgtgaggagaaggaggagcggctgatgctgctggagagctggaggagctttgaggaggagtttggaacagccagtgacaaggagcgggtggacaagctgatgcctgagaaggtgaagaagaggaggaaggtgcagacagatgatggcagtgatgctggctgggaggagtactttgactacatcttcccagaagatgctgccaaccagcccaacctgaagctgctggccatggccaagctgtggaagaagcagcagcaggagaaggaggatgctgagcaccacccagatgaagatgtggatgagagcgagagctag

SEQ ID NO: 192589 - DNA, 2547 bp, Artificial Sequence
  derived and/or modified sequence
atgaccgccaccgtggagaacctgaccttccagaaggacaccctgggcaacgccgtggataaaaatacatctcgccttgaacttaggtcttactctttggccggccgtcatggcagtacagagccacttgtgctggcttggagcagccagttcaggcggttgacatggggctgtgctttggacgcactacacagaagcccttgcgtggccgcatcgcagcacggtgttactcacctgatcaggtcatcccgcaccccccacagcacaagatgccgcaaagaagacgcccagccaggccaccatggaaacggtgctgcatccgtgacagcacaggctagagggcagagaagtgtgttgcaggttcccctgccagttcctcggtcctgcctgttttctgaaagctttgtcgtctccgttagttctcagagtcggttcctggcttccgtgcccggcactggagtccaaagatcgaccgccgctgatatggctgccagcaccgcagcggggaaacagaggataccgaaggtggcaaaggtgaaaaacaaagctccagccgaggttcaaataaccgctgagcagctgctgcgggaagccaaagaacgtgaactcgaattgctccctccacctccacaacagaagatcaccgacgaagaggagctcaatgattacaagcttcgtaagcgaaagacttttgaggataatattcgcaaaaaccgaaccgttatcagcaactggattaagtacgcgcagtgggaagaaagccttaaagaaatacagagggctaggagtatttatgagcgcgctctggatgtggactatcggaacatcacattgtggttgaagtatgccgagatggaaatgaaaaaccgacaggtgaatcatgctcggaatatctgggacagggcaatcactaccttgcctcgggtgaaccagttctggtacaagtacacctatatggaggaaatgctgggcaacgtcgctggggctcggcaggtatttgaaaggtggatggagtggcagccagaagagcaggcctggcattcatatatcaatttcgagctgagatacaaagaggtggatagagctcgcaccatatatgagaggtttgtgttggtgcatccagatgtaaaaaattggatcaaatacgctcgatttgaagagaagcacgcatactttgcgcacgccaggaaagtttacgaacgggccgtcgaattcttcggcgatgaacacatggacgaacatctatatgttgccttcgctaagttcgaagagaatcagaaggagttcgaacgggtcagagtcatttacaagtacgccctagacaggatctccaaacaggatgctcaggagctcttcaagaactacaccattttcgaaaaaaagtttggcgacagaagaggcattgaggatattattgtgtcgaaacgccgtttccagtatgaagaggaggtcaaagccaacccacacaactacgatgcctggtttgactatctgcggctcgtcgagtctgatgcagaggcagaagcagtccgggaagtgtatgaaagagccattgccaacgtacccccaatccaggagaaacgccattggaagcgctatatctatctgtggatcaactacgcactgtatgaagagctggaggctaaggaccctgagcgcacccgccaggtctaccaggcttcgctggaactgattccacacaaaaagttcaccttcgctaaaatgtggattttgtacgcccaattcgaaatacggcagaaaaacttgtcgttagcaaggagggcgctcgggacctctatcggtaagtgtcccaaaaacaagctctttaaggtgtacatcgagcttgagctgcagctgagggagttcgacagatgtagaaaattgtacgaaaagttcttggaattcgggcctgaaaattgtacaagctggatcaaattcgccgaactcgagacaattttgggcgacatagaccgagcccgcgctatctacgaacttgccatatctcaaccaagactcgacatgcccgaggtgctctggaagtcctatatagactttgagattgaacaggaggagaccgagaggactcggaacctatataggaggctgcttcagagaacccaacacgtaaaggtgtggatttccttcgcgcaatttgagctctcgtcaggaaaggaagggagcttgacgaaatgtcgtcagatatacgaggaggccaacaagaccatgcgtaactgcgaagagaaagaggaacgactgatgcttctggagagttggaggtcctttgaggaggagttcggcaccgcctccgacaaggaaagggtggataagctgatgccagagaaagtgaaaaagaggcgcaaggtgcagactgacgatggctccgatgcagggtgggaagaatacttcgattacatcttcccagaagacgctgctaatcagccgaacctgaagctactcgcaatggctaaactctggaagaaacagcagcaagagaaagaagacgccgaacaccatcccgacgaagacgtggatgagtctgagagttag

SEQ ID NO: 192590 - DNA, 2547 bp, Artificial Sequence
  derived and/or modified sequence
atgacagccacagtggaaaatctgactttccaaaaggataccctcggtaatgctgtggacaaaaatacatctcgactcgagcttcgctcctactcccttgcgggaagacacggctccactgagcccttggtgctggcctggtcctcccagttcagaaggctcacttgggggtgcgccttagacgcgctgcacagatcgccctgtgttgctgcctcccagcatggggttacccacctgataaggtcttcacgcacaccgcacagcactaggtgtcggaaggaagacgctcagcccggacatcacggaaatggtgcagcaagcgtcacagcccaggctcgaggccaaaggtccgtcttacaggtacctctgcccgtgcccaggtcctgcttattctccgagagtttcgtcgtcagcgtctcgtcccagagtagattcctggccagcgtccctggaaccggcgtccaaagatccacggccgcagacatggctgcaagcacagccgctggaaaacagagaattcctaaggtggctaaagtcaaaaataaggctccggctgaggtgcaaattaccgctgagcagcttctgcgcgaggccaaagagcgcgaactcgaacttctcccgcctcccccacagcaaaagattactgatgaggaggaactaaacgattacaagttaagaaaaagaaaaactttcgaggataacatccgcaaaaataggactgtgatctccaactggatcaagtacgcccaatgggaggaaagcttaaaggagatccagagggcacgcagcatttacgagagggccctcgatgtggactatagaaacattacattgtggctcaagtacgcagagatggaaatgaaaaatcggcaggtgaatcatgccaggaacatatgggatagggccatcacaaccttgccaagagtgaatcagttctggtacaaatacacctatatggaggagatgctaggtaatgtggctggggcacggcaggtctttgagaggtggatggagtggcaaccagaagagcaggcttggcatagttacatcaactttgagttgcgctacaaagaggtggaccgggcacgcaccatctatgagcgcttcgtgctcgtccacccagacgtaaagaactggatcaagtatgcaaggtttgaggaaaagcatgcatacttcgcccacgcccgaaaggtctatgaaagggccgtggagtttttcggggacgagcacatggacgagcacctctatgtggctttcgccaaatttgaagagaatcaaaaagagttcgagagagtgagagtcatctataaatacgctcttgacagaatttccaagcaagacgcacaagagctgttcaagaattacactatatttgaaaagaagttcggcgaccgcaggggcatagaggacataattgtttcaaagagacgattccaatatgaggaagaagtaaaagcaaatccccacaattacgatgcttggtttgattatctgcgtctggtggagagtgacgctgaagctgaagcagtccgcgaagtgtatgagagggccattgcaaacgtgcctccaatacaggagaagcgtcactggaagcgatacatctatctgtggattaattacgccttgtacgaggagctggaagccaaggacccagaaagaactaggcaggtctaccaggccagcctcgagttaatcccccacaaaaaatttaccttcgccaaaatgtggatcctctacgcccaattcgagatccggcaaaaaaacctgtctctggctaggcgggctcttggaacaagtatcggcaaatgtcccaagaataaacttttcaaggtgtatatcgaactggaactgcagcttagggagttcgatagatgtcgcaagctctatgagaaatttcttgagttcggacctgagaactgtacgtcatggatcaaatttgctgaactcgaaacaatcctgggcgatatcgacagagcacgcgctatttacgaactggctatttcacaacctaggctggacatgcccgaggtgctgtggaaaagctacatcgactttgagattgagcaggaggagaccgaacgcacccgaaatctgtaccgtcggttgttgcagcgaactcaacacgtgaaggtgtggatttcgttcgcccagttcgaattatcaagcggcaaagagggcagtctgaccaagtgtcgccaaatttacgaagaagccaacaagactatgcgcaattgcgaggagaaggaagagcggctcatgctgctggagtcttggaggtcattcgaggaggaatttggcactgccagtgacaaagaacgggtggataagctgatgcccgagaaagttaagaaacgccgtaaagttcagacagacgatgggtctgacgcgggatgggaagagtacttcgattacatttttccggaggacgccgctaaccagcccaacttaaaactcctcgctatggcaaagctatggaagaagcagcaacaggagaaagaggacgcagaacatcaccccgatgaagacgtggacgagtccgaaagctag

SEQ ID NO: 192591 - DNA, 4406 bp, Artificial Sequence
  derived and/or modified sequence
ctttccgacactctttgggaagagaatctctaatgacggcaacagtggagaacctaacgttccagaaggacactttgggaaatgctgttgacaaaaacacatccagattggagctccgttcttactcccttgcagggcgccacggctcgacagagccactcgtcctcgcctggtcatcccagttccggaggctgacctggggatgcgccctggacgccctgcaccgcagtccttgcgtcgctgctagtcagcacggcgttacccacctcatccgcagctccaggacgccgcactccacgcgctgccgcaaggaggacgcgcagcctggtcaccatggaaacggtgccgcctccgtcacggctcaagcgagaggtcaaaggtcagtcctgcaagttccgcttccggttccgagatcctgtttgttttctgaaagctttgtggtttcggtgagctctcagagccgatttctagcgtccgtgccggggacaggtgtccagaggtcgactgctgcagacatggcggcctccaccgcggccgggaagcagcggattcccaaagtggccaaggtgaaaaacaaagccccggctgaggtacagataactgctgaacaactcttaagagaggctaaagaaagagaacttgagcttcttccacctccacctcaacagaagatcacagatgaagaagaattaaatgattataaactaaggaaaaggaagacttttgaagataatataagaaaaaacaggactgtgattagtaactggataaaatacgcacaatgggaagaaagcctaaaggagattcaaagggctcgatccatatacgagcgtgctttagatgtagactaccgaaatattacactctggctgaaatacgcagaaatggaaatgaagaatcgccaagtcaaccatgctcgaaatatctgggaccgggccataacaacgctgcctcgagttaatcagttctggtacaagtacacgtacatggaggaaatgttgggaaacgttgccggtgcccggcaggtgtttgagcgctggatggagtggcagcctgaggagcaagcctggcactcctacatcaactttgagctgagatacaaagaggtggatcgggcccgcaccatttatgagcgatttgtcctcgtgcaccctgatgttaagaactggatcaagtatgcccgctttgaagaaaaacatgcttattttgcccatgcacggaaagtgtatgagagagctgtggaattctttggagatgaacatatggatgagcacctttatgttgcctttgccaagtttgaagaaaatcagaaagagtttgaaagggtacgagtgatttacaagtatgccctggacagaatttcaaaacaagatgcccaagaactctttaaaaattataccatctttgagaagaagtttggtgataggcggggtattgaagatatcattgtgagcaaacggagattccagtacgaagaagaagtgaaggcgaatccacacaattatgatgcatggtttgattacttgcgcttggtagaaagtgacgcagaagctgaagccgtgagagaagtctatgaaagggccattgccaatgtcccacccattcaggagaagaggcactggaagcgctacatttatctttggatcaactatgcactctatgaagaattggaggcaaaggatcctgagaggacaagacaggtgtatcaagcctctttggaactaattcctcacaaaaagttcacatttgccaaaatgtggatactgtatgcacagtttgaaatacgacagaagaatctgtcattagccagaagagcattgggaacttccataggcaaatgtccaaagaacaaattatttaaagtttacatagaattggagctacagcttcgagaatttgacagatgccggaagctttatgaaaagttcctggaatttggacctgaaaattgtacctcatggattaaattcgctgaattagagacaatccttggtgatattgacagagcacgggcaatctatgaattagccatcagtcagccacgtttagacatgccagaggtgctttggaaatcatatattgattttgaaattgagcaggaagaaacagaaagaacacgaaacctttaccggcggttgcttcaacggacgcagcatgtcaaggtatggatcagctttgctcagtttgagttgtcttcaggaaaagaaggaagtttgactaaatgcagacaaatttatgaagaagctaacaaaaccatgcgaaactgtgaagaaaaggaagagagacttatgctgctggaatcttggcgaagttttgaagaagaatttggaacagcttcagataaggagagagtagacaaactcatgccagagaaagtcaagaagagaagaaaggtccagactgatgatgggtctgatgcaggctgggaagaatactttgattacatctttccagaagatgctgccaaccaacctaacctcaaactcctggccatggccaaactgtggaagaaacagcagcaggaaaaggaggatgctgagcaccatccagatgaggacgtcgatgagagtgaatcctgatctttttttcatagacaaatgttttgttatttttataaattaattgtttggaactcttgtgactcctggaagttcttatatatttcaccagtaagaaattgattggtatctttgatggctactttttaagttattttttaaatgctcttgggttagctaggggtagggattgcaagtaaaggacttttttaactgctggatttgtttttccaactgagtccaaacttttctaatgtctgtccacatcatgcattaggaaatgtaattaaggtaacattctacagttacttttcatgtcatacccataaagatagtttatgcattcatctgaaatgtgtaactttttcatgtcttcagagtcacagacttgagttcatttcccagctctgccactcatgattatataacttaattttcattttcctcattcacaaaatgggccaatagtttgacagctcattttgaagattacattataaaaggaatatacctggtgggtgcatagtaagtgctcagtaaattgtttgttctaagccacttttaaaaatggtttcattccttgtagaattgaatgcgagtggattaataatttaccttactttcttactagtgtccagttatattgttttttagaacaacacttggaaaataatttgcagtgattatatttctgaacaaggttcagaaaacattgtttactaagaatttagtctaataatttcagttaggcgctcatcagttctccagagtggttgagtttgtaataccttgtttaaagaataatggcttgttcacgtgtgtgctatgaaaaatgatgtcccatgttcacataaatttgggaaattctggactaagacttaagtctcgttaatcaaatctctttatagttaggcttctgtacattatgtatctccagtagcaatgttgccatattatttatttcccaaacttagtggacaatggagtcatttctacctagagtaccagtaaacatctcccagtgtgctatagtagaaaatgtctactcctcactgctgacatgttaaacttactcttggtttagagcatgtgtagaaacacctaaggtagctctatgctaaataatgaagagtagcacaagaatgaatgtatttgctgatacgttgctcacattctcaagcaaaaattcaactgcattaaccgatctgagagttttcctttaacctggactgtgtttctcaagcacattttttctttgttcactgcccaaggactagaactgtatttttaaggttgttttcccctaaaaggacctttagtaagcaaatttattattaaatgtgcacatcttattcacccaagggaataaaagctacttcgtaatgttgttactaaattttatcttgaaaataaataacagtgtttgaggacagaagaaactaggactgttgttgagataaaatctgttttcagcctgactgctttagtcactggacgagcatcagctactgcggtgtcagatcacttctcgagtagaggtctgcctagtgagtgagcaggagaacatcatcttaatagcctttggctcacccagagtcagggagagatgaaaataataggtcagaatgcaagtgacttaatcacagtcttcctagaattatctgtttatgttgcatgaatgcataagaaaaaaattctgtcatgttcccaaggtagaattgtaataagcatgtgccagtgtgaaagctggaaggaaaaaagctattctctaacaggagaacataaagattcatttctctcccaccctcaactccaccaaagtaaatcctttcgatagtaaaagtttaa

SEQ ID NO: 192592 - DNA, 2547 bp, Artificial Sequence
  derived and/or modified sequence
atgaccgccaccgtggagaacctgaccttccagaaggacaccctgggcaacgccgtggacaagaacaccagcagactggagctgagaagctacagcctggccggcagacacggcagcaccgagcccctggtgctggcctggagcagccagttcagaagactgacctggggctgcgccctggacgccctgcacagaagcccctgcgtggccgccagccagcacggcgtgacccacctgatcagaagcagcagaaccccccacagcaccagatgcagaaaggaggacgcccagcccggccaccacggcaacggcgccgccagcgtgaccgcccaggccagaggccagagaagcgtgctgcaggtgcccctgcccgtgcccagaagctgcctgttcagcgagagcttcgtggtgagcgtgagcagccagagcagattcctggccagcgtgcccggcaccggcgtgcagagaagcaccgccgccgacatggccgccagcaccgccgccggcaagcagagaatccccaaggtggccaaggtgaagaacaaggcccccgccgaggtgcagatcaccgccgagcagctgctgagagaggccaaggagagagagctggagctgctgcccccccccccccagcagaagatcaccgacgaggaggagctgaacgactacaagctgagaaagagaaagaccttcgaggacaacatcagaaagaacagaaccgtgatcagcaactggatcaagtacgcccagtgggaggagagcctgaaggagatccagagagccagaagcatctacgagagagccctggacgtggactacagaaacatcaccctgtggctgaagtacgccgagatggagatgaagaacagacaggtgaaccacgccagaaacatctgggacagagccatcaccaccctgcccagagtgaaccagttctggtacaagtacacctacatggaggagatgctgggcaacgtggccggcgccagacaggtgttcgagagatggatggagtggcagcccgaggagcaggcctggcacagctacatcaacttcgagctgagatacaaggaggtggacagagccagaaccatctacgagagattcgtgctggtgcaccccgacgtgaagaactggatcaagtacgccagattcgaggagaagcacgcctacttcgcccacgccagaaaggtgtacgagagagccgtggagttcttcggcgacgagcacatggacgagcacctgtacgtggccttcgccaagttcgaggagaaccagaaggagttcgagagagtgagagtgatctacaagtacgccctggacagaatcagcaagcaggacgcccaggagctgttcaagaactacaccatcttcgagaagaagttcggcgacagaagaggcatcgaggacatcatcgtgagcaagagaagattccagtacgaggaggaggtgaaggccaacccccacaactacgacgcctggttcgactacctgagactggtggagagcgacgccgaggccgaggccgtgagagaggtgtacgagagagccatcgccaacgtgccccccatccaggagaagagacactggaagagatacatctacctgtggatcaactacgccctgtacgaggagctggaggccaaggaccccgagagaaccagacaggtgtaccaggccagcctggagctgatcccccacaagaagttcaccttcgccaagatgtggatcctgtacgcccagttcgagatcagacagaagaacctgagcctggccagaagagccctgggcaccagcatcggcaagtgccccaagaacaagctgttcaaggtgtacatcgagctggagctgcagctgagagagttcgacagatgcagaaagctgtacgagaagttcctggagttcggccccgagaactgcaccagctggatcaagttcgccgagctggagaccatcctgggcgacatcgacagagccagagccatctacgagctggccatcagccagcccagactggacatgcccgaggtgctgtggaagagctacatcgacttcgagatcgagcaggaggagaccgagagaaccagaaacctgtacagaagactgctgcagagaacccagcacgtgaaggtgtggatcagcttcgcccagttcgagctgagcagcggcaaggagggcagcctgaccaagtgcagacagatctacgaggaggccaacaagaccatgagaaactgcgaggagaaggaggagagactgatgctgctggagagctggagaagcttcgaggaggagttcggcaccgccagcgacaaggagagagtggacaagctgatgcccgagaaggtgaagaagagaagaaaggtgcagaccgacgacggcagcgacgccggctgggaggagtacttcgactacatcttccccgaggacgccgccaaccagcccaacctgaagctgctggccatggccaagctgtggaagaagcagcagcaggagaaggaggacgccgagcaccaccccgacgaggacgtggacgagagcgagagctag

SEQ ID NO: 192593 - protein, 383 aa, Artificial Sequence
  derived and/or modified sequence
MSLVDLGKKLLEAARAGQDDEVRILMANGAPFTTDWLGTSPLHLAAQYGHYSTTEVLLRAGVSRDARTKVDRTPLHMAASEGHASIVEVLLKHGADVNAKDMLKMTALHWATEHNHQEVVELLIKYGADVHTQSKFCKTAFDISIDNGNEDLAEILQIAMQNQINTNPESPDTVTIHAATPQFIIGPGGVVNLTDETGVSAVQFGNSSTSVLATLAALAEASAPLSNSSETPVVATEEVVTAESVDGAIQQVVSSGGQQVITIVTDGIQLGNLHSIPTSGIGQPIIVTMPDGQQVLTVPATDIAEETVISEEPPAKRQCIEIIENRVESAEIEEREALQKQLDEANREAQKYRQQLLKKEQEAEAYRQKLEAMTRLQTNKEAV

SEQ ID NO: 192594 - DNA, 3016 bp, Artificial Sequence
  derived and/or modified sequence
gctttctttgtgtggctgaagcgctagaaatggcatattttctttcccttcgttaaaaaatcagaccctctttcccctctctccccgcgggaacacagctagggagtgggtaggagcaggatctgccgacgagggcagaggcggaaaatcctcgggcgatgagctgaagagggccgggtccgggagggatgctgggagcttgactcactcgcacaccatgtgtccctccgcgcgcagcacgggggacttttcggtggggattttgggcgccgaccagacgcggcattttcggaaaatagcgccctgtgcagctgaagcgctttgtgtgtagcggggccgcgtcagcccggccgggtacgaggcgcctcgggtccccgcaccacctcctgctgccttcccgtcgccgctcccgaagcttttccagatgtccctggtagatttgggaaagaagcttttagaagcggcacgagcaggtcaagatgatgaagttcgtattttgatggcaaatggagctccctttactacagactggctgggaacttctccacttcatctagcagcacagtatggtcattattccaccacagaggtactgctgcgagctggtgtgagcagagatgccagaaccaaagtggaccgaacaccattacatatggcagcttctgagggccatgccagcatagtagaggttttacttaagcatggtgctgatgtcaatgcaaaggacatgttaaagatgacagctctccattgggccacagaacacaatcatcaagaggtggtggaacttttaatcaaatatggtgctgatgtacacacgcaaagtaaattttgtaaaactgcatttgatatttcaatagacaatggaaatgaagatttagcagagatattacagattgctatgcagaaccaaatcaacacaaacccagagagtcctgacactgtgacaatacatgctgcaacaccacagtttatcattggacctggaggggtggtgaacctaacagatgaaacgggtgtatctgctgttcagtttggaaactcttctacatcagtattagctacattagctgccttagctgaagcatctgctccattgtccaattcttcagaaactccagtagtggccacagaagaagtagttactgcagaatctgtggatggtgccattcagcaagtagttagttcagggggtcagcaagtcatcacaatagttacagatggaattcagcttggaaatttgcactctattccaaccagtggaattggtcagcccatcattgtgaccatgccagatggacaacaagtattaacagtaccagcaacagacattgctgaagaaactgttataagtgaagaaccaccagctaagagacaatgtatcgaaataattgaaaaccgggtggaatctgcagaaatagaagagagagaagctcttcagaaacagctggatgaagcaaatcgagaagcacaaaaatatcgacagcagctcctaaagaaagaacaggaagcagaggcctacagacagaagttggaagctatgactcgtcttcagactaataaagaagctgtttaattgaaatgaacatgtagtttgattttacttttggtcaagaaagaatacaatcttgaactgtacacaacaaaggtacagccatgggaatacagaatgatagaagagactacagatggataattggacttaagccatgagctctgagttcttgtaacataaaactttactttagaagttgtgaaatgtatttaaaactgaattctgtaaatagtttttttttttttacagttccaaatgagttgataaagattgttgaagagatccaaaaccagaataagccactgtttttgtgaattctttttgattttagtacaaaccttaatttctcagaaacggaacagttttaagggtgatcgttgttggttaggccaaatgttgtgtaataattatggtggactgatgctggaattactcctgtaggtataaacctctgtatgaagagaagatttctcccaggaaatctttgtacagctttaagttgtgtcagattctctgaaaacattttttagaaagcaaaatttttatatttgttcaatttcagctatacccaagtagatttacatgtatatgaagcaaatatttttaaaaatttctgtttgtacatattctgcatgttttataatttcaaaatgcatcacttacataggtatttctcccacagaaatgatgaaagtgaccagaaaaaaacaaaaacaaaacccctttactctgtaggtcattgaaacgaagtaagctggcagctggttttattggaatgacagtgttctcggaaggagcagcctacaagataacttgaatttgccaattctgcaaaatctgtgcttttttgaaaatttaagagtggggacgtgaaactgtattctgtgccttccatcatgatttccacatgaaagcactttaaggcactgattttaagataatgtttttggaaaacccaatgcatatgggtttctgaaatattttatggacttatttctccccaggaaatgattcttacggaaaaaaattgcttttgtatgtagaacaggaactttttgtattacagtgatgcaatagacatgtctaatgtaacttctacttttccttttgaaagctcagtgtctgtgctatgacttgctctcatcacaatattgttgaattccacaatgtatggacattaaacactggcagactgttcactttttcttttttttttttggtaaaatattacttcaaacccctttttcttgctttatttttcagtgttttattgctttatgaactgtttaaccctgaaatccctctaggttatctatactgtataaaaaagcaattacccttaaaactgtactctggcctacttttctattttgcaattaaatatctttttcacatatgttcattgtagacttatgtttttatcacatcttattaacacattaaaaatgttatcctactgca

SEQ ID NO: 192595 - DNA, 1152 bp, Artificial Sequence
  derived and/or modified sequence
atgagtctcgttgatttgggcaagaaactgctggaagcggctagagccggacaggacgatgaagtgaggattctgatggcaaacggggcccctttcaccacggattggttaggtacaagccctcttcacctcgcagctcaatacggccattattccactaccgaggtgttactgagggccggagtttctcgagatgcgagaactaaggtggaccggacaccactgcatatggccgcctcagagggccatgcaagcatcgtcgaggtgttattgaagcacggagccgatgtgaatgcgaaggatatgctgaagatgactgcgcttcactgggcaacggagcataaccaccaggaggttgtggagctgctcattaagtacggcgcagatgtccatacccagtctaagttctgcaagaccgcattcgacatctcaatcgataacggcaacgaggatctcgccgagattcttcagatcgccatgcaaaatcagattaacaccaatcccgaatcacctgacacagtcacaattcatgcagccaccccccagtttattattggacccggcggagttgtcaatctcaccgacgagaccggcgtgtctgcagtgcaatttggcaattctagcacatccgttctcgcaactctggccgccctggctgaggcttccgctccactcagcaatagttctgaaaccccggtggtggccacagaagaggttgtgacagcagaatctgtagacggcgctatccagcaggtggtaagttcgggcggacagcaggtcatcaccatcgtcaccgatggcatccagttgggaaaccttcactcgatccccaccagtggtattggccagcccatcatcgtcacgatgcctgatggacagcaagtcctgaccgtgccggccacagatatcgctgaagagactgttataagcgaagaacctcctgctaagagacaatgtatcgagatcatcgaaaatcgcgtcgagtctgctgaaatcgaggagagagaagcactgcagaagcagctcgacgaagcaaaccgggaagcacagaaataccgccaacagttactgaaaaaagagcaagaagcagaggcttaccggcagaaactcgaagcgatgacacgcttacaaacaaataaagaggccgtctag

SEQ ID NO: 192596 - DNA, 1152 bp, Artificial Sequence
  derived and/or modified sequence
atgagcctggtggacctgggcaagaagctgctggaggccgcccgggccggccaggatgatgaggtgcgcatcctgatggccaacggggcccccttcaccacagactggctgggcaccagccccctgcacctggccgcccagtatggccactacagcaccacagaggtgctgctgcgggccggcgtgtccagagatgcccggaccaaggtggacaggacccccctgcacatggccgccagcgagggccacgccagcatcgtggaggtgctgctgaagcatggagcagatgtgaatgccaaggacatgctgaagatgacagccctgcactgggccacagagcacaaccaccaggaggtggtggagctgctgatcaagtacggggctgatgtgcacacccagagcaagttctgcaagacagcctttgacatcagcattgacaatggaaatgaagacctggccgagatcctgcagatcgccatgcagaaccagatcaacaccaaccctgagagcccagacacagtgaccatccacgccgccaccccccagttcatcatcggccctggaggagtggtgaacctgacagatgaaacaggagtgtctgctgtgcagtttggaaacagcagcacctctgtgctggccaccctggccgccctggccgaggccagcgcccccctgagcaacagcagcgagacccctgtggtggccacagaggaggtggtgacagctgagagcgtggatggagccatccagcaggtggtgtcctctgggggccagcaggtgatcaccatcgtgacagatggcatccagctgggcaacctgcacagcatccccaccagcggcatcggccagcccatcatcgtgaccatgccagatggccagcaggtgctgactgtgcctgccacagacattgctgaggagaccgtcatcagcgaggagcccccagccaagaggcagtgcatcgagatcatcgagaacagagtggagagcgctgagattgaggagcgggaggccctgcagaagcagctggatgaggccaaccgggaggcccagaagtaccggcagcagctgctgaagaaggagcaggaggccgaggcctaccggcagaagctggaggccatgacccggctgcagaccaacaaggaggccgtgtag

SEQ ID NO: 192597 - DNA, 1152 bp, Artificial Sequence
  derived and/or modified sequence
atgagcctggtggacctgggcaagaagctgctggaggccgcccgggcagggcaggacgatgaagtgagaattctgatggcaaacggtgcccccttcacaacggactggttgggcacttcacctctccaccttgccgctcagtacggccactactcaacgactgaggttctgctgcgcgcaggtgttagtcgcgacgcacggactaaagtggatagaacaccgcttcacatggcggcttctgagggccacgcctccattgtcgaggtgctgcttaaacacggtgcagacgtgaatgccaaggatatgctgaaaatgacagctttgcactgggccacggaacacaatcaccaggaggtggtcgagcttttgatcaaatacggcgcagatgttcatacccagtcaaaattttgtaagacagcgtttgacatctctatagacaatggcaacgaggatctggcagagatcctccaaatagccatgcagaatcaaatcaataccaaccccgagagccccgatactgttaccatccatgctgccaccccccaatttatcattggcccaggtggagtagttaacctgaccgacgagacgggtgtgtctgccgtccagttcgggaactctagcacatccgtgctagccaccctggccgctctagccgaggcgagtgcacccctgtctaacagctctgagaccccagtggtcgcaaccgaggaagtcgtaacagctgagagcgtagacggcgcgattcaacaagtggtgtcgtctggaggacagcaggtgattaccatcgttacggacggaattcagctgggaaaccttcactctattccaacctctggaatagggcagccgatcattgtgacgatgcccgatggtcagcaggtgctcacagtgccagctacggacatcgctgaggaaacagttataagcgaagagccaccagccaagagacagtgtatcgaaatcatcgagaacagggtcgagtctgcagagatcgaagagagagaagcacttcaaaagcagttagacgaggcaaatcgggaagcacagaagtaccggcagcaactgctaaaaaaggagcaggaagccgaggcctacagacaaaaactcgaagcgatgacgagactgcagacgaataaggaagccgtgtag

SEQ ID NO: 192598 - DNA, 1152 bp, Artificial Sequence
  derived and/or modified sequence
atgtctcttgtggacctgggaaagaagctactagaagcggctagggctggccaggatgacgaggtacgcattctgatggccaacggggctccgttcacaacggactggttggggacgtcaccgcttcacctggcagctcagtatgggcactattccaccactgaagttctgttgcgcgctggagtttctagggatgccagaacaaaggtcgatcggacccctttacacatggccgcatctgaggggcatgcgtccatcgtcgaagtgctactcaagcatggcgctgacgtcaatgcgaaggacatgctgaaaatgactgcccttcattgggccactgagcacaaccaccaggaggtggtagaattactgatcaagtacggcgctgatgtacatacccagtcaaagttttgtaagacagctttcgacatttctatcgataatggcaacgaagacctggctgagatactccagattgcaatgcagaaccagatcaatacaaaccctgagagtcctgatactgttacaattcacgccgcaactcctcagttcatcatcggccctggcggtgtcgtaaacttaaccgacgagaccggagtatccgcggtacagtttggcaacagctctacctccgtcttggccacgctggctgcgctagcggaggcatctgccccactgtccaactcttctgaaacaccagtagttgcaacagaagaggtggtgacggccgagtcagtggatggtgccatccagcaggtggtatcctctgggggacaacaggtaattactattgtgaccgatggcatccaactggggaacctgcatagcatcccaacaagcggaataggccagccgatcatagtcacaatgccggacggccaacaagttctgacagtgcccgcaaccgatatcgccgaggaaaccgttataagcgaagaaccccctgcaaagcggcagtgcattgagataattgagaacagggtggaatccgcggaaattgaagagcgcgaggctctacagaagcagctcgatgaagctaatcgcgaggcccagaaatacaggcagcagctgctgaaaaaggagcaggaagctgaagcatatagacagaaacttgaggccatgacacggctccaaactaataaggaagctgtatag

SEQ ID NO: 192599 - DNA, 1152 bp, Artificial Sequence
  derived and/or modified sequence
atgagcctggtggacctgggcaagaagctgctggaggccgccagagccggccaggacgacgaggtgagaatcctgatggccaacggcgcccccttcaccaccgactggctgggcaccagccccctgcacctggccgcccagtacggccactacagcaccaccgaggtgctgctgagagccggcgtgagcagagacgccagaaccaaggtggacagaacccccctgcacatggccgccagcgagggccacgccagcatcgtggaggtgctgctgaagcacggcgccgacgtgaacgccaaggacatgctgaagatgaccgccctgcactgggccaccgagcacaaccaccaggaggtggtggagctgctgatcaagtacggcgccgacgtgcacacccagagcaagttctgcaagaccgccttcgacatcagcatcgacaacggcaacgaggacctggccgagatcctgcagatcgccatgcagaaccagatcaacaccaaccccgagagccccgacaccgtgaccatccacgccgccaccccccagttcatcatcggccccggcggcgtggtgaacctgaccgacgagaccggcgtgagcgccgtgcagttcggcaacagcagcaccagcgtgctggccaccctggccgccctggccgaggccagcgcccccctgagcaacagcagcgagacccccgtggtggccaccgaggaggtggtgaccgccgagagcgtggacggcgccatccagcaggtggtgagcagcggcggccagcaggtgatcaccatcgtgaccgacggcatccagctgggcaacctgcacagcatccccaccagcggcatcggccagcccatcatcgtgaccatgcccgacggccagcaggtgctgaccgtgcccgccaccgacatcgccgaggagaccgtgatcagcgaggagccccccgccaagagacagtgcatcgagatcatcgagaacagagtggagagcgccgagatcgaggagagagaggccctgcagaagcagctggacgaggccaacagagaggcccagaagtacagacagcagctgctgaagaaggagcaggaggccgaggcctacagacagaagctggaggccatgaccagactgcagaccaacaaggaggccgtgtag

SEQ ID NO: 192600 - protein, 306 aa, Artificial Sequence
  derived and/or modified sequence
MSLKLQASNVTNKNDPKSINSRVFIGNLNTALVKKSDVETIFSKYGRVAGCSVHKGYAFVQYSNERHARAAVLGENGRVLAGQTLDINMAGEPKPDRPKGLKRAASAIYSGYIFDYDYYRDDFYDRLFDYRGRLSPVPVPRAVPVKRPRVTVPLVRRVKTNVPVKLFARSTAVTTSSAKIKLKSSELQAIKTELTQIKSNIDALLSRLEQIAAEQKANPDGKKKGDGGGAGGGGGGGGSGGGGSGGGGGGGSSRPPAPQENTTSEAGLPQGEARTRDDGDEEGLLTHSEEELEHSQDTDADDGALQ

SEQ ID NO: 192601 - protein, 181 aa, Artificial Sequence
  derived and/or modified sequence
MSLKLQASNVTNKNDPKSINSRVFIGNLNTALVKKSDVETIFSKYGRVAGCSVHKGYAFVQYSNERHARAAVLGENGRVLAGQTLDINMAGEPKPDRPKGLKRAASAIYSGYIFDYDYYRDDFYDRLFDYRGRLSPVPVPRAVPVKRPRVTVPLVRRVKTNVPVKLFARSTAVTTSSAKIK

SEQ ID NO: 192602 - DNA, 1789 bp, Artificial Sequence
  derived and/or modified sequence
ggctgcagactcctcgtgctcgtgtcaccgtgtccttcccaggagacagagaaggaggagagcccggaaccagggccggagcggcgggcggagccgagctgcggggagccgctccgggtgcccccacccccgcgcgcctcagtggtgccggccgagggcagggctcgcggttgcggggctcgcgccgctgtcagtgcggcggggcgcgcgagcggcgccagctcggggcagcggaacccagagaagctgagggggcggtagcggcggcgacggcgacgacgacgactcccgcgcgtgtgcccagcctcttcccgccgcagccgcccttttcctccctcccttacgtccccgagtgcggcagtaccgcctccttcccagccgcgcggcttcctccagacctctcggcgcgggtgagccctattcccagaggcaggtggtgctgaccctgtaacccaaaggaggaaacagctggctaagctcatcattgttactggtgggcaccatgtccttgaagcttcaggcaagcaatgtaaccaacaagaatgaccccaagtccatcaactctcgagtcttcattggaaacctcaacacagctctggtgaagaaatcagatgtggagaccatcttctctaagtatggccgtgtggccggctgttctgtgcacaagggctatgcctttgttcagtactccaatgagcgccatgcccgggcagctgtgctgggagagaatgggcgggtgctggccgggcagaccctggacatcaacatggctggagagcctaagcctgacagacccaaggggctaaagagagcagcatctgccatatacagtggctacatctttgactatgattactaccgggacgacttctacgacaggctcttcgactaccggggccgtctgtcgcccgtgccagtgcccagggcggtccctgtgaagcgaccccgggtcacagtccctttggtccggcgtgtcaaaactaacgtacctgtcaagctctttgcccgctccacagctgtcaccaccagctcagccaagatcaagttaaagagcagtgagctgcaggccatcaagacggagctgacacagatcaagtccaatatcgatgccctgctgagccgcttggagcagatcgctgcggagcaaaaggccaatccagatggcaagaagaagggtgatggaggtggcgccggcggcggcggcggtggtggtggcagcggtggcggtggcagtggtggtggcggtggcggtggcagcagccggccaccagccccccaagagaacacaacttctgaggcaggcctgccccagggggaagcacggacccgagacgacggcgatgaggaagggctcctgacacacagcgaggaagagctggaacacagccaggacacagacgcggatgatggggccttgcagtaagcagcctgacaggagcaatggccaccagcaggtgaagggcatcgctgccccaggcctcaagccgggcacccaaccctggatgccaccccccagcgggtaccagaggaaagctggcagcaggcgcctcctcccccaacgcatcccagccagtgccatgtcctctgcaggtggagttactggcctactccttccccatgagccctccctgtctgcactgcccaggccagagggtagagcacaggggtttccccatactacctcccctccccaggacactcccaggcttgggttttttctataggtttggcggggggccacagggaggggaccctgacaataaagagattggatcccaacctgttctga

SEQ ID NO: 192603 - DNA, 1204 bp, Artificial Sequence
  derived and/or modified sequence
ggagagcccatgcgcctgggaagccgggctgtttctgggcggggctgcagactcctcgtgctcgtgtcaccgtgtccttcccaggagacagagaaggaggagagcccggaaccagggccggagcggcgggcggagccgagctgcggggagccgctccgggtgcccccacccccgcgcgcctcagtggtgccggccgagggcagggctcgcggttgcggggctcgcgccgctgtcagtgcggcggggcgcgcgagcggcgccagctcggggcagcggaacccagagaagctgagggggcggtagcggcggcgacggcgacgacgacgactcccgcgcgtgtgcccagcctcttcccgccgcagccgcccttttcctccctcccttacgtccccgagtgcggcagtaccgcctccttcccagccgcgcggcttcctccagacctctcggcgcgggtgagccctattcccagaggcaggtggtgctgaccctgtaacccaaaggaggaaacagctggctaagctcatcattgttactggttcccagagagggggcttcttgaaaagcaagtagagcagaagactggtgagcacggtgtttcccagcatctccacagtgccagcacagaggaggacactcaagaaatgtttgttaagtgggcaccatgtccttgaagcttcaggcaagcaatgtaaccaacaagaatgaccccaagtccatcaactctcgagtcttcattggaaacctcaacacagctctggtgaagaaatcagatgtggagaccatcttctctaagtatggccgtgtggccggctgttctgtgcacaagggctatgcctttgttcagtactccaatgagcgccatgcccgggcagctgtgctgggagagaatgggcgggtgctggccgggcagaccctggacatcaacatggctggagagcctaagcctgacagacccaaggggctaaagagagcagcatctgccatatacagtggctacatctttgactatgattactaccgggacgacttctacgacaggctcttcgactaccggggccgtctgtcgcccgtgccagtgcccagggcggtccctgtgaagcgaccccgggtcacagtccctttggtccggcgtgtcaaaactaacgtacctgtcaagctctttgcccgctccacagctgtcaccaccagctcagccaagatcaag

SEQ ID NO: 192604 - DNA, 921 bp, Artificial Sequence
  derived and/or modified sequence
atgtcgttgaagctgcaagccagcaacgtgactaacaagaacgatcccaaatctattaatagtcgtgtgtttataggtaacctcaacactgctttagtcaaaaaatcagacgtggagacaatcttcagtaaatatggcagagtggctggctgttcagtacacaaggggtatgctttcgtgcaatatagcaacgaaagacacgccagagcagcagttttaggggagaacgggcgagtgctggccgggcagacgcttgacatcaatatggccggcgaaccaaagcctgaccggcccaaggggcttaagagggcggcatccgctatctacagcggatacattttcgactacgattattatagggacgatttttacgaccggctgttcgattaccgcggtcgcctgtcgccagtgcctgtgccacgcgccgtaccagtcaaaagaccccgtgtgactgtaccgcttgtgaggcgcgtaaagacaaacgttccggtaaagttatttgcacgctctacagctgtgaccacctcctccgctaaaatcaagctcaaaagcagcgaactgcaagcaatcaaaactgaactgactcagatcaagtctaatatcgacgctcttctatccagacttgaacagatcgccgctgagcagaaagccaaccccgacgggaagaagaagggagacgggggtggagcaggaggcggaggcgggggcggtgggtcggggggcggaggttccgggggaggcgggggtggggggtcgtcgcgcccacccgcaccccaagaaaacaccacatctgaggccggactgccacagggcgaagcccgaacccgggatgacggagacgaagaaggtctgctcactcactccgaggaagaacttgagcactcacaagatacggacgccgatgatggtgcgctacagtag

SEQ ID NO: 192605 - DNA, 546 bp, Artificial Sequence
  derived and/or modified sequence
atgtccctgaaactacaggcctctaatgtaaccaataagaacgatccgaaatcaattaactctcgagtgtttattggaaatctgaatactgcacttgtgaaaaaatcggatgtcgagactatctttagcaaatacggaagagtcgccggttgctctgtgcataagggctatgcctttgtgcagtactcaaacgagaggcatgcgcgggccgctgtcctcggcgaaaatgggagagtgctggcaggtcaaactctggacataaacatggccggagaaccaaaacccgaccggcccaaagggctgaagcgcgctgcatctgctatatactcaggatacatctttgactacgactactacagagacgacttctacgatcggctgttcgactatcgcggaaggctgtctcccgtccctgttcctcgggcagtgcccgtgaaaaggccgcgtgtcacagtgcctctggtgcgccgggttaaaacgaacgttcctgtaaagctgttcgcacgctccacagctgtcactacctcctctgcaaaaattaagtag

SEQ ID NO: 192606 - DNA, 921 bp, Artificial Sequence
  derived and/or modified sequence
atgagcctgaagctgcaggccagcaatgtgaccaacaagaatgaccccaagagcatcaacagcagggtcttcatcggcaacctgaacacagccctggtgaagaagagtgatgtggagaccatcttcagcaaatatggccgggtggccggctgcagcgtgcacaagggctacgcctttgtgcagtacagcaatgaaagacatgcccgggctgctgtgctgggagaaaatggccgggtgctggccggccagaccctggacatcaacatggccggggagcccaagccagaccggcccaagggcctgaagagagctgccagcgccatctacagcggctacatctttgattatgactactacagagatgacttctatgaccggctgtttgactaccggggccgcctgagccctgtgcctgtgcccagggctgtgcctgtgaagaggccccgggtgacagtgcccctggtgcggcgggtgaagaccaacgtgcctgtgaagctgtttgcccggagcacagctgtgaccaccagcagcgccaagatcaagctgaagagcagcgagctgcaggccatcaagacagagctgacccagatcaagagcaacattgatgccctgctgagccggctggagcagattgctgctgagcagaaggccaacccagatggcaagaagaagggagatggcggcggggccggcggcggcggcggcggcggcggcagcggcggcggcggcagcggcggcggcggcggcggcggcagcagccggcccccagccccccaggagaacaccaccagcgaggccggcctgccccagggcgaggcccggaccagagatgatggagatgaggagggcctgctgacccacagcgaggaggagctggagcacagccaggacacagatgctgatgatggagccctgcagtag

SEQ ID NO: 192607 - DNA, 546 bp, Artificial Sequence
  derived and/or modified sequence
atgagcctgaagctgcaggccagcaatgtgaccaacaagaatgaccccaagagcatcaacagcagggtcttcatcggcaacctgaacacagccctggtgaagaagagtgatgtggagaccatcttcagcaaatatggccgggtggccggctgcagcgtgcacaagggctacgcctttgtgcagtacagcaatgaaagacatgcccgggctgctgtgctgggagaaaatggccgggtgctggccggccagaccctggacatcaacatggccggggagcccaagccagaccggcccaagggcctgaagagagctgccagcgccatctacagcggctacatctttgattatgactactacagagatgacttctatgaccggctgtttgactaccggggccgcctgagccctgtgcctgtgcccagggctgtgcctgtgaagaggccccgggtgacagtgcccctggtgcggcgggtgaagaccaacgtgcctgtgaagctgtttgcccggagcacagctgtgaccaccagcagcgccaagatcaagtag

SEQ ID NO: 192608 - DNA, 921 bp, Artificial Sequence
  derived and/or modified sequence
atgagcctgaagctgcaggccagcaacgtgaccaacaagaacgaccctaaatcaatcaacagccgggtgttcataggaaacctgaacactgcactggtgaaaaaaagtgacgtggagacaatcttctctaaatatggacgggtcgctggctgctccgtccataaaggctacgcctttgtgcagtatagcaacgagagacatgctagagctgccgtcctgggcgaaaacggccgggttctggctggccagaccttggatatcaatatggccggggagcccaagccagataggccgaaaggactcaagagagccgcctccgccatttattccggttacatcttcgactacgactactatagagacgatttctatgacagattgttcgattacagaggacgactgagtcccgtgccggtccctagggctgttccagtgaagaggccgcgagtgacagtgcctctggtgaggagagtgaagacaaatgtgcccgtgaagttgtttgccaggtcgaccgccgtgactacaagttccgctaagatcaaactgaagtcctccgaactgcaagcaatcaagactgaattaacccagatcaagagtaatatcgacgctctgctaagcaggttagaacagatcgccgcagagcaaaaggcaaatcctgatggcaagaagaagggagatggaggcggcgctggggggggcgggggcgggggggggtccggcggaggtggttcagggggcgggggtggaggtggcagcagtagaccccctgcgcctcaggagaacaccacatcggaagccgggctaccccagggcgaagccagaactcgcgatgatggcgatgaagagggtctgctcacacactcagaggaggagttggagcacagccaggacaccgatgccgatgacggagccttacaatag

SEQ ID NO: 192609 - DNA, 546 bp, Artificial Sequence
  derived and/or modified sequence
atgagcctgaagctgcaggccagcaacgtgaccaacaagaacgaccccaagtcaatcaactcgcgtgttttcatcgggaaccttaatactgcgctggtaaagaagagcgacgtggagacaattttctcaaaatatggccgtgtcgcgggctgctccgtccacaaggggtatgcctttgtgcaatatagtaacgaacgacacgctcgagcggccgtgctaggagagaacggacgagtacttgcaggccagacgcttgatatcaacatggctggtgaaccgaagccagataggccaaaaggcttgaaacgtgcggcttccgccatttattcgggttacatctttgactacgactactatcgggacgatttctatgaccgtctctttgactacagggggcggttatctccagtgccagtgcctcgagccgtgcctgttaagcggccaagagttactgtgccactcgtccgaagggtgaaaacgaatgtaccggtgaagctattcgcccggtccacggccgtcactacgagcagtgcaaaaataaaatag

SEQ ID NO: 192610 - DNA, 921 bp, Artificial Sequence
  derived and/or modified sequence
atgagtctaaaattacaggcatcaaatgtaaccaataaaaacgacccgaagagcattaacagcagggtgtttatcggaaatctcaatactgctctcgtgaaaaaatcagatgtagagacaatttttagcaagtatggcagagtggctgggtgtagcgtgcacaagggttacgccttcgtgcagtacagcaatgaacgacatgctcgcgctgctgttctaggagagaacgggagggttctggcaggacagactctggatattaacatggccggagagccaaagccggataggccaaaagggcttaagcgggctgccagtgcaatatacagcgggtacatattcgattatgactattaccgcgatgacttctacgacagactcttcgattaccggggaagactgtcaccagtcccggtgccgagagccgttcccgtgaaaaggccgagagtgactgtgcctttggtcaggagagtgaaaaccaatgttcccgtgaagctcttcgcacgatccacagccgtcactacttcaagcgctaaaatcaaactaaagagctcagagctgcaggctattaagactgaactgacgcagatcaaatcaaatattgacgcgttgctttctagattagaacagatagccgctgagcagaaggccaatccagacgggaagaaaaagggggatggagggggagctggcggaggcggaggagggggaggatctggcggtgggggtagcggtggcggaggcggtgggggatcctcccgccctcctgcccctcaggaaaacaccacctctgaggcagggctgccgcagggggaggcacgcacaagagatgacggcgatgaagagggcctcctgactcactcagaggaggaattggagcacagccaggacacagatgccgacgacggtgccctgcagtag

SEQ ID NO: 192611 - DNA, 546 bp, Artificial Sequence
  derived and/or modified sequence
atgtccctcaagctccaggcgagtaacgttactaataaaaacgaccccaagtctatcaactctcgagttttcatagggaacttgaacaccgccctggtgaaaaaatctgacgttgaaacaatctttagcaagtacgggcgtgtggccggatgctcagtgcataaaggatacgcctttgtgcagtatagcaacgaaaggcacgcacgcgcagccgtcctgggcgagaatggcagggtgcttgccggacagacactcgatattaatatggctggggagccaaagcccgaccgtccaaaagggctgaagagagccgcatccgccatctattccggttatatttttgattatgattattacagagacgacttttatgaccgtctctttgattatcgcggacgtctctcacccgtcccagtcccaagggctgtacctgtgaagcgccctcgcgtgaccgtccctctggtgcgtcgcgtcaagactaatgtgccagtcaaactcttcgcacgcagcacagcagtgactacctctagtgccaagataaaatag

SEQ ID NO: 192612 - DNA, 921 bp, Artificial Sequence
  derived and/or modified sequence
atgagcctgaagctgcaggccagcaacgtgaccaacaagaacgaccccaagagcatcaacagcagagtgttcatcggcaacctgaacaccgccctggtgaagaagagcgacgtggagaccatcttcagcaagtacggcagagtggccggctgcagcgtgcacaagggctacgccttcgtgcagtacagcaacgagagacacgccagagccgccgtgctgggcgagaacggcagagtgctggccggccagaccctggacatcaacatggccggcgagcccaagcccgacagacccaagggcctgaagagagccgccagcgccatctacagcggctacatcttcgactacgactactacagagacgacttctacgacagactgttcgactacagaggcagactgagccccgtgcccgtgcccagagccgtgcccgtgaagagacccagagtgaccgtgcccctggtgagaagagtgaagaccaacgtgcccgtgaagctgttcgccagaagcaccgccgtgaccaccagcagcgccaagatcaagctgaagagcagcgagctgcaggccatcaagaccgagctgacccagatcaagagcaacatcgacgccctgctgagcagactggagcagatcgccgccgagcagaaggccaaccccgacggcaagaagaagggcgacggcggcggcgccggcggcggcggcggcggcggcggcagcggcggcggcggcagcggcggcggcggcggcggcggcagcagcagaccccccgccccccaggagaacaccaccagcgaggccggcctgccccagggcgaggccagaaccagagacgacggcgacgaggagggcctgctgacccacagcgaggaggagctggagcacagccaggacaccgacgccgacgacggcgccctgcagtag

SEQ ID NO: 192613 - DNA, 546 bp, Artificial Sequence
  derived and/or modified sequence
atgagcctgaagctgcaggccagcaacgtgaccaacaagaacgaccccaagagcatcaacagcagagtgttcatcggcaacctgaacaccgccctggtgaagaagagcgacgtggagaccatcttcagcaagtacggcagagtggccggctgcagcgtgcacaagggctacgccttcgtgcagtacagcaacgagagacacgccagagccgccgtgctgggcgagaacggcagagtgctggccggccagaccctggacatcaacatggccggcgagcccaagcccgacagacccaagggcctgaagagagccgccagcgccatctacagcggctacatcttcgactacgactactacagagacgacttctacgacagactgttcgactacagaggcagactgagccccgtgcccgtgcccagagccgtgcccgtgaagagacccagagtgaccgtgcccctggtgagaagagtgaagaccaacgtgcccgtgaagctgttcgccagaagcaccgccgtgaccaccagcagcgccaagatcaagtag

SEQ ID NO: 192614 - protein, 617 aa, Artificial Sequence
  derived and/or modified sequence
MGSYLSVPAYFTSRDLFRCSECQDSLTNWYYEKDGKLYCPKDYWGKFGEFCHGCSLLMTGPFMVAGEFKYHPECFACMSCKVIIEDGDAYALVQHATLYCGKCHNEVVLAPMFERLSTESVQEQLPYSVTLISMPATTEGRRGFSVSVESACSNYATTVQVKEVNRMHISPNNRNAIHPGDRILEINGTPVRTLRVEEVEDAISQTSQTLQLLIEHDPVSQRLDQLRLEARLAPHMQNAGHPHALSTLDTKENLEGTLRRRSLRRSNSISKSPGPSSPKEPLLFSRDISRSESLRCSSSYSQQIFRPCDLIHGEVLGKGFFGQAIKVTHKATGKVMVMKELIRCDEETQKTFLTEVKVMRSLDHPNVLKFIGVLYKDKKLNLLTEYIEGGTLKDFLRSMDPFPWQQKVRFAKGIASGMAYLHSMCIIHRDLNSHNCLIKLDKTVVVADFGLSRLIVEERKRAPMEKATTKKRTLRKNDRKKRYTVVGNPYWMAPEMLNGKSYDETVDIFSFGIVLCEIIGQVYADPDCLPRTLDFGLNVKLFWEKFVPTDCPPAFFPLAAICCRLEPESRPAFSKLEDSFEALSLYLGELGIPLPAELEELDHTVSMQYGLTRDSPP

SEQ ID NO: 192615 - protein, 670 aa, Artificial Sequence
  derived and/or modified sequence
MSPCSGGRGELRAACLQPEVPGAPGLSWWPSTAGLRQSQTDLQLSLSIWCGKKMGSYLSVPAYFTSRDLFRCSECQDSLTNWYYEKDGKLYCPKDYWGKFGEFCHGCSLLMTGPFMVAGEFKYHPECFACMSCKVIIEDGDAYALVQHATLYCGKCHNEVVLAPMFERLSTESVQEQLPYSVTLISMPATTEGRRGFSVSVESACSNYATTVQVKEVNRMHISPNNRNAIHPGDRILEINGTPVRTLRVEEVEDAISQTSQTLQLLIEHDPVSQRLDQLRLEARLAPHMQNAGHPHALSTLDTKENLEGTLRRRSLRRSNSISKSPGPSSPKEPLLFSRDISRSESLRCSSSYSQQIFRPCDLIHGEVLGKGFFGQAIKVTHKATGKVMVMKELIRCDEETQKTFLTEVKVMRSLDHPNVLKFIGVLYKDKKLNLLTEYIEGGTLKDFLRSMDPFPWQQKVRFAKGIASGMAYLHSMCIIHRDLNSHNCLIKLDKTVVVADFGLSRLIVEERKRAPMEKATTKKRTLRKNDRKKRYTVVGNPYWMAPEMLNGKSYDETVDIFSFGIVLCEIIGQVYADPDCLPRTLDFGLNVKLFWEKFVPTDCPPAFFPLAAICCRLEPESRPAFSKLEDSFEALSLYLGELGIPLPAELEELDHTVSMQYGLTRDSPP

SEQ ID NO: 192616 - protein, 392 aa, Artificial Sequence
  derived and/or modified sequence
MSALAGEDVWRCPGCGDHIAPSQIWYRTVNETWHGSCFRRSNSISKSPGPSSPKEPLLFSRDISRSESLRCSSSYSQQIFRPCDLIHGEVLGKGFFGQAIKVTHKATGKVMVMKELIRCDEETQKTFLTEVKVMRSLDHPNVLKFIGVLYKDKKLNLLTEYIEGGTLKDFLRSMDPFPWQQKVRFAKGIASGMAYLHSMCIIHRDLNSHNCLIKLDKTVVVADFGLSRLIVEERKRAPMEKATTKKRTLRKNDRKKRYTVVGNPYWMAPEMLNGKSYDETVDIFSFGIVLCEIIGQVYADPDCLPRTLDFGLNVKLFWEKFVPTDCPPAFFPLAAICCRLEPESRPAFSKLEDSFEALSLYLGELGIPLPAELEELDHTVSMQYGLTRDSPP

SEQ ID NO: 192617 - DNA, 1854 bp, Artificial Sequence
  derived and/or modified sequence
atgggcagctacctgagcgtgcccgcctacttcaccagcagagacctgttcagatgcagcgagtgccaggacagcctgaccaactggtactacgagaaggacggcaagctgtactgccccaaggactactggggcaagttcggcgagttctgccacggctgcagcctgctgatgaccggccccttcatggtggccggcgagttcaagtaccaccccgagtgcttcgcctgcatgagctgcaaggtgatcatcgaggacggcgacgcctacgccctggtgcagcacgccaccctgtactgcggcaagtgccacaacgaggtggtgctggcccccatgttcgagagactgagcaccgagagcgtgcaggagcagctgccctacagcgtgaccctgatcagcatgcccgccaccaccgagggcagaagaggcttcagcgtgagcgtggagagcgcctgcagcaactacgccaccaccgtgcaggtgaaggaggtgaacagaatgcacatcagccccaacaacagaaacgccatccaccccggcgacagaatcctggagatcaacggcacccccgtgagaaccctgagagtggaggaggtggaggacgccatcagccagaccagccagaccctgcagctgctgatcgagcacgaccccgtgagccagagactggaccagctgagactggaggccagactggccccccacatgcagaacgccggccacccccacgccctgagcaccctggacaccaaggagaacctggagggcaccctgagaagaagaagcctgagaagaagcaacagcatcagcaagagccccggccccagcagccccaaggagcccctgctgttcagcagagacatcagcagaagcgagagcctgagatgcagcagcagctacagccagcagatcttcagaccctgcgacctgatccacggcgaggtgctgggcaagggcttcttcggccaggccatcaaggtgacccacaaggccaccggcaaggtgatggtgatgaaggagctgatcagatgcgacgaggagacccagaagaccttcctgaccgaggtgaaggtgatgagaagcctggaccaccccaacgtgctgaagttcatcggcgtgctgtacaaggacaagaagctgaacctgctgaccgagtacatcgagggcggcaccctgaaggacttcctgagaagcatggaccccttcccctggcagcagaaggtgagattcgccaagggcatcgccagcggcatggcctacctgcacagcatgtgcatcatccacagagacctgaacagccacaactgcctgatcaagctggacaagaccgtggtggtggccgacttcggcctgagcagactgatcgtggaggagagaaagagagcccccatggagaaggccaccaccaagaagagaaccctgagaaagaacgacagaaagaagagatacaccgtggtgggcaacccctactggatggcccccgagatgctgaacggcaagagctacgacgagaccgtggacatcttcagcttcggcatcgtgctgtgcgagatcatcggccaggtgtacgccgaccccgactgcctgcccagaaccctggacttcggcctgaacgtgaagctgttctgggagaagttcgtgcccaccgactgcccccccgccttcttccccctggccgccatctgctgcagactggagcccgagagcagacccgccttcagcaagctggaggacagcttcgaggccctgagcctgtacctgggcgagctgggcatccccctgcccgccgagctggaggagctggaccacaccgtgagcatgcagtacggcctgaccagagacagccccccctag

SEQ ID NO: 192618 - DNA, 3462 bp, Artificial Sequence
  derived and/or modified sequence
ctcaagaatgccagtgtgtgtgtagcctccacagagaggtcgttttctcggagtccagaggggccgcctgagcttctgagaactagggaggagccatcccagccatgagcccctgtgggaatctgctgggggccaagtggcctggagtcctcaggctcccgcagctgctccggagggagaggtgagctcagggcagcctgcctgcagccagaggtgccgggagccccgggcctgtcatggtggccatctacagccggcctgaggcagtcacagacggatttgcagctgagcctgtctatctggtgtgggaagaagatggggagttacttgtcagtcccggcttacttcacctccagagacctgtttcggtgttcagaatgccaggattccctcaccaactggtactatgagaaggatgggaagctctactgccccaaggactactgggggaagtttggggagttctgtcatgggtgctccctgctgatgacagggccttttatggtggctggggagttcaagtaccacccagagtgctttgcctgtatgagctgcaaggtgatcattgaggatggggatgcatatgcactggtgcagcatgccaccctctactgtgggaagtgccacaatgaggtggtgctggcacccatgtttgagagactctccacagagtctgttcaggagcagctgccctactctgtcacgctcatctccatgccggccaccactgaaggcaggcggggcttctccgtgtccgtggagagtgcctgctccaactacgccaccactgtgcaagtgaaagaggtcaaccggatgcacatcagtcccaacaatcgaaacgccatccaccctggggaccgcatcctggagatcaatgggacccccgtccgcacacttcgagtggaggaggtggaggatgcaattagccagacgagccagacacttcagctgttgattgaacatgaccccgtctcccaacgcctggaccagctgcggctggaggcccggctcgctcctcacatgcagaatgccggacacccccacgccctcagcaccctggacaccaaggagaatctggaggggacactgaggagacgttccctaaggcgcagtaacagtatctccaagtcccctggccccagctccccaaaggagcccctgctgttcagccgtgacatcagccgctcagaatcccttcgttgttccagcagctattcacagcagatcttccggccctgtgacctaatccatggggaggtcctggggaagggcttctttgggcaggctatcaaggtgacacacaaagccacgggcaaagtgatggtcatgaaagagttaattcgatgtgatgaggagacccagaaaacttttctgactgaggtgaaagtgatgcgcagcctggaccaccccaatgtgctcaagttcattggtgtgctgtacaaggataagaagctgaacctcctgacagagtacattgaggggggcacactgaaggactttctgcgcagtatggatccgttcccctggcagcagaaggtcaggtttgccaaaggaatcgcctccggaatggcctatttgcactctatgtgcatcatccaccgggatctgaactcgcacaactgcctcatcaagttggacaagactgtggtggtggcagactttgggctgtcacggctcatagtggaagagaggaaaagggcccccatggagaaggccaccaccaagaaacgcaccttgcgcaagaacgaccgcaagaagcgctacacggtggtgggaaacccctactggatggcccctgagatgctgaacggaaagagctatgatgagacggtggatatcttctcctttgggatcgttctctgtgagatcattgggcaggtgtatgcagatcctgactgccttccccgaacactggactttggcctcaacgtgaagcttttctgggagaagtttgttcccacagattgtcccccggccttcttcccgctggccgccatctgctgcagactggagcctgagagcagaccagcattctcgaaattggaggactcctttgaggccctctccctgtacctgggggagctgggcatcccgctgcctgcagagctggaggagttggaccacactgtgagcatgcagtacggcctgacccgggactcacctccctagccctggcccagccccctgcaggggggtgttctacagccagcattgcccctctgtgccccattcctgctgtgagcagggccgtccgggcttcctgtggattggcggaatgtttagaagcagaacaagccattcctattacctccccaggaggcaagtgggcgcagcaccagggaaatgtatctccacaggttctggggcctagttactgtctgtaaatccaatacttgcctgaaagctgtgaagaagaaaaaaacccctggcctttgggccaggaggaatctgttactcgaatccacccaggaactccctggcagtggattgtgggaggctcttgcttacactaatcagcgtgacctggacctgctgggcaggatcccagggtgaacctgcctgtgaactctgaagtcactagtccagctgggtgcaggaggacttcaagtgtgtggacgaaagaaagactgatggctcaaagggtgtgaaaaagtcagtgatgctccccctttctactccagatcctgtccttcctggagcaaggttgagggagtaggttttgaagagtcccttaatatgtggtggaacaggccaggagttagagaaagggctggcttctgtttacctgctcactggctctagccagcccagggaccacatcaatgtgagaggaagcctccacctcatgttttcaaacttaatactggagactggctgagaacttacggacaacatcctttctgtctgaaacaaacagtcacaagcaaaggaagaggctgggggactagaaagaggccctgccctctagaaagctcagatcttggcttctgttactcatactcgggtgggctccttagtcagatgcctaaaacattttgcctaaagctcgatgggttctggaggacagtgtggcttgtcacaggcctagagtctgagggaggggagtgggagtctcagcaatctcttggtcttggcttcatggcaaccactgctcacccttcaacatgcctggtttaggcagcagcttgggctgggaagaggtggtggcagagtctcaaagctgagatgctgagagagatagctccctgagctgggccatctgacttctacctcccatgtttgctctcccaactcattagctcctgggcagcatcctcctgagccacatgtgcaggtactggaaaacctccatcttggctcccagagctctaggaactcttcatcacaactagatttgcctcttctaagtgtctatgagcttgcaccatatttaataaattgggaatgggtttggggtattaa

SEQ ID NO: 192619 - DNA, 2013 bp, Artificial Sequence
  derived and/or modified sequence
atgagcccctgcagcggcggcagaggcgagctgagagccgcctgcctgcagcccgaggtgcccggcgcccccggcctgagctggtggcccagcaccgccggcctgagacagagccagaccgacctgcagctgagcctgagcatctggtgcggcaagaagatgggcagctacctgagcgtgcccgcctacttcaccagcagagacctgttcagatgcagcgagtgccaggacagcctgaccaactggtactacgagaaggacggcaagctgtactgccccaaggactactggggcaagttcggcgagttctgccacggctgcagcctgctgatgaccggccccttcatggtggccggcgagttcaagtaccaccccgagtgcttcgcctgcatgagctgcaaggtgatcatcgaggacggcgacgcctacgccctggtgcagcacgccaccctgtactgcggcaagtgccacaacgaggtggtgctggcccccatgttcgagagactgagcaccgagagcgtgcaggagcagctgccctacagcgtgaccctgatcagcatgcccgccaccaccgagggcagaagaggcttcagcgtgagcgtggagagcgcctgcagcaactacgccaccaccgtgcaggtgaaggaggtgaacagaatgcacatcagccccaacaacagaaacgccatccaccccggcgacagaatcctggagatcaacggcacccccgtgagaaccctgagagtggaggaggtggaggacgccatcagccagaccagccagaccctgcagctgctgatcgagcacgaccccgtgagccagagactggaccagctgagactggaggccagactggccccccacatgcagaacgccggccacccccacgccctgagcaccctggacaccaaggagaacctggagggcaccctgagaagaagaagcctgagaagaagcaacagcatcagcaagagccccggccccagcagccccaaggagcccctgctgttcagcagagacatcagcagaagcgagagcctgagatgcagcagcagctacagccagcagatcttcagaccctgcgacctgatccacggcgaggtgctgggcaagggcttcttcggccaggccatcaaggtgacccacaaggccaccggcaaggtgatggtgatgaaggagctgatcagatgcgacgaggagacccagaagaccttcctgaccgaggtgaaggtgatgagaagcctggaccaccccaacgtgctgaagttcatcggcgtgctgtacaaggacaagaagctgaacctgctgaccgagtacatcgagggcggcaccctgaaggacttcctgagaagcatggaccccttcccctggcagcagaaggtgagattcgccaagggcatcgccagcggcatggcctacctgcacagcatgtgcatcatccacagagacctgaacagccacaactgcctgatcaagctggacaagaccgtggtggtggccgacttcggcctgagcagactgatcgtggaggagagaaagagagcccccatggagaaggccaccaccaagaagagaaccctgagaaagaacgacagaaagaagagatacaccgtggtgggcaacccctactggatggcccccgagatgctgaacggcaagagctacgacgagaccgtggacatcttcagcttcggcatcgtgctgtgcgagatcatcggccaggtgtacgccgaccccgactgcctgcccagaaccctggacttcggcctgaacgtgaagctgttctgggagaagttcgtgcccaccgactgcccccccgccttcttccccctggccgccatctgctgcagactggagcccgagagcagacccgccttcagcaagctggaggacagcttcgaggccctgagcctgtacctgggcgagctgggcatccccctgcccgccgagctggaggagctggaccacaccgtgagcatgcagtacggcctgaccagagacagccccccctag

SEQ ID NO: 192620 - DNA, 1179 bp, Artificial Sequence
  derived and/or modified sequence
atgagcgccctggccggcgaggacgtgtggagatgccccggctgcggcgaccacatcgcccccagccagatctggtacagaaccgtgaacgagacctggcacggcagctgcttcagaagaagcaacagcatcagcaagagccccggccccagcagccccaaggagcccctgctgttcagcagagacatcagcagaagcgagagcctgagatgcagcagcagctacagccagcagatcttcagaccctgcgacctgatccacggcgaggtgctgggcaagggcttcttcggccaggccatcaaggtgacccacaaggccaccggcaaggtgatggtgatgaaggagctgatcagatgcgacgaggagacccagaagaccttcctgaccgaggtgaaggtgatgagaagcctggaccaccccaacgtgctgaagttcatcggcgtgctgtacaaggacaagaagctgaacctgctgaccgagtacatcgagggcggcaccctgaaggacttcctgagaagcatggaccccttcccctggcagcagaaggtgagattcgccaagggcatcgccagcggcatggcctacctgcacagcatgtgcatcatccacagagacctgaacagccacaactgcctgatcaagctggacaagaccgtggtggtggccgacttcggcctgagcagactgatcgtggaggagagaaagagagcccccatggagaaggccaccaccaagaagagaaccctgagaaagaacgacagaaagaagagatacaccgtggtgggcaacccctactggatggcccccgagatgctgaacggcaagagctacgacgagaccgtggacatcttcagcttcggcatcgtgctgtgcgagatcatcggccaggtgtacgccgaccccgactgcctgcccagaaccctggacttcggcctgaacgtgaagctgttctgggagaagttcgtgcccaccgactgcccccccgccttcttccccctggccgccatctgctgcagactggagcccgagagcagacccgccttcagcaagctggaggacagcttcgaggccctgagcctgtacctgggcgagctgggcatccccctgcccgccgagctggaggagctggaccacaccgtgagcatgcagtacggcctgaccagagacagccccccctag

SEQ ID NO: 192621 - DNA, 1854 bp, Artificial Sequence
  derived and/or modified sequence
atgggcagttacctgtcagtgccagcctactttacatctcgcgatttgttccgatgctcggagtgccaagattctctaactaactggtattacgagaaggatggtaaactgtactgcccaaaagactactggggcaagttcggggagttctgccatgggtgctcactcctgatgacagggccttttatggtagctggcgaattcaaataccatcccgaatgctttgcgtgcatgtcttgtaaagtgattatcgaagacggggatgcctatgcgctcgtgcaacatgctaccctgtattgtgggaagtgccacaacgaggtggtcctggccccaatgtttgagagactttcaactgagtccgtacaggaacagcttccctactctgtgacacttatatctatgccagccaccacagaagggcgtcgtggtttctcagtgtctgtggagtccgcctgtagcaactacgcaaccaccgtgcaggtaaaagaagtgaatagaatgcacatttccccaaacaacagaaacgctatacaccccggggacagaatacttgagatcaacggaactcctgtcaggacgctgagagtggaggaggtggaggatgccatttctcagaccagtcaaactttacagttgctgatcgagcatgatccagtatcacagaggctggatcagctacgtctggaggcaaggctggctccacatatgcagaatgccggtcacccccatgcactctccacccttgacacaaaagaaaacctggagggcacactgcggcgacgatcactgagaagatccaactccatttcaaagagcccaggcccgtcaagccctaaggaaccattactattctcccgggacatctcccgatccgagagtcttagatgcagctcctcctatagtcagcagattttccgcccctgtgatctcattcacggcgaggtgttggggaaggggtttttcgggcaggctatcaaggtgactcataaagctactggcaaagtgatggtgatgaaagagttgatcaggtgcgacgaagagactcaaaaaacgttcttgaccgaagtcaaggtcatgcggtccctcgaccatcccaacgtgctgaagtttataggtgtgctgtataaagacaagaagctgaacctcctgaccgaatatatcgaaggcggcacccttaaagacttcttacgatccatggacccttttccttggcagcagaaggtgcgtttcgctaaagggatcgcatccggtatggcctatctccacagcatgtgtatcatacaccgggatttgaattctcacaactgcctgattaaattggataagactgtggtggttgcagattttgggctatccaggctcatcgtcgaggagagaaagagggcacctatggaaaaagccaccactaaaaagagaaccttaaggaagaacgatagaaagaagcgatatactgtcgtcgggaacccctactggatggcccccgagatgttaaatggcaagtcctacgatgaaacagtggatatcttttctttcgggatcgtgctatgcgagatcatcgggcaggtttatgccgatcccgattgtttaccaagaacactggattttggccttaacgttaagctgttctgggagaagttcgttcctaccgattgtcctccagcctttttccccctggcagccatttgttgtcgcctggaacccgaatcgcgaccagcattttctaagcttgaggactcgttcgaagcgctcagcctctaccttggtgaactgggcattcctctgcccgcagaactggaagagcttgaccatacagtgagcatgcagtatggcctgaccagagactcacccccctag

SEQ ID NO: 192622 - DNA, 2013 bp, Artificial Sequence
  derived and/or modified sequence
atgagcccatgttcaggcggcagaggcgaacttcgggcagcttgcctacagcctgaagttccaggcgccccagggctctcctggtggccttctacagccggcctgagacagagccaaacagaccttcaactgtcgctgtctatatggtgcggaaagaagatggggagttacctgagtgtgcccgcctattttactagcagggatctcttccgatgcagcgagtgtcaggattctttgaccaattggtactatgaaaaagatgggaaactatactgtccgaaggactactgggggaaattcggcgagttctgccatggctgcagcttactgatgaccggaccttttatggtcgccggcgagtttaaataccatccagagtgtttcgcctgtatgagttgcaaagtgatcatcgaggacggggacgcctacgctctggtgcagcatgcgactctgtactgtggcaaatgccacaatgaggtggtgttggctcctatgttcgaacgcctgtcaactgagtcagtccaggagcagctgccctattcagtcacactgatctcaatgcccgccactacagaaggcaggaggggatttagtgtcagcgtggagtctgcctgctccaactatgccaccaccgtgcaagtaaaggaggttaaccggatgcatatatcgcctaataacagaaatgctatccaccctggcgacagaattttggagatcaacgggactcctgttcggacactgcgggttgaagaggtggaggacgctatctcccagacatcccaaacccttcagctgcttatcgaacatgaccctgtgagtcaaagactcgaccagctgaggctggaagcccgtctggctccgcacatgcagaatgctggtcatccacacgctctgtccactctggacaccaaagagaatctcgagggtacattgagaagaagatccttgagacgaagcaatagcatcagtaaaagcccaggaccaagctctcccaaggagcctctgcttttttctagagatatatctagatcagagagtctaaggtgcagttcatcatactcacagcagattttccgaccctgcgacctgattcatggtgaggtgctaggcaagggattttttggacaggccatcaaagtcacccacaaggcaacgggcaaagtgatggtgatgaaagaattaatccgctgcgacgaggaaacacaaaagaccttcttaaccgaggtgaaggtgatgcgtagcctggatcatccaaatgtgcttaagttcataggagtcctatataaagataagaaactgaacctgttgaccgagtacatcgagggtggtactctgaaggatttcctgagatctatggacccttttccatggcagcagaaggtgcgattcgcaaagggaattgcctcagggatggcgtatctacattccatgtgcattatccatagagatctcaattcccacaattgcttgattaaactggacaaaacggtggtggtcgcggacttcggccttagcagactgatagtcgaggaaaggaaaagggctcccatggagaaggcaactactaagaagcgaacactgcgaaagaatgaccgaaaaaaacgttatacagtcgtggggaacccttattggatggccccagaaatgttgaacggaaagtcctacgatgagactgttgacatttttagttttggaattgtgctttgcgagataatcggccaggtgtacgctgaccccgattgtcttccccggaccctggactttggactgaacgtgaagctattttgggaaaaatttgtccccaccgattgtcccccagccttttttcccctcgccgccatctgctgcagactggagcccgagtcacgaccggccttcagcaagctcgaagactctttcgaggccctgtcgttatatctcggggaactgggcattccactgccggcagagctcgaggagcttgaccatacagtgagcatgcagtatggtctgactcgggactctcccccctag

SEQ ID NO: 192623 - DNA, 1179 bp, Artificial Sequence
  derived and/or modified sequence
atgtctgccctggcgggcgaggacgtgtggaggtgcccgggctgtggggaccatatcgcacctagccagatctggtaccggacggtgaacgagacatggcacggatcctgtttcaggaggagcaactcaattagtaagagccccggcccttcctcgccaaaggagcctcttctgttttctagagacattagtcgatccgaatccctaaggtgttccagtagctactcccagcaaatctttagaccatgcgacctcatccatggagaggtgttgggtaaggggttcttcgggcaggctatcaaggtaacacacaaagcaaccggaaaagtgatggtgatgaaagaacttatccgatgtgacgaagagacgcagaagactttcctgacggaggtgaaagtcatgagaagcctcgaccaccccaacgtgctcaagttcatcggtgtcctgtacaaggacaagaagctcaacctacttacagaatatattgagggaggtacgttgaaagactttctaagatccatggatccctttccatggcagcagaaagtgcggtttgccaagggcatcgcctctggaatggcttacctgcattccatgtgtatcattcaccgggacttaaattcccacaactgtctaataaagctggacaagaccgtggtggtagcagattttggtctttctagactcattgtggaggagcgcaagcgtgcccccatggaaaaggctacgaccaagaaacggactctgcggaagaatgatcgcaaaaagcgctacacagtcgttggaaacccgtattggatggcacccgagatgctcaatggcaagtcctatgacgaaaccgtcgatatattttcctttgggattgttctgtgtgagatcattggccaagtgtatgccgaccccgattgtttgcctaggacactggactttgggctcaacgttaagttgttttgggaaaaatttgtcccgacggattgcccccccgccttctttccccttgccgctatatgctgccgcctggagccagaatctcggcccgccttttccaagctcgaggattcatttgaggcgttgagcctctacctcggagaacttggcatcccgctgccagccgagctggaagaactggatcatactgtcagtatgcagtatggccttacacgggacagccccccctag

SEQ ID NO: 192624 - DNA, 1854 bp, Artificial Sequence
  derived and/or modified sequence
atgggcagctacctgtctgtgcctgcctacttcaccagccgggacctcttccgctgcagcgagtgccaggacagcctgaccaactggtactatgagaaggatggcaagctgtactgccccaaggactactggggcaagtttggagagttctgccacggctgcagcctgctgatgacaggccccttcatggtggccggggagttcaagtaccacccagaatgttttgcctgcatgagctgcaaggtgatcattgaagatggagatgcctatgccctggtgcagcacgccaccctgtactgtgggaagtgccacaatgaggtggtgctggcccccatgtttgagcggctgagcacagagagcgtgcaggagcagctgccctacagcgtgaccctcatctccatgcctgccaccacagagggcagaagaggcttctctgtgtctgtggagagcgcctgcagcaactatgccaccaccgtgcaggtgaaggaggtgaacaggatgcacatcagccccaacaacagaaatgccatccaccctggggaccgcatcctggagatcaatggcacccctgtgaggaccctgcgggtggaggaggtggaggatgccatcagccagaccagccagaccctgcagctgctgattgaacatgaccctgtgtcccagaggctggaccagctgcggctggaggcccggctggccccccacatgcagaatgccggccacccccacgccctgagcaccctggacaccaaggagaacctggagggcaccctgcggcggcgcagcctgcggcgcagcaacagcatcagcaagagccctggccccagcagccccaaggagcccctgctcttcagccgggacatcagccgctctgagagcctgcgctgcagcagcagctacagccagcagatcttccggccctgtgacctgatccacggggaggtgctgggcaagggcttcttcggccaggccatcaaggtgacccacaaggccaccgggaaggtgatggtgatgaaggagctgatccgctgtgatgaggagacccagaagaccttcctgacagaggtgaaggtgatgaggagcctggaccaccccaacgtgctgaagttcatcggcgtgctgtacaaggacaagaagctgaacctgctgacagagtacattgaaggaggcaccctgaaggacttcctgcgctccatggaccccttcccctggcagcagaaggtgcgctttgccaagggcatcgccagcggcatggcctacctgcacagcatgtgcatcatccaccgggacctgaacagccacaactgcctgatcaagctggacaagacagtggtggtggccgactttggcctgagccggctgattgtggaggagaggaagagggcccccatggagaaggccaccaccaagaagaggaccctgaggaagaatgacaggaagaagcgctacacagtggtgggcaacccctactggatggcccctgagatgctgaatggcaagagctatgatgaaacagtggacatcttctcctttggaattgtgctgtgtgagatcatcggccaggtgtatgctgaccctgactgcctgcccaggaccctggactttggcctgaatgtgaagctgttctgggagaagtttgtgcccacagactgccccccagccttcttccccctggccgccatctgctgccgcctggagcctgagagcaggcctgccttcagcaagctggaggacagctttgaggccctgagcctgtacctgggggagctgggcatccccctgcctgctgagctggaggagctggaccacacagtgtccatgcagtatggcctgacccgggacagccccccatag

SEQ ID NO: 192625 - DNA, 2013 bp, Artificial Sequence
  derived and/or modified sequence
atgagcccctgcagcggcggccgcggggagctgcgggccgcctgcctgcagcctgaggtgcctggggcccctggcctgtcctggtggcccagcacagctggcctgcggcagagccagacagacctgcagctgagcctgagcatctggtgtgggaagaagatgggcagctacctgtctgtgcctgcctacttcaccagccgggacctcttccgctgcagcgagtgccaggacagcctgaccaactggtactatgagaaggatggcaagctgtactgccccaaggactactggggcaagtttggagagttctgccacggctgcagcctgctgatgacaggccccttcatggtggccggggagttcaagtaccaccctgagtgctttgcctgcatgagctgcaaggtgatcattgaagatggagatgcctatgccctggtgcagcacgccaccctgtactgtgggaagtgccacaatgaggtggtgctggcccccatgtttgagcggctgagcacagaatctgtgcaggagcagctgccctacagcgtgaccctcatctccatgcctgccaccacagagggccggcggggcttctctgtgtctgtggagagcgcctgcagcaactatgccaccaccgtgcaggtgaaggaggtgaacaggatgcacatcagccccaacaacagaaatgccatccaccctggggaccgcatcctggagatcaatggcacccctgtgaggaccctgcgggtggaggaggtggaggatgccatcagccagaccagccagaccctgcagctgctgattgaacatgaccctgtgtcccagaggctggaccagctgcggctggaggcccggctggccccccacatgcagaatgccggccacccccacgccctgagcaccctggacaccaaggagaacctggagggcaccctgcggcggcgcagcctgcggcgcagcaacagcatcagcaagagccctggccccagcagccccaaggagcccctgctcttcagccgggacatcagccgctctgagagcctgcgctgcagcagcagctacagccagcagatcttccggccctgtgacctgattcatggagaggtgctgggcaagggcttcttcggccaggccatcaaggtgacccacaaggccaccgggaaggtgatggtgatgaaggagctgatccgctgtgatgaggagacccagaagaccttcctgacagaggtgaaggtgatgaggagcctggaccaccccaacgtgctgaagttcatcggcgtgctgtacaaggacaagaagctgaacctgctgacagagtacatcgagggcggcaccctgaaggacttcctgcgctccatggaccccttcccctggcagcagaaggtgcgctttgccaagggcatcgccagcggcatggcctacctgcacagcatgtgcatcatccaccgggacctgaacagccacaactgcctgatcaagctggacaagacagtggtggtggccgactttggcctgagccgcctcatcgtggaggagaggaagagggcccccatggagaaggccaccaccaagaagaggaccctgaggaagaatgacaggaagaagcgctacacagtggtgggcaacccctactggatggcccctgagatgctgaatggcaagagctatgatgagaccgtggacatcttctcctttggcatcgtgctgtgtgagatcatcggccaggtgtatgctgaccctgactgcctgcccaggaccctggactttggcctgaatgtgaagctgttctgggagaagtttgtgcccacagactgccccccagccttcttccccctggccgccatctgctgccgcctggagcctgagagcaggcctgccttcagcaagctggaggacagctttgaggccctgagcctgtacctgggggagctgggcatccccctgcctgctgagctggaggagctggaccacacagtgtccatgcagtatggcctgacccgggacagccccccatag

SEQ ID NO: 192626 - DNA, 1179 bp, Artificial Sequence
  derived and/or modified sequence
atgtctgccctggccggagaagatgtgtggcgctgccccggctgtggggaccacatcgcccccagccagatctggtacagaacagtgaatgagacctggcacggcagctgcttcagaagaagcaacagcatcagcaagagccctggccccagcagccccaaggagcccctgctcttcagccgggacatcagccgctctgagagcctgcgctgcagcagcagctacagccagcagatcttccggccctgtgacctgattcatggagaggtgctgggcaagggcttcttcggccaggccatcaaggtgacccacaaggccaccgggaaggtgatggtgatgaaggagctgatccgctgtgatgaggagacccagaagaccttcctgacagaggtgaaggtgatgaggagcctggaccaccccaacgtgctgaagttcatcggcgtgctgtacaaggacaagaagctgaacctgctgacagagtacatcgagggcggcaccctgaaggacttcctgcgctccatggaccccttcccctggcagcagaaggtgcgctttgccaagggcatcgccagcggcatggcctacctgcacagcatgtgcatcatccaccgggacctgaacagccacaactgcctgatcaagctggacaagacagtggtggtggccgactttggcctgagccgcctcatcgtggaggagaggaagagggcccccatggagaaggccaccaccaagaagaggaccctgaggaagaatgacaggaagaagcgctacacagtggtgggcaacccctactggatggcccctgagatgctgaatggcaagagctatgatgagaccgtggacatcttctcctttggcatcgtgctgtgtgagatcatcggccaggtgtatgctgaccctgactgcctgcccaggaccctggactttggcctgaatgtgaagctgttctgggagaagtttgtgcccacagactgccccccagccttcttccccctggccgccatctgctgccgcctggagcctgagagcaggcctgccttcagcaagctggaggacagctttgaggccctgagcctgtacctgggggagctgggcatccccctgcctgctgagctggaggagctggaccacacagtgtccatgcagtatggcctgacccgggacagccccccatag

SEQ ID NO: 192627 - DNA, 1854 bp, Artificial Sequence
  derived and/or modified sequence
atgggcagctacctgagcgtgcccgcctacttcaccagccgggacctgtttcggtgcagcgagtgtcaagacagccttaccaactggtactacgaaaaagacggcaaattatattgtccaaaggattactggggcaaattcggagaattttgccatgggtgcagcctcctgatgacgggaccgtttatggtggcaggggaattcaagtatcaccccgagtgcttcgcctgtatgtcatgcaaagtaataattgaagacggagatgcatatgcgctcgtgcagcacgctactctatattgtggcaagtgccacaacgaggtggtgttagcccctatgtttgagaggctgagcacggagtcggtgcaagagcagttaccgtactcagttaccttaatttcgatgcccgcaacaaccgagggaagaagaggattttcagtctctgtcgaatctgcatgctctaactacgccaccacggttcaggtgaaagaggttaatcgaatgcacatctctccaaataataggaacgcaattcacccgggcgaccgcatcctagagataaatgggacacctgtccgtaccctacgggtggaagaggtggaagacgctatctctcagacctcccaaacacttcagctgttgattgaacatgacccagtttctcagcggctggaccagcttagactggaagctcggctcgcaccacacatgcagaacgccgggcatccacacgctctaagcactcttgataccaaagaaaatctggagggcactctgcgtcgccgcagtctgcgccgcagcaatagcatctctaagtcccccggcccttcatctcccaaagagccccttctgtttagcagggatataagccggagcgagagtttgcgttgcagctccagttattctcagcaaatcttccgcccttgcgaccttattcacggggaggtgctcggaaaggggttcttcgggcaggccataaaagtaactcataaagcaaccgggaaagtgatggtgatgaaagagctgatcaggtgtgatgaagagacccaaaagacattcctgactgaggtgaaagtcatgcgatcgctggatcaccctaatgtcctgaagtttatcggggtcctttataaagataagaaactgaacttgttgacagaatatatagaaggtggaaccctaaaggatttcctcaggagtatggacccctttccttggcagcaaaaagtcagattcgcgaaaggtatcgcttctggaatggcctatttgcattctatgtgcatcattcaccgcgacctcaactctcataactgcctgataaagctggacaagaccgttgtggtggccgattttggcctgagccgattgatcgtagaggaacgaaaaagagcgcccatggaaaaagctacaaccaagaagaggacacttagaaagaacgatcggaagaaacgttacacagttgtgggtaatccctattggatggcccccgagatgcttaacgggaaatcatatgatgaaactgtcgacatcttttcctttggaatcgttctgtgtgagatcatcgggcaggtgtatgcagacccggattgtctgcctagaacactggactttggcctgaacgtgaagctgttttgggagaaattcgttcctaccgactgccccccagcctttttccctctcgcagcaatctgctgccgcttggagccagagtcccgcccagctttcagtaagctggaagactcttttgaggcactatccttgtatctgggcgaactcgggattccgctgcccgcagagctggaagagttggatcatactgtaagtatgcagtatgggcttactcgggactcaccaccatag

SEQ ID NO: 192628 - DNA, 2013 bp, Artificial Sequence
  derived and/or modified sequence
atgagcccctgcagcggcggccggggcgagctgcgggccgcctgccttcaacccgaagtccctggcgccccaggtctgagctggtggcctagtaccgcgggactgcggcaatcacagacggacctgcaactgtcactgtccatttggtgtggaaaaaagatgggttcatacctgagcgtacccgcttacttcacatccagggacctgtttaggtgctccgagtgtcaggatagcctgaccaattggtactacgaaaaagacgggaaactctattgtccaaaggattattggggaaagttcggggagttctgccatgggtgttcactactcatgactgggcctttcatggtagcaggggaatttaaataccaccccgaatgttttgcatgcatgtcctgtaaagtgatcatagaagatggggatgcatacgccctcgttcagcatgctacgctgtactgcgggaagtgtcacaatgaagtggtgctcgcccccatgtttgagagactctcgactgagtcagtacaggaacaactgccttattccgtgacccttatttctatgccagcaaccaccgagggcaggcgcggattcagtgtaagcgtagaatccgcctgcagcaactatgcaacaactgtccaagtgaaagaggtgaataggatgcatatttctcccaacaatcgtaatgccatccacccgggtgatcgaattctggagatcaatgggacacctgtacggaccttaagagttgaagaagtggaggacgccatatctcaaacttcccagaccctccagcttctcatcgaacacgatcccgtgtctcagaggctcgatcagctcaggctggaggctcggctcgccccacacatgcagaacgccggccacccacacgccctcagcacactagacaccaaggagaacctcgagggcacgttgaggagacgcagcctgcgccgcagcaatagtatttcgaaatcaccaggccctagtagtccaaaggaacctctgctgtttagccgagatatctctcgatctgagtctttgaggtgtagtagctcatacagccaacagatcttcagaccgtgtgacttaatccatggggaggtgctggggaagggctttttcggccaggctataaaggtcacgcataaagctacgggcaaagtgatggtcatgaaagaactgataaggtgtgacgaggaaacacagaaaacattcctgaccgaagtcaaagtaatgaggagcctggaccatcccaatgttctcaaatttatcggcgtgttgtacaaggacaaaaaactgaacctcctgacagagtatatcgaggggggcactctgaaggattttctgcgatcgatggatcctttcccgtggcagcagaaagtgcgcttcgccaagggaatcgcctctgggatggcgtatcttcatagcatgtgcataattcacagagaccttaattcacacaactgcttgatcaaacttgacaaaacagtcgtggtagccgactttggactatctcgtttaatcgtggaggagaggaagcgggcccccatggagaaggcaaccaccaagaaaagaactctgcgtaaaaatgatcggaaaaagagatacacagtggtaggcaatccatattggatggcacccgaaatgctgaacgggaaaagctatgatgagactgtggatatttttagctttggaattgtattgtgtgagatcatcggtcaagtgtacgccgatcctgattgcctgcctaggacactggacttcggattgaatgtcaagctcttctgggaaaaattcgtgcccacagactgtccacccgcatttttccctctggctgcaatctgctgccggctagagccggaaagccggccagccttctcaaaactggaagactctttcgaggccctgagcttgtatctgggtgagttgggcattccgctcccagctgagctcgaagaactggaccatactgtctcgatgcagtacgggctcacgagagactctcctccatag

SEQ ID NO: 192629 - DNA, 1179 bp, Artificial Sequence
  derived and/or modified sequence
atgagcgccctggccggcgaggacgtgtggcggtgccccggctgcggggaccatatcgcacctagccagatttggtacaggactgtgaacgagacttggcacggatcctgctttcgccgttctaactcaatcagtaaatcaccaggcccatcctcaccgaaagaacctctgttgtttagccgagatatcagtcgcagcgagtccttgcgttgttcatctagctactctcagcagatattccggccttgtgacctcattcacggcgaggtgctgggtaaaggtttcttcggccaggcgatcaaggtgacccataaggctactgggaaagtgatggtaatgaaggagctgatccggtgcgatgaggaaacccaaaagacgttcctgactgaagtaaaagtgatgcgcagcctggaccaccccaatgtcctaaagtttattggcgtcctctacaaggataagaagctcaatctgctgaccgaatacattgaagggggcactctgaaggattttctacgttcaatggaccctttcccatggcagcagaaagtgagatttgctaaaggtattgcaagtggcatggcatacctgcacagcatgtgtattatacatcgcgacctgaattcacacaactgtctcataaagctcgacaagacggtcgtagttgcagattttgggctgtccaggctgatcgtcgaggagagaaagagagcccctatggagaaagcgacgactaaaaagcgcacgcttagaaagaacgataggaaaaagcggtataccgtggttgggaacccctactggatggctcccgagatgctaaacggaaaaagctacgatgagaccgtagatatcttctccttcgggattgtactgtgcgaaatcataggtcaggtgtacgcagacccggactgcctaccacggacattagacttcgggttgaatgtcaaactgttctgggaaaaattcgtcccaacagattgtccacccgccttcttcccacttgctgccatttgctgccggctcgagcccgagtctcggcctgctttctcaaagcttgaggactcttttgaagcactgtcactctatcttggggagcttgggattcccctacccgccgagttggaggagctagaccataccgtgagtatgcagtacggcttgacacgagatagccccccctag

SEQ ID NO: 192630 - DNA, 1854 bp, Artificial Sequence
  derived and/or modified sequence
atgggctcatacctgtccgtgcctgcctatttcacgtctcgagacctctttcgatgctccgaatgtcaagactcgttgacaaattggtactacgagaaggatggcaagctgtactgcccaaaagattattggggcaaattcggcgagttttgtcacgggtgtagtttgcttatgacaggcccatttatggtcgccggtgagttcaagtatcatccggaatgtttcgcctgcatgtcttgtaaggtcatcatcgaagacggcgatgcctacgctttagtacagcacgccaccctttactgtgggaaatgccataatgaggtagttctggcaccaatgtttgagaggctgtctaccgagtccgtgcaagaacaactaccttattctgtcacactgatatcgatgcccgctacaaccgagggaagacggggtttctccgtctcggtagaaagcgcctgctccaactacgccacaaccgttcaggtgaaagaagtgaaccgaatgcatatctctcccaataacaggaatgcaatccatcctggcgacagaatcttagagatcaatggaactcccgttcggacgctccgcgtcgaggaagtagaagatgccatctctcagactagtcagacactgcagctgctgatcgaacacgatccagtgtcacagcgcctggatcagctccgacttgaggccagactggctccacatatgcagaacgccggtcatcctcatgcccttagcacgctcgacaccaaggagaacctggagggcaccctccggcgtcgatctttacgacggtcgaactcgatttccaaatcccccggacccagttctcccaaagagccattactgttctctcgggacatttctaggagcgaatccctgcggtgttcctcttcttattcacagcagatcttccgcccttgcgatctcatccacggggaggtgcttgggaagggcttcttcggacaggctattaaggtgactcacaaggcaaccgggaaggttatggtaatgaaagaactcatacgatgcgatgaagagacccagaagaccttcctgaccgaggtgaaagtgatgagatccctggatcaccctaatgttctcaagtttatcggggtgctgtacaaagacaagaaactcaacttgctgaccgagtatatcgagggaggaaccctgaaggacttcctgagatctatggatccctttccatggcagcagaaagtgcggtttgctaaaggcattgcttctggtatggcatatttacacagcatgtgcatcatccaccgggaccttaattcccacaattgtcttattaaactcgacaaaacagtcgtagtcgctgacttcggtctgtctagacttattgtggaagaacgcaagcgggctcccatggaaaaggccacaacaaagaagcggacactccggaaaaacgatcggaaaaagcgatacaccgtggttggtaacccttattggatggctccagaaatgctcaacggcaaaagttatgacgagaccgtagatatcttctcctttggcatcgtgttatgtgagattattggccaggtgtatgcggatcctgactgcttacccaggacactggattttggattaaacgtaaagttgttctgggagaaatttgtgcccaccgactgcccccctgccttttttcctctcgccgctatatgctgtagactcgagccagagtccagaccagcattctctaaacttgaagactcattcgaagcactgagtctgtaccttggcgagctgggcattcctcttcctgccgaattggaagagctggaccatacggtttcaatgcaatatggcctgacccgcgatagtcccccttag

SEQ ID NO: 192631 - DNA, 2013 bp, Artificial Sequence
  derived and/or modified sequence
atgtctccatgcagcgggggtagaggcgagctgcgggctgcctgcctgcaacctgaggtgcctggggctcctggactgtcctggtggccatccaccgctggtcttcgccagagtcagacagacttacagctgagcctgagcatctggtgtggtaaaaaaatggggtcgtatctgagcgtcccagcctatttcaccagtcgggatctgtttagatgctccgaatgtcaggacagtctgaccaattggtactatgaaaaagatggtaaactgtattgtccaaaggactattgggggaaatttggcgaattctgtcatggttgttctctattgatgacgggtcctttcatggtcgctggcgaatttaaatatcatccagaatgtttcgcctgcatgagctgcaaggtcatcatcgaggacggggatgcctatgctctcgtgcaacacgcgactctctactgtggcaagtgtcataatgaagtggttctagcccctatgttcgagaggctttccaccgaaagtgtgcaggagcagcttccctattcagttactctcatctccatgcccgcaactacggagggacggagaggattttcagtgtcggtagagtcagcttgtagtaattatgcaaccaccgtgcaggtgaaggaggtgaacaggatgcacatttcccccaataaccgaaacgctattcaccccggagatcgtattctcgaaatcaatggtactccagtaaggacgctccgggttgaagaagtagaggacgcaattagtcagacctctcagacactacagcttctgatcgagcacgatcctgtgtcccagaggctggaccaactcaggctggaagccaggctagctccccatatgcagaacgcgggtcatcctcacgcgttgtccaccctggacacaaaagagaacctggaaggcactttgaggcggaggagcctccgccgttcaaatagcatctccaaatctcctggtccttcaagtccaaaggaacctcttctcttttcacgcgatataagtcggtccgaaagcttgagatgcagctcgtcctactcccagcagatcttcagaccctgtgacctgatccacggggaggttctcggaaaaggtttctttgggcaggccatcaaggtgactcataaggcgacagggaaggtcatggtgatgaaggagctcatccgctgcgacgaggaaacacagaagacttttctgaccgaggtgaaggtgatgcgcagcctagatcacccaaatgtgctgaagtttattggcgtcttatataaagataagaagctgaatctcctgactgaatatatcgaaggtgggacactaaaagattttctcagatccatggaccccttcccctggcagcaaaaagtccgctttgctaaaggcattgcctcaggtatggcttacctgcactctatgtgcataattcacagagacctgaattcccacaactgcctgatcaaactggataagaccgtggtggttgccgatttcggtctgtcaagattgattgttgaggagcgcaagcgagcaccaatggagaaggccacgacgaaaaagagaaccttaagaaaaaacgatcgtaagaagagatacaccgtcgtcggcaatccatactggatggcccctgagatgctgaatggcaagagctacgacgagaccgtcgacatcttttcttttggcatcgtactctgcgagataatcggtcaagtctacgctgaccccgactgcttaccgaggacgctcgacttcgggctgaacgtaaagctcttttgggaaaagtttgttcccacagactgcccccctgccttctttcctctggctgccatctgctgcagactggaaccggagagcaggcctgccttcagtaaattagaggattcttttgaagccctgagtctctacctgggcgagctgggaattccgttgccagctgagctcgaggagttagatcataccgtgtcaatgcagtatggcctaaccagggacagccccccatag

SEQ ID NO: 192632 - DNA, 1179 bp, Artificial Sequence
  derived and/or modified sequence
atgagcgctctggcgggtgaggatgtttggagatgtcccggatgcggggaccatatcgccccatcccagatctggtatcggaccgtgaacgagacgtggcatggcagctgctttcgcaggagcaactccattagtaaatctcctgggccatcctctccgaaggaacctctgctgtttagtagagacatctccaggagcgaatcccttagatgttcatcaagttattctcagcagatattccgaccttgcgaccttatacacggagaggtacttggcaagggcttcttcggccaggccataaaagtaacccacaaagcgacagggaaggtgatggtcatgaaggagctaatcaggtgtgacgaagagacgcaaaagacttttctgaccgaggtcaaggtgatgagatcactcgaccaccccaacgtgcttaagttcattggcgtgttatacaaagataagaagctgaacctactcaccgagtatatcgaaggcggtaccttaaaagactttctgcggtcgatggaccccttcccctggcaacagaaggtgagatttgccaaaggcattgcgtccgggatggcctacctgcatagcatgtgcatcattcacagggacctaaatagccacaattgccttatcaagctggataaaaccgtggtggtagcggactttggactcagcagacttattgtggaggagaggaagcgtgcacctatggaaaaggccactaccaaaaaacgaactctgaggaaaaatgatcggaaaaagcgctatacggtagtcgggaacccctactggatggcgcctgaaatgctcaacggtaaatcctatgacgaaaccgtcgatatcttcagctttggcatcgttctttgtgagatcataggccaggtctacgccgacccagactgtttgccacgcacactggattttggcctcaacgtcaagctgttctgggaaaaatttgtgcccacagactgccccccagctttcttccctctggctgcgatctgttgccgacttgaacccgagtccaggcctgctttcagcaaactcgaagattcgtttgaggcactgtctctgtatctgggcgagctgggcatccccttgcccgctgagttggaggagcttgatcacacagtttctatgcaatacggtcttaccagggattccccaccttag

SEQ ID NO: 192633 - DNA, 2345 bp, Artificial Sequence
  derived and/or modified sequence
agtcaccggcccctgctcaagaatgccagtgtgtgtgtagcctccacagagaggtcgttttctcggagtccagaggggccgcctgagcttctgagaactagggaggagccatcccagccatgagcccctgctccggagggagaggtgagctcagggcagcctgcctgcagccagaggtgccgggagccccgggcctgtcatggtggccatctacagccggcctgaggcagtcacagacggatttgcagctgagcctgtctatctggtgtgggaagaagatggggagttacttgtcagtcccggcttacttcacctccagagacctgtttcggtgttcagaatgccaggattccctcaccaactggtactatgagaaggatgggaagctctactgccccaaggactactgggggaagtttggggagttctgtcatgggtgctccctgctgatgacagggccttttatggtggctggggagttcaagtaccacccagagtgctttgcctgtatgagctgcaaggtgatcattgaggatggggatgcatatgcactggtgcagcatgccaccctctactgtgggaagtgccacaatgaggtggtgctggcacccatgtttgagagactctccacagagtctgttcaggagcagctgccctactctgtcacgctcatctccatgccggccaccactgaaggcaggcggggcttctccgtgtccgtggagagtgcctgctccaactacgccaccactgtgcaagtgaaagaggtcaaccggatgcacatcagtcccaacaatcgaaacgccatccaccctggggaccgcatcctggagatcaatgggacccccgtccgcacacttcgagtggaggaggtggaggatgcaattagccagacgagccagacacttcagctgttgattgaacatgaccccgtctcccaacgcctggaccagctgcggctggaggcccggctcgctcctcacatgcagaatgccggacacccccacgccctcagcaccctggacaccaaggagaatctggaggggacactgaggagacgttccctaaggcgcagtaacagtatctccaagtcccctggccccagctccccaaaggagcccctgctgttcagccgtgacatcagccgctcagaatcccttcgttgttccagcagctattcacagcagatcttccggccctgtgacctaatccatggggaggtcctggggaagggcttctttgggcaggctatcaaggtgacacacaaagccacgggcaaagtgatggtcatgaaagagttaattcgatgtgatgaggagacccagaaaacttttctgactgaggtgaaagtgatgcgcagcctggaccaccccaatgtgctcaagttcattggtgtgctgtacaaggataagaagctgaacctcctgacagagtacattgaggggggcacactgaaggactttctgcgcagtatggatccgttcccctggcagcagaaggtcaggtttgccaaaggaatcgcctccggaatggcctatttgcactctatgtgcatcatccaccgggatctgaactcgcacaactgcctcatcaagttggacaagactgtggtggtggcagactttgggctgtcacggctcatagtggaagagaggaaaagggcccccatggagaaggccaccaccaagaaacgcaccttgcgcaagaacgaccgcaagaagcgctacacggtggtgggaaacccctactggatggcccctgagatgctgaacggaaagagctatgatgagacggtggatatcttctcctttgggatcgttctctgtgagatcattgggcaggtgtatgcagatcctgactgccttccccgaacactggactttggcctcaacgtgaagcttttctgggagaagtttgttcccacagattgtcccccggccttcttcccgctggccgccatctgctgcagactggagcctgagagcagaccagcattctcgaaattggaggactcctttgaggccctctccctgtacctgggggagctgggcatcccgctgcctgcagagctggaggagttggaccacactgtgagcatgcagtacggcctgacccgggactcacctccctagccctggcccagccccctgcaggggggtgttctacagccagcattgcccctctgtgccccattcctgctgtgagcagggccgtccgggcttcctgtggattggcggaatgtttagaagcagaacaagccattcctattacctccccaggaggcaagtgggcgcagcaccagggaaatgtatctccacaggttctggggcctagttactgtctgt

SEQ ID NO: 192634 - DNA, 2863 bp, Artificial Sequence
  derived and/or modified sequence
gttcgcgcctggggctgtggtcttcccgcgcctgaggcggcggcggcaggagctgaggggagttgtagggaactgaggggagctgctgtgtcccccgcctcctcctccccatttccgcgctcccgggaccatgtccgcgctggcgggtgaagatgtctggaggtgtccaggctgtggggaccacattgctccaagccagatatggtacaggactgtcaacgaaacctggcacggctcttgcttccggcgcagtaacagtatctccaagtcccctggccccagctccccaaaggagcccctgctgttcagccgtgacatcagccgctcagaatcccttcgttgttccagcagctattcacagcagatcttccggccctgtgacctaatccatggggaggtcctggggaagggcttctttgggcaggctatcaaggtgacacacaaagccacgggcaaagtgatggtcatgaaagagttaattcgatgtgatgaggagacccagaaaacttttctgactgaggtgaaagtgatgcgcagcctggaccaccccaatgtgctcaagttcattggtgtgctgtacaaggataagaagctgaacctcctgacagagtacattgaggggggcacactgaaggactttctgcgcagtatggatccgttcccctggcagcagaaggtcaggtttgccaaaggaatcgcctccggaatggcctatttgcactctatgtgcatcatccaccgggatctgaactcgcacaactgcctcatcaagttggacaagactgtggtggtggcagactttgggctgtcacggctcatagtggaagagaggaaaagggcccccatggagaaggccaccaccaagaaacgcaccttgcgcaagaacgaccgcaagaagcgctacacggtggtgggaaacccctactggatggcccctgagatgctgaacggaaagagctatgatgagacggtggatatcttctcctttgggatcgttctctgtgagatcattgggcaggtgtatgcagatcctgactgccttccccgaacactggactttggcctcaacgtgaagcttttctgggagaagtttgttcccacagattgtcccccggccttcttcccgctggccgccatctgctgcagactggagcctgagagcagaccagcattctcgaaattggaggactcctttgaggccctctccctgtacctgggggagctgggcatcccgctgcctgcagagctggaggagttggaccacactgtgagcatgcagtacggcctgacccgggactcacctccctagccctggcccagccccctgcaggggggtgttctacagccagcattgcccctctgtgccccattcctgctgtgagcagggccgtccgggcttcctgtggattggcggaatgtttagaagcagaacaagccattcctattacctccccaggaggcaagtgggcgcagcaccagggaaatgtatctccacaggttctggggcctagttactgtctgtaaatccaccaggaactccctggcagtggattgtgggaggctcttgcttacactaatcagcgtgacctggacctgctgggcaggatcccagggtgaacctgcctgtgaactctgaagtcactagtccagctgggtgcaggaggacttcaagtgtgtggacgaaagaaagactgatggctcaaagggtgtgaaaaagtcagtgatgctccccctttctactccagatcctgtccttcctggagcaaggttgagggagtaggttttgaagagtcccttaatatgtggtggaacaggccaggagttagagaaagggctggcttctgtttacctgctcactggctctagccagcccagggaccacatcaatgtgagaggaagcctccacctcatgttttcaaacttaatactggagactggctgagaacttacggacaacatcctttctgtctgaaacaaacagtcacaagcaaaggaagaggctgggggactagaaagaggccctgccctctagaaagctcagatcttggcttctgttactcatactcgggtgggctccttagtcagatgcctaaaacattttgcctaaagctcgatgggttctggaggacagtgtggcttgtcacaggcctagagtctgagggaggggagtgggagtctcagcaatctcttggtcttggcttcatggcaaccactgctcacccttcaacatgcctggtttaggcagcagcttgggctgggaagaggtggtggcagagtctcaaagctgagatgctgagagagatagctccctgagctgggccatctgacttctacctcccatgtttgctctcccaactcattagctcctgggcagcatcctcctgagccacatgtgcaggtactggaaaacctccatcttggctcccagagctctaggaactcttcatcacaactagatttgcctcttctaagtgtctatgagcttgcaccatatttaataaattgggaatgggtttggggtattaatgcaatgtgtggtggttgtattggagcagggggaattgataaaggagagtggttgctgttaatattatcttatctattgggtggtatgtgaaatattgtacatagacctgatgagttgtgggaccagatgtcatctctggtcagagtttacttgctatatagactgtacttatgtgtgaagtttgcaagcttgctttagggctgagccctggactcccagcagcagcacagttcagcattgtgtggctggttgtttcctggctgtccccagcaagtgtaggagtggtgggcctgaactgggccattgatcagactaaataaattaagcagttaacat

SEQ ID NO: 192635 - protein, 391 aa, Artificial Sequence
  derived and/or modified sequence
MDLEKNYPTPRTSRTGHGGVNQLGGVFVNGRPLPDVVRQRIVELAHQGVRPCDISRQLRVSHGCVSKILGRYYETGSIKPGVIGGSKPKVATPKVVEKIAEYKRQNPTMFAWEIRDRLLAERVCDNDTVPSVSSINRIIRTKVQQPPNQPVPASSHSIVSTGSVTQVSSVSTDSAGSSYSISGILGITSPSADTNKRKRDEGIQESPVPNGHSLPGRDFLRKQMRGDLFTQQQLEVLDRVFERQHYSDIFTTTEPIKPEQTTEYSAMASLAGGLDDMKANLASPTPADIGSSVPGPQSYPIVTGRDLASTTLPGYPPHVPPAGQGSYSAPTLTGMVPGSEFSGSPYSHPQYSSYNDSWRFPNPGLLGSPYYYSAAARGAAPPAAATAYDRH

SEQ ID NO: 192636 - protein, 283 aa, Artificial Sequence
  derived and/or modified sequence
MFAWEIRDRLLAERVCDNDTVPSVSSINRIIRTKVQQPPNQPVPASSHSIVSTGSVTQVSSVSTDSAGSSYSISGILGITSPSADTNKRKRDEGIQESPVPNGHSLPGRDFLRKQMRGDLFTQQQLEVLDRVFERQHYSDIFTTTEPIKPEQTTEYSAMASLAGGLDDMKANLASPTPADIGSSVPGPQSYPIVTGRDLASTTLPGYPPHVPPAGQGSYSAPTLTGMVPGSEFSGSPYSHPQYSSYNDSWRFPNPGLLGSPYYYSAAARGAAPPAAATAYDRH

SEQ ID NO: 192637 - DNA, 3650 bp, Artificial Sequence
  derived and/or modified sequence
agcactgctgctctcccggcttcccgctctactccggccgggccgggtccgccacgtctggcgcgctgagcaggcccggccgcgcagcgcctaccctttcctcgctccgggccggcagtgtggggcggcgcgctgggggcgcggcgtgtctggggacatcttgtgatgttggcgagaacaggacatgatctcacatggcgagaagctctttagttccttaatcatttcacggtgccttcggacgctttttttccacctaaaacgtttagtttcagctcagtgatcagctaccccagctcggcgggggagcggaaggcttgaattattccgacctgtgagcggcccctggcaccaaaaaaaaaaaaaaaaaaaaaaaaaaaagaaaaaaaaaggcacaaaaaagtggaaacttttccctgtccattccatcaagtcctgaaaaatcaaaatggatttagagaaaaattatccgactcctcggaccagcaggacaggacatggaggagtgaatcagcttgggggggtttttgtgaatggacggccactcccggatgtagtccgccagaggatagtggaacttgctcatcaaggtgtcaggccctgcgacatctccaggcagcttcgggtcagccatggttgtgtcagcaaaattcttggcaggtattatgagacaggaagcatcaagcctggggtaattggaggatccaaaccaaaggtcgccacacccaaagtggtggaaaaaatcgctgaatataaacgccaaaatcccaccatgtttgcctgggagatcagggaccggctgctggcagagcgggtgtgtgacaatgacaccgtgcctagcgtcagttccatcaacaggatcatccggacaaaagtacagcagccacccaaccaaccagtcccagcttccagtcacagcatagtgtccactggctccgtgacgcaggtgtcctcggtgagcacggattcggccggctcgtcgtactccatcagcggcatcctgggcatcacgtcccccagcgccgacaccaacaagcgcaagagagacgaaggtattcaggagtctccggtgccgaacggccactcgcttccgggcagagacttcctccggaagcagatgcggggagacttgttcacacagcagcagctggaggtgctggaccgcgtgtttgagaggcagcactactcagacatcttcaccaccacagagcccatcaagcccgagcagaccacagagtattcagccatggcctcgctggctggtgggctggacgacatgaaggccaatctggccagccccacccctgctgacatcgggagcagtgtgccaggcccgcagtcctaccccattgtgacaggccgtgacttggcgagcacgaccctccccgggtaccctccacacgtcccccccgctggacagggcagctactcagcaccgacgctgacagggatggtgcctgggagtgagttttccgggagtccctacagccaccctcagtattcctcgtacaacgactcctggaggttccccaacccggggctgcttggctccccctactattatagcgctgccgcccgaggagccgccccacctgcagccgccactgcctatgaccgtcactgacccttggagccaggcgggcaccaaacactgatggcacctattgagggtgacagccacccagccctcctgaagatagccagagagcccatgagaccgtcccccagcatcccccacttgcctgaagctcccctcttcctctcttcctccagggactctggggccctttggtggggccgttggacttctggatgcttgtctatttctaaaagccaatctatgagcttctcccgatggccactgggtctctgcaaaccaatagactgtcctgcaaataaccgcagccccagcccagcctgcctgtcctccagctgtctgactatccatccatcataaccaccccagcctgggaaggagagcttgcttttgttgcttcagcagcacccatgtaaataccttcttgcttttctgtgggcctgaaggtccgactgagaagactgctccacccatgatgcatctcgcactcttggtgcatcaccggacatcttagacctatggcagagcatcctctctgccctgggtgaccctggcaggtgcgctcagagctgtcctcaagatggaggatgctgcccttgggccccagcctcctgctcatccctccttctttagtatctttacgaggagtctcactgggctggttgtgctgcaggctccccctgaggcccctctccaagaggagcacactttggggagatgtcctggtttcctgcctccatttctctgggaccgatgcagtatcagcagctcttttccagatcaaagaactcaaagaaaactgtctgggagattcctcagctacttttccgaagcagaatgtcatccgaggtattgattacattgtggactttgaatgtgagggctggatgggacgcaggagatcatctgatcccagccaaggaggggcctgaggctctccctactccctcagcccctggaacggtgttttctgaggcatgcccaggttcaggtcacttcggacacctgccatggacacttcacccaccctccaggaccccagcaagtggattctgggcaagcctgttccggtgatgtagacaataattaacacagaggactttcccccacacccagatcacaaacagcctacagccagaacttctgagcatcctctcggggcagaccctccccgtcctcgtggagcttagcaggcagctgggcatggaggtgctggggctggggcagatgcctaatttcgcacaatgcatgcccacctgttgatctaaggggccgcgatggtcagggccacggccaagggccacgggaacttggagagggagcttggagaactcactgtgggctagggtggtcagaggaagccagcagggaagatctgggggacagaggaaggcctcctgagggaggggcaggagagcagtgaggagctgctgtgtgacctgggagtgattttgacatgggggtgccaggtgccatcatctctttacctggggccttaattccttgcatagtctctcttgtcaagtcagaacagccaggtagagcccttgtccaaacctgggctgaatgacagtgatgagagggggcttggccttcttaggtgacaatgtcccccatatctgtatgtcaccaggatggcagagagccagggcagagagagactggacttgggatcagcaggccaggcaggtcttgtcctggtcctggccacatgtctttgctgtgggacctcagacaaaaccctgcacctctttgagccttggctgccttggtgcagcagggtcatctgtagggccaccccacagctctttccttcccctcctctctccagggagccggggctgtgagaggatcatctggggcaggccctccacttccaagcaagcagatgggggtgggcacctgaggcccaataatatttggaccaagtgggaaacaagaacactcggaggggcgggaatcagaagagcctggaaaaagacctagcccaacttcccttgtgggaaactgaggcccagcttggggaaggccaggaccatgcagggagaaaaag

SEQ ID NO: 192638 - DNA, 1176 bp, Artificial Sequence
  derived and/or modified sequence
atggacctggagaagaactaccccacccccagaaccagcagaaccggccacggcggcgtgaaccagctgggcggcgtgttcgtgaacggcagacccctgcccgacgtggtgagacagagaatcgtggagctggcccaccagggcgtgagaccctgcgacatcagcagacagctgagagtgagccacggctgcgtgagcaagatcctgggcagatactacgagaccggcagcatcaagcccggcgtgatcggcggcagcaagcccaaggtggccacccccaaggtggtggagaagatcgccgagtacaagagacagaaccccaccatgttcgcctgggagatcagagacagactgctggccgagagagtgtgcgacaacgacaccgtgcccagcgtgagcagcatcaacagaatcatcagaaccaaggtgcagcagccccccaaccagcccgtgcccgccagcagccacagcatcgtgagcaccggcagcgtgacccaggtgagcagcgtgagcaccgacagcgccggcagcagctacagcatcagcggcatcctgggcatcaccagccccagcgccgacaccaacaagagaaagagagacgagggcatccaggagagccccgtgcccaacggccacagcctgcccggcagagacttcctgagaaagcagatgagaggcgacctgttcacccagcagcagctggaggtgctggacagagtgttcgagagacagcactacagcgacatcttcaccaccaccgagcccatcaagcccgagcagaccaccgagtacagcgccatggccagcctggccggcggcctggacgacatgaaggccaacctggccagccccacccccgccgacatcggcagcagcgtgcccggcccccagagctaccccatcgtgaccggcagagacctggccagcaccaccctgcccggctaccccccccacgtgccccccgccggccagggcagctacagcgcccccaccctgaccggcatggtgcccggcagcgagttcagcggcagcccctacagccacccccagtacagcagctacaacgacagctggagattccccaaccccggcctgctgggcagcccctactactacagcgccgccgccagaggcgccgccccccccgccgccgccaccgcctacgacagacactag

SEQ ID NO: 192639 - DNA, 1176 bp, Artificial Sequence
  derived and/or modified sequence
atggatcttgagaagaattatcctacgccccggacttctcggacgggccacggaggagttaatcagctggggggagtgttcgtgaatggacggccactgccagacgtggtgaggcaaagaattgtcgagctggcccaccaaggagtgaggccctgtgacatttcccgtcaactgagagtctctcatggttgtgtttcaaaaatccttggacgctactacgagaccggaagcatcaagcctggcgtcatcggcggaagtaagccaaaagttgccacgccaaaggtcgtggagaaaatcgctgaatataagcgccagaatccaacaatgtttgcttgggagattcgggatcgtctgttagccgagagagtgtgtgataacgataccgtaccctcagtgagctccatcaaccgtataatcagaactaaggtgcaacagccaccaaaccaacccgtgcccgcttctagccattccatagttagtactggctccgtgacacaagtctcctccgtcagtacagacagcgccggctcctcatattctatcagcggaatccttgggatcactagcccgtccgccgataccaacaagcggaagagggacgagggcatccaagaaagccccgtgccaaacggccacagtctgccgggaagggattttcttcggaagcaaatgcggggggacctgtttacccagcagcaattagaagttctggatcgcgtctttgaacgtcagcattacagcgacatattcaccaccactgagccgatcaagcctgagcaaacaaccgaatactccgcaatggctagtcttgccggtggcctggacgacatgaaagcaaatctcgcaagccctactccagccgacatcggcagctccgtgcccggaccccagtcttaccccatcgtgacgggccgggacctcgccagcactactctgcccgggtacccgccgcatgtccctcctgctggacagggctcatactccgctcccaccctgactggaatggtccccggaagcgagtttagcgggagcccatactctcacccacagtacagttcctataatgattcctggaggttccccaatccgggacttcttggcagcccttattattactctgccgcagccagaggtgctgcacctcccgcggctgctactgcctatgatagacactag

SEQ ID NO: 192640 - DNA, 1176 bp, Artificial Sequence
  derived and/or modified sequence
atggacctggagaagaactaccccacccccaggaccagcaggactggacatggaggagtgaaccagctgggcggcgtgtttgtgaatggccggcccctgcctgatgtggtgcggcagagaattgtggagctggcccaccagggcgtgcggccctgtgacatcagccggcagctgcgggtgagccacggctgtgtgtccaagatcctgggccgctactatgaaacaggcagcatcaagccaggagtgattggaggcagcaagcccaaggtggccacccccaaggtggtggagaagattgctgagtacaagaggcagaaccccaccatgtttgcctgggagatccgggaccggctgctggccgagcgggtgtgtgacaatgacacagtgcccagcgtgagcagcatcaaccgcatcatccgcaccaaggtgcagcagccccccaaccagcctgtgcctgccagcagccacagcatcgtgtccactggatctgtgacccaggtgtcctctgtgtccacagacagcgctggcagcagctacagcatcagcggcatcctgggcatcaccagccccagcgctgacaccaacaagaggaagagagatgagggcatccaggagagccctgtgcccaacggccacagcctgcccggccgggacttcctgaggaagcagatgagaggagacctcttcacccagcagcagctggaggtgctggacagagtgtttgagcggcagcactacagcgacatcttcaccaccacagagcccatcaagccagagcagaccacagagtacagcgccatggccagcctggccggcggcctggatgacatgaaggccaacctggccagccccaccccagctgacatcggcagctctgtgcccggcccccagagctaccccatcgtgacaggccgggacctggccagcaccaccctgcccggctacccaccccacgtgcccccagctggccagggcagctacagcgcccccaccctgaccggcatggtgcccggcagcgagttcagcggcagcccctacagccacccccagtacagcagctacaatgacagctggaggttccccaaccctggcctgctgggcagcccctactactacagcgctgctgcccggggagctgcccctcctgctgctgccacagcctatgacagacactag

SEQ ID NO: 192641 - DNA, 1176 bp, Artificial Sequence
  derived and/or modified sequence
atggacctggagaagaactaccccaccccccggaccagccggaccgggcatggtggggttaaccagctaggcggtgttttcgtgaacgggagaccactgcccgatgtggtgaggcagaggatagtggaactcgcacaccagggcgtgcggccttgtgatatctccagacagctcagggtctctcatggttgtgtcagtaagatcttggggcgttactacgagacgggatcaattaaacccggggtgattggagggagcaagcctaaggttgcaacccctaaggtggttgaaaagattgctgagtataaacgccaaaatcccactatgtttgcctgggagattcgggataggttactggctgaacgggtctgcgacaatgatactgtgccaagcgtttcttctattaacagaattatacggacgaaggtgcagcagccacctaatcagcccgtgccagcgagttcgcattctatcgtcagcaccggaagcgttacacaggtctctagcgtgtccacagactcagcggggtcttcatattcaatctcaggcattttgggcatcacctccccgtcagcagataccaataagaggaagcgcgatgaaggaattcaggaatcccccgtccctaacgggcacagcctgcccggtcgggacttcctgaggaagcagatgcggggggacttgttcacacagcagcagctcgaggtcctggaccgcgttttcgagagacagcactattccgatatttttacaaccaccgagcccattaagcccgaacagactacagaatatagcgccatggcatccttagcgggcggactcgacgacatgaaggccaacctcgcctccccaactcccgccgatataggttcaagcgtccctggtccacaaagctatcccattgttaccggacgcgatctggccagcactactctccccggctatccaccacacgtaccccccgctgggcaaggaagttacagcgccccgacgttaaccggcatggtgcccgggagcgaattctcagggtcaccctacagccacccacagtacagcagttataacgactcatggcgttttccaaatccaggcttgcttgggtccccttactactactctgctgctgcccgaggagccgcgcctcctgctgcagccactgcttacgaccgccattag

SEQ ID NO: 192642 - DNA, 8536 bp, Artificial Sequence
  derived and/or modified sequence
aaaaaaaagaaaaaaaaaggcacaaaaaagtggaaacttttccctgtccattccatcaagtcctgaaaaatcaaaatggatttagagaaaaattatccgactcctcggaccagcaggacaggacatggaggagtgaatcagcttgggggggtttttgtgaatggacggccactcccggatgtagtccgccagaggatagtggaacttgctcatcaaggtgtcaggccctgcgacatctccaggcagcttcgggtcagccatggttgtgtcagcaaaattcttggcaggtattatgagacaggaagcatcaagcctggggtaattggaggatccaaaccaaaggtcgccacacccaaagtggtggaaaaaatcgctgaatataaacgccaaaatcccaccatgtttgcctgggagatcagggaccggctgctggcagagcgggtgtgtgacaatgacaccgtgcctagcgtcagttccatcaacaggatcatccggacaaaagtacagcagccacccaaccaaccagtcccagcttccagtcacagcatagtgtccactggctccgtgacgcaggtgtcctcggtgagcacggattcggccggctcgtcgtactccatcagcggcatcctgggcatcacgtcccccagcgccgacaccaacaagcgcaagagagacgaaggtattcaggagtctccggtgccgaacggccactcgcttccgggcagagacttcctccggaagcagatgcggggagacttgttcacacagcagcagctggaggtgctggaccgcgtgtttgagaggcagcactactcagacatcttcaccaccacagagcccatcaagcccgagcagaccacagagtattcagccatggcctcgctggctggtgggctggacgacatgaaggccaatctggccagccccacccctgctgacatcgggagcagtgtgccaggcccgcagtcctaccccattgtgacaggccgtgacttggcgagcacgaccctccccgggtaccctccacacgtcccccccgctggacagggcagctactcagcaccgacgctgacagggatggtgcctgggagtgagttttccgggagtccctacagccaccctcagtattcctcgtacaacgactcctggaggttccccaacccggggctgcttggctccccctactattatagcgctgccgcccgaggagccgccccacctgcagccgccactgcctatgaccgtcactgacccttggagccaggcgggcaccaaacactgatggcacctattgagggtgacagccacccagccctcctgaagatagccagagagcccatgagaccgtcccccagcatcccccacttgcctgaagctcccctcttcctctcttcctccagggactctggggccctttggtggggccgttggacttctggatgcttgtctatttctaaaagccaatctatgagcttctcccgatggccactgggtctctgcaaaccaatagactgtcctgcaaataaccgcagccccagcccagcctgcctgtcctccagctgtctgactatccatccatcataaccaccccagcctgggaaggagagcttgcttttgttgcttcagcagcacccatgtaaataccttcttgcttttctgtgggcctgaaggtccgactgagaagactgctccacccatgatgcatctcgcactcttggtgcatcaccggacatcttagacctatggcagagcatcctctctgccctgggtgaccctggcaggtgcgctcagagctgtcctcaagatggaggatgctgcccttgggccccagcctcctgctcatccctccttctttagtatctttacgaggagtctcactgggctggttgtgctgcaggctccccctgaggcccctctccaagaggagcacactttggggagatgtcctggtttcctgcctccatttctctgggaccgatgcagtatcagcagctcttttccagatcaaagaactcaaagaaaactgtctgggagattcctcagctacttttccgaagcagaatgtcatccgaggtattgattacattgtggactttgaatgtgagggctggatgggacgcaggagatcatctgatcccagccaaggaggggcctgaggctctccctactccctcagcccctggaacggtgttttctgaggcatgcccaggttcaggtcacttcggacacctgccatggacacttcacccaccctccaggaccccagcaagtggattctgggcaagcctgttccggtgatgtagacaataattaacacagaggactttcccccacacccagatcacaaacagcctacagccagaacttctgagcatcctctcggggcagaccctccccgtcctcgtggagcttagcaggcagctgggcatggaggtgctggggctggggcagatgcctaatttcgcacaatgcatgcccacctgttgatctaaggggccgcgatggtcagggccacggccaagggccacgggaacttggagagggagcttggagaactcactgtgggctagggtggtcagaggaagccagcagggaagatctgggggacagaggaaggcctcctgagggaggggcaggagagcagtgaggagctgctgtgtgacctgggagtgattttgacatgggggtgccaggtgccatcatctctttacctggggccttaattccttgcatagtctctcttgtcaagtcagaacagccaggtagagcccttgtccaaacctgggctgaatgacagtgatgagagggggcttggccttcttaggtgacaatgtcccccatatctgtatgtcaccaggatggcagagagccagggcagagagagactggacttgggatcagcaggccaggcaggtcttgtcctggtcctggccacatgtctttgctgtgggacctcagacaaaaccctgcacctctttgagccttggctgccttggtgcagcagggtcatctgtagggccaccccacagctctttccttcccctcctctctccagggagccggggctgtgagaggatcatctggggcaggccctccacttccaagcaagcagatgggggtgggcacctgaggcccaataatatttggaccaagtgggaaacaagaacactcggaggggcgggaatcagaagagcctggaaaaagacctagcccaacttcccttgtgggaaactgaggcccagcttggggaaggccaggaccatgcagggagaaaaagcagacttcctctggccaccgctaagtattttgttccctaagtcccccacagggtggtggaacagaagagaaaactaaggctcagcaaggtggagtcctcaagcagtgactggtgggggtggggctgggactcgggctcctgacccccaacccatggtgttccctgtcaccctggtctatccacatctcctattcctgaggagagttgacagtaagagcagtgagagatggttctgggccccatgccctagacaatcagtctgtaagaactgccaaggaagcctggtcacccaggccagggatggagcccagcgagctcacagcaggcacatgcacccccgcccccacccagaacctgcggggcaaagaagggaggtagttggggccagagtccacctccaggagccagggtgagctggctgcagcttccacctgtcaggtaaggtaggagaaggtatgttacctggcatctctctccctgcctccctccatttagcaggaagtggtggggtcaggggtcttcagcacagacttcttgagcctctgccccctgtcacccttcttttggaatgatgtgtacccacatctttggatcctgccctccttgtggttccaggctgttgggaggaggtcagcctcccctgaaccagctgcctgaggcatgcagcatccttcctcggcaaagcccacctggctcacagcggccccctctccccatcctgttcctcttcttgccctgtaatgagctccccccatacctttcctccctcacctgaggctttgctggtcctcagattggttttgtatttgtgagacaaccacttgactcctgggctgccaggcggaagcacaagcgcacatggatgcacacggatgttctcacacacacacgcccgctctcaccaattcacagcacctcgtggtccagcggagctgcctgggagcttggtgaggatggctccaaaggacacaagccgttgagtagatgccagagaattctgaatggaaaacacaagtccggggcctcaccagcatcgtggcagaaggcctggggcatttctccatgggccttcttccctgtgttcgagctctgacttttggaaaaggacattgtggattttatgaaaatttctcataccatcagtctagctccaacctagaaaaattggatgatatatcaaacccaacatccctttcccaaggcaccttagttaaggctagcccttccataactgacattgtacggtgctttgcaatcctcaaccactctgtggagcaaagagcatgatgcctactttatagacggggaaattgacatttggggctctcacggcaacatagaggcgaagtgaattctcagatctccaggccccattctctctccaccgagttgtgctcctgtcatgggagtgtatggcttaaagacactcccccacccccattccctagaaatcccccagacccacaatcaggcaagaaagaacagggacccagaggctggcctgacctaggggcctgcaggttggcggctttgtttcctaagaacattgaaacctgcggagtctttgaccaaatccacaacagtgcttctgaggtttcatccagactctttcccagctgtccctgaggttcagagggtatcagagtcaattcaaggccatgccataatccctgaccaggcctggacatgggtccagccctgactccaggggtccaggtgccaaggtcatgtgctgtcccccacttccctttctttgccttcgcactttggaacaggctccaggcctggctgtgacagtatgcaggagtgcccaagccagggccaccagggtgtccacagcccctggaaacacagatcacaatctcaagtcccctgaatgaactgcttcctgggtgaacggggtggtgtagccttgccactcgggcagcgcaccagacagtacggtgcagcagtgcccgagatgcccagaagtgtgcctgcccccctgagtggcattcaagtatgaaaacttgtaaaattttctgtcggcctaaagaaaaatgtccatgggccaaacttgacccactgggcaccagcctgtgagccccaatgcctgtcaattgccccctttctcattcacctcctgtcctttgttgcagatttggaggagatgggagcccagagaggtgagagatgtgcttcagggtgtccagcaaggcaggggtagaaacgggcacgcccagagcctgccactctcccaggcctcatcttgggctcttgcaagtcttgcgctttgaagatggagttgggtggaaggtcagaggcgctggggacgggattggggagctgctgggttttcaggggaggtcagtgctgcttgggcacctttcacatgtgcagggaagagactcagatgtggccacagggcactgaggggtgaaatccatttaccagaagtcacgctccagaacgactgcccagccttggcagccagtggctccagccaccccctcctcatgacattcagccagaattgagctccaagccagggaagcaaatcttaaaaaccaaccaagcaccctgacacagccctagaaacacgatgagtctgaaatacagcttcccaggaggggagtctaagatacagcttcccgggagggtggaaaccaactcctgccccacggccaggccaggcccaggcaggcatgggtggatcccacagggctctgagctagaccggctccacggtggccccactacgaggccagttctgcagtcttggccttgtcacccatcgagaggctgctctgatggttcccagccacacaccagctctcctggggaaactatttctttcgttcttttggcctcggagaggtccgaggcaagtacatttcttaaaaggtaataaaatgcattattggaaagttggacagtcaggccacgactcctagcccacggcgtgccccacctcccagcagccccttcagccccttgcccctgttgccccaaacctcagggttccctcttgcatattcatgggggaaccacagtgctgatgtgtacttccccactgtcagctcggctgcacctcgtgtggcgccaggtcccaagggcctctgcagaggccaggctgtgagccccttgcctgcctgctcccctgatgaggcaacagcttctctgaaatgagctgccggccaggagcaggcaggcaccagcctgtctttccttttctggtaattcctcagcactgaggctccgttcctgggcaccccaggattgaagggaacctcagaatcatgtcactgccattctagagtttcaatccaaggggtcccctttagctcatctccaagatgggtaaacgtagccaccattcagaaagcccagaaattcttgttcccacatcttagacccctgagcaacacaaggagaaaatgcagctgcttacctattaatatctactgagggacaatcagcaaagcctcaaaggagtcgtctcaggtagggtacttggcctgtggcaggagagacagaggcacaaacccacccacccatcagcttccggtggctgatcggggcccagggagggaagcaggtgaaacagcagggtgggggtgacttggcagtcgtgcatctcctccccgactctgaggcctggcaggaggaggccacaccagcctcacctgccctgacccccgccccccaccctgtgaccctgtggctatggccgctggtcgcccttgtccccaaaatcaccatgcctgtggccacgtccctcatcttctccaaaagcatcattaagaacaagtgattttggatgatggatttttgatttacaaacggcgcatttcccttggagtggaacagaaaggaaaccatttaatggcgcccttcttttcaagcatgaatacattttaatgaaactattttattgtatttgaggaaatggagagttgaacattccaaccaatcaatagccaattaattgctataaagctaaaaagaaaataaataaatcctgagtctattttaaacactgcaaaaagttcagagcctcagaatctggccttcccctccataaggtgcacgagcatgtaaacacacacacacacacacacacacacacacacacactcactcactcccctacacctcagacatacttgaaactcagaaacagcactgagtctccccatgccaattcttgcctgctgtcttcgacttgggtcagagaaggtgagcagacccggcagcagcctgtcccggggctcaggaagaggcaggcccatcccctggccccaagcacccagcacaacagagggtggcgggcagtgagggcctggcgttgcctgggccccacttctcagccccagctgctgggcctccaaggttgggctgaggatggagttttggctctgggtttgccctgactcctgctggaagacgctgccctggtttttcaccctctagtggccttggacattgagtatttgtagaaatgcagattacattgcaaatggaaacctttgccaggaagacacatgcattttgcttttaattctttgagacatttgattttgtcttagggactgacctttcagcatcaaagaaatacatatctactgtatccgccaaagtttgtgatgcctgcatagacgcttacttgtaaaaaaaaaaaaatacaaaaaaatacaaaaaaaccaacaacaaaaaccacaattgaattgcctttgaaagtgggagatgatctgtctccaacggattgaaaaaaaaaaatgcttcttaaaaaatgtgtatgttttgtattctttttttctagtagaaaataactgacttgaaatattggtggtttttttcttagtgacgtgtgttgcttttgtgtgtaataatatttgaatgtaattacagcagtgccaatttgccaaagatgttggacatatttttcttttttggggaggagggcagggctaggggtgggacttgggagaaaacaggggtggggttttggtttaattttttttttacttttttttccttgtcaaacctgaaatttgtggcttccttttaagttaaatggttgactgcaacacctttattttagattagttggagaaacatgcaataagattggcgtagtttcaatatctgtgtgtcttttcatgagtggctgttacttgtgaagaattgattttatgtaacctttatgtgagataattatttgtaaatatttgccataattttattggttcctaaaataaaagtaattttttaagttca

SEQ ID NO: 192643 - DNA, 1176 bp, Artificial Sequence
  derived and/or modified sequence
atggacctggaaaaaaattacccgactccccgaacttcacggacgggccacggaggggttaatcagcttggtggggtgttcgttaatggacgccctttaccagacgtggtcagacagaggattgtagagctcgctcaccagggagtgcgaccttgtgacatctctcgccagctgcgagtgtcccatggttgtgtttccaaaatcctcggacgctactatgaaaccgggagtattaagcccggagtcatcggcggtagcaaacccaaggtagccaccccaaaagtggtcgagaaaatcgcagaatataagaggcagaaccctaccatgtttgcctgggagatcagagatcgcctactcgcagaaagagtgtgtgataatgacaccgtaccatctgtcagctccatcaaccggattattcggactaaagtgcagcagcctccaaaccaacctgttccagcctcctcccatagcattgtgagtacagggagtgtaacgcaagtatccagcgtgagcactgactcagcagggagttcatattctatcagcgggatactgggtattacaagtcctagtgctgacaccaataagagaaagcgcgacgaggggatccaggagtcaccagtgccgaacggtcactcattacctggcagagactttctcaggaagcagatgaggggtgacctgttcacccagcagcaattggaggtactcgaccgggtgtttgagaggcaacattactcagatatttttacgacgactgagcctatcaagcctgaacaaaccacagagtatagcgctatggcgagcctggctgggggattggacgatatgaaagcaaatcttgcctcacccacacccgcagacatcggttcgagcgtcccaggaccccagtcctacccaattgtgacagggagggatttagcctccacgactctgcccggttacccgcctcacgtacccccagcaggacaaggctcctatagcgcgcctaccctcaccgggatggtgcctggctcagagtttagcgggtccccatattcccaccctcaatactcgagttataacgattcatggaggtttcccaatccaggcctgttaggtagcccttattattattccgcagcagcacgaggtgcggctccccctgcggctgccacagcctacgataggcactag

SEQ ID NO: 192644 - DNA, 1176 bp, Artificial Sequence
  derived and/or modified sequence
atggatttagagaaaaattatccgactcctcggaccagcaggacaggacatggaggagtgaatcagcttgggggggtttttgtgaatggacggccactcccggatgtagtccgccagaggatagtggaacttgctcatcaaggtgtcaggccctgcgacatctccaggcagcttcgggtcagccatggttgtgtcagcaaaattcttggcaggtattatgagacaggaagcatcaagcctggggtaattggaggatccaaaccaaaggtcgccacacccaaagtggtggaaaaaatcgctgaatataaacgccaaaatcccaccatgtttgcctgggagatcagggaccggctgctggcagagcgggtgtgtgacaatgacaccgtgcctagcgtcagttccatcaacaggatcatccggacaaaagtacagcagccacccaaccaaccagtcccagcttccagtcacagcatagtgtccactggctccgtgacgcaggtgtcctcggtgagcacggattcggccggctcgtcgtactccatcagcggcatcctgggcatcacgtcccccagcgccgacaccaacaagcgcaagagagacgaaggtattcaggagtctccggtgccgaacggccactcgcttccgggcagagacttcctccggaagcagatgcggggagacttgttcacacagcagcagctggaggtgctggaccgcgtgtttgagaggcagcactactcagacatcttcaccaccacagagcccatcaagcccgagcagaccacagagtattcagccatggcctcgctggctggtgggctggacgacatgaaggccaatctggccagccccacccctgctgacatcgggagcagtgtgccaggcccgcagtcctaccccattgtgacaggccgtgacttggcgagcacgaccctccccgggtaccctccacacgtcccccccgctggacagggcagctactcagcaccgacgctgacagggatggtgcctgggagtgagttttccgggagtccctacagccaccctcagtattcctcgtacaacgactcctggaggttccccaacccggggctgcttggctccccctattattatagcgctgccgcccgaggagccgccccacctgcagccgccactgcctatgaccgtcactga

SEQ ID NO: 192645 - DNA, 1367 bp, Artificial Sequence
  derived and/or modified sequence
aagcttttggaccctcgtacagaagctaatacgactcactatagggaaataagagagaaaagaagagtaagaagaaatataagagccaccatggatttagagaaaaattatccgactcctcggaccagcaggacaggacatggaggagtgaatcagcttgggggggtttttgtgaatggacggccactcccggatgtagtccgccagaggatagtggaacttgctcatcaaggtgtcaggccctgcgacatctccaggcagcttcgggtcagccatggttgtgtcagcaaaattcttggcaggtattatgagacaggaagcatcaagcctggggtaattggaggatccaaaccaaaggtcgccacacccaaagtggtggaaaaaatcgctgaatataaacgccaaaatcccaccatgtttgcctgggagatcagggaccggctgctggcagagcgggtgtgtgacaatgacaccgtgcctagcgtcagttccatcaacaggatcatccggacaaaagtacagcagccacccaaccaaccagtcccagcttccagtcacagcatagtgtccactggctccgtgacgcaggtgtcctcggtgagcacggattcggccggctcgtcgtactccatcagcggcatcctgggcatcacgtcccccagcgccgacaccaacaagcgcaagagagacgaaggtattcaggagtctccggtgccgaacggccactcgcttccgggcagagacttcctccggaagcagatgcggggagacttgttcacacagcagcagctggaggtgctggaccgcgtgtttgagaggcagcactactcagacatcttcaccaccacagagcccatcaagcccgagcagaccacagagtattcagccatggcctcgctggctggtgggctggacgacatgaaggccaatctggccagccccacccctgctgacatcgggagcagtgtgccaggcccgcagtcctaccccattgtgacaggccgtgacttggcgagcacgaccctccccgggtaccctccacacgtcccccccgctggacagggcagctactcagcaccgacgctgacagggatggtgcctgggagtgagttttccgggagtccctacagccaccctcagtattcctcgtacaacgactcctggaggttccccaacccggggctgcttggctccccctattattatagcgctgccgcccgaggagccgccccacctgcagccgccactgcctatgaccgtcactgagctgccttctgcggggcttgccttctggccatgcccttcttctctcccttgcacctgtacctcttggtctttgaataaagcctgagtaggaaggcggccgc

SEQ ID NO: 192646 - protein, 109 aa, Artificial Sequence
  derived and/or modified sequence
MWSTRSPNSTAWPLSLEPDPGMSGWPDGRMETSTPTIMDIVVIAGVIAAVAIVLVSLLFVMLRYMYRHKGTYHTNEAKGTEFAESADAALQGDPALQDAGDSSRKEYFI

SEQ ID NO: 192647 - DNA, 330 bp, Artificial Sequence
  derived and/or modified sequence
atgtggtcaacaaggtcccccaactccaccgcgtggcccctgtccttggaacctgaccccggaatgtctgggtggcccgatgggagaatggagacctcaactcctacgattatggacattgtggtaatcgcaggagtgatcgctgccgtcgccatagttctcgtgagccttttgtttgtaatgttacgatatatgtacagacataaaggaacttaccacacaaatgaggcgaagggaaccgagtttgcggagtctgcagacgccgccttacagggcgaccccgccctgcaggatgcgggcgatagtagccggaaggagtattttatctag

SEQ ID NO: 192648 - DNA, 932 bp, Artificial Sequence
  derived and/or modified sequence
cgggagcgcgaccctcccccggcccggcctggcccggcctggccagtccccgcggtctctgcccgggctgacgcccaggaatgtggtcgacgagaagccccaacagcacggcgtggcctctcagcctcgagcctgatccagggatgtctggatggccggatggcagaatggagacctccacccccaccataatggacattgtcgtcattgcaggtgtgattgctgctgtggccatcgtcctagtctccctcctcttcgtcatgctgcgctacatgtaccggcacaagggcacgtaccacaccaatgaggccaagggcacggagtttgctgagagtgcagatgcagccctgcagggagaccctgccctccaagatgctggtgatagcagcagaaaggagtactttatttgagggacaacagacttcacttccctgaatgcctcccccatctccatcaggaaaaatacaccccatcgcccagcacccctgctgataccaccagacagagagagagagcacttgattcttcccgagatagccacctggaaacactaggtgcctgcccagggaggaacggaggaggactcgcgctacaagaggccactcccagggacccagggaggcgatggccaccccagaggccaccttttgctccacggaggtgggagaaaatctgggcacatggggccccctgggcagtgcaggacaacatcagctcactggcaggaaagtccttgttgagggtgagggggtgctggggtacccgggggctggggaagcaaggaaataagtcatctgtatgctgactggggataatggcatcaaatgtcagtccttgacatttggggggaacagcaggtgccagagctaaaaggtacctttgtctgccattgatccagctcagaacgattggaaataaatttgaaatgtaac

SEQ ID NO: 192649 - DNA, 330 bp, Artificial Sequence
  derived and/or modified sequence
atgtggagcaccaggagccccaacagcacagcctggcccctgagcctggagccagaccccggcatgagcggctggccagatggccgcatggagaccagcacccccaccatcatggacatcgtggtgattgctggggtgattgctgctgtggccatcgtgctggtgtccctgctgtttgtgatgctgcgctacatgtaccgccacaagggcacctaccacaccaatgaggccaagggcacagaatttgctgagagcgcagatgctgccctgcagggcgaccctgccctgcaggatgctggggacagcagcaggaaggagtacttcatctag

SEQ ID NO: 192650 - DNA, 330 bp, Artificial Sequence
  derived and/or modified sequence
atgtggagcacccggagccccaacagcaccgcctggcccctgagcttggagccggaccccggtatgagcggctggcctgacgggaggatggagacgagcaccccgactattatggatatcgtcgtcatcgccggcgtgattgctgccgtggccattgtgttagtgagtctgctattcgtcatgctcaggtatatgtaccgccataaggggacataccataccaatgaagccaagggcacagaatttgcggaatcagccgacgcggcactgcagggcgaccccgcgctccaggacgccggagactctagccgaaaggagtactttatctag

SEQ ID NO: 192651 - DNA, 330 bp, Artificial Sequence
  derived and/or modified sequence
atgtggtctacaaggtcacccaatagtaccgcgtggccgttgtctctcgagcccgacccaggaatgtctggctggcccgatggaagaatggaaaccagcactccaacaatcatggacattgtcgtgatagcaggagtcatcgcagccgtcgcaatagttctcgtgagtctcctcttcgtgatgttgcggtatatgtacaggcataaggggacctatcacaccaacgaagccaagggaaccgagttcgccgagtccgccgatgccgctctgcagggcgacccggctcttcaggacgctggtgactccagccggaaagagtatttcatttag

SEQ ID NO: 192652 - DNA, 330 bp, Artificial Sequence
  derived and/or modified sequence
atgtggagcaccagaagccccaacagcaccgcctggcccctgagcctggagcccgaccccggcatgagcggctggcccgacggcagaatggagaccagcacccccaccatcatggacatcgtggtgatcgccggcgtgatcgccgccgtggccatcgtgctggtgagcctgctgttcgtgatgctgagatacatgtacagacacaagggcacctaccacaccaacgaggccaagggcaccgagttcgccgagagcgccgacgccgccctgcagggcgaccccgccctgcaggacgccggcgacagcagcagaaaggagtacttcatctag

SEQ ID NO: 192653 - protein, 400 aa, Artificial Sequence
  derived and/or modified sequence
MMDLRNTPAKSLDKFIEDYLLPDTCFRMQINHAIDIICGFLKERCFRGSSYPVCVSKVVKGGSSGKGTTLRGRSDADLVVFLSPLTTFQDQLNRRGEFIQEIRRQLEACQRERAFSVKFEVQAPRWGNPRALSFVLSSLQLGEGVEFDVLPAFDALGQLTGGYKPNPQIYVKLIEECTDLQKEGEFSTCFTELQRDFLKQRPTKLKSLIRLVKHWYQNCKKKLGKLPPQYALELLTVYAWERGSMKTHFNTAQGFRTVLELVINYQQLCIYWTKYYDFKNPIIEKYLRRQLTKPRPVILDPADPTGNLGGGDPKGWRQLAQEAEAWLNYPCFKNWDGSPVSSWILLAESNSADDETDDPRRYQKYGYIGTHEYPHFSHRPSTLQAASTPQAEEDWTCTIL

SEQ ID NO: 192654 - DNA, 1203 bp, Artificial Sequence
  derived and/or modified sequence
atgatggatcttcggaatacccccgcaaaatcgctggataaattcatcgaagactatcttcttcccgatacctgcttcaggatgcagattaatcatgctatcgacattatttgcgggtttctaaaggaacgctgtttccggggctcctcctaccctgtatgcgttagcaaggttgtaaaaggtgggtctagtggtaagggcaccactctaaggggacgttcagacgccgacttggtggttttcctgagtccgctcaccactttccaggatcagctaaacagacgcggggaattcatccaggaaatcagacggcagctggaggcatgccaaagggaacgtgccttcagcgttaaattcgaggtccaagccccaagatgggggaacccccgggcactttccttcgtcctttcttcgctgcagctgggcgagggagtggagtttgatgtgctgccggccttcgacgcccttggccaacttacaggcggttataaacccaaccctcaaatctacgtgaaactgatagaggaatgcaccgatctacagaaggaaggagaattctccacgtgttttactgaactgcaaagggatttcttaaagcagcgccctacaaagctgaagagcctgatcagactggtgaagcattggtatcagaactgcaagaagaaacttggtaagctgccacctcagtatgccctcgagctgctgacagtgtacgcctgggaacgcgggagtatgaaaacccacttcaataccgcgcagggattccgtaccgttttggagctggtgatcaactatcagcagctgtgcatttactggaccaaatactacgactttaagaatcccatcatagaaaaatatttgaggcgtcaactaacaaagcctagacctgtgattctggatcccgctgatcccaccggtaaccttggtgggggcgatccgaaaggctggcggcaattggctcaggaggctgaggcttggctgaattacccttgttttaagaactgggatggaagtcccgtgagttcctggatcctactggcagagtctaattccgctgacgatgagacagacgatccaaggcgataccagaagtacggttatatcggcacgcacgagtatccccattttagccacagaccatccacgctccaggccgcttctactccccaggccgaggaggattggacctgcaccatcctttag

SEQ ID NO: 192655 - DNA, 1203 bp, Artificial Sequence
  derived and/or modified sequence
atgatggacctgaggaacaccccagccaagagcctggacaagttcatcgaggactacctgctgcctgacacctgcttcaggatgcagatcaaccacgccatcgacatcatctgtggcttcctgaaggagcgctgcttccggggcagcagctaccctgtgtgtgtgtccaaggtggtgaagggcggcagcagcggcaagggcaccaccctgcggggccgcagtgatgctgacctggtggtgttcctgagccccctgaccaccttccaggaccagctgaacagaagaggagagttcatccaggagatccggcggcagctggaggcctgccagcgggagcgggccttctctgtgaagtttgaggtgcaggccccccgctggggcaacccccgggccctgagctttgtgctgagcagcctgcagctgggggagggcgtggagtttgatgtgctgcctgcctttgatgccctgggccagctgaccggcggctacaagcccaacccccagatctacgtgaagctgattgaggagtgcacagacctgcagaaggagggggagttcagcacctgcttcacagagctgcagagggacttcctgaagcagaggcccaccaagctgaagagcctcatccggctggtgaagcactggtaccagaactgcaagaagaagctgggcaagctgcccccccagtatgccctggagctgctgactgtgtatgcctgggagcggggctccatgaagacccacttcaacacagcccagggcttcagaacagtgctggagctggtgatcaactaccagcagctgtgcatctactggaccaagtactatgacttcaagaaccccatcatcgagaagtacctgcggcggcagctgaccaagcccaggcctgtgatcctggaccctgctgaccccactggaaacctgggcggcggggaccccaagggctggaggcagctggcccaggaggccgaggcctggctgaactacccctgcttcaagaactgggatggcagccctgtgtcctcctggatcctgctggccgagagcaacagcgcagatgatgaaacagatgacccccggcgctaccagaagtatggctacatcggcacccatgagtacccccacttcagccaccggcccagcaccctgcaggccgccagcaccccccaggccgaggaggactggacctgcaccatcctgtag

SEQ ID NO: 192656 - DNA, 1203 bp, Artificial Sequence
  derived and/or modified sequence
atgatggacctgcggaacacccccgccaagagcctggacaagttcatcgaggattaccttttaccggatacatgcttcagaatgcagattaatcatgctattgatattatctgtggctttctgaaggagaggtgcttcagggggtctagctatcccgtgtgtgtctctaaagtagttaagggggggtcatccggcaaaggaaccacactgaggggccgatcagacgccgacttggtcgtgtttctttccccactgacaacctttcaggaccaacttaatcggcggggagaattcatccaggaaattcgcaggcagctcgaggcatgtcaaagagaaagggcattctcagtaaaatttgaagtccaggcccctcgctggggcaatccaagggccctgtcatttgtgttgtcctctctgcagctgggagagggggtagaattcgacgtgctgccagcgttcgacgccctgggtcagctaacgggcggttacaagcccaatcctcaaatctacgtgaagttgatcgaggaatgcacagacctgcagaaagaaggcgaatttagcacctgttttacggaacttcagcgagatttcctaaagcaaaggcctaccaagctgaaatctcttatccgcctcgttaagcactggtatcagaactgcaagaagaaactcgggaagctgccacctcagtacgcacttgagcttcttaccgtctacgcttgggagaggggtagcatgaagacgcattttaacactgctcaaggttttcgcactgtccttgagctggtgattaattaccagcaactatgtatatactggacaaagtactacgatttcaagaatccaatcatcgagaagtatttgaggaggcagctcaccaagcctcgcccagtcatcttggaccctgccgaccccacggggaatctgggggggggcgatccaaaaggttggcgccagttagcccaggaggcggaggcttggttaaactacccatgtttcaagaactgggatggcagcccagtgtcatcctggatcctgcttgccgagagtaactcagccgacgacgagaccgatgatccccggcggtaccaaaagtacggctatattggtacccacgaatatccacatttcagccatcgtccctccaccctgcaggccgcatcaacaccccaggcagaagaagattggacttgtactatcctgtag

SEQ ID NO: 192657 - DNA, 1203 bp, Artificial Sequence
  derived and/or modified sequence
atgatggatctccggaatacacctgccaaatcactggataagttcattgaagactacctcctccctgatacgtgcttccgcatgcagatcaaccatgctattgatataatttgtggctttctcaaagagcgttgctttcggggatcctcataccccgtttgtgttagtaaggttgtaaaggggggaagctctggcaaaggcactacactgcgaggccgttcagatgccgacctcgtggtcttcctctcacccttgacgacattccaagatcaactgaacagacggggagagtttatacaggagatccgccgacagcttgaggcctgccaacgagagagagctttctcggtcaaattcgaggtgcaggccccacgctggggcaacccacgagcgctgagcttcgtgctgagtagcctgcaacttggggagggggtggaattcgatgttctcccagccttcgacgcactgggccaattaactggcggatacaaacctaatccccagatctatgttaagctgattgaggagtgcactgatcttcaaaaggaaggcgagttcagcacgtgcttcacagagctgcaaagagacttccttaaacagcgtccaacaaagctgaaaagcctgatccggctcgtcaagcactggtaccagaactgcaagaagaagctgggcaaactccccccacaatacgcgctggagttgctaactgtttacgcctgggaacgtggctcgatgaagacccacttcaacactgcccagggatttaggactgttctcgagctggttataaattaccagcagctctgcatctattggactaagtattacgatttcaaaaaccctattattgagaagtacctccgaaggcagctgacaaagccccgaccggtaattctggatcctgccgaccctacggggaatctgggaggtggtgatcctaagggttggcgccagttagcgcaggaagcggaggcctggctgaattacccttgtttcaaaaattgggacggaagccccgtcagtagctggatcctgctggctgaatcaaactcagccgacgacgagacagatgatccgaggaggtatcagaaatatgggtacatcggcacccacgaatatccccacttcagccaccggccttcgaccttgcaggcggcaagcacgccgcaggccgaagaagactggacctgcactatattatag

SEQ ID NO: 192658 - DNA, 1816 bp, Artificial Sequence
  derived and/or modified sequence
gcatttccagagcagagttcagagaaaggctgggctgcttgttgctggctaaaggacaaagggtaagtttcaggaagcagaagagtgagcagatgaaattcagcactgggatcaggggagtgtctgatttgcaaaaggaaagtgcaaagacagctcctcccttctgaggaaacgaaaccaacagcagtccaagctcagtcagcagaagagataaaagcaaacaggtctgggaggcagttctgttgccactctctctcctgtcaatgatggatctcagaaataccccagccaaatctctggacaagttcattgaagactatctcttgccagacacgtgtttccgcatgcaaatcaaccatgccattgacatcatctgtgggttcctgaaggaaaggtgcttccgaggtagctcctaccctgtgtgtgtgtccaaggtggtaaagggtggctcctcaggcaagggcaccaccctcagaggccgatctgacgctgacctggttgtcttcctcagtcctctcaccacttttcaggatcagttaaatcgccggggagagttcatccaggaaattaggagacagctggaagcctgtcaaagagagagagcattttccgtgaagtttgaggtccaggctccacgctggggcaacccccgtgcgctcagcttcgtactgagttcgctccagctcggggagggggtggagttcgatgtgctgcctgcctttgatgccctgggtcagttgactggcggctataaacctaacccccaaatctatgtcaagctcatcgaggagtgcaccgacctgcagaaagagggcgagttctccacctgcttcacagaactacagagagacttcctgaagcagcgccccaccaagctcaagagcctcatccgcctagtcaagcactggtaccaaaattgtaagaagaagcttgggaagctgccacctcagtatgccctggagctcctgacggtctatgcttgggagcgagggagcatgaaaacacatttcaacacagcccagggatttcggacggtcttggaattagtcataaactaccagcaactctgcatctactggacaaagtattatgactttaaaaaccccattattgaaaagtacctgagaaggcagctcacgaaacccaggcctgtgatcctggacccggcggaccctacaggaaacttgggtggtggagacccaaagggttggaggcagctggcacaagaggctgaggcctggctgaattacccatgctttaagaattgggatgggtccccagtgagctcctggattctgctggctgaaagcaacagtgcagacgatgagaccgacgatcccaggaggtatcagaaatatggttacattggaacacatgagtaccctcatttctctcatagacccagcacactccaggcagcatccaccccacaggcagaagaggactggacctgcaccatcctctgaatgccagtgcatcttgggggaaagggctccagtgttatctggaccagttccttcattttcaggtgggactcttgatccagagaggacaaagctcctcagtgagctggtgtataatccaggacagaacccaggtctcctgactcctggccttctatgccctctatcctatcatagataacattctccacagcctcacttcattccacctattctctgaaaatattccctgagagagaacagagagatttagataagagaatgaaattccagccttgactttcttctgtgcacctgatgggagggtaatgtctaatgtattatcaataacaataaaaataaagcaaatacca

SEQ ID NO: 192659 - DNA, 1203 bp, Artificial Sequence
  derived and/or modified sequence
atgatggacctgagaaacacccccgccaagagcctggacaagttcatcgaggactacctgctgcccgacacctgcttcagaatgcagatcaaccacgccatcgacatcatctgcggcttcctgaaggagagatgcttcagaggcagcagctaccccgtgtgcgtgagcaaggtggtgaagggcggcagcagcggcaagggcaccaccctgagaggcagaagcgacgccgacctggtggtgttcctgagccccctgaccaccttccaggaccagctgaacagaagaggcgagttcatccaggagatcagaagacagctggaggcctgccagagagagagagccttcagcgtgaagttcgaggtgcaggcccccagatggggcaaccccagagccctgagcttcgtgctgagcagcctgcagctgggcgagggcgtggagttcgacgtgctgcccgccttcgacgccctgggccagctgaccggcggctacaagcccaacccccagatctacgtgaagctgatcgaggagtgcaccgacctgcagaaggagggcgagttcagcacctgcttcaccgagctgcagagagacttcctgaagcagagacccaccaagctgaagagcctgatcagactggtgaagcactggtaccagaactgcaagaagaagctgggcaagctgcccccccagtacgccctggagctgctgaccgtgtacgcctgggagagaggcagcatgaagacccacttcaacaccgcccagggcttcagaaccgtgctggagctggtgatcaactaccagcagctgtgcatctactggaccaagtactacgacttcaagaaccccatcatcgagaagtacctgagaagacagctgaccaagcccagacccgtgatcctggaccccgccgaccccaccggcaacctgggcggcggcgaccccaagggctggagacagctggcccaggaggccgaggcctggctgaactacccctgcttcaagaactgggacggcagccccgtgagcagctggatcctgctggccgagagcaacagcgccgacgacgagaccgacgaccccagaagataccagaagtacggctacatcggcacccacgagtacccccacttcagccacagacccagcaccctgcaggccgccagcaccccccaggccgaggaggactggacctgcaccatcctgtag

SEQ ID NO: 192660 - protein, 719 aa, Artificial Sequence
  derived and/or modified sequence
MGNGESQLSSVPAQKLGWFIQEYLKPYEECQTLIDEMVNTICDVLQEPEQFPLVQGVAIGGSYGRKTVLRGNSDGTLVLFFSDLKQFQDQKRSQRDILDKTGDKLKFCLFTKWLKNNFEIQKSLDGFTIQVFTKNQRISFEVLAAFNALSLNDNPSPWIYRELKRSLDKTNASPGEFAVCFTELQQKFFDNRPGKLKDLILLIKHWHQQCQKKIKDLPSLSPYALELLTVYAWEQGCRKDNFDIAEGVRTVLELIKCQEKLCIYWMVNYNFEDETIRNILLHQLQSARPVILDPVDPTNNVSGDKICWQWLKKEAQTWLTSPNLDNELPAPSWNVLPAPLFTTPGHLLDKFIKEFLQPNKCFLEQIDSAVNIIRTFLKENCFRQSTAKIQIVRGGSTAKGTALKTGSDADLVVFHNSLKSYTSQKNERHKIVKEIHEQLKAFWREKEEELEVSFEPPKWKAPRVLSFSLKSKVLNESVSFDVLPAFNALGQLSSGSTPSPEVYAGLIDLYKSSDLPGGEFSTCFTVLQRNFIRSRPTKLKDLIRLVKHWYKECERKLKPKGSLPPKYALELLTIYAWEQGSGVPDFDTAEGFRTVLELVTQYQQLCIFWKVNYNFEDETVRKFLLSQLQKTRPVILDPAEPTGDVGGGDRWCWHLLAKEAKEWLSSPCFKDGTGNPIPPWKVPTMQTPGSCGARIHPIVNEMFSSRSHRILNNNSKRNF

SEQ ID NO: 192661 - DNA, 2160 bp, Artificial Sequence
  derived and/or modified sequence
atgggtaacggcgaaagccaacttagctccgtgccagcccaaaagctgggctggttcattcaggaatatttgaaaccatacgaggagtgtcaaaccctcatcgatgaaatggttaacactatctgcgatgtgctgcaggagcctgaacagtttcccctggtgcaaggggtagcaatcggaggtagctatgggagaaaaactgtgcttcgggggaacagcgacggaaccttggtgctcttcttcagcgacttaaagcagtttcaggaccagaagagatcccagagggatatcctcgacaaaacgggcgataaattaaagttttgcttgttcacaaagtggctcaagaacaactttgagatccagaagtctttggacggattcacaattcaggtcttcaccaaaaatcaacggatttccttcgaggtactggcggcctttaacgccttgagtcttaacgacaaccctagtccctggatataccgggaactgaagcgctccctcgacaagactaacgcctcacccggcgagtttgctgtttgttttactgagctgcagcagaagttttttgacaatagaccaggtaaactgaaggatctcatcttactgatcaagcactggcaccagcagtgccagaagaagattaaggatcttcctagcctaagcccatatgctttagagctgctcactgtttatgcatgggagcagggttgtaggaaagataactttgatatagctgaaggcgttagaaccgtgttggagcttatcaaatgtcaggagaagctgtgtatctactggatggtgaattataactttgaggatgaaacgattagaaacattctgctgcatcagctccagagtgcgcgccctgtcattctcgatcctgtggatcctactaacaatgtgtcgggagataagatctgctggcaatggttgaaaaaagaagcacagacctggttgacgtcccctaatctcgacaatgaactgccagctcccagttggaacgttttgcctgcccccctgtttactacccctggtcacctactagataaattcatcaaggagtttctccagcctaataaatgcttcctggaacagatcgattctgccgttaacattatccggacctttcttaaggagaactgctttaggcagagcacagcgaagatccagattgtacggggcgggagcaccgcaaaaggtacagctctaaagacaggcagcgacgccgatctggtcgtgttccataattctctgaagtcatacacaagtcaaaaaaacgagcggcacaagatcgtcaaggaaatccatgagcaactgaaagccttttggagggaaaaggaagaggagctggaagtcagcttcgagccacctaagtggaaggcccccagggtgctgtcattctctctgaagtcaaaggtgctgaatgaatcagtgtctttcgacgtgcttcctgccttcaacgccctcggccagttgagcagtggatctaccccttctccagaagtgtacgccggcctcattgatctgtataaatcatcagacctcccagggggcgagttcagcacgtgctttactgttctgcagagaaattttattagaagccgcccaacaaaactgaaggaccttattcggttagtcaagcattggtataaggagtgtgaaagaaagttgaaaccgaagggctccctgcctcccaaatacgccctggaactcctgacaatatatgcctgggagcagggatccggggtgcccgacttcgacactgcagagggtttccgcaccgtattggagcttgttacacagtatcagcagctctgtatcttttggaaagtcaactacaactttgaagacgagacggtgcggaaatttctgctttcgcaactgcagaaaacccgccccgtaattctggaccctgctgagcccactggggacgtcggggggggcgacagatggtgctggcatctcctggctaaggaggctaaggaatggttgtcttctccttgtttcaaggatggaacaggaaaccccattcctccatggaaagtacctactatgcaaacacccggatcatgtggcgcgcgcattcacccaattgtgaatgagatgttttccagccgtagtcacagaatccttaacaataatagcaaaaggaacttttag

SEQ ID NO: 192662 - DNA, 2160 bp, Artificial Sequence
  derived and/or modified sequence
atgggaaatggagagagccagctgagctctgtgcctgcccagaagctgggctggttcatccaggagtacctgaagccctatgaggagtgccagaccctgattgatgagatggtgaacaccatctgtgatgtgctgcaggagcctgagcagttccccctggtgcagggcgtggccatcggcggcagctatggcaggaagacagtgctgcggggcaacagtgatggcaccctggtgctcttcttcagtgacctgaagcagttccaggaccagaagaggagccagagggacatcctggacaagacaggagacaagctgaagttctgcctcttcaccaagtggctgaagaacaactttgagatccagaagagcctggatggcttcaccatccaggtgttcaccaagaaccagaggatcagctttgaggtgctggccgccttcaatgccctgagcctgaatgacaaccccagcccctggatctaccgggagctgaagaggagcctggacaagaccaatgccagccctggagaatttgctgtgtgcttcacagagctgcagcagaagttctttgacaacagacctgggaagctgaaggacctgatcctgctgatcaagcactggcaccagcagtgccagaagaagatcaaggacctgcccagcctgagcccctatgccctggagctgctgactgtgtatgcctgggagcagggctgcaggaaggacaactttgatattgctgagggcgtgaggacagtgctggagctgatcaagtgccaggagaagctgtgcatctactggatggtgaactacaactttgaagatgagaccatccggaacatcctgctgcaccagctgcagagcgcccggcctgtgatcctggaccctgtggaccccaccaacaacgtgtctggggacaagatctgctggcagtggctgaagaaggaggcccagacctggctgaccagccccaacctggacaatgagctgcctgcccccagctggaatgtgctgcctgcccccctcttcaccaccccaggccacctgctggacaagttcatcaaggagttcctgcagcccaacaagtgcttcctggagcagattgacagcgctgtgaacatcatccgcaccttcctgaaggagaactgcttccggcagagcacagccaagatccagatcgtgcggggcggcagcacagccaagggcacagccctgaagacaggcagtgatgctgacctggtggtgttccacaacagcctgaagagctacaccagccagaagaatgaaagacacaagatcgtgaaggagatccacgagcagctgaaggccttctggagggagaaggaggaggagctggaggtgtcctttgagccccccaagtggaaggccccccgggtgctgtccttcagcctgaagagcaaggtgctgaatgaatctgtgtcctttgatgtgctgcctgccttcaatgccctgggccagctgagcagcggcagcacccccagccctgaggtgtatgccggcctgattgacctgtacaagagcagtgacctgcccggcggggagttcagcacctgcttcaccgtgctgcagaggaacttcatccgcagccggcccaccaagctgaaggacctgatccggctggtgaagcactggtacaaggaatgtgagaggaagctgaagcccaagggcagcctgccccccaagtatgccctggagctgctgaccatctatgcctgggagcagggcagcggcgtgcctgactttgacacagctgagggcttcagaacagtgctggagctggtgacccagtaccagcagctgtgcatcttctggaaggtgaactacaactttgaagatgaaacagtgaggaagttcctgctgagccagctgcagaagaccaggcctgtgatcctggaccctgctgagcccactggagatgtgggcggcggggaccgctggtgctggcacctgctggccaaggaggccaaggagtggctgagcagcccctgcttcaaggatggcactggaaaccccatccccccctggaaggtgcccaccatgcagaccccaggcagctgtggggcccgcatccaccccatcgtgaatgagatgttcagcagccgcagccaccgcatcctgaacaacaacagcaagaggaacttctag

SEQ ID NO: 192663 - DNA, 2160 bp, Artificial Sequence
  derived and/or modified sequence
atgggcaacggcgagagccagctgagcagcgtgcccgcccagaagctgggctggttcatccaggaatacctgaagccatatgaggagtgtcagacgctgattgatgagatggtgaatacgatttgcgacgtcttgcaggagcccgagcagttcccactcgtgcagggagtcgccattggggggtcctatgggcggaaaacagtcctgaggggcaacagtgacggaactcttgtgctgtttttctccgatttgaaacagttccaggaccagaagcgctcacagagagatatcctggataaaaccggagataagctgaagttctgtctgttcacaaaatggctcaaaaataatttcgagatccaaaaatccctggatggattcaccattcaggtttttacaaaaaaccagcgcatctccttcgaagtactcgctgctttcaacgctcttagtctgaatgacaatccttcaccctggatttacagagaactgaagcggtcactggacaaaacaaacgccagccctggcgagttcgccgtttgcttcaccgagctgcagcaaaagttcttcgataaccgccccgggaagctgaaggacctcatcttactgatcaaacattggcaccagcagtgtcaaaaaaagataaaagatcttcccagccttagcccgtatgccctcgagctgctcacggtttatgcatgggaacaggggtgtcgaaaggacaactttgatattgcggagggcgtgcgcactgtgttggagttaatcaagtgtcaggaaaagttgtgcatctactggatggtgaactataatttcgaagacgaaactattcgcaatatactgctgcatcaactacagagcgccagacccgtgattttggaccctgtggaccccacgaataatgtctcaggggataagatctgctggcaatggcttaagaaggaggctcagacatggctgacctcacctaacctagacaacgaactccccgcacccagctggaatgtgctccctgctccactgttcaccacacctggccacctgttggataaatttatcaaggaatttttgcagccaaataagtgttttcttgaacaaatcgattcagctgtgaacataattcgaacattcctgaaagaaaattgtttcagacagtcaacggcgaagattcagatcgtcagaggcggctccactgccaagggcactgctcttaagaccggcagtgatgccgacctcgttgtgttccacaacagtctcaagagttacactagccagaagaacgaacgtcataaaattgttaaggagatccatgagcaacttaaagccttttggagagagaaagaggaggaattagaggtgtccttcgagccccccaagtggaaagccccccgagtgctttcgttttcactcaagagtaaggtgttaaatgaatctgtttcctttgatgtactgccagcctttaatgccctgggccagctgtcctctggtagcaccccctccccagaagtttatgcgggcctaatagatttgtataaatcaagtgacctgcccggaggcgaattctctacttgcttcaccgtgttacagcggaacttcatccgtagcagacctaccaagctaaaggatctcatccgcttggtcaaacattggtacaaggagtgtgagcgaaagctgaagcctaagggcagtcttccgcctaaatacgccctggagcttctcacaatttacgcttgggaacaagggagcggggtgcccgatttcgatacggctgaggggtttaggactgtactggaactcgtgacgcaataccaacagctatgcattttttggaaggtgaactacaatttcgaggatgaaaccgtgagaaaatttttgctgagccagctgcagaaaacacgtccagtgatcctcgatcctgccgagcctactggtgacgtgggaggcggcgatagatggtgttggcacttgctggctaaggaagccaaagaatggttgtcctcgccttgctttaaggacggcactggcaatcctatccccccttggaaggtaccaactatgcagacccccgggtcctgtggcgccaggattcatcctattgtcaatgaaatgtttagttccagatctcaccgaatcctcaacaacaattcaaagaggaacttttag

SEQ ID NO: 192664 - DNA, 2160 bp, Artificial Sequence
  derived and/or modified sequence
atgggcaatggcgagtctcagctctcatctgtgcccgctcagaagttgggctggtttattcaggagtaccttaaaccgtacgaagagtgccaaaccctgatcgatgaaatggtgaataccatctgcgatgtgttgcaggaaccagagcagttccctctggtccaaggagtggccattgggggttcatacggcagaaagacagtactgcgcggaaattcagacggcactctcgtgctattcttttctgatctcaagcaatttcaggatcaaaagcgttctcaacgggatatcctcgataaaacaggagataaacttaaattttgcttgtttacgaagtggttgaaaaacaactttgagattcagaagtcactggatggatttacaatccaggtgttcaccaaaaaccagcgaatttccttcgaagtgctggctgcctttaacgctcttagtcttaatgataatcccagcccatggatctatagagaactgaagaggagcctggataagaccaacgcaagcccaggtgaattcgccgtctgtttcactgaactccagcaaaaattctttgacaacagacctgggaagctcaaggatcttatcctgctaatcaagcattggcatcagcagtgccagaaaaagatcaaggatttgccatcactgtccccatatgcactggagctactgacagtgtatgcttgggaacaaggatgtcgtaaagataacttcgacatcgctgaaggtgttcggaccgtcttagagttaataaaatgtcaggaaaaactgtgtatatattggatggtgaactataactttgaggacgagaccatccgcaacatcctcttacatcagctgcagagcgctagaccagttatacttgaccctgtcgatcctaccaacaacgtaagtggcgataaaatctgctggcaatggctcaagaaagaggcccagacctggttgactagcccaaatctcgacaatgaactgcctgcaccttcatggaatgtattacctgcacctctatttactacacccggacacctgcttgacaagtttatcaaggagtttctccaacccaataaatgctttctggagcagatagattctgcggtgaacatcatccgtaccttcctcaaggaaaactgctttaggcagtccaccgccaagatccagattgtgcgcggtggctccaccgcgaaggggacggcacttaaaacaggatccgatgctgacctggtggttttccataatagtctaaagtcgtatactagtcagaagaatgagcgccataagatcgtgaaggagatacatgagcagctgaaggccttttggagggagaaggaagaagagctggaggtcagcttcgagcccccaaagtggaaggcaccacgcgttcttagctttagtctcaaatccaaggttctcaacgaatcagtttcttttgacgtgctgccggcattcaacgcattggggcagctgagttcagggagcaccccctcacccgaagtctacgcaggactgatcgacctctataagtcttccgatctccctggtggggagttcagtacctgtttcacagtcctgcagagaaactttatacggtctcgccctacaaaactgaaagatttaattcgactcgtaaaacactggtataaagagtgtgagcggaagttaaagcctaagggcagcttgccccctaagtacgccctggagctactcaccatctacgcgtgggagcaaggtagcggcgtgccagattttgacactgcagagggcttccgcacagtgctcgaactcgtgacacagtaccagcagttgtgcatcttttggaaagtgaattacaatttcgaagatgaaacagtgcgaaaattcctcctttctcagctccaaaagactcgacccgtgatcctggatccggcagagccaaccggtgatgtcggaggcggagatcgttggtgctggcatctattggctaaggaggctaaagaatggctgagcagtccatgtttcaaagacggcaccgggaatccgattcctccatggaaggtcccaactatgcagacccccggtagttgcggagccaggatccatccaatcgtaaacgaaatgttctctagtagatcccacaggatcctcaacaataactctaaaaggaatttttag

SEQ ID NO: 192665 - DNA, 3613 bp, Artificial Sequence
  derived and/or modified sequence
agttggtaaactcactgcaaggggcagggcagagcctctgagcttaagttagttttgtttccctgtcccggatacaagagttggtaagctcgctgcagtgggtggagagaggcctctagacttcagtttcagtttcctggctctgggcagcagcaagaattcctctgcctcccatcctaccattcactgtcttgccggcagccagctgagagcaatgggaaatggggagtcccagctgtcctcggtgcctgctcagaagctgggttggtttatccaggaatacctgaagccctacgaagaatgtcagacactgatcgacgagatggtgaacaccatctgtgacgtcctgcaggaacccgaacagttccccctggtgcagggagtggccataggtggctcctatggacggaaaacagtcttaagaggcaactccgatggtacccttgtcctcttcttcagtgacttaaaacaattccaggatcagaagagaagccaacgtgacatcctcgataaaactggggataagctgaagttctgtctgttcacgaagtggttgaaaaacaatttcgagatccagaagtcccttgatgggttcaccatccaggtgttcacaaaaaatcagagaatctctttcgaggtgctggccgccttcaacgctctgagcttaaatgataatcccagcccctggatctatcgagagctcaaaagatccttggataagacaaatgccagtcctggtgagtttgcagtctgcttcactgaactccagcagaagttttttgacaaccgtcctggaaaactaaaggatttgatcctcttgataaagcactggcatcaacagtgccagaaaaaaatcaaggatttaccctcgctgtctccgtatgccctggagctgcttacggtgtatgcctgggaacaggggtgcagaaaagacaactttgacattgctgaaggcgtcagaaccgtactggagctgatcaaatgccaggagaagctgtgtatctattggatggtcaactacaactttgaagatgagaccatcaggaacatcctgctgcaccagctccaatcagcgaggccagtaatcttggatccagttgacccaaccaataatgtgagtggagataaaatatgctggcaatggctgaaaaaagaagctcaaacctggttgacttctcccaacctggataatgagttacctgcaccatcttggaatgttctgcctgcaccactcttcacgaccccaggccaccttctggataagttcatcaaggagtttctccagcccaacaaatgcttcctagagcagattgacagtgctgttaacatcatccgtacattccttaaagaaaactgcttccgacaatcaacagccaagatccagattgtccggggaggatcaaccgccaaaggcacagctctgaagactggctctgatgccgatctcgtcgtgttccataactcacttaaaagctacacctcccaaaaaaacgagcggcacaaaatcgtcaaggaaatccatgaacagctgaaagccttttggagggagaaggaggaggagcttgaagtcagctttgagcctcccaagtggaaggctcccagggtgctgagcttctctctgaaatccaaagtcctcaacgaaagtgtcagctttgatgtgcttcctgcctttaatgcactgggtcagctgagttctggctccacacccagccccgaggtttatgcagggctcattgatctgtataaatcctcggacctcccgggaggagagttttctacctgtttcacagtcctgcagcgaaacttcattcgctcccggcccaccaaactaaaggatttaattcgcctggtgaagcactggtacaaagagtgtgaaaggaaactgaagccaaaggggtctttgcccccaaagtatgccttggagctgctcaccatctatgcctgggagcaggggagtggagtgccggattttgacactgcagaaggtttccggacagtcctggagctggtcacacaatatcagcagctctgcatcttctggaaggtcaattacaactttgaagatgagaccgtgaggaagtttctactgagccagttgcagaaaaccaggcctgtgatcttggacccagccgaacccacaggtgacgtgggtggaggggaccgttggtgttggcatcttctggcaaaagaagcaaaggaatggttatcctctccctgcttcaaggatgggactggaaacccaataccaccttggaaagtgccgacaatgcagacaccaggaagttgtggagctaggatccatcctattgtcaatgagatgttctcatccagaagccatagaatcctgaataataattctaaaagaaacttctagagatcatctggcaatcgcttttaaagactcggctcaccgtgagaaagagtcactcacatccattcttcccttgatggtccctattcctccttcccttgcttcttggacttcttgaaatcaatcaagactgcaaaccctttcataaagtcttgccttgctgaactccctctctgcaggcagcctgcctttaaaaatagttgctgtcatccactttatgtgcatcttatttctgtcaacttgtattttttttcttgtatttttccaattagctcctcctttttccttccagtctaaaaaaggaatcctctgtgtcttcaaagcaaagctctttactttccccttggttctcataactctgtgatcttgctctcggtgcttccaactcatccacgtcctgtctgtttcctctgtatacaaaaccctttctgcccctgctgacacagacatcctctatgccagcagccagccaaccctttcattagaacttcaagctctccaaaggctcagattataactgttgtcatatttatatgaggctgttgtcttttccttctgagcctgcctttctcccccccacccaggagtatcctcttgccaaatcaaaagactttttccttgggctttagccttaaagatacttgaaggtctaggtgctttaacctcacataccctcacttaaacttttatcactgttgcatataccagttgtgatacaataaagaatgtatctggattttgtgcctagttcctagcacacagcttcaaaaattctagagtttcctgataggagtgtcttttgtattcataacaagcccttttcacccatgcctgggtttatgctaacaaggttacccatggtgggcccttagtttcaaggaaggagttggccaagccagaaagaccaagcatgtggttaaagcattggaattttcagccccatcccacccccaatctccaaggaggtgatggggctggaaattgagttcaattttaacatggccagtgatttaagcaatgctgcctatgtaaagaaaccccaataaaaactctggacagtgaggcttggggagcttcctgattggcagacattccaatgtactaggaaggtagcgcatcttgattccacagggacaaaggctcctgagctctgggcccttccagtgcttgccaccctacatactctttgtctggctcttcatttgtattctttataataaaatggtgattgtaagtagagca

SEQ ID NO: 192666 - DNA, 2160 bp, Artificial Sequence
  derived and/or modified sequence
atgggcaacggcgagagccagctgagcagcgtgcccgcccagaagctgggctggttcatccaggagtacctgaagccctacgaggagtgccagaccctgatcgacgagatggtgaacaccatctgcgacgtgctgcaggagcccgagcagttccccctggtgcagggcgtggccatcggcggcagctacggcagaaagaccgtgctgagaggcaacagcgacggcaccctggtgctgttcttcagcgacctgaagcagttccaggaccagaagagaagccagagagacatcctggacaagaccggcgacaagctgaagttctgcctgttcaccaagtggctgaagaacaacttcgagatccagaagagcctggacggcttcaccatccaggtgttcaccaagaaccagagaatcagcttcgaggtgctggccgccttcaacgccctgagcctgaacgacaaccccagcccctggatctacagagagctgaagagaagcctggacaagaccaacgccagccccggcgagttcgccgtgtgcttcaccgagctgcagcagaagttcttcgacaacagacccggcaagctgaaggacctgatcctgctgatcaagcactggcaccagcagtgccagaagaagatcaaggacctgcccagcctgagcccctacgccctggagctgctgaccgtgtacgcctgggagcagggctgcagaaaggacaacttcgacatcgccgagggcgtgagaaccgtgctggagctgatcaagtgccaggagaagctgtgcatctactggatggtgaactacaacttcgaggacgagaccatcagaaacatcctgctgcaccagctgcagagcgccagacccgtgatcctggaccccgtggaccccaccaacaacgtgagcggcgacaagatctgctggcagtggctgaagaaggaggcccagacctggctgaccagccccaacctggacaacgagctgcccgcccccagctggaacgtgctgcccgcccccctgttcaccacccccggccacctgctggacaagttcatcaaggagttcctgcagcccaacaagtgcttcctggagcagatcgacagcgccgtgaacatcatcagaaccttcctgaaggagaactgcttcagacagagcaccgccaagatccagatcgtgagaggcggcagcaccgccaagggcaccgccctgaagaccggcagcgacgccgacctggtggtgttccacaacagcctgaagagctacaccagccagaagaacgagagacacaagatcgtgaaggagatccacgagcagctgaaggccttctggagagagaaggaggaggagctggaggtgagcttcgagccccccaagtggaaggcccccagagtgctgagcttcagcctgaagagcaaggtgctgaacgagagcgtgagcttcgacgtgctgcccgccttcaacgccctgggccagctgagcagcggcagcacccccagccccgaggtgtacgccggcctgatcgacctgtacaagagcagcgacctgcccggcggcgagttcagcacctgcttcaccgtgctgcagagaaacttcatcagaagcagacccaccaagctgaaggacctgatcagactggtgaagcactggtacaaggagtgcgagagaaagctgaagcccaagggcagcctgccccccaagtacgccctggagctgctgaccatctacgcctgggagcagggcagcggcgtgcccgacttcgacaccgccgagggcttcagaaccgtgctggagctggtgacccagtaccagcagctgtgcatcttctggaaggtgaactacaacttcgaggacgagaccgtgagaaagttcctgctgagccagctgcagaagaccagacccgtgatcctggaccccgccgagcccaccggcgacgtgggcggcggcgacagatggtgctggcacctgctggccaaggaggccaaggagtggctgagcagcccctgcttcaaggacggcaccggcaaccccatccccccctggaaggtgcccaccatgcagacccccggcagctgcggcgccagaatccaccccatcgtgaacgagatgttcagcagcagaagccacagaatcctgaacaacaacagcaagagaaacttctag

SEQ ID NO: 192667 - protein, 666 aa, Artificial Sequence
  derived and/or modified sequence
MACLMAAFSVGTAMNASSYSAEMTEPKSVCVSVDEVVSSNMEATETDLLNGHLKKVDNNLTEAQRFSSLPRRAAVNIEFRDLSYSVPEGPWWRKKGYKTLLKGISGKFNSGELVAIMGPSGAGKSTLMNILAGYRETGMKGAVLINGLPRDLRCFRKVSCYIMQDDMLLPHLTVQEAMMVSAHLKLQEKDEGRREMVKEILTALGLLSCANTRTGSLSGGQRKRLAIALELVNNPPVMFFDEPTSGLDSASCFQVVSLMKGLAQGGRSIICTIHQPSAKLFELFDQLYVLSQGQCVYRGKVCNLVPYLRDLGLNCPTYHNPADFVMEVASGEYGDQNSRLVRAVREGMCDSDHKRDLGGDAEVNPFLWHRPSEEDSSSMEGCHSFSASCLTQFCILFKRTFLSIMRDSVLTHLRITSHIGIGLLIGLLYLGIGNEAKKVLSNSGFLFFSMLFLMFAALMPTVLTFPLEMGVFLREHLNYWYSLKAYYLAKTMADVPFQIMFPVAYCSIVYWMTSQPSDAVRFVLFAALGTMTSLVAQSLGLLIGAASTSLQVATFVGPVTAIPVLLFSGFFVSFDTIPTYLQWMSYISYVRYGFEGVILSIYGLDREDLHCDIDETCHFQKSEAILRELDVENAKLYLDFIVLGIFFISLRLIAYFVLRYKIRAER

SEQ ID NO: 192668 - DNA, 2001 bp, Artificial Sequence
  derived and/or modified sequence
atggcttgtctaatggccgccttctctgttgggacagccatgaatgcaagtagttattctgccgagatgacagagcccaagtccgtttgtgtgtccgtggatgaagtggtttcatcgaacatggaagctaccgagacggacctgctgaacggccacttgaaaaaagttgataacaacctgacagaagcacagcgcttctcttctttgcctcgtcgggcagctgttaatatagagtttagagatctctcatattccgtgcctgaaggcccctggtggaggaaaaaagggtacaagaccctcctgaaaggaattagcgggaagttcaacagcggggaactcgtggctattatgggaccaagtggagccggcaagtccactctgatgaacatcctggctggatacagggagactggtatgaaaggagctgtgttgatcaatgggctgccacgcgacttgagatgctttcgaaaagtcagctgctacattatgcaggacgacatgctgctcccacatctcacagtgcaggaagcgatgatggtcagtgctcacctgaaactgcaggagaaagacgaggggagaagagagatggtgaaggaaattctgactgcgctaggcttactgtcctgtgctaacacacggacaggcagtcttagcggcggccaaaggaagcgtttggcgattgccctggagcttgtcaacaacccccccgtgatgttcttcgatgaaccaacatcaggcctcgactccgcttcatgctttcaggtggtatcactcatgaaggggcttgctcagggcggcagatctatcatctgcacaattcaccaaccttcagcgaagttgtttgaactatttgaccaactctacgttctatcacagggtcaatgcgtctacagaggcaaggtgtgtaacttagtcccgtaccttcgcgacctgggcctgaattgccctacctatcacaatccagccgactttgtcatggaagtcgccagcggcgagtatggtgaccagaatagcaggctggtcagggccgtgcgcgaaggcatgtgtgattccgaccacaaacgggacttgggtggcgatgcagaggtcaatccattcttgtggcaccggccaagcgaggaagactcctccagtatggagggatgtcacagctttagcgccagctgtctgacccagttttgcatcctgtttaagagaacatttctgtcaattatgcgcgattctgtactgacacacctgcgcataaccagtcacataggtattgggttacttattggattgctgtatcttggcatcggcaatgaggctaagaaagtcctctccaactctggcttcctgttcttctccatgctgtttttaatgtttgcagcgttgatgcccaccgtgcttacctttcccttggagatgggcgtgttcctgagggaacatctgaattactggtattctttgaaggcatactacctggcaaagactatggccgacgtcccctttcagatcatgtttccggtcgcctactgttctatagtgtactggatgacatcccagccttctgacgccgtgaggttcgtcctgttcgccgccctaggcacgatgacctcactcgtcgcccagtcactaggccttctgattggggccgcatctacatccctgcaggtagcaaccttcgtgggcccagtgaccgctatcccggtgctgcttttctccggatttttcgtttcattcgatactatcccaacctacctgcagtggatgtcttacatcagctatgtgaggtacggctttgagggggtcattctgagtatctacggactcgacagagaagatcttcactgcgacattgatgagacttgccacttccagaaatcagaagccatactgcgcgaacttgatgttgagaatgccaaattatatcttgacttcatcgtcttaggcatttttttcatctctcttcggctcatcgcatacttcgttttgcgctataaaattcgggccgagagatag

SEQ ID NO: 192669 - DNA, 2001 bp, Artificial Sequence
  derived and/or modified sequence
atggcctgcctgatggccgccttctctgtgggcacagccatgaatgccagcagctacagcgctgagatgacagagcccaagtctgtgtgtgtgtctgtggatgaggtggtgagcagcaacatggaggccacagaaacagacctgctgaatggccacctgaagaaggtggacaacaacctgacagaggcccagcgcttcagcagcctgcccaggagagctgctgtgaacatcgagttccgggacctgagctacagcgtgcctgagggcccctggtggaggaagaagggctacaagaccctgctgaagggcatcagcggcaagttcaacagcggggagctggtggccatcatgggccccagcggggccggcaagagcaccctgatgaacatcctggccggctaccgggagaccggcatgaagggagctgtgctgatcaatggcctgccccgggacctgcgctgcttcaggaaggtgtcctgctacatcatgcaggatgacatgctgctgccccacctgactgtgcaggaggccatgatggtgtctgcccacctgaagctgcaggagaaggatgagggcagaagagagatggtgaaggagatcctgacagccctgggcctgctgagctgtgccaacaccaggacaggcagcctgagcggcggccagaggaagaggctggccatcgccctggagctggtgaacaacccccctgtgatgttctttgatgagcccaccagcggcctggacagcgccagctgcttccaggtggtgtccctgatgaagggcctggcccagggcggccgcagcatcatctgcaccatccaccagcccagcgccaagctgtttgagctgtttgaccagctgtatgtgctgagccagggccagtgtgtgtaccggggcaaggtgtgcaacctggtgccctacctgcgggacctgggcctgaactgccccacctaccacaacccagctgactttgtgatggaggtggccagcggggagtatggagaccagaacagccggctggtgcgggctgtgcgggagggcatgtgtgacagcgaccacaagagggacctgggcggagatgctgaggtgaaccccttcctgtggcaccggcccagcgaggaggacagcagctccatggagggctgccacagcttcagcgccagctgcctgacccagttctgcatcctcttcaagaggaccttcctgagcatcatgagggacagcgtgctgacccacctgcgcatcaccagccacatcggcatcggcctgctgattggcctgctgtacctgggcattggaaatgaggccaagaaggtgctgagcaacagcggcttcctgttcttctccatgctgttcctgatgtttgctgccctgatgcccaccgtgctgaccttccccctggagatgggcgtcttcctgcgggagcacctgaactactggtacagcctgaaggcctactacctggccaagaccatggctgatgtgcccttccagatcatgtttcctgtggcctactgcagcatcgtgtactggatgaccagccagcccagtgatgctgtgcgctttgtgctgtttgctgccctgggcaccatgaccagcctggtggcccagagcctgggcctgctgattggagctgccagcaccagcctgcaggtggccacctttgtgggccctgtgacagccatccctgtgctgctcttcagcggcttctttgtgtcctttgacaccatccccacctacctgcagtggatgagctacatctcctatgtgcgctatggctttgagggcgtcatcctgagcatctacggcctggaccgggaggacctgcactgtgacattgatgagacctgccacttccagaagtctgaggccatcctgcgggagctggatgtggagaatgccaagctgtacctggacttcatcgtgctgggcatcttcttcatcagcctgcggctgattgcctactttgtgctgcgctacaagatccgggcagagaggtag

SEQ ID NO: 192670 - DNA, 2001 bp, Artificial Sequence
  derived and/or modified sequence
atggcctgcctgatggccgccttcagcgtgggcaccgccatgaacgcctcatcctattccgcagaaatgacagaacccaaatcggtgtgcgttagtgtcgacgaggtcgtgagttcaaacatggaagccactgagaccgacctgttgaacggacatctgaagaaggtggacaacaacctgaccgaggcccaaagattttcctccctaccacggcgcgctgctgtcaacattgaattccgggatctttcctacagcgttcccgagggaccctggtggcgcaaaaagggctataagacactgctgaaagggatttcgggtaaattcaattccggggaacttgtggccattatgggaccctcaggcgccggcaaatcaacccttatgaatatccttgcaggctacagagagaccggtatgaagggggcagtcctaataaacggcctgcctagagatctgaggtgtttccggaaggtgtcttgttacatcatgcaggatgatatgttattaccacacctgaccgtccaggaagccatgatggtttccgcgcacctgaagctccaggaaaaagatgagggccgcagggagatggtgaaggaaatcctcacagccctgggactgctgtcatgcgccaacactagaacaggtagcctgagcgggggtcaaagaaagagactggcaattgctctcgagttggtgaacaatccccccgtgatgttctttgacgagcctacctcggggttagattctgcttcttgttttcaggtagtaagcctgatgaagggactggcgcaggggggtcggtccattatttgtacaatccaccagccatcggccaagctcttcgaactgttcgatcagttgtatgtcctgagccaggggcagtgcgtgtatcgcgggaaagtgtgtaatctggtcccttacctgcgagacctgggtcttaattgccccacctaccataaccccgccgactttgtcatggaggttgcctccggcgaatacggggaccagaactcaaggttagtaagggctgttcgagagggaatgtgcgacagtgaccacaaacgcgacctcggcggagatgccgaagtgaaccccttcttgtggcatagacctagcgaggaagattcgtccagcatggaaggatgtcatagcttttcggcaagctgtctcacgcagttctgtatccttttcaaacggaccttcctgtctatcatgcgcgatagcgttttaacacacttgcgcataacgtcgcatatcgggatcgggttgctgattggcctgttataccttggaattggaaatgaggcaaagaaggtgctttccaatagcggctttctgttttttagcatgcttttcctgatgttcgcagccttaatgcccaccgtgttgacgttccccctggagatgggagtcttcctgcgagaacatctaaattattggtattcacttaaagcttactatctggcaaaaactatggctgacgtaccatttcaaattatgttcccggttgcgtattgttccatagtgtactggatgacctctcagccatcagatgccgtgcgattcgtgctttttgccgctcttggtaccatgacatccctggtggctcagtctttgggcttactcattggagcggcctctacctctcttcaggtggccactttcgtagggccggtgaccgctatccctgtactgcttttcagcggcttctttgtgtcttttgacactatccccacctacttgcagtggatgtcctacatttcctatgttaggtatggctttgagggtgtgatcctaagcatatatggtctcgatcgggaggatctacactgcgatatcgacgagacctgccatttccagaaaagcgaggccatcctgagagaacttgatgtggaaaacgccaagctttacttggatttcatcgtcttggggatcttctttattagcctgcgtcttattgcatatttcgtgttgagatacaagatacgcgccgaacgttag

SEQ ID NO: 192671 - DNA, 2001 bp, Artificial Sequence
  derived and/or modified sequence
atggcatgcctgatggcggcattcagcgtcggaactgctatgaacgccagctcatattcagccgaaatgaccgaacccaagtctgtatgtgtgtcagtggacgaggtagtctcgtcaaatatggaagcaaccgaaacagatctcctgaatggtcaccttaaaaaagtggataataacctgacagaggcgcagagattctcttctctgcctcgccgtgctgctgttaacatcgagtttagggatttgagctactctgtgcctgagggaccatggtggaggaagaagggttacaagacactgcttaagggcatttctggaaaattcaactccggcgaactggtggctatcatggggccaagcggcgcaggtaagagcactttgatgaacatcctggcaggttatcgggaaacaggaatgaaaggcgcagtgctgatcaatgggctgccgagggatctccgctgcttccggaaggtttcctgttacattatgcaggatgacatgctgttgccacatctaaccgtgcaggaggccatgatggtgtctgcacaccttaagctccaagagaaggatgagggaaggcgtgaaatggtgaaggagatcctgaccgcactgggcttactttcctgcgcaaacacacgcaccggatccttatccgggggacagcggaaaaggctggctattgctttggagctggtgaacaaccccccagtcatgttttttgacgaaccaacttctgggctggacagtgccagttgcttccaggttgtatcgctcatgaaaggactggcccagggtggtagatctatcatatgcaccatccaccagccctccgcaaagctcttcgagctcttcgatcagctctacgtactgagtcagggacagtgcgtgtacagaggtaaggtatgtaatctggtaccatatttgagagacctcgggctgaactgtcccacctaccataatccagcagacttcgttatggaagtggcctctggcgagtacggcgatcagaattcgaggcttgtgcgagccgttcgcgaggggatgtgcgattctgatcacaaacgcgaccttggcggagacgcggaagtaaatccctttctctggcaccggccttccgaagaagacagcagttccatggaggggtgccatagcttctccgcttcgtgcctcacgcagttttgcatcttgttcaagcgaacctttctgtcgataatgcgcgactctgtgttgacacaccttcgcattacaagccacattggtatcggcctactgatcggactattgtatctcggaatcggaaacgaagccaaaaaggtgctgtccaacagcgggtttttgttcttcagtatgctcttcctcatgtttgcagctctgatgcccaccgtgttgactttcccactggagatgggtgtcttcctgagggaacacctgaactactggtattcgctgaaagcttattatctggctaaaaccatggccgatgtgcccttccagatcatgttcccggtggcctactgctcaatcgtatactggatgacgagtcagcccagtgacgcagttcgctttgtgctttttgctgccttgggcactatgacatcccttgttgcccagagcctgggcctcctgatcggcgcagccagcacttcactccaagtcgctactttcgttggaccagtaacagcgatacccgtcttacttttttctgggttcttcgtctcattcgacactatccctacctatttgcagtggatgtcttatatcagctatgtgcgctatggattcgaaggcgtcatcctcagcatctacggattggatagggaagatctccactgcgatattgacgagacttgtcattttcagaaatcagaagctattctgcgcgaactggatgtggaaaacgctaagctctacttagacttcatcgtgctgggcatctttttcatttctctccggctgatcgcctattttgtgctgaggtataaaattcgcgcagaacggtag

SEQ ID NO: 192672 - DNA, 2998 bp, Artificial Sequence
  derived and/or modified sequence
gagccggagccggatcccagccggagcccaagcgcagcccgcaccccgcgcagcggctgagccgggagccagcgcagcctcggccccgcagctcaagcctcgtccccgccgccgccgccgccgccgccgccgccgcccccggggcatggcctgtctgatggccgctttctcggtcggcaccgccatgaatgccagcagttactctgcagagatgacggagcccaagtcggtgtgtgtctcggtggatgaggtggtgtccagcaacatggaggccactgagacggacctgctgaatggacatctgaaaaaagtagataataacctcacggaagcccagcgcttctcctccttgcctcggagggcagctgtgaacattgaattcagggacctttcctattcggttcctgaaggaccctggtggaggaagaaaggatacaagaccctcctgaaaggaatttccgggaagttcaatagtggtgagttggtggccattatgggtccttccggggccgggaagtccacgctgatgaacatcctggctggatacagggagacgggcatgaagggggccgtcctcatcaacggcctgccccgggacctgcgctgcttccggaaggtgtcctgctacatcatgcaggatgacatgctgctgccgcatctcactgtgcaggaggccatgatggtgtcggcacatctgaagcttcaggagaaggatgaaggcagaagggaaatggtcaaggagatactgacagcgctgggcttgctgtcttgcgccaacacgcggaccgggagcctgtcaggtggtcagcgcaagcgcctggccatcgcgctggagctggtgaacaaccctccagtcatgttcttcgatgagcccaccagcggcctggacagcgcctcctgcttccaggtggtctcgctgatgaaagggctcgctcaagggggtcgctccatcatttgcaccatccaccagcccagcgccaaactcttcgagctgttcgaccagctttacgtcctgagtcaaggacaatgtgtgtaccggggaaaagtctgcaatcttgtgccatatttgagggatttgggtctgaactgcccaacctaccacaacccagcagattttgtcatggaggttgcatccggcgagtacggtgatcagaacagtcggctggtgagagcggttcgggagggcatgtgtgactcagaccacaagagagacctcgggggtgatgccgaggtgaacccttttctttggcaccggccctctgaagaggactcctcgtccatggaaggctgccacagcttctctgccagctgcctcacgcagttctgcatcctcttcaagaggaccttcctcagcatcatgagggactcggtcctgacacacctgcgcatcacctcgcacattgggatcggcctcctcattggcctgctgtacttggggatcgggaacgaagccaagaaggtcttgagcaactccggcttcctcttcttctccatgctgttcctcatgttcgcggccctcatgcctactgttctgacatttcccctggagatgggagtctttcttcgggaacacctgaactactggtacagcctgaaggcctactacctggccaagaccatggcagacgtgccctttcagatcatgttcccagtggcctactgcagcatcgtgtactggatgacgtcgcagccgtccgacgccgtgcgctttgtgctgtttgccgcgctgggcaccatgacctccctggtggcacagtccctgggcctgctgatcggagccgcctccacgtccctgcaggtggccactttcgtgggcccagtgacagccatcccggtgctcctgttctcggggttcttcgtcagcttcgacaccatccccacgtacctacagtggatgtcctacatctcctatgtcaggtatgggttcgaaggggtcatcctctccatctatggcttagaccgggaagatctgcactgtgacatcgacgagacgtgccacttccagaagtcggaggccatcctgcgggagctggacgtggaaaatgccaagctgtacctggacttcatcgtactcgggattttcttcatctccctccgcctcattgcctattttgtcctcaggtacaaaatccgggcagagaggtaaaacacctgaatgccaggaaacaggaagattagacactgtggccgagggcacgtctagaatcgaggaggcaagcctgtgcccgaccgacgacacagagactcttctgatccaacccctagaaccgcgttgggtttgtgggtgtctcgtgctcagccactctgcccagctgggttggatcttctctccattcccctttctagctttaactaggaagatgtaggcagattggtggtttttttttttttaacatacagaattttaaataccacaactggggcagaatttaaagctgcaacacagctggtgatgagaggcttcctcagtccagtcgctccttagcaccaggcaccgtgggtcctggatggggaactgcaagcagcctctcagctgatggctgcacagtcagatgtctggtggcagagagtccgagcatggagcgattccattttatgactgttgtttttcacattttcatctttctaaggtgtgtctcttttccaatgagaagtcatttttgcaagccaaaagtcgatcaatcgcattcattttaagaaattatacctttttagtacttgctgaagaatgattcagggtaaatcacatactttgtttagagaggcgaggggtttaaccgagtcacccagctggtctcatacatagacagcacttgtgaaggattgaatgcaggttccaggtggagggaagacgtggacaccatctccactgagccatgcagacatttttaaaagctatacaaaaaattgtgagaagacattggccaactctttcaaagtctttctttttccacgtgcttcttattttaagcgaaatatattgtttgtttcttcctaa

SEQ ID NO: 192673 - DNA, 2001 bp, Artificial Sequence
  derived and/or modified sequence
atggcctgcctgatggccgccttcagcgtgggcaccgccatgaacgccagcagctacagcgccgagatgaccgagcccaagagcgtgtgcgtgagcgtggacgaggtggtgagcagcaacatggaggccaccgagaccgacctgctgaacggccacctgaagaaggtggacaacaacctgaccgaggcccagagattcagcagcctgcccagaagagccgccgtgaacatcgagttcagagacctgagctacagcgtgcccgagggcccctggtggagaaagaagggctacaagaccctgctgaagggcatcagcggcaagttcaacagcggcgagctggtggccatcatgggccccagcggcgccggcaagagcaccctgatgaacatcctggccggctacagagagaccggcatgaagggcgccgtgctgatcaacggcctgcccagagacctgagatgcttcagaaaggtgagctgctacatcatgcaggacgacatgctgctgccccacctgaccgtgcaggaggccatgatggtgagcgcccacctgaagctgcaggagaaggacgagggcagaagagagatggtgaaggagatcctgaccgccctgggcctgctgagctgcgccaacaccagaaccggcagcctgagcggcggccagagaaagagactggccatcgccctggagctggtgaacaacccccccgtgatgttcttcgacgagcccaccagcggcctggacagcgccagctgcttccaggtggtgagcctgatgaagggcctggcccagggcggcagaagcatcatctgcaccatccaccagcccagcgccaagctgttcgagctgttcgaccagctgtacgtgctgagccagggccagtgcgtgtacagaggcaaggtgtgcaacctggtgccctacctgagagacctgggcctgaactgccccacctaccacaaccccgccgacttcgtgatggaggtggccagcggcgagtacggcgaccagaacagcagactggtgagagccgtgagagagggcatgtgcgacagcgaccacaagagagacctgggcggcgacgccgaggtgaaccccttcctgtggcacagacccagcgaggaggacagcagcagcatggagggctgccacagcttcagcgccagctgcctgacccagttctgcatcctgttcaagagaaccttcctgagcatcatgagagacagcgtgctgacccacctgagaatcaccagccacatcggcatcggcctgctgatcggcctgctgtacctgggcatcggcaacgaggccaagaaggtgctgagcaacagcggcttcctgttcttcagcatgctgttcctgatgttcgccgccctgatgcccaccgtgctgaccttccccctggagatgggcgtgttcctgagagagcacctgaactactggtacagcctgaaggcctactacctggccaagaccatggccgacgtgcccttccagatcatgttccccgtggcctactgcagcatcgtgtactggatgaccagccagcccagcgacgccgtgagattcgtgctgttcgccgccctgggcaccatgaccagcctggtggcccagagcctgggcctgctgatcggcgccgccagcaccagcctgcaggtggccaccttcgtgggccccgtgaccgccatccccgtgctgctgttcagcggcttcttcgtgagcttcgacaccatccccacctacctgcagtggatgagctacatcagctacgtgagatacggcttcgagggcgtgatcctgagcatctacggcctggacagagaggacctgcactgcgacatcgacgagacctgccacttccagaagagcgaggccatcctgagagagctggacgtggagaacgccaagctgtacctggacttcatcgtgctgggcatcttcttcatcagcctgagactgatcgcctacttcgtgctgagatacaagatcagagccgagagatag

SEQ ID NO: 192674 - protein, 324 aa, Artificial Sequence
  derived and/or modified sequence
MPARALLPRRMGHRTLASTPALWASIPCPRSELRLDLVLPSGQSFRWREQSPAHWSGVLADQVWTLTQTEEQLHCTVYRGDKSQASRPTPDELEAVRKYFQLDVTLAQLYHHWGSVDSHFQEVAQKFQGVRLLRQDPIECLFSFICSSNNNIARITGMVERLCQAFGPRLIQLDDVTYHGFPSLQALAGPEVEAHLRKLGLGYRARYVSASARAILEEQGGLAWLQQLRESSYEEAHKALCILPGVGTKVADCICLMALDKPQAVPVDVHMWHIAQRDYSWHPTTSQAKGPSPQTNKELGNFFRSLWGPYAGWAQAVSVPRCPP

SEQ ID NO: 192675 - DNA, 975 bp, Artificial Sequence
  derived and/or modified sequence
atgccggcaagggcgctgctgccacggagaatggggcaccggacattggcaagcacgcctgccctttgggcatctatcccctgtcctcggtcagagcttagactggatctggtgctacccagcggccaaagcttcaggtggcgggaacaatcccccgcccactggtcgggagttctggctgaccaagtttggactttaacgcagacggaagaacagctgcactgtacggtgtatagaggggacaaaagtcaggcttctcgcccaactccagatgaactggaagctgtgcgcaaatattttcagctggacgtgacccttgcccagctgtatcatcactggggctccgtggacagccactttcaggaggtggctcagaaatttcagggagttcgcctcctacgccaggatcccattgaatgtctcttctcatttatctgttcttctaataataacattgcccggatcacgggcatggtggagaggctgtgtcaggctttcggtcctcggctaattcagctggatgacgtaacataccacgggttcccctctctgcaagccctggccggacccgaagtggaggctcaccttcggaagctgggactgggttacagggcccgttacgtcagtgccagcgccagagctattctggaagagcaaggcggcctggcatggctgcagcaactgagagaaagctcctatgaagaggcccacaaagctctttgcatactgcccggagtcggaaccaaggttgccgactgcatctgtctcatggcgctggataagccccaggcggtaccagttgacgtacacatgtggcatatcgctcagagggactacagttggcatccaaccaccagccaggccaaaggaccctccccccagaccaataaagaactagggaatttttttaggtccctgtgggggccatatgctggctgggcccaagcagtctccgtacccagatgccctccatag

SEQ ID NO: 192676 - DNA, 975 bp, Artificial Sequence
  derived and/or modified sequence
atgcctgcccgggccctgctgcccaggaggatgggccacaggaccctggccagcaccccagccctgtgggccagcatcccctgccccaggtctgagctgcggctggacctggtgctgcccagcggccagagcttccgctggagggagcagagccctgcccactggagcggcgtgctggccgaccaggtgtggaccctgacccagacagaggagcagctgcactgcaccgtgtacagaggagacaagagccaggccagccggcccaccccagatgagctggaggccgtgaggaagtacttccagctggatgtgaccctggcccagctgtaccaccactggggctctgtggacagccacttccaggaggtggcccagaagttccagggcgtgcggctgctgcggcaggaccccattgaatgtctcttctccttcatctgcagcagcaacaacaacatcgcccgcatcaccggcatggtggagcggctgtgccaggccttcggccccaggctcatccagctggatgatgtgacctaccacggcttccccagcctgcaggccctggccggccctgaggtggaggcccacctgaggaagctgggcctgggctaccgggcccgctacgtgtctgccagcgcccgggccatcctggaggagcagggcggcctggcctggctgcagcagctgcgggagagcagctatgaggaggcccacaaggccctgtgcatcctgcccggggtgggcaccaaggtggccgactgcatctgcctgatggccctggacaagccccaggccgtgcctgtggatgtgcacatgtggcacatcgcccagagggactacagctggcaccccaccaccagccaggccaagggccccagcccccagaccaacaaggagctgggcaacttcttccgcagcctgtggggcccctatgccggctgggcccaggccgtgtctgtgccccgctgccccccatag

SEQ ID NO: 192677 - DNA, 975 bp, Artificial Sequence
  derived and/or modified sequence
atgcccgcccgggccctgctgccccggcggatgggccaccggaccctcgcctctaccccggctttatgggcatccatcccctgtcctaggtccgaactgaggttggatcttgtgctcccatctggtcagtcctttaggtggcgggagcagtctcccgcccactggtctggcgtactggctgaccaggtgtggactttaacacagaccgaggagcagttgcattgtaccgtttaccggggtgacaaaagtcaggctagccgccctaccccagacgagctggaggcagtccgtaagtactttcagctcgacgtgacactggctcagctttatcaccactggggcagtgtggactctcacttccaagaggttgctcagaagtttcagggggtcaggctccttaggcaggatcctattgaatgtcttttttctttcatttgctctagtaataacaacattgctcgcattacaggaatggttgagagactgtgccaggcattcggccctcggttgatccaacttgatgatgtcacctatcacggatttccctctctgcaggccttagctggacctgaagtggaagcccacctgcggaagctcggattaggataccgcgcaagatatgtcagcgcttcagccagggccattctggaggaacaaggtggattagcctggctacaacaactgagggagtcttcttacgaagaggcgcacaaagcactgtgtatcctgcccggggtaggcactaaggtggctgattgcatctgccttatggctcttgataagccacaggccgtgccagtggacgtccacatgtggcacattgctcagagggattactcttggcaccccactacatcccaggctaagggtccatctccccagacaaacaaggagctcggaaacttcttccgttcactgtgggggccttacgctggatgggcacaggctgtctctgtgccccgctgtccaccttag

SEQ ID NO: 192678 - DNA, 975 bp, Artificial Sequence
  derived and/or modified sequence
atgccagccagagctctgctgcctagaaggatggggcatagaactttggcctccaccccagctctgtgggcctccatcccttgtcctcggtccgagctgaggcttgatctagtactcccgagcggacagtctttccgttggcgcgagcagtcccctgcccactggtctggggtgctggcagaccaggtgtggactttgacacaaacggaagagcagctccattgcacggtgtaccgcggagacaagagccaggcttcccgccctacaccggacgaactcgaagctgtgcggaagtattttcagctggatgttacgctggctcagctttatcatcactggggcagcgtggattctcatttccaggaagtggcccagaaatttcagggtgtgaggctcctacgccaggatccaattgaatgtttgttttctttcatttgttcttctaacaacaacattgcaaggatcacagggatggttgaacggttgtgccaggcctttggccctcggctgatacagttggatgatgtgacgtatcacggcttcccatccctacaggcacttgccggacctgaagtcgaagcacacctgagaaaactgggcctgggctatcgcgcacggtatgtgtcggcttcggctcgggctattctggaggagcagggaggactggcatggcttcagcagctgcgcgaatcttcctacgaggaggctcataaggcactgtgcatactgcccggtgtcggcacaaaagtagcagattgtatttgccttatggccttggacaagccccaggcagtaccggtcgacgtgcatatgtggcacatcgcccaacgcgattattcttggcaccccaccacgtctcaggccaaaggacctagccctcagacgaataaggagctgggtaacttcttccgctccttatggggcccatacgcagggtgggctcaagctgtgtcagtgcctcggtgtcctccatag

SEQ ID NO: 192679 - DNA, 975 bp, Artificial Sequence
  derived and/or modified sequence
atgcccgccagagccctgctgcccagaagaatgggccacagaaccctggccagcacccccgccctgtgggccagcatcccctgccccagaagcgagctgagactggacctggtgctgcccagcggccagagcttcagatggagagagcagagccccgcccactggagcggcgtgctggccgaccaggtgtggaccctgacccagaccgaggagcagctgcactgcaccgtgtacagaggcgacaagagccaggccagcagacccacccccgacgagctggaggccgtgagaaagtacttccagctggacgtgaccctggcccagctgtaccaccactggggcagcgtggacagccacttccaggaggtggcccagaagttccagggcgtgagactgctgagacaggaccccatcgagtgcctgttcagcttcatctgcagcagcaacaacaacatcgccagaatcaccggcatggtggagagactgtgccaggccttcggccccagactgatccagctggacgacgtgacctaccacggcttccccagcctgcaggccctggccggccccgaggtggaggcccacctgagaaagctgggcctgggctacagagccagatacgtgagcgccagcgccagagccatcctggaggagcagggcggcctggcctggctgcagcagctgagagagagcagctacgaggaggcccacaaggccctgtgcatcctgcccggcgtgggcaccaaggtggccgactgcatctgcctgatggccctggacaagccccaggccgtgcccgtggacgtgcacatgtggcacatcgcccagagagactacagctggcaccccaccaccagccaggccaagggccccagcccccagaccaacaaggagctgggcaacttcttcagaagcctgtggggcccctacgccggctgggcccaggccgtgagcgtgcccagatgccccccctag

SEQ ID NO: 192680 - protein, 410 aa, Artificial Sequence
  derived and/or modified sequence
MPARALLPRRMGHRTLASTPALWASIPCPRSELRLDLVLPSGQSFRWREQSPAHWSGVLADQVWTLTQTEEQLHCTVYRGDKSQASRPTPDELEAVRKYFQLDVTLAQLYHHWGSVDSHFQEVAQKFQGVRLLRQDPIECLFSFICSSNNNIARITGMVERLCQAFGPRLIQLDDVTYHGFPSLQALAGPEVEAHLRKLGLGYRARYVSASARAILEEQGGLAWLQQLRESSYEEAHKALCILPGVGTKVADCICLMALDKPQAVPVDVHMWHIAQRDYSWHPTTSQAKGPSPQTNKELGNFFRSLWGPYAGWAQATPPSYRCCSVPTCANPAMLRSHQQSAERVPKGRKARWGTLDKEIPQAPSPPFPTSLSPSPPSLMLGRGLPVTTSKARHPQIKQSVCTTRWGGGY

SEQ ID NO: 192681 - DNA, 1233 bp, Artificial Sequence
  derived and/or modified sequence
atgccagcacgcgcacttctaccccgcaggatggggcatcgcacgctcgcaagcacgcccgccttatgggccagcatcccatgcccgagatccgagctaaggctggatttagtgctcccaagtggacagtctttccgttggcgcgaacaaagccccgcgcattggtctggtgtcttggccgatcaggtctggactctcactcagacagaggagcagctgcattgtactgtgtacagaggagataaatcccaggccagccggcccacccccgacgagctggaagccgtgcgcaagtacttccagctcgatgtcactcttgctcagttgtatcaccattggggctctgttgatagccacttccaggaggtggcccaaaagttccagggggtaagattactgcgacaggaccctatcgaatgcctgtttagctttatctgctcttcaaacaacaacatagcaagaattactgggatggtcgaacgcttgtgccaggcttttgggcctcggcttatacaattggatgatgtgacttatcacggattcccatccctgcaggcattagctggccccgaggttgaggctcatctgcggaagttaggcctcggataccgcgctcggtatgtctctgcctctgcgagggccatcttggaagagcagggggggctcgcttggctgcagcagctgcgagaaagctcctacgaggaagctcacaaagcactttgtattttgcctggggtgggtaccaaagtagctgactgtatttgccttatggcgctggataagcctcaagccgtgcccgtggatgtacatatgtggcacatcgcccagcgtgattactcttggcatcccaccacatcccaagccaaaggcccctcaccacagacaaataaggaactggggaactttttcagatcgctctggggcccttacgccggatgggctcaggctactcccccatcctacaggtgttgtagcgtccccacctgcgctaacccagcgatgctcagaagtcaccagcagagcgcagagcgggtgccaaaagggcgcaaggccagatggggcaccctggacaaagagattccccaggcccctagtccacccttccctacctccctctcgccttctccaccatccctgatgctgggtcggggactccccgtgacgaccagcaaagccagacatccacaaataaaacagagcgtgtgcacaacacgatggggaggcggttactag

SEQ ID NO: 192682 - DNA, 1655 bp, Artificial Sequence
  derived and/or modified sequence
ctacttccggtggtgctgtggtctgcccctggagaacccagaagaacacagctgtgcgcgcccacaggctctgggggcgggagaagataagtcgcaaggagggggcgggacctacacctcaggaaagccggagaattggggcacgaagcggggctttgatgacccgcaaagggcgaggcatgcaggaggtggaggaattaagtgaaacagggaaggttgttaaacagcaccgtgtgggcgaggccttaagggtcgtggtccttgtctgggcggggtctttgggcgtcgacgaggcctggttctgggtaggcggggctactacggggcggtgcctgctgtggaaatgcctgcccgcgcgcttctgcccaggcgcatggggcatcgtactctagcctccactcctgccctgtgggcctccatcccgtgccctcgctctgagctgcgcctggacctggttctgccttctggacaatctttccggtggagggagcaaagtcctgcacactggagtggtgtactagcggatcaagtatggacactgactcagactgaggagcagctccactgcactgtgtaccgaggagacaagagccaggctagcaggcccacaccagacgagctggaggccgtgcgcaagtacttccagctagatgttaccctggctcaactgtatcaccactggggttccgtggactcccacttccaagaggtggctcagaaattccaaggtgtgcgactgctgcgacaagaccccatcgaatgccttttctcttttatctgttcctccaacaacaacatcgcccgcatcactggcatggtggagcggctgtgccaggcttttggacctcggctcatccagcttgatgatgtcacctaccatggcttccccagcctgcaggccctggctgggccagaggtggaggctcatctcaggaagctgggcctgggctatcgtgcccgttacgtgagtgccagtgcccgagccatcctggaagaacagggcgggctagcctggctgcagcagctacgagagtcctcatatgaggaggcccacaaggccctctgcatcctgcctggagtgggcaccaaggtggctgactgcatctgcctgatggccctagacaagccccaggctgtgcccgtggatgtccatatgtggcacattgcccaacgtgactacagctggcaccctaccacgtcccaggcgaagggaccgagcccccagaccaacaaggaactgggaaactttttccggagcctgtggggaccttatgctggctgggcccaagcgactccaccctcctacaggtgctgttcagtgccgacctgcgccaatcccgccatgctcaggagccaccagcaaagcgcagaaagggttccaaagggccggaaggctagatggggcaccctggacaaagaaattccccaagcaccttcccctccattccccacttctctctccccatccccacccagtctcatgttggggaggggcctccctgtgactacctcaaaggccaggcacccccaaatcaagcagtcagtttgcacaacaagatggggtgggggatattgagggagacagcgctaaggatggttttatcttccctttattacaagaaggaacaataaaatagaaacatttgtatggaaaa

SEQ ID NO: 192683 - DNA, 1233 bp, Artificial Sequence
  derived and/or modified sequence
atgcctgcccgggccctgctgcccaggaggatgggccacaggaccctggccagcaccccagccctgtgggccagcatcccctgccccaggtctgagctgcggctggacctggtgctgcccagcggccagagcttccgctggagggagcagagccctgcccactggagcggcgtgctggccgaccaggtgtggaccctgacccagacagaggagcagctgcactgcaccgtgtacagaggagacaagagccaggccagccggcccaccccagatgagctggaggccgtgaggaagtacttccagctggatgtgaccctggcccagctgtaccaccactggggctctgtggacagccacttccaggaggtggcccagaagttccagggcgtgcggctgctgcggcaggaccccattgaatgtctcttctccttcatctgcagcagcaacaacaacatcgcccgcatcaccggcatggtggagcggctgtgccaggccttcggccccaggctcatccagctggatgatgtgacctaccacggcttccccagcctgcaggccctggccggccctgaggtggaggcccacctgaggaagctgggcctgggctaccgggcccgctacgtgtctgccagcgcccgggccatcctggaggagcagggcggcctggcctggctgcagcagctgcgggagagcagctatgaggaggcccacaaggccctgtgcatcctgcccggggtgggcaccaaggtggccgactgcatctgcctgatggccctggacaagccccaggccgtgcctgtggatgtgcacatgtggcacatcgcccagagggactacagctggcaccccaccaccagccaggccaagggccccagcccccagaccaacaaggagctgggcaacttcttccgcagcctgtggggcccctatgccggctgggcccaggccaccccacccagctaccgctgctgcagcgtgcccacctgtgccaacccagccatgctgcggagccaccagcagagcgctgagcgggtgcccaagggcaggaaggcccgctggggcaccctggacaaggagatcccccaggcccccagcccccccttccccaccagcctgagccccagcccccccagcctgatgctgggccggggcctgcctgtgaccaccagcaaggcccggcacccccagatcaagcagagcgtgtgcaccacccgctggggcggcggctactag

SEQ ID NO: 192684 - DNA, 1233 bp, Artificial Sequence
  derived and/or modified sequence
atgcccgcccgggccctgctgccccggcggatgggccaccggaccctcgcatccactccagctctctgggcttccataccttgtcccagatccgagctgcgcctagatttagtgcttccttccggtcaatcctttcgatggagggagcagagtcctgcccattggtctggcgtcctggcagaccaggtgtggaccctgacgcagaccgaggagcagctccattgcactgtttataggggggacaaatctcaagcatctcgccctactcctgacgagctggaggctgtgaggaagtattttcagttagacgtgaccttagcacagctatatcaccattggggaagcgtggactcccattttcaggaagtagcccagaagttccaaggagtccgcctgctcaggcaagacccaattgagtgcctattctcctttatctgtagtagtaacaacaatattgctaggattaccggaatggtagagcggctttgccaagcctttggtccacgccttattcaattggacgacgtgacctatcatggctttccctcgttgcaagcactcgcgggacccgaggtcgaagcgcacctccgcaaactgggcttgggttaccgagccaggtacgtgtctgcctccgcaagagccatcctcgaagagcaaggtgggttagcttggctacagcaattacgggagagttcttatgaggaagctcataaagccctctgcattttgccaggagtgggaacaaaagtggccgattgcatctgtctgatggcgctggacaaacctcaggcagttcctgtcgacgttcacatgtggcacatcgcacagagagactacagctggcaccccaccacttcccaagcaaagggcccctcccctcaaacaaacaaagagcttggaaattttttccgttctttgtgggggccatatgcaggctgggcgcaggctacaccgccctcatacagatgttgctctgtgcctacctgcgccaatcccgccatgctgcgttcccaccagcagtccgcagagcgcgtcccaaaagggcggaaagctaggtggggcaccctggacaaagagataccccaggccccctctcctcctttccccacttcactcagtccttctccgccaagcttgatgctcggcagaggtctgcccgttacaaccagtaaggcacgacatccgcaaatcaaacaatcagtgtgtactaccaggtggggcgggggatactag

SEQ ID NO: 192685 - DNA, 1233 bp, Artificial Sequence
  derived and/or modified sequence
atgcctgctcgggctctcctacccaggaggatggggcatcgaaccctggcctcaactcccgcactgtgggccagtataccttgtccccgttcggaactcaggcttgacctggtcctgccgagcggacagtcattcagatggagggaacaatcacccgcacattggagcggggttctggccgaccaggtctggacactgacccagacagaggaacagctccactgtaccgtgtacaggggcgacaaatcacaggcttctagacccacacccgatgaactagaggccgttcgcaagtactttcaactagacgtgaccctagcacagctgtaccaccattggggttctgtggactcacacttccaggaagttgcccagaagtttcagggtgttcgtctgttacgccaggaccctattgaatgcctgtttagctttatttgcagcagtaataataatatcgctagaattactggtatggtggaaaggctatgccaggcttttgggcctcgattgatacaactagacgacgtcacataccatggcttccccagcttgcaggccctcgccggtcccgaagtagaggcccatctgcggaaattaggactaggctatcgcgctcgatacgtttcagcctccgcgagagctatcctggaggagcaggggggactggcatggctgcagcagctcagggagagctcctacgaggaggcacataaagcactctgtatcctgcccggagtcggtaccaaagtcgctgattgcatttgcctgatggcattggataaacctcaggccgtgcccgtagacgtgcatatgtggcacattgcccagcgcgactatagctggcatcctactactagccaggcaaagggaccctcccctcagacaaataaggaactggggaatttcttcaggtctttgtggggcccttatgcaggctgggcgcaagctacaccccctagttacagatgctgctctgttcccacatgcgctaaccctgccatgctgcgatcccaccagcagtccgcagaacgcgtccccaagggtagaaaagcgaggtggggaaccttagacaaagaaatccctcaggctcccagtccgcctttccccacttctttatcaccctcacccccttccctgatgctggggagagggcttccagtcactacctccaaggcccgacacccccagatcaagcagtcggtttgtaccacacgctggggtggtggatattag

SEQ ID NO: 192686 - DNA, 1233 bp, Artificial Sequence
  derived and/or modified sequence
atgcccgccagagccctgctgcccagaagaatgggccacagaaccctggccagcacccccgccctgtgggccagcatcccctgccccagaagcgagctgagactggacctggtgctgcccagcggccagagcttcagatggagagagcagagccccgcccactggagcggcgtgctggccgaccaggtgtggaccctgacccagaccgaggagcagctgcactgcaccgtgtacagaggcgacaagagccaggccagcagacccacccccgacgagctggaggccgtgagaaagtacttccagctggacgtgaccctggcccagctgtaccaccactggggcagcgtggacagccacttccaggaggtggcccagaagttccagggcgtgagactgctgagacaggaccccatcgagtgcctgttcagcttcatctgcagcagcaacaacaacatcgccagaatcaccggcatggtggagagactgtgccaggccttcggccccagactgatccagctggacgacgtgacctaccacggcttccccagcctgcaggccctggccggccccgaggtggaggcccacctgagaaagctgggcctgggctacagagccagatacgtgagcgccagcgccagagccatcctggaggagcagggcggcctggcctggctgcagcagctgagagagagcagctacgaggaggcccacaaggccctgtgcatcctgcccggcgtgggcaccaaggtggccgactgcatctgcctgatggccctggacaagccccaggccgtgcccgtggacgtgcacatgtggcacatcgcccagagagactacagctggcaccccaccaccagccaggccaagggccccagcccccagaccaacaaggagctgggcaacttcttcagaagcctgtggggcccctacgccggctgggcccaggccaccccccccagctacagatgctgcagcgtgcccacctgcgccaaccccgccatgctgagaagccaccagcagagcgccgagagagtgcccaagggcagaaaggccagatggggcaccctggacaaggagatcccccaggcccccagcccccccttccccaccagcctgagccccagcccccccagcctgatgctgggcagaggcctgcccgtgaccaccagcaaggccagacacccccagatcaagcagagcgtgtgcaccaccagatggggcggcggctactag

SEQ ID NO: 192687 - protein, 424 aa, Artificial Sequence
  derived and/or modified sequence
MPARALLPRRMGHRTLASTPALWASIPCPRSELRLDLVLPSGQSFRWREQSPAHWSGVLADQVWTLTQTEEQLHCTVYRGDKSQASRPTPDELEAVRKYFQLDVTLAQLYHHWGSVDSHFQEVAQKFQGVRLLRQDPIECLFSFICSSNNNIARITGMVERLCQAFGPRLIQLDDVTYHGFPSLQALAGPEVEAHLRKLGLGYRARYVSASARAILEEQGGLAWLQQLRESSYEEAHKALCILPGVGTKVADCICLMALDKPQAVPVDVHMWHIAQRDYSWHPTTSQAKGPSPQTNKELGNFFRSLWGPYAGWAQAGLLGNAFDGHQLLRPLIFCQDHLREGPPIGRGDSQGEELEPQLPSSLSSIPYGFCDHCWTKDVDDPPLVTHPSPGSRDGHMTQAWPVKVVSPLATVIGHVMQASLLAL

SEQ ID NO: 192688 - DNA, 1275 bp, Artificial Sequence
  derived and/or modified sequence
atgcctgcaagagcacttctgcctagacgcatgggacatcggacactcgcgtccaccccagcattatgggcatctattccctgtccccgtagcgagctccgcctggatctggtgctcccttctggccagtccttccggtggagggaacagtcacctgcacattggtccggtgtccttgccgaccaagtttggactctgactcaaacagaagagcagctgcactgcaccgtttaccgcggtgacaagtcccaagcctcaagaccaactcctgatgagctggaggccgtcaggaagtacttccagctggatgtcaccttagcgcagctgtatcatcattggggaagcgtggatagccacttccaggaagttgcccagaagttccagggcgttaggttgcttcgacaggatccgattgaatgtcttttttcctttatatgcagtagcaataacaatatcgcccgcataacaggtatggtcgaacgcctgtgccaggccttcggtccacgactgattcagctggacgacgtgacttatcatggattcccctccctacaagcactggccggaccggaggtagaggcccacttaagaaaactcggactcggctaccgggcgcgctatgtgtcggctagtgcccgcgctatcctggaagaacaggggggcttagcttggctgcagcagctgagagagagttcctacgaagaagcgcacaaagctctatgcattttgccgggtgtggggacgaaagtggccgattgcatttgcctcatggcgcttgataagcctcaggccgtgcctgttgatgtgcatatgtggcacatcgctcagcgagattactcctggcaccctacaacgtcccaggcaaagggcccctctccacagaccaacaaagaactcggtaacttttttagatcactgtggggtccgtacgccggctgggctcaggctggtctgctggggaatgcctttgatggccaccaactcctgaggcccctcattttctgtcaggatcacctgcgggaaggcccgcccattggccgcggggatagccaaggcgaggagcttgagccccagttgccctcttctttgtcttctattccctatggattctgtgaccattgctggacaaaagatgttgacgacccacctctggttacccacccctccccggggtcccgcgacggacacatgacgcaagcttggcctgtgaaagtagtgtcccccctggcgactgtgatcggtcacgtcatgcaggccagtctgctcgcactgtag

SEQ ID NO: 192689 - DNA, 2220 bp, Artificial Sequence
  derived and/or modified sequence
ctacttccggtggtgctgtggtctgcccctggagaacccagaagaacacagctgtgcgcgcccacaggctctgggggcgggagaagataagtcgcaaggagggggcgggacctacacctcaggaaagccggagaattggggcacgaagcggggctttgatgacccgcaaagggcgaggcatgcaggaggtggaggaattaagtgaaacagggaaggttgttaaacagcaccgtgtgggcgaggccttaagggtcgtggtccttgtctgggcggggtctttgggcgtcgacgaggcctggttctgggtaggcggggctactacggggcggtgcctgctgtggaaatgcctgcccgcgcgcttctgcccaggcgcatggggcatcgtactctagcctccactcctgccctgtgggcctccatcccgtgccctcgctctgagctgcgcctggacctggttctgccttctggacaatctttccggtggagggagcaaagtcctgcacactggagtggtgtactagcggatcaagtatggacactgactcagactgaggagcagctccactgcactgtgtaccgaggagacaagagccaggctagcaggcccacaccagacgagctggaggccgtgcgcaagtacttccagctagatgttaccctggctcaactgtatcaccactggggttccgtggactcccacttccaagaggtggctcagaaattccaaggtgtgcgactgctgcgacaagaccccatcgaatgccttttctcttttatctgttcctccaacaacaacatcgcccgcatcactggcatggtggagcggctgtgccaggcttttggacctcggctcatccagcttgatgatgtcacctaccatggcttccccagcctgcaggccctggctgggccagaggtggaggctcatctcaggaagctgggcctgggctatcgtgcccgttacgtgagtgccagtgcccgagccatcctggaagaacagggcgggctagcctggctgcagcagctacgagagtcctcatatgaggaggcccacaaggccctctgcatcctgcctggagtgggcaccaaggtggctgactgcatctgcctgatggccctagacaagccccaggctgtgcccgtggatgtccatatgtggcacattgcccaacgtgactacagctggcaccctaccacgtcccaggcgaagggaccgagcccccagaccaacaaggaactgggaaactttttccggagcctgtggggaccttatgctggctgggcccaagcgggcctccttggcaatgcatttgatggccaccagcttctgcgtcctcttatcttctgccaggatcacctccgagaaggcccccctatcgggagaggggattcacaaggtgaagaactggaaccccagcttccctccagcctctcctccattccctatgggttctgtgaccactgctggaccaaggacgtggatgaccctcccctagtcactcatccatcccctggctccagagatggtcacatgacccaggcctggccagtcaaagtagtctctcccctggccacagtaattggtcatgtgatgcaagccagcttactagcactttgagaatgagtctcctgttgagctggtaggatgtaagcctggagctaatggcgatcatctttgccaccacctggggagagcctgcttgggaatgaaattaacacaaaggaagtccaacctgagaaatggccaaatatatttcctgataacattatgtggccctctggatccagccatgcctgaggtctacccctgggcttttggattatgtgtacagttggttcatccctttttctgctaattcgagtcatggctaatttaacaccctttagaaccttaaagaaccatcagcatcacccgggaacttttttagaaatgcaaaatctctactgctttggatcctgggtcaaaaaaaagaaaaaaaaaagaaatgcaaaactttaggccctgccccagatttactaaatcaatctgcagtttaacaaaatcctcaggtgatttgtatgctcattgaactttaagaagcagtgttttagaacaggttcttaaaaaggaacaaataaactcatttaactaaagttaactgattaaagaggatttgctagggtattctttccacatctgtttgctttctctgggagaataagaagtcataagtcaaagaa

SEQ ID NO: 192690 - DNA, 1948 bp, Artificial Sequence
  derived and/or modified sequence
cggagaattggggcacgaagcggggctttgatgacccgcaaagggcgaggcatgcaggaggtggaggaattaagtgaaacagggaaggttgttaaacagcaccgtgtgggcgaggccttaagggtcgtggtccttgtctgggcggggtctttgggcgtcgacgaggcctggttctgggtaggcggggctactacggggcggtgcctgctgtggaaatgcctgcccgcgcgcttctgcccaggcgcatggggcatcgtactctagcctccactcctgccctgtgggcctccatcccgtgccctcgctctgagctgcgcctggacctggttctgccttctggacaatctttccggtggagggagcaaagtcctgcacactggagtggtgtactagcggatcaagtatggacactgactcagactgaggagcagctccactgcactgtgtaccgaggagacaagagccaggctagcaggcccacaccagacgagctggaggccgtgcgcaagtacttccagctagatgttaccctggctcaactgtatcaccactggggttccgtggactcccacttccaagaggtggctcagaaattccaaggtgtgcgactgctgcgacaagaccccatcgaatgccttttctcttttatctgttcctccaacaacaacatcgcccgcatcactggcatggtggagcggctgtgccaggcttttggacctcggctcatccagcttgatgatgtcacctaccatggcttccccagcctgcaggccctggctgggccagaggtggaggctcatctcaggaagctgggcctgggctatcgtgcccgttacgtgagtgccagtgcccgagccatcctggaagaacagggcgggctagcctggctgcagcagctacgagagtcctcatatgaggaggcccacaaggccctctgcatcctgcctggagtgggcaccaaggtggctgactgcatctgcctgatggccctagacaagccccaggctgtgcccgtggatgtccatatgtggcacattgcccaacgtgactacagctggcaccctaccacgtcccaggcgaagggaccgagcccccagaccaacaaggaactgggaaactttttccggagcctgtggggaccttatgctggctgggcccaagcggctggatcagatgcctcctgaagaattacagacttcttcctctagacttggagggcctccttggcaatgcatttgatggccaccagcttctgcgtcctcttatcttctgccaggatcacctccgagaaggcccccctatcgggagaggggattcacaaggtgaagaactggaaccccagcttccctccagcctctcctccattccctatgggttctgtgaccactgctggaccaaggacgtggatgaccctcccctagtcactcatccatcccctggctccagagatggtcacatgacccaggcctggccagtcaaagtagtctctcccctggccacagtaattggtcatgtgatgcaagccagcttactagcactttgagaatgagtctcctgttgagctggtaggatgtaagcctggagctaatggcgatcatctttgccaccacctggggagagcctgcttgggaatgaaattaacacaaaggaagtccaacctgagaaatggccaaatatatttcctgataacattatgtggccctctggatccagccatgcctgaggtctacccctgggcttttggattatgtgtacagttggttcatccctttttctgctaattcgagtcatggctaatttaacaccctttagaaccttaaagaaccatcagcatcacccgggaacttttttagaaatgcaaaatctctactgctttggatcctgggtcaaaaaaaagaaaaaaaaaagaaatgcaaaactttaggccctgccccagatttactaaatc

SEQ ID NO: 192691 - DNA, 1275 bp, Artificial Sequence
  derived and/or modified sequence
atgcctgcccgggccctgctgcccaggaggatgggccacaggaccctggccagcaccccagccctgtgggccagcatcccctgccccaggtctgagctgcggctggacctggtgctgcccagcggccagagcttccgctggagggagcagagccctgcccactggagcggcgtgctggccgaccaggtgtggaccctgacccagacagaggagcagctgcactgcaccgtgtacagaggagacaagagccaggccagccggcccaccccagatgagctggaggccgtgaggaagtacttccagctggatgtgaccctggcccagctgtaccaccactggggctctgtggacagccacttccaggaggtggcccagaagttccagggcgtgcggctgctgcggcaggaccccattgaatgtctcttctccttcatctgcagcagcaacaacaacatcgcccgcatcaccggcatggtggagcggctgtgccaggccttcggccccaggctcatccagctggatgatgtgacctaccacggcttccccagcctgcaggccctggccggccctgaggtggaggcccacctgaggaagctgggcctgggctaccgggcccgctacgtgtctgccagcgcccgggccatcctggaggagcagggcggcctggcctggctgcagcagctgcgggagagcagctatgaggaggcccacaaggccctgtgcatcctgcccggggtgggcaccaaggtggccgactgcatctgcctgatggccctggacaagccccaggccgtgcctgtggatgtgcacatgtggcacatcgcccagagggactacagctggcaccccaccaccagccaggccaagggccccagcccccagaccaacaaggagctgggcaacttcttccgcagcctgtggggcccctatgccggctgggcccaggccggcctgctgggcaatgcctttgatggccaccagctgctgcggcccctcatcttctgccaggaccacctgcgggagggcccccccatcggccgcggggacagccagggcgaggagctggagccccagctgcccagcagcctgagcagcatcccctacggcttctgtgaccactgctggaccaaggatgtggatgacccccccctggtgacccaccccagccctggcagcagagatggccacatgacccaggcctggcctgtgaaggtggtgagccccctggccaccgtgattggacatgtgatgcaggccagcctgctggccctgtag

SEQ ID NO: 192692 - DNA, 1275 bp, Artificial Sequence
  derived and/or modified sequence
atgcccgcccgggccctgctgccccggcggatgggccaccggaccctggcctcaactcctgccctctgggcctccatcccttgtccacggtccgaactgagactggacttggtgctaccatccggacagtcgttccgctggcgtgagcagtccccggcccactggagcggggtccttgcagatcaggtttggaccctgacacagacagaggaacaactgcattgcactgtctaccgcggagataaaagtcaggcctctagaccaacacccgacgagctcgaggccgtgagaaaatattttcaactggacgtgactctagctcagctttaccatcactggggctctgtagactctcacttccaggaagtggcccaaaaatttcagggggtcaggctactgcgccaagacccaattgagtgcttattttctttcatctgctccagcaacaacaacattgccagaatcactggcatggtggagcgcctgtgccaggcatttggcccacgtctcattcaacttgatgatgttacgtaccacggttttccgagtcttcaggccttagccggacctgaagtggaggcccatcttagaaagctggggcttggttaccgcgcaagatacgtgtcagcctcagcgagagctattctggaggagcagggcggactggcgtggctgcaacagctgagggaaagctcctacgaagaagctcacaaagccctatgcattctcccgggcgtgggtacaaaagtcgccgattgtatctgccttatggcattggacaaaccccaggcagtgcccgtggacgtgcacatgtggcacatcgctcagagggactattcctggcaccccactaccagccaggcgaagggcccgagcccacaaaccaataaggaattggggaatttcttcaggagcttgtggggcccttatgccgggtgggcacaggctggccttctggggaatgcgtttgacggacaccaactgctcagacctctgattttctgccaggaccatttgagagaaggccccccaatcgggcgaggggactcacagggggaggagttggagccccagctgccttccagtttatccagcattccatatggcttctgcgaccattgttggactaaggacgtggatgaccctcctctagtgactcacccttcacctggctctcgcgacggacatatgactcaggcatggcccgtgaaggttgtctcccctctcgccaccgtcatcggacacgtgatgcaggcaagtctcttagcattgtag

SEQ ID NO: 192693 - DNA, 1275 bp, Artificial Sequence
  derived and/or modified sequence
atgcccgctcgcgctctgcttccgcgaagaatgggacataggaccctcgccagtacacccgcactgtgggcttcaatcccttgccctaggtctgagctcaggctggacctggtactgccaagcggacagtctttcaggtggagggagcagagtcctgcccactggtccggagttttagctgatcaggtgtggacactgactcagacggaagagcagttgcactgcaccgtgtatagaggggataaatcccaagccagtaggccgactccggatgagctggaagctgtgcgaaagtacttccaactagacgtaacgctcgcccagctctatcatcattgggggagcgtggacagccatttccaagaggtggcccaaaaattccagggcgtccgccttctgcgtcaggatcctattgagtgcctcttttcctttatctgtagcagcaataacaatattgccagaattaccggtatggtcgagcgcctctgccaggccttcggccctcgtctaatacaacttgacgatgtgacataccatggttttccatcactccaagctttagcaggacccgaggtagaagcccacctgcgcaaacttggcttgggctatcgcgctcgatacgtgtcagccagtgctagagccattctggaggagcaaggtggcctggcctggcttcagcagctgagagaaagctcttacgaggaagcgcataaagctttatgcatactccctggcgttggcactaaggtggctgactgtatctgtctcatggctcttgataaaccacaggctgtaccagtggatgttcacatgtggcatattgctcaacgagactactcctggcacccaacaaccagccaggccaaaggaccctcaccccagacgaacaaggaacttgggaattttttcagatccctttgggggccatacgccggatgggcacaggccggtttattgggcaacgcctttgacggccatcagttgttgcgcccattgatcttttgccaggatcacctgcgagaaggcccaccaattggccgtggagattcgcaaggagaagagctcgagcctcagcttccctctagcctatcatccattccgtatggcttctgcgaccactgttggaccaaggacgttgatgacccaccattggtaacccatccaagtcccggaagccgagacgggcatatgactcaggcatggcctgtgaaggtggtgagcccattagcaaccgtgatcggtcacgtgatgcaggcatctttgcttgctctctag

SEQ ID NO: 192694 - DNA, 1275 bp, Artificial Sequence
  derived and/or modified sequence
atgcccgccagagccctgctgcccagaagaatgggccacagaaccctggccagcacccccgccctgtgggccagcatcccctgccccagaagcgagctgagactggacctggtgctgcccagcggccagagcttcagatggagagagcagagccccgcccactggagcggcgtgctggccgaccaggtgtggaccctgacccagaccgaggagcagctgcactgcaccgtgtacagaggcgacaagagccaggccagcagacccacccccgacgagctggaggccgtgagaaagtacttccagctggacgtgaccctggcccagctgtaccaccactggggcagcgtggacagccacttccaggaggtggcccagaagttccagggcgtgagactgctgagacaggaccccatcgagtgcctgttcagcttcatctgcagcagcaacaacaacatcgccagaatcaccggcatggtggagagactgtgccaggccttcggccccagactgatccagctggacgacgtgacctaccacggcttccccagcctgcaggccctggccggccccgaggtggaggcccacctgagaaagctgggcctgggctacagagccagatacgtgagcgccagcgccagagccatcctggaggagcagggcggcctggcctggctgcagcagctgagagagagcagctacgaggaggcccacaaggccctgtgcatcctgcccggcgtgggcaccaaggtggccgactgcatctgcctgatggccctggacaagccccaggccgtgcccgtggacgtgcacatgtggcacatcgcccagagagactacagctggcaccccaccaccagccaggccaagggccccagcccccagaccaacaaggagctgggcaacttcttcagaagcctgtggggcccctacgccggctgggcccaggccggcctgctgggcaacgccttcgacggccaccagctgctgagacccctgatcttctgccaggaccacctgagagagggcccccccatcggcagaggcgacagccagggcgaggagctggagccccagctgcccagcagcctgagcagcatcccctacggcttctgcgaccactgctggaccaaggacgtggacgacccccccctggtgacccaccccagccccggcagcagagacggccacatgacccaggcctggcccgtgaaggtggtgagccccctggccaccgtgatcggccacgtgatgcaggccagcctgctggccctgtag

SEQ ID NO: 192695 - protein, 304 aa, Artificial Sequence
  derived and/or modified sequence
MAGNFDSEERSSWYWGRLSRQEAVALLQGQRHGVFLVRDSSTSPGDYVLSVSENSRVSHYIINSSGPRPPVPPSPAQPPPGVSPSRLRIGDQEFDSLPALLEFYKIHYLDTTTLIEPVSRSRQGSGVILRQEEAEYVRALFDFNGNDEEDLPFKKGDILRIRDKPEEQWWNAEDSEGKRGMIPVPYVEKYRPASASVSALIGGNQEGSHPQPLGGPEPGPYAQPSVNTPLPNLQNGPIYARVIQKRVPNAYDKTALALEVGELVKVTKINVSGQWEGECNGKRGHFPFTHVRLLDQQNPDEDFS

SEQ ID NO: 192696 - DNA, 915 bp, Artificial Sequence
  derived and/or modified sequence
atggccggcaacttcgacagcgaggagagaagcagctggtactggggcagactgagcagacaggaggccgtggccctgctgcagggccagagacacggcgtgttcctggtgagagacagcagcaccagccccggcgactacgtgctgagcgtgagcgagaacagcagagtgagccactacatcatcaacagcagcggccccagaccccccgtgccccccagccccgcccagcccccccccggcgtgagccccagcagactgagaatcggcgaccaggagttcgacagcctgcccgccctgctggagttctacaagatccactacctggacaccaccaccctgatcgagcccgtgagcagaagcagacagggcagcggcgtgatcctgagacaggaggaggccgagtacgtgagagccctgttcgacttcaacggcaacgacgaggaggacctgcccttcaagaagggcgacatcctgagaatcagagacaagcccgaggagcagtggtggaacgccgaggacagcgagggcaagagaggcatgatccccgtgccctacgtggagaagtacagacccgccagcgccagcgtgagcgccctgatcggcggcaaccaggagggcagccacccccagcccctgggcggccccgagcccggcccctacgcccagcccagcgtgaacacccccctgcccaacctgcagaacggccccatctacgccagagtgatccagaagagagtgcccaacgcctacgacaagaccgccctggccctggaggtgggcgagctggtgaaggtgaccaagatcaacgtgagcggccagtgggagggcgagtgcaacggcaagagaggccacttccccttcacccacgtgagactgctggaccagcagaaccccgacgaggacttcagctag

SEQ ID NO: 192697 - DNA, 915 bp, Artificial Sequence
  derived and/or modified sequence
atggccggcaacttcgatagcgaggagaggtcatcctggtactgggggaggctctccaggcaagaggccgtcgcattactgcaaggccagaggcacggcgtgttccttgtgagggactcctccactagtccaggcgattacgtgttatctgtgtcagagaacagcagagtgagccactacataataaattcatctggaccccggcctcctgtgcctccaagcccggcgcagccaccacctggggtctccccctccaggctgcggataggtgatcaggaatttgatagtctgcccgcactgctcgaattttataagattcactacctagacaccactacgcttatagagcccgtgtctaggagccgacagggatccggcgtcatcctgcggcaagaggaggctgaatatgtcagagcccttttcgacttcaatggaaatgacgaggaggacctgccattcaagaagggagatatcctgcggatccgggacaagcctgaggagcaatggtggaacgcagaagattccgaggggaaacgcggcatgatccccgtgccatatgtagagaaataccgtcccgcaagtgcctctgtgtccgccctgataggaggaaaccaggagggctcacacccgcagcccctggggggaccagagccagggccttatgcccagccaagcgtgaatacacccctaccaaacctgcagaatggccctatttatgccagggtgatccaaaagcgggtcccaaatgcgtatgataagacagctcttgcgttagaggtaggcgaactcgttaaagtgactaaaattaacgttagcgggcagtgggagggcgaatgtaacggtaagagaggacatttcccattcactcatgttcgcctgttggatcagcaaaaccctgacgaggattttagctag

SEQ ID NO: 192698 - DNA, 915 bp, Artificial Sequence
  derived and/or modified sequence
atggccggcaactttgattctgaggagaggagctcctggtactggggccgcctgagccggcaggaggccgtggccctgctgcagggccagagacatggagtcttcctggtgcgggacagcagcaccagccctggggactatgtgctgtctgtgtctgagaacagccgggtgagccactacatcatcaacagcagcggccccaggcctcctgtgccccccagccctgcccagcccccacctggggtgagccccagccggctgagaattggagaccaggagtttgacagcctgcctgccctgctggagttctacaagatccactacctggacaccaccaccctgattgagcctgtgagccgcagccggcagggcagcggggtcatcctgcggcaggaggaggccgagtatgtgcgggccctgtttgacttcaatggaaatgatgaggaggacctgcccttcaagaagggggacatcctgcgcatccgggacaagccagaggagcagtggtggaatgcagaagattctgagggcaagaggggcatgatccctgtgccctacgtggagaagtacagacctgccagcgcctctgtgtctgccctgattggaggcaaccaggagggcagccacccccagcccctgggcggccctgagcccggcccctatgcccagcccagcgtgaacacccccctgcccaacctgcagaatggccccatctatgcccgggtcatccagaagagggtgcccaatgcctatgacaagacagccctggccctggaggtgggggagctggtgaaggtgaccaagatcaacgtgtctggccagtgggagggggagtgcaatggcaagaggggccacttccccttcacccacgtgcggctgctggaccagcagaacccagatgaggacttctcctag

SEQ ID NO: 192699 - DNA, 915 bp, Artificial Sequence
  derived and/or modified sequence
atggccggcaacttcgacagcgaggagcggagcagctggtactgggggaggctttccagacaggaagccgtggctctgttgcaaggacagaggcatggcgtgttcctggtccgagatagctccacctctcctggcgattatgttctcagcgtgagcgagaactcccgcgtatctcattatataatcaactcctccgggccccggcccccagtgcctccttctcctgcacagcccccacccggagtatccccgtcaagacttcgcataggtgaccaagagttcgactctctacctgctcttcttgagttctacaaaattcattatcttgatactactacactgatcgagccagttagccggagtcggcagggtagcggcgtgattctgcgacaggaagaggctgaatacgtcagagcgttgttcgacttcaatggaaatgatgaggaagacttaccatttaagaaaggtgatattctgcgcatcagggataagccagaggaacagtggtggaacgccgaggattctgagggcaagcgtggaatgattcctgtgccctatgtcgaaaaatatagaccggctagcgcttcagtgtctgcactaataggaggaaatcaagagggtagccatccgcagccactgggaggaccagaacccggaccctacgcccagccctctgtcaatactcccctacctaatctgcaaaatggccctatatatgcccgagtgattcagaagagggttcccaacgcctatgacaaaactgcgctggccttggaggtgggagaattggtgaaggtcacgaagatcaacgtgtctgggcagtgggaaggcgaatgtaatggcaaacggggtcactttccttttacacatgtgaggctcctagaccagcagaatcctgacgaagacttctcttag

SEQ ID NO: 192700 - DNA, 915 bp, Artificial Sequence
  derived and/or modified sequence
atggctggtaactttgactctgaggagcgttcctcctggtactggggaagactgtctaggcaggaagctgttgctctgctccaagggcaacggcatggagtgttcctggtgagagatagtagtaccagccccggagattatgttctgagcgtctcagaaaacagtcgggtatcccactatataattaattccagcggaccacggccacctgtccctccctccccagcccaacctccgccaggcgtgtctccatctaggctccggattggcgatcaggagttcgattcgctgccagctctgctggagttctataagatccattatctcgacactacgaccttaattgagcccgtctcccgcagtagacaaggctcaggagtcattttacgccaggaggaggctgagtatgttcgggctctgttcgattttaacggaaacgacgaggaagatctgccattcaagaagggtgatattttgcgcatcagggataaaccggaggagcagtggtggaatgccgaagactctgaaggaaagagaggcatgatccctgttccctatgtggagaaatatcgccctgcctccgcttctgtgtcagcgctgatcggcggaaatcaagagggttctcatccccagccactggggggacctgagccgggaccctacgctcagccttccgttaatacccctctacctaatcttcagaacggacctatctatgcaagagtgatccagaaaagagttcccaatgcgtacgataagacagcccttgcactagaggtgggcgaactggtgaaggttaccaaaataaatgtttctggccagtgggaaggtgagtgcaacggcaaaagagggcacttccccttcacccatgtgaggctgttggaccagcagaaccctgatgaagattttagctag

SEQ ID NO: 192701 - DNA, 3880 bp, Artificial Sequence
  derived and/or modified sequence
gggggaggcccgcggctgccgccgccatttcgggcgctgctgtgaagctgaaaccggagccggtccgctgggcggcgggcgccgggggccggaggggcgcgcgcggcggcggcaccccagcgtttaggcgcggaggcagccatggcgggcaacttcgactcggaggagcggagtagctggtactgggggaggttgagtcggcaggaggcggtggcgctgctgcagggccagcggcacggggtgttcctggtgcgggactcgagcaccagccccggggactatgtgctcagcgtctcagagaactcgcgcgtctcccactacatcatcaacagcagcggcccgcgcccgccggtgccaccgtcgcccgcccagcctccgcccggggtgagcccctccagactccgaataggagatcaagagtttgattcattgcctgctttactggaattctacaaaatacactatttggacactacaacgttgatagaaccagtttccagatccaggcagggtagtggagtgattctcaggcaggaggaggcggagtatgtgcgagccctctttgactttaatgggaatgatgaggaagatcttccctttaagaaaggagacatcttgagaatccgggacaagcctgaagagcagtggtggaatgcggaggacagcgaaggcaagagagggatgattccagtcccttacgtcgagaagtatagacctgcctccgcctcagtatcggctctgattggaggtaaccaggagggttcccacccacagccactgggtgggccggagcctgggccctatgcccaacccagcgtcaacactccgctccctaacctccagaatgggcccatatatgccagggttatccagaagcgagtccccaatgcctacgacaagacagccttggctttggaggtcggtgagctggtaaaggttacgaagattaatgtgagtggtcagtgggaaggggagtgtaatggcaaacgaggtcacttcccattcacacatgtccgtctgctggatcaacagaatcccgatgaggacttcagctgagtatagttcaacagttttgctgacagatgggaacaatcttttttttttttttccaactgccatctatacaattttcttacagatgtcaaaagcagtctagtttatataagcattctgttacctgtgatattttttagactgaactgctccattcctagtcttaattaccatattcagggtacgaactggagggcttgtgtgttagcttctgaattggcaattggaggcggtagtggtcgtgcctgtgtgtatcagaagggataggtatcttgcctcctttctctcaggcagtgcaaatcaccctgtggaaaaccgatggacaggaaggagtgttacacactgcttaccctgatttattcagtggttttgttttcattctggaaccatactatcaaatggcgacagactgttccgttccacccccgtgaagtaatcatgcaccgtgtgaatagtatcaagcaggattgctttcattgtatggagcatgaccagcgtgtgactcattctgacatttcagatcctaagaattctaagaacactactagaagcatttgttccctcctagtcaatgcttcatactttttcttgggattcttttagcccttgacattcttgtcccccaaacctgtaagtaggtgaattcctaagataagtgtgtattttcattccaggtgaaaagcaggatgtaccgagcactttattcagtgcatagctttaagccagtgttggattcactaagtggacagccagtctcccagctctctgccttccccaaaagggtcgtagtaggtcacccttctacagcagctaactagagtcctaactaatgggatccagcagggccatttctccagagggccagtatcctattaggagactcttggaattcttaggttctactcaagagtggaaggaccaatcacctctgatattctgtggaaggttttggggtcaaattctgccctctgcattctgtgcaacttgtataaaagtcaagttagtattacatgaatttggggtagggttagtgctttgaaaaaatgttgaaccggctgggcgcggtggctcacgtctgtaatcccagcactttgggaggccgaggcgggtggatcatgaggtcaggagttcgagaccagcctggccaacatagtgaaaccccatctctgctaaagatataaaaaattagcccggcgtggtggtgcacgcctgtaatcccagctactcgggaggctgaggcaggagaattgcttcaacctgggaggtggaggctgcagtgagccgagatcgcaccactgcgttccagcctgagcgacagggcaagactcagtctcaaaaaaaaaaaaaaggaaaaaaaaaagaaaaaaaaatgttgaaccaattgtgaattacttatgtattattcatttctcatggggagagtaatgctgttgaagaacattacattgtaaactgccttcatttttggctctttgtttatgttcaggtttagtttacaaacccatttaagtatggaatgatttatatggggtcaggtgctccacaaaatagacctatgagaccaaaaatgacctaggctatttagacgacagcatgaaacttccacgttagttctcagtctataaaggcacttaccggtctctggtgtggtatgaccaatagaaacaccttatagtttgctttggacctcattttggaaaaataatctgcctttctaattgttctgcataggttaaaatgataaatttacattctttgaacctataccagattgtggtgtccgagtgaccggcacactgtctgacacacagtcagtgtgcacgtatttgtctgagtgaatgaggagacctgagaaaccggtgacgtggcacagggaagccagctggcccaggattccgtacatggccgcaagcagactaacgcgttgacgctaatttaatgtattttacctcacactaaggtcatgcttgataaagacgttaaactcaacttgtaaaatggtagcccagtgctatgcacagagtgggtgctcattagtgttgaatgaacacatttgtaatactacatgtaattccatctgactgctttgttaaattttcagttagaacgtagatactgtaaagtccacacacacattaaatcttgttttcctgaaagtatggcatcaaaaatacttgtagaaaaaccttgtcacaactgatttgaatgttcctattttcttttcctttgactttgatattggcttgtaatgtctcttttcatcatatgtaatatcagtggaacaggcagcgctactcaagtcctaaggattcctcagtgatcagtgatccagggccgttcatgaaccactgggctggatttgactgttgagtgtggcagttaatgcccctcaagaaatcaaaggatgtcttataagtgtcttccaaaaaaaagcaaatgctgaaatcctattggcaaagtaaactgaaattggctgctatattttatataatcatttctgcaaatcccattttttgaatactaatatttgacatggttaattcttattaatttgttggaattgtttattgttaataatgcaaatagataatttttaattatccacaagtaacatttcactgttaatggtttgaaataggtgataagcaaaccaatttgaaataaaatataaacatgtgccattgtattataacactatacactttcttgacagttaaatttaaaaaaaaattttttttggtagcatgtattgtatatgtttatagtatatgtagtaaataaaaatatggccaaatgtttggcttggtgatcttttgcaaaaaagtaa

SEQ ID NO: 192702 - protein, 706 aa, Artificial Sequence
  derived and/or modified sequence
MSSDASQGVITTPPPPSMPHKERYFDRINENDPEYIRERNMSPDLRQDFNMMEQRKRVTQILQSPAFREDLECLIQEQMKKGHNPTGLLALQQIADYIMANSFSGFSSPPLSLGMVTPINDLPGADTSSYVKGEKLTRCKLASLYRLVDLFGWAHLANTYISVRISKEQDHIIIIPRGLSFSEATASNLVKVNIIGEVVDQGSTNLKIDHTGFSPHAAIYSTRPDVKCVIHIHTLATAAVSSMKCGILPISQESLLLGDVAYYDYQGSLEEQEERIQLQKVLGPSCKVLVLRNHGVVALGETLEEAFHYIFNVQLACEIQVQALAGAGGVDNLHVLDFQKYKAFTYTVAASGGGGVNMGSHQKWKVGEIEFEGLMRTLDNLGYRTGYAYRHPLIREKPRHKSDVEIPATVTAFSFEDDTVPLSPLKYMAQRQQREKTRWLNSPNTYMKVNVPEESRNGETSPRTKITWMKAEDSSKVSGGTPIKIEDPNQFVPLNTNPNEVLEKRNKIREQNRYDLKTAGPQSQLLAGIVVDKPPSTMQFEDDDHGPPAPPNPFSHLTEGELEEYKRTIERKQQGLEDAEQELLSDDASSVSQIQSQTQSPQNVPEKLEENHELFSKSFISMEVPVMVVNGKDDMHDVEDELAKRVSRLSTSTTIENIEITIKSPEKIEEVLSPEGSPSKSPSKKKKKFRTPSFLKKNKKKEKVEA

SEQ ID NO: 192703 - DNA, 2121 bp, Artificial Sequence
  derived and/or modified sequence
atgtctagtgatgccagccaaggcgtgattaccacaccccctcccccctcgatgcctcacaaggaacgctactttgatcgtatcaacgagaatgaccccgagtatatccgggagagaaacatgtctcctgaccttaggcaggactttaacatgatggaacagagaaagcgcgtcacccagatcctgcagtcccccgcatttcgagaggatctggagtgcctgatccaggaacagatgaaaaagggacacaatcccacaggtctgttagccctgcagcaaattgccgactacataatggccaacagcttctctgggtttagctcaccacctctttccctgggcatggtcacacccatcaacgatttacccggtgcagatacgtcttcatacgtaaagggagagaagttgacaaggtgcaaattggcaagtctttaccggcttgtcgatctttttggttgggctcacctcgccaacacctacatatctgtgcggatctctaaagagcaagatcatattatcatcattcctagaggactgagcttcagcgaggccactgcaagtaacctggtcaaggtgaacataattggcgaggtcgtggaccagggaagcaccaatctgaagatcgatcacaccggattctctccccacgccgcaatttacagcacgcggcctgatgtgaaatgtgtcattcacattcatactctggctactgcggccgtgagctcgatgaaatgcgggattctgcccatttctcaggaatccctcctcttgggcgatgttgcctattacgactatcagggttccctggaggagcaggaggaaagaatacagcttcagaaagttctggggccctcttgcaaggtgctggtgctccggaaccacggagtcgtggccttgggagaaacgctggaggaggcttttcactatatattcaatgtgcagctcgcatgcgaaatccaagtgcaggcattagccggggccggtggagtagataacctccatgtactggacttccagaaatacaaggcgttcacttacaccgtcgccgcgtcagggggcggaggtgtgaatatgggatctcaccagaagtggaaagtcggggagatagagtttgaaggtcttatgcgcactttggacaacctgggctaccgtaccggctacgcctacagacatcccctgatcagggaaaagccccgacacaagagcgacgtggagatccctgctaccgtaaccgcattctccttcgaggatgacacagtccccctgtcaccactcaaatacatggctcagaggcagcaacgagaaaagacccggtggctcaactctcccaacacatatatgaaggtcaatgtacctgaggaaagcaggaatggggaaacatcacctaggactaagatcacgtggatgaaggctgaggactcaagcaaggtgagcgggggaacacccattaaaattgaagaccctaaccagttcgtgccactgaatacaaatcctaatgaggttctcgaaaagagaaataaaatcagggagcagaaccgttacgacttaaagaccgctggaccccaatcacagctgttggcagggatcgtggttgataaaccaccctcaactatgcagtttgaagacgacgaccatggaccacctgcccctcctaaccctttcagtcacctgacagagggtgagctcgaggaatacaaacgtaccatagagaggaaacaacagggcctcgaagacgcagagcaggagttgttgtctgacgatgcttctagcgtgagccagattcagagccagactcagtctccacagaacgtgccagaaaaactcgaggagaaccatgaactgttctcaaagagcttcatctcaatggaggtccccgtcatggtggtcaatggcaaggacgacatgcacgatgtcgaagacgaactggccaaacgcgtgagtaggctcagcacgtccaccaccatagagaacatagaaattacaattaagagtccagagaagatcgaggaagtactaagccccgaaggtagtccgtccaaatcgccatccaaaaagaaaaaaaagttcaggacacccagtttcctgaagaagaacaagaagaaggaaaaggtggaagcctag

SEQ ID NO: 192704 - DNA, 3081 bp, Artificial Sequence
  derived and/or modified sequence
ggggcgctcggctagtcccgccagagcgcgagccgccagcccgtaacggtcgccagtgtgaggggcgggagggaaagaagaggggtttaaattagattttttaaaacacagagcaagcgccagaggcgtcggcatcccaggtgtcgccgcttcctgctgcacagggctcggcgtacaggtccctccctcctcaagccccctccccttctcccgccctaccctctggggctctgcggcgcttaagaggcggccgcagcggcggatccggcggctgctgcagcccgggcggctgccgagaaggagggaggggaaacacaaagccggctacgcgctgcgagataacaagagtaatccacagacttaaaacatgagctcagatgccagccaaggcgtgattaccactcctcctcctcccagcatgcctcacaaagagagatattttgaccgcatcaatgaaaatgacccagaatacattagggagaggaacatgtctcctgatctacgacaagacttcaacatgatggagcagaggaaacgagttactcagatcctgcaaagtcctgcctttcgggaagacttggaatgccttattcaagaacagatgaagaaaggccacaacccaactggattactagcattacagcagattgcagattacatcatggccaattctttctcgggtttttcttcacctcctctcagtcttggcatggtcacacctatcaatgaccttcctggtgcagatacatcctcatatgtgaagggagaaaaacttactcgctgtaaacttgccagcctgtacagacttgtagacttgtttggatgggcacacctggcaaatacctatatctcagtaagaataagtaaggagcaagaccacattataataattcccagaggcctatctttttctgaagctacagcctccaatttggtgaaagtcaatataataggagaagtggttgaccagggaagtaccaatttgaaaattgaccatacaggattcagtccccatgctgcaatctattcaacacgtcctgatgttaagtgtgtgatacacatccatacccttgcaacagcagctgtatcctccatgaaatgtgggatccttccaatttctcaagagtctcttcttctgggagatgttgcctattatgactaccaagggtcacttgaagaacaggaggagagaattcaactgcagaaggttctgggaccaagttgtaaggtgctggtactcaggaatcatggtgtggttgcacttggagaaacattagaggaggcttttcattatatttttaatgtgcaactagcctgtgagattcaggtgcaggccctagcaggtgcaggtggagtagacaatctccatgtactggactttcagaagtataaagctttcacttacactgtagcagcgtctggtggaggaggtgtgaatatgggttcccatcaaaaatggaaggttggcgaaattgagtttgaagggcttatgaggactctggacaacttggggtatagaacaggctatgcttacaggcatcctctcattcgagagaagcctaggcacaagagtgatgtggaaatcccagcaactgtgactgctttttcctttgaagacgatacagtgccactctctcctctcaaatacatggcacagaggcaacagcgtgaaaaaacaagatggctgaactcaccaaatacttacatgaaagtgaatgtgcctgaggagtctcggaacggagaaaccagtccccgaaccaaaatcacgtggatgaaagcagaagactcatctaaagttagtggtggaacacctatcaaaattgaagatccaaatcagtttgttcctttaaacacaaacccgaatgaggtactagaaaagagaaataagattcgggaacaaaatcgatatgacttgaaaacagcaggaccacaatctcagttgcttgctggaattgttgtggataagccaccttctactatgcaatttgaagatgatgatcatggcccaccagctcctcctaacccatttagtcatctcacagaaggagaacttgaagagtataagaggacaatcgaacgtaaacaacaaggcctagaagatgctgagcaggaattactctcagatgacgcttcatctgtttcacaaattcagtctcaaactcagtcaccgcaaaatgtccctgaaaaattagaagaaaaccatgagctgttttccaagagcttcatctccatggaagtgcctgtcatggtagtaaatggcaaggatgatatgcatgatgttgaagatgagcttgctaagcgagtgagtaggttaagcacaagtacaaccatagaaaacatcgagattactattaagtctccagagaaaatcgaagaagtcctgtcacctgaaggctccccttcaaaatcgccatccaagaaaaagaagaaattccgcactccttcttttctgaaaaagaacaaaaaaaaggagaaagttgaggcctaaataaagtctttttataattattattataacaatgtgacattgcacatctaaataccacatttaagttgatcattaatatgcaatggtagatcagattgggggatgtagcaaactggactttaagaactggaaagaggttttacaaaagaaaaactttcagattcatctctcattttatatgtccagaaatggctttgaattttaagcaattactagttttaattagctctgccctcatgaagtattattataattcaccataaacagctatctgtctgaattacttcaggccttctccataatatctgttagaaagaaattgccagtgagcaagtgagaatttttatttctcaatacctgcttcacttgataatcatattataattttttatcatgattattgactatatttttggagtcccattgtttcagtgggcattaacagaatgctttaaaaacttctaagacaagaatctatagcattagtatacactggcacataattttttaaaaagttttaagaaaagattcatttggaattttattcacagtataaaatttcctcacctgaagtaactttgtttgccaaaaaa

SEQ ID NO: 192705 - DNA, 2121 bp, Artificial Sequence
  derived and/or modified sequence
atgagcagtgatgccagccagggcgtcatcaccaccccacctcctccttccatgccccacaaggagcgctactttgaccgcatcaatgaaaatgaccctgagtacatccgggagaggaacatgagcccagacctgcggcaggacttcaacatgatggagcagaggaagagggtgacccagatcctgcagagccctgccttccgggaggacctggagtgcctgatccaggagcagatgaagaagggccacaaccccaccggcctgctggccctgcagcagattgctgactacatcatggccaacagcttcagcggcttcagcagcccccccctgagcctgggcatggtgacccccatcaatgacctgcctggagctgacaccagcagctatgtgaagggggagaagctgacccgctgcaagctggccagcctgtaccgcctggtggacctgtttggctgggcccacctggccaacacctacatctctgtgcgcatcagcaaggagcaggaccacatcatcatcatcccccggggcctgtccttcagcgaggccacagccagcaacctggtgaaggtgaacatcattggagaggtggtggaccagggcagcaccaacctgaagattgaccacacaggcttcagcccccatgctgccatctacagcaccaggccagatgtgaagtgtgtgatccacatccacaccctggccacagctgctgtgtcctccatgaagtgtggcatcctgcccatcagccaggagagcctgctgctgggagatgtggcctactatgactaccagggcagcctggaggagcaggaggagcgcatccagctgcagaaggtgctgggccccagctgcaaggtgctggtgctgaggaaccacggcgtggtggccctgggggagaccctggaggaggccttccactacatcttcaacgtgcagctggcctgtgagatccaggtgcaggccctggccggggccggcggcgtggacaacctgcacgtgctggacttccagaagtacaaggccttcacctacacagtggccgccagcggcggcggcggcgtgaacatgggcagccaccagaagtggaaggtgggggagattgaatttgagggcctgatgaggaccctggacaacctgggctacagaacaggctacgcctaccgccaccccctcatccgggagaagcccaggcacaagagtgatgtggagatcccagccaccgtgacagccttctcctttgaagatgacacagtgcccctgagccccctgaagtacatggcccagaggcagcagcgggagaagacccgctggctgaacagccccaacacctacatgaaggtgaatgtgcctgaggagagcagaaatggagagaccagccccaggaccaagatcacctggatgaaggccgaggacagcagcaaggtgtctgggggcacccccatcaagattgaggaccccaaccagtttgtgcccctgaacaccaaccccaatgaggtgctggagaagaggaacaagatccgggagcagaacagatatgacctgaagacagctggcccccagagccagctgctggccggcatcgtggtggacaagccacccagcaccatgcagtttgaagatgatgaccacggccccccagccccacccaaccccttcagccacctgacagaaggagagctggaggagtacaagaggaccattgaaaggaagcagcagggcctggaggatgctgagcaggagctgctgagtgatgatgccagctctgtgtcccagatccagagccagacccagagcccccagaatgtgcctgagaagctggaggagaaccacgagctgttcagcaagagcttcatctccatggaggtgcctgtgatggtggtgaatggcaaggatgacatgcatgatgtggaggatgagctggccaagagggtgtcccggctgagcaccagcaccaccatcgagaacatcgagatcaccatcaagagccctgagaagattgaggaggtgctgagccctgagggcagccccagcaagagccccagcaagaagaagaagaagttccgcacccccagcttcctgaagaagaacaagaagaaggagaaggtggaggcctag

SEQ ID NO: 192706 - DNA, 2121 bp, Artificial Sequence
  derived and/or modified sequence
atgagcagcgacgccagccagggcgtgatcaccacccccccccccccctcaatgcctcataaagaacgttattttgatagaatcaatgagaacgatcctgagtacattcgtgagagaaacatgagtccagacctgagacaggattttaacatgatggagcagcggaaacgagttacccagattctacagagccccgctttcagggaggatctggaatgtctgatccaggaacagatgaaaaaaggtcacaatcctactgggttgctggctttacagcagatagcagattatatcatggctaattcattctcaggcttctcctcccctcctctgagcttgggcatggttactccgattaatgaccttcccggcgcagatacttcctcttatgtgaagggcgagaagttaactcgttgcaaactggcctctctctaccggttggtcgaccttttcggttgggcacacctggctaatacctacattagtgtacgaatttcaaaggagcaagaccacatcatcatcattcctcggggcctgagcttcagcgaggctacagccagtaatttggtaaaagttaatatcattggcgaggtggtggaccagggctccaccaacttaaaaatcgatcacacaggcttttcaccccatgccgccatttacagcactcgtcccgacgttaaatgcgttatccatatccataccctcgcgactgccgccgttagttcaatgaagtgtggaattctccccatctcacaagagagcttactgctgggtgacgtcgcctattacgattaccagggatcgttggaggaacaggaggaaaggattcagctgcagaaggtgctgggacctagctgcaaagtcctggtgcttcggaatcacggtgtcgttgccctgggggaaaccctcgaagaggccttccactatatatttaatgttcaactagcttgtgagatccaggttcaggcactcgctggggccggaggggtggacaaccttcacgttctggactttcagaaatacaaggcgtttacttacaccgtggccgcttcggggggaggcggcgttaatatgggaagccatcagaagtggaaggtgggcgagattgaatttgaggggttgatgcgtacactggacaacttggggtacaggacgggatacgcctataggcatcctctcataagagaaaaacctcggcataaatcggacgtagagatcccagccaccgtaacggcattctcctttgaggacgataccgtcccgctgtccccccttaaatacatggcccagagacaacagcgagaaaaaactcgatggctgaactctccgaatacgtacatgaaggtgaatgtgccagaggaatcacggaacggcgagacaagtccgcgcactaaaatcacgtggatgaaggccgaggactcaagcaaggtctctggaggcacacctattaaaatcgaggaccccaatcagttcgtgccattaaataccaatcccaatgaggtattagaaaagcgtaacaagatccgcgagcagaaccggtacgatctgaaaaccgcaggcccacaatctcagttgctggccgggatcgtggttgataagccccctagcaccatgcagttcgaggatgatgatcatggcccccctgctccccctaacccattctcccacctgactgagggcgaactcgaagagtacaaacgtacaatcgagcgcaaacagcaaggacttgaggatgccgagcaggagctactgtccgatgatgcttcatctgtctctcagatccaaagtcagacccagtcaccccaaaacgtaccagagaaactggaagaaaatcacgagctgttctccaaaagcttcattagcatggaggtgcctgtcatggtagttaatgggaaggatgatatgcacgacgtcgaggacgagctcgcaaagagagtaagtcgtcttagcacttctaccaccattgagaacatcgagataaccatcaagagcccagagaagatagaagaagtcctttcacctgagggttctccaagcaaatccccatctaagaagaaaaagaaatttcgaaccccaagtttccttaaaaagaacaaaaagaaggagaaagtagaggcctag

SEQ ID NO: 192707 - DNA, 2121 bp, Artificial Sequence
  derived and/or modified sequence
atgtccagcgatgcctctcagggcgtgattacaacacccccaccaccatctatgccccataaggaaagatacttcgacagaatcaacgaaaatgatcctgagtacatacgcgaaagaaacatgtcgcccgacttacgacaggatttcaacatgatggagcaaagaaagcgcgtgacccagatcttgcagtcccctgcatttcgcgaggatcttgagtgtctcatccaggaacagatgaagaagggccataatcccactggtctgcttgctctccagcagattgcagattacatcatggccaattccttttccggattcagttccccccctttgagcctgggaatggtgacaccgattaacgatctccctggcgctgatacaagtagttacgttaagggcgaaaagttgacaaggtgtaaattagcatccctttacagactcgttgatctattcggatgggcacacctggcaaatacctacatctcggtgcgcatctcgaaagaacaggatcatatcattatcattccacgaggtttatcattttcagaagccacggcttccaacttggttaaggtcaacattatcggggaagtcgttgaccagggctcaaccaatctgaaaatcgatcatacaggcttcagccctcacgccgcaatctattccacgcgtccagacgtgaaatgtgtcatccacattcatacattagcgactgccgctgtctcttctatgaaatgtggaatcctgccaatctctcaggaatctctacttttgggcgatgtggcatattacgactaccagggatctttggaggagcaggaagaacgtatacagctccagaaagtgctgggacccagctgtaaggtattagtgcttcgcaatcatggcgtggttgccctgggcgaaacattggaagaggcttttcattatatctttaacgtgcagctggcctgtgaaatacaggtccaggcattggccggtgccggaggggttgataatctgcacgtgctagattttcagaaatataaagccttcacctacaccgtagctgcgtccgggggaggaggggtgaacatgggcagccaccagaagtggaaagtgggagaaattgaatttgaaggactgatgcgcacccttgataacctgggctacagaacggggtacgcctatcggcatccgctgatacgagagaagcctcgtcacaagagcgatgtggaaatcccggcaacggtcacagctttcagttttgaggatgacaccgtgcctcttagtccacttaaatacatggcacaaaggcagcagagagaaaagacccgctggttgaattcccctaacacttatatgaaagtaaatgtgcccgaagagagccgaaacggagaaacttctccgaggacaaagattacatggatgaaggcagaggactcatctaaagtatccggcggaacaccaattaagatcgaagatcccaaccagttcgtccctcttaataccaatcccaatgaagtcttagagaaacgtaacaagattcgggagcagaaccgctatgacctaaagacagccggtcctcagtcccagctgctggcgggaatcgtagtcgacaagcctccctcgactatgcagttcgaagacgacgaccatggacctccagcacccccaaacccctttagccacctgaccgaaggggaactcgaagagtacaagcgaactatcgagcgtaaacagcaggggctggaggacgccgagcaagagttgctctctgacgacgcttccagtgtgagtcagatccagtcgcaaacacagtccccacagaacgtgcccgaaaaacttgaagaaaaccacgaactgttttctaaatctttcattagcatggaggtaccggttatggtagttaatggaaaagatgacatgcatgacgtagaagatgaactcgcaaaacgagtctcaagactctctactagcacgacaatcgagaacatagagatcaccatcaagtctccggaaaagatcgaggaagtccttagtccagagggttctccatccaagagcccgagcaagaagaagaagaaattcaggacgcctagcttcctaaagaagaacaaaaaaaaagagaaggtggaagcgtag

SEQ ID NO: 192708 - DNA, 2121 bp, Artificial Sequence
  derived and/or modified sequence
atgagcagcgacgccagccagggcgtgatcaccaccccccccccccccagcatgccccacaaggagagatacttcgacagaatcaacgagaacgaccccgagtacatcagagagagaaacatgagccccgacctgagacaggacttcaacatgatggagcagagaaagagagtgacccagatcctgcagagccccgccttcagagaggacctggagtgcctgatccaggagcagatgaagaagggccacaaccccaccggcctgctggccctgcagcagatcgccgactacatcatggccaacagcttcagcggcttcagcagcccccccctgagcctgggcatggtgacccccatcaacgacctgcccggcgccgacaccagcagctacgtgaagggcgagaagctgaccagatgcaagctggccagcctgtacagactggtggacctgttcggctgggcccacctggccaacacctacatcagcgtgagaatcagcaaggagcaggaccacatcatcatcatccccagaggcctgagcttcagcgaggccaccgccagcaacctggtgaaggtgaacatcatcggcgaggtggtggaccagggcagcaccaacctgaagatcgaccacaccggcttcagcccccacgccgccatctacagcaccagacccgacgtgaagtgcgtgatccacatccacaccctggccaccgccgccgtgagcagcatgaagtgcggcatcctgcccatcagccaggagagcctgctgctgggcgacgtggcctactacgactaccagggcagcctggaggagcaggaggagagaatccagctgcagaaggtgctgggccccagctgcaaggtgctggtgctgagaaaccacggcgtggtggccctgggcgagaccctggaggaggccttccactacatcttcaacgtgcagctggcctgcgagatccaggtgcaggccctggccggcgccggcggcgtggacaacctgcacgtgctggacttccagaagtacaaggccttcacctacaccgtggccgccagcggcggcggcggcgtgaacatgggcagccaccagaagtggaaggtgggcgagatcgagttcgagggcctgatgagaaccctggacaacctgggctacagaaccggctacgcctacagacaccccctgatcagagagaagcccagacacaagagcgacgtggagatccccgccaccgtgaccgccttcagcttcgaggacgacaccgtgcccctgagccccctgaagtacatggcccagagacagcagagagagaagaccagatggctgaacagccccaacacctacatgaaggtgaacgtgcccgaggagagcagaaacggcgagaccagccccagaaccaagatcacctggatgaaggccgaggacagcagcaaggtgagcggcggcacccccatcaagatcgaggaccccaaccagttcgtgcccctgaacaccaaccccaacgaggtgctggagaagagaaacaagatcagagagcagaacagatacgacctgaagaccgccggcccccagagccagctgctggccggcatcgtggtggacaagccccccagcaccatgcagttcgaggacgacgaccacggcccccccgccccccccaaccccttcagccacctgaccgagggcgagctggaggagtacaagagaaccatcgagagaaagcagcagggcctggaggacgccgagcaggagctgctgagcgacgacgccagcagcgtgagccagatccagagccagacccagagcccccagaacgtgcccgagaagctggaggagaaccacgagctgttcagcaagagcttcatcagcatggaggtgcccgtgatggtggtgaacggcaaggacgacatgcacgacgtggaggacgagctggccaagagagtgagcagactgagcaccagcaccaccatcgagaacatcgagatcaccatcaagagccccgagaagatcgaggaggtgctgagccccgagggcagccccagcaagagccccagcaagaagaagaagaagttcagaacccccagcttcctgaagaagaacaagaagaaggagaaggtggaggcctag

SEQ ID NO: 192709 - protein, 197 aa, Artificial Sequence
  derived and/or modified sequence
MVERLCQAFGPRLIQLDDVTYHGFPSLQALAGPEVEAHLRKLGLGYRARYVSASARAILEEQGGLAWLQQLRESSYEEAHKALCILPGVGTKETFSGACGDLMLAGPKRCCSVPTCANPAMLRSHQQSAERVPKGRKARWGTLDKEIPQAPSPPFPTSLSPSPPSLMLGRGLPVTTSKARHPQIKQSVCTTRWGGGY

SEQ ID NO: 192710 - protein, 357 aa, Artificial Sequence
  derived and/or modified sequence
MPARALLPRRMGHRTLASTPALWASIPCPRSELRLDLVLPSGQSFRWREQSPAHWSGVLADQVWTLTQTEEQLHCTVYRGDKSQASRPTPDELEAVRKYFQLDVTLAQLYHHWGSVDSHFQEVAQKFQGVRLLRQDPIECLFSFICSSNNNIARITGMVERLCQAFGPRLIQLDDVTYHGFPSLQALAGPEVEAHLRKLGLGYRARYVSASARAILEEQGGLAWLQQLRESSYEEAHKALCILPGVGTKGLLGNAFDGHQLLRPLIFCQDHLREGPPIGRGDSQGEELEPQLPSSLSSIPYGFCDHCWTKDVDDPPLVTHPSPGSRDGHMTQAWPVKVVSPLATVIGHVMQASLLAL

SEQ ID NO: 192711 - DNA, 594 bp, Artificial Sequence
  derived and/or modified sequence
atggtcgaacgcctctgccaggcgttcgggccaagactcattcagctggatgacgtcacataccatggcttcccttcacttcaggcgctggcagggcccgaagtagaagctcatctacggaaactgggattgggctatcgagccagatacgtcagtgcaagcgcacgggctattctcgaggagcagggaggactcgcatggcttcagcagctgcgagaatcatcgtacgaggaagcccacaaagccttatgcattttaccaggggtcggcaccaaagagacttttagcggtgcgtgcggggacctcatgctggccggccctaagcgctgttgttctgtccctacctgcgccaacccagcaatgctgcgctcccaccagcagtccgcggagcgggtgcccaaaggtcgaaaagccaggtggggcacccttgataaagagatccctcaggccccctccccccccttcccaacctccctctctccctctcctccaagtttaatgttagggaggggcctgcccgtcactacctccaaggcgcgccaccctcagattaagcagagcgtgtgcaccactcgttgggggggtggatactag

SEQ ID NO: 192712 - DNA, 1074 bp, Artificial Sequence
  derived and/or modified sequence
atgcctgctcgggccctgctgccacgtcggatggggcatcggactctcgcctccaccccagcgttgtgggcaagtatcccttgcccacgcagtgaattgcgtctcgacttagtcttacctagtgggcaatcttttagatggcgggagcaaagtcccgcccattggtccggagtattggctgaccaggtctggactttgacacaaacagaggaacaacttcattgtaccgtgtatcgaggcgacaaatctcaggcttcccgcccaactccagatgagctcgaagctgtgcggaagtactttcagctggatgtgactttggctcagctttatcatcattgggggtcagtagactcacactttcaggaagtggcacagaagtttcagggcgtacgcctgctgagacaggatcctattgagtgcctattttccttcatctgctcatcaaacaacaatatcgccagaatcacagggatggtagagcgactgtgccaggctttcgggccccggctgattcaactagacgacgtgacataccatggtttccccagcctgcaggcactcgctgggcctgaagtggaggcccacctgcggaagttgggtctgggctatagggccagatatgtgtccgcaagcgctcgagcaatacttgaggagcagggcggactggcttggctgcagcagctgcgcgaatctagttacgaagaagcccacaaggctctatgtatcttacctggcgtcggcactaaaggcctgcttgggaacgcttttgacgggcatcagcttctgcgccctctcatcttctgtcaagatcacctgagagagggccctcctatagggcgcggcgactcccagggtgaggaattggaaccccagctgccatcatccctgtcctcaataccttatggcttttgcgaccactgctggacaaaagatgttgacgatccgcctcttgtgacccacccctcgcccggttcacgcgatggacacatgacccaagcctggccggtcaaggtcgtttctcctctcgccaccgtgataggccacgtgatgcaggctagcttgctggccctttag

SEQ ID NO: 192713 - DNA, 1084 bp, Artificial Sequence
  derived and/or modified sequence
ggcggtgcctgctgtggaaatgcctgcccgcgcgcttctgcccaggcgcatggggcatcgtactctagcctccactcctgccctgtgggcctccatcccgtgccctcgctctgagctgcgcctggacctggttctgccttctggacaatctttccggtggagggagcaaagtcctgcacactggagtggtgtactagcggatcaagtatggacactgactcagactgaggagcagctccactgcactgtgtaccgaggagacaagagccaggctagcaggcccacaccagacgagctggaggccgtgcgcaagtacttccagctagatgttaccctggctcaactgtatcaccactggggttccgtggactcccacttccaagaggtggctcagaaattccaaggtgtgcgactgctgcgacaagaccccatcgaatgccttttctcttttatctgttcctccaacaacaacatcgcccgcatcactggcatggtggagcggctgtgccaggcttttggacctcggctcatccagcttgatgatgtcacctaccatggcttccccagcctgcaggccctggctgggccagaggtggaggctcatctcaggaagctgggcctgggctatcgtgcccgttacgtgagtgccagtgcccgagccatcctggaagaacagggcgggctagcctggctgcagcagctacgagagtcctcatatgaggaggcccacaaggccctctgcatcctgcctggagtgggcaccaaggaaactttttccggagcctgtggggaccttatgctggctgggcccaagcggtgctgttcagtgccgacctgcgccaatcccgccatgctcaggagccaccagcaaagcgcagaaagggttccaaagggccggaaggctagatggggcaccctggacaaagaaattccccaagcaccttcccctccattccccacttctctctccccatccccacccagtctcatgttggggaggggcctccctgtgactacctcaaaggccaggcacccccaaatcaagcagtcagtttgcacaacaagatggggtgggggatattga

SEQ ID NO: 192714 - DNA, 1950 bp, Artificial Sequence
  derived and/or modified sequence
ctacttccggtggtgctgtggtctgcccctggagaacccagaagaacacagctgtgcgcgcccacaggctctgggggcgggagaagataagtcgcaaggagggggcgggacctacacctcaggaaagccggagaattggggcacgaagcggggctttgatgacccgcaaagggcgaggcatgcaggaggtggaggaattaagtgaaacagggaaggttgttaaacagcaccgtgtgggcgaggccttaagggtcgtggtccttgtctgggcggggtctttgggcgtcgacgaggcctggttctgggtaggcggggctactacggggcggtgcctgctgtggaaatgcctgcccgcgcgcttctgcccaggcgcatggggcatcgtactctagcctccactcctgccctgtgggcctccatcccgtgccctcgctctgagctgcgcctggacctggttctgccttctggacaatctttccggtggagggagcaaagtcctgcacactggagtggtgtactagcggatcaagtatggacactgactcagactgaggagcagctccactgcactgtgtaccgaggagacaagagccaggctagcaggcccacaccagacgagctggaggccgtgcgcaagtacttccagctagatgttaccctggctcaactgtatcaccactggggttccgtggactcccacttccaagaggtggctcagaaattccaaggtgtgcgactgctgcgacaagaccccatcgaatgccttttctcttttatctgttcctccaacaacaacatcgcccgcatcactggcatggtggagcggctgtgccaggcttttggacctcggctcatccagcttgatgatgtcacctaccatggcttccccagcctgcaggccctggctgggccagaggtggaggctcatctcaggaagctgggcctgggctatcgtgcccgttacgtgagtgccagtgcccgagccatcctggaagaacagggcgggctagcctggctgcagcagctacgagagtcctcatatgaggaggcccacaaggccctctgcatcctgcctggagtgggcaccaagggcctccttggcaatgcatttgatggccaccagcttctgcgtcctcttatcttctgccaggatcacctccgagaaggcccccctatcgggagaggggattcacaaggtgaagaactggaaccccagcttccctccagcctctcctccattccctatgggttctgtgaccactgctggaccaaggacgtggatgaccctcccctagtcactcatccatcccctggctccagagatggtcacatgacccaggcctggccagtcaaagtagtctctcccctggccacagtaattggtcatgtgatgcaagccagcttactagcactttgagaatgagtctcctgttgagctggtaggatgtaagcctggagctaatggcgatcatctttgccaccacctggggagagcctgcttgggaatgaaattaacacaaaggaagtccaacctgagaaatggccaaatatatttcctgataacattatgtggccctctggatccagccatgcctgaggtctacccctgggcttttggattatgtgtacagttggttcatccctttttctgctaattcgagtcatggctaatttaacaccctttagaaccttaaagaaccatcagcatcacccgggaacttttttagaaatgcaaaatctctactgctttggatcctgggtcaaaaaaaagaaaaaaaaaagaaatgcaaaactttaggccctgccccagatttactaaatcaatctgcagtttaacaaaatcctcaggtgatttgtatgctcattgaactttaagaagcagtgttttagaacaggttcttaaaaaggaacaaataaactcatttaactaaagttaactgattaaagagg

SEQ ID NO: 192715 - DNA, 594 bp, Artificial Sequence
  derived and/or modified sequence
atggtggagcggctgtgccaggccttcggccccaggctcatccagctggatgatgtgacctaccacggcttccccagcctgcaggccctggccggccctgaggtggaggcccacctgaggaagctgggcctgggctaccgggcccgctacgtgtctgccagcgcccgggccatcctggaggagcagggcggcctggcctggctgcagcagctgcgggagagcagctatgaggaggcccacaaggccctgtgcatcctgcccggggtgggcaccaaggagaccttcagcggggcctgtggggacctgatgctggccggccccaagcgctgctgcagcgtgcccacctgtgccaacccagccatgctgcggagccaccagcagagcgctgagcgggtgcccaagggcaggaaggcccgctggggcaccctggacaaggagatcccccaggcccccagcccccccttccccaccagcctgagccccagcccccccagcctgatgctgggccggggcctgcctgtgaccaccagcaaggcccggcacccccagatcaagcagagcgtgtgcaccacccgctggggcggcggctactag

SEQ ID NO: 192716 - DNA, 1074 bp, Artificial Sequence
  derived and/or modified sequence
atgcctgcccgggccctgctgcccaggaggatgggccacaggaccctggccagcaccccagccctgtgggccagcatcccctgccccaggtctgagctgcggctggacctggtgctgcccagcggccagagcttccgctggagggagcagagccctgcccactggagcggcgtgctggccgaccaggtgtggaccctgacccagacagaggagcagctgcactgcaccgtgtacagaggagacaagagccaggccagccggcccaccccagatgagctggaggccgtgaggaagtacttccagctggatgtgaccctggcccagctgtaccaccactggggctctgtggacagccacttccaggaggtggcccagaagttccagggcgtgcggctgctgcggcaggaccccattgaatgtctcttctccttcatctgcagcagcaacaacaacatcgcccgcatcaccggcatggtggagcggctgtgccaggccttcggccccaggctcatccagctggatgatgtgacctaccacggcttccccagcctgcaggccctggccggccctgaggtggaggcccacctgaggaagctgggcctgggctaccgggcccgctacgtgtctgccagcgcccgggccatcctggaggagcagggcggcctggcctggctgcagcagctgcgggagagcagctatgaggaggcccacaaggccctgtgcatcctgcccggggtgggcaccaagggcctgctgggcaatgcctttgatggccaccagctgctgcggcccctcatcttctgccaggaccacctgcgggagggcccccccatcggccgcggggacagccagggcgaggagctggagccccagctgcccagcagcctgagcagcatcccctacggcttctgtgaccactgctggaccaaggatgtggatgatcctcccctggtgacccaccccagccctggcagcagagatggccacatgacccaggcctggcctgtgaaggtggtgagccccctggccaccgtcatcggccacgtgatgcaggccagcctgctggccctgtag

SEQ ID NO: 192717 - DNA, 594 bp, Artificial Sequence
  derived and/or modified sequence
atggtggagcggctgtgccaggccttcggcccccggctgatccagctagacgatgttacataccacgggttcccctctctccaggctctggctggccccgaggtcgaagcccatttacgcaaactgggactaggatatagagccaggtacgtatccgcttctgcaagagccatcctggaagagcagggagggctggcctggttacaacagctgcgcgaatccagctatgaggaggctcacaaggccctgtgtattctccccggagtgggaaccaaagagactttttcaggcgcttgtggggacttgatgctggcggggcccaagcgatgctgcagtgtgcctacgtgcgcaaatcccgccatgttaagatcccaccagcaatccgcagagagggtcccaaaaggacgcaaagcacgctggggcactctggataaggagataccacaggcgccttctcccccatttccaacatctcttagcccatctccgccctccctgatgcttggacggggattacctgtcactacatctaaggcgagacacccccagatcaaacagagcgtgtgcaccacccgatggggaggagggtactag

SEQ ID NO: 192718 - DNA, 1074 bp, Artificial Sequence
  derived and/or modified sequence
atgcccgcccgggccctgctgccccggcggatgggccaccggaccctggcatctacgcctgctctctgggcctctattccctgtcctcgatccgaactccgccttgaccttgtgctgccatctggacaatcgtttcgatggagagaacagagccccgcacactggagcggggtgctggctgatcaggtttggaccctgactcagacggaagagcagctgcactgtactgtctaccgtggcgataaatctcaggcaagcagacccacaccagacgaactagaagccgttcgcaagtatttccagctggacgtcacactcgctcaattataccaccactggggcagcgtggactctcactttcaggaggtggcacaaaagttccagggtgtacgactattgaggcaggaccctatcgagtgcctgtttagtttcatatgctcctcaaacaacaacattgctcggatcactggcatggttgaacggctgtgccaggcttttgggcctagactaattcagctggatgacgtaacctaccatggcttcccctcattgcaagctctggccggccccgaagtggaggctcatctgcgcaagctggggttgggttacagggccaggtacgtctcggcatcggctcgggcgattcttgaagagcagggcggcctggcctggctgcagcagctacgggaaagctcgtatgaggaggcgcacaaggcattatgcattttgcccggggttggtaccaaaggtctgctcggtaacgcctttgacggacatcaactactccgccccctgatattctgtcaagaccacctgagagagggcccaccaattggcagaggcgactcccaaggcgaggagcttgagccccagctgcccagttccttgtcctcgatcccttatggattttgcgatcattgttggacgaaggacgtagacgatccccccctggttactcacccctctcctggcagcagggatggccacatgacccaggcatggcctgtcaaggttgtcagtccgttggctactgtcataggccatgttatgcaggcgtccctcctggcactgtag

SEQ ID NO: 192719 - DNA, 594 bp, Artificial Sequence
  derived and/or modified sequence
atggtggaacgtctgtgtcaggcgtttggccctcgtctgatccagcttgacgatgtgacgtaccacggctttccctcgttgcaagctttggcgggacccgaagtggaggcccatctccgtaagctgggactaggatatagagctcgctatgtctccgcctctgcacgcgcaatcctcgaggaacaggggggactggcatggctccagcagctccgcgaaagctcatatgaagaggcacataaggctctttgtatactccctggtgtggggacaaaagaaaccttcagtggggcttgtggagatctcatgctcgcgggaccaaaaaggtgctgtagtgtgccaacctgcgccaaccccgctatgctgcgctctcatcagcagtcggctgaacgtgtgcccaaaggtcggaaagctcgctggggcacacttgataaggagatcccccaagcccctagccctccatttcccacatctctgtcgccttcgccccctagtcttatgttgggcagaggtttgcccgtgactacctctaaagctcggcatccccagattaagcaaagcgtgtgcacaacacggtggggcggaggatactag

SEQ ID NO: 192720 - DNA, 1074 bp, Artificial Sequence
  derived and/or modified sequence
atgccagcgagagctctcctgcctcgaagaatgggacacaggactttagcatcaacacctgccctgtgggcgagtatcccgtgccctagaagcgagctccgtttagatctcgtcctccctagtggtcagagtttcaggtggagagagcagagtcccgctcattggtcaggcgttttagctgatcaagtatggaccctgacccaaacagaagagcaactacattgcaccgtgtataggggagacaaatcccaggcctctcggcctactccggacgaactggaggccgtacgtaaatattttcagttggacgtgaccctggcccagctttaccaccactggggatctgtagatagtcactttcaggaagtggctcagaagtttcaaggagtccgcctgttgcgacaggatcctatcgaatgtctgtttagctttatctgttcctcaaacaacaacatagcacggattaccggaatggttgagagactatgtcaggccttcgggccaaggcttattcagctcgacgatgtgacttatcacggcttcccgagccttcaagctcttgccggtccagaggtggaagcccatctgcgaaagctgggtctaggctatcgcgcaagatatgtctccgccagcgcacgggcaatattagaggaacaagggggactagcatggctccaacagctgcgagaaagttcctacgaagaggcgcacaaagccctgtgtatactgccaggcgtggggacgaaggggctcctgggcaacgctttcgatggccaccagcttcttcggcctctgatcttctgccaggaccatctgcgagaaggccctccaattgggaggggggactctcagggcgaagaacttgagccccaacttccttcgagcttgagctcaataccctacggattctgtgatcattgctggactaaggatgtcgacgacccccctctggtgacccacccctctccaggttctagagatggtcacatgacacaggcgtggccagtaaaggtggtcagtcccttagctacagtgatcggacacgtcatgcaagccagcttgctcgccttatag

SEQ ID NO: 192721 - DNA, 594 bp, Artificial Sequence
  derived and/or modified sequence
atggtggagagactgtgccaggccttcggccccagactgatccagctggacgacgtgacctaccacggcttccccagcctgcaggccctggccggccccgaggtggaggcccacctgagaaagctgggcctgggctacagagccagatacgtgagcgccagcgccagagccatcctggaggagcagggcggcctggcctggctgcagcagctgagagagagcagctacgaggaggcccacaaggccctgtgcatcctgcccggcgtgggcaccaaggagaccttcagcggcgcctgcggcgacctgatgctggccggccccaagagatgctgcagcgtgcccacctgcgccaaccccgccatgctgagaagccaccagcagagcgccgagagagtgcccaagggcagaaaggccagatggggcaccctggacaaggagatcccccaggcccccagcccccccttccccaccagcctgagccccagcccccccagcctgatgctgggcagaggcctgcccgtgaccaccagcaaggccagacacccccagatcaagcagagcgtgtgcaccaccagatggggcggcggctactag

SEQ ID NO: 192722 - DNA, 1074 bp, Artificial Sequence
  derived and/or modified sequence
atgcccgccagagccctgctgcccagaagaatgggccacagaaccctggccagcacccccgccctgtgggccagcatcccctgccccagaagcgagctgagactggacctggtgctgcccagcggccagagcttcagatggagagagcagagccccgcccactggagcggcgtgctggccgaccaggtgtggaccctgacccagaccgaggagcagctgcactgcaccgtgtacagaggcgacaagagccaggccagcagacccacccccgacgagctggaggccgtgagaaagtacttccagctggacgtgaccctggcccagctgtaccaccactggggcagcgtggacagccacttccaggaggtggcccagaagttccagggcgtgagactgctgagacaggaccccatcgagtgcctgttcagcttcatctgcagcagcaacaacaacatcgccagaatcaccggcatggtggagagactgtgccaggccttcggccccagactgatccagctggacgacgtgacctaccacggcttccccagcctgcaggccctggccggccccgaggtggaggcccacctgagaaagctgggcctgggctacagagccagatacgtgagcgccagcgccagagccatcctggaggagcagggcggcctggcctggctgcagcagctgagagagagcagctacgaggaggcccacaaggccctgtgcatcctgcccggcgtgggcaccaagggcctgctgggcaacgccttcgacggccaccagctgctgagacccctgatcttctgccaggaccacctgagagagggcccccccatcggcagaggcgacagccagggcgaggagctggagccccagctgcccagcagcctgagcagcatcccctacggcttctgcgaccactgctggaccaaggacgtggacgacccccccctggtgacccaccccagccccggcagcagagacggccacatgacccaggcctggcccgtgaaggtggtgagccccctggccaccgtgatcggccacgtgatgcaggccagcctgctggccctgtag

SEQ ID NO: 192723 - protein, 195 aa, Artificial Sequence
  derived and/or modified sequence
MPARALLPRRMGHRTLASTPALWASIPCPRSELRLDLVLPSGQSFRWREQSPAHWSGVLADQVWTLTQTEEQLHCTVYRGDKSQASRPTPDELEAVRKYFQLDVTLAQLYHHWGSVDSHFQEVAQKFQGVRLLRQDPIECLFSFICSSNNNIARITGMVERLCQAFGPRLIQLDDVTYHGFPSLQALAGPPWQCI

SEQ ID NO: 192724 - DNA, 588 bp, Artificial Sequence
  derived and/or modified sequence
atgcccgcccgtgccttactccccaggcggatgggccaccggaccctggcatcgactcccgccctctgggcctctatcccttgtcccaggagtgagttgcgactggatttggtgttgccatcaggtcagagcttccgctggcgggaacagtcaccggcccattggtccggtgtcctggctgaccaggtgtggaccctgacccaaacagaggaacagttgcattgtaccgtgtatcgtggagacaagtcccaggcatcccgccccacgccggacgagctcgaggcagtcagaaagtacttccagctggacgtgaccttggcccagctctatcaccattggggtagcgtcgattcccacttccaagaagttgcacaaaagttccagggcgtaaggctgctgcgtcaggaccccatcgagtgcctgttttcctttatctgtagcagcaacaacaacattgcccgaatcacaggcatggtggagcggttgtgtcaggccttcggtccccgcctgatccagctggatgacgtgacctaccacgggtttccgagcctgcaagcgctggcaggaccaccgtggcagtgcatatag

SEQ ID NO: 192725 - DNA, 1069 bp, Artificial Sequence
  derived and/or modified sequence
cgaagcggggctttgatgacccgcaaagggcgaggcatgcaggaggtggaggaattaagtgaaacagggaaggttgttaaacagcaccgtgtgggcgaggccttaagggtcgtggtccttgtctgggcggggtctttgggcgtcgacgaggcctggttctgggtaggcggggctactacggggcggtgcctgctgtggaaatgcctgcccgcgcgcttctgcccaggcgcatggggcatcgtactctagcctccactcctgccctgtgggcctccatcccgtgccctcgctctgagctgcgcctggacctggttctgccttctggacaatctttccggtggagggagcaaagtcctgcacactggagtggtgtactagcggatcaagtatggacactgactcagactgaggagcagctccactgcactgtgtaccgaggagacaagagccaggctagcaggcccacaccagacgagctggaggccgtgcgcaagtacttccagctagatgttaccctggctcaactgtatcaccactggggttccgtggactcccacttccaagaggtggctcagaaattccaaggtgtgcgactgctgcgacaagaccccatcgaatgccttttctcttttatctgttcctccaacaacaacatcgcccgcatcactggcatggtggagcggctgtgccaggcttttggacctcggctcatccagcttgatgatgtcacctaccatggcttccccagcctgcaggccctggctgggcctccttggcaatgcatttgatggccaccagcttctgcgtcctcttatcttctgccaggatcacctccgagaaggcccccctatcgggagaggggattcacaaggtgaagaactggaaccccagcttccctccagcctctcctccattccctatgggttctgtgaccactgctggaccaaggacgtggatgaccctcccctagtcactcatccatcccctggctccagagatggtcacatgacccaggcctggccagtcaaagtagtctctcccctggccacagtaattggtcatgtgatgc

SEQ ID NO: 192726 - DNA, 588 bp, Artificial Sequence
  derived and/or modified sequence
atgcctgcccgggccctgctgcccaggaggatgggccacaggaccctggccagcaccccagccctgtgggccagcatcccctgccccaggtctgagctgcggctggacctggtgctgcccagcggccagagcttccgctggagggagcagagccctgcccactggagcggcgtgctggccgaccaggtgtggaccctgacccagacagaggagcagctgcactgcaccgtgtacagaggagacaagagccaggccagccggcccaccccagatgagctggaggccgtgaggaagtacttccagctggatgtgaccctggcccagctgtaccaccactggggctctgtggacagccacttccaggaggtggcccagaagttccagggcgtgcggctgctgcggcaggaccccattgaatgtctcttctccttcatctgcagcagcaacaacaacatcgcccgcatcaccggcatggtggagcggctgtgccaggccttcggccccaggctcatccagctggatgatgtgacctaccacggcttccccagcctgcaggccctggccggccccccctggcagtgcatctag

SEQ ID NO: 192727 - DNA, 588 bp, Artificial Sequence
  derived and/or modified sequence
atgcccgcccgggccctgctgccccggcggatgggccaccggacccttgcttcaacgcccgccctctgggcatccattccctgtccacggtcggagcttcggcttgacttggttctgccatcaggccagtcatttcggtggagggaacaatcacccgcccattggagtggagtgctggcagaccaagtgtggacgcttacacagacagaggagcagctgcattgcactgtttaccgcggagataagtcccaggctagtaggcctacacccgacgaactggaagctgtccgaaagtacttccagctcgatgtaaccctggcccaactgtaccaccattgggggagcgtcgatagccactttcaagaagtggctcagaagtttcagggcgttcgactgctccggcaagacccaattgaatgcctgttctccttcatatgttcttccaacaacaacattgcccgtatcacggggatggtggagcgcctctgccaggcattcggaccccggctcattcaactggatgatgtgacctatcacggctttccttctctgcaggctctcgccgggccaccctggcagtgtatctag

SEQ ID NO: 192728 - DNA, 588 bp, Artificial Sequence
  derived and/or modified sequence
atgcccgcacgggctttgctgccccgaagaatggggcaccgaacgctcgcgtctacaccggcactgtgggcaagtattccttgtccacggtccgaacttaggctcgacctcgtgctgccaagcggacagtctttccggtggagggagcagtcaccagctcactggtcaggcgtcctagccgatcaagtctggaccctcacgcaaaccgaagaacagttgcactgcaccgtgtacaggggggacaagagccaggcctcaaggcctacccccgacgagctggaggccgtgaggaagtactttcagctcgatgtcactctggctcaactctaccatcattggggatcagtggactctcacttccaggaagtggcccagaagtttcaaggtgtgagactactgaggcaggatccgattgaatgcttattctcatttatttgttcctccaacaacaatatcgcacggatcactggaatggtagagagactctgccaagctttcggccctaggctgatccaattggatgacgtgacttaccacggcttcccaagcctgcaggctttggctggacccccttggcaatgcatatag

SEQ ID NO: 192729 - DNA, 588 bp, Artificial Sequence
  derived and/or modified sequence
atgcccgccagagccctgctgcccagaagaatgggccacagaaccctggccagcacccccgccctgtgggccagcatcccctgccccagaagcgagctgagactggacctggtgctgcccagcggccagagcttcagatggagagagcagagccccgcccactggagcggcgtgctggccgaccaggtgtggaccctgacccagaccgaggagcagctgcactgcaccgtgtacagaggcgacaagagccaggccagcagacccacccccgacgagctggaggccgtgagaaagtacttccagctggacgtgaccctggcccagctgtaccaccactggggcagcgtggacagccacttccaggaggtggcccagaagttccagggcgtgagactgctgagacaggaccccatcgagtgcctgttcagcttcatctgcagcagcaacaacaacatcgccagaatcaccggcatggtggagagactgtgccaggccttcggccccagactgatccagctggacgacgtgacctaccacggcttccccagcctgcaggccctggccggccccccctggcagtgcatctag

SEQ ID NO: 192730 - protein, 356 aa, Artificial Sequence
  derived and/or modified sequence
MPARALLPRRMGHRTLASTPALWASIPCPRSELRLDLVLPSGQSFRWREQSPAHWSGVLADQVWTLTQTEEQLHCTVYRGDKSQASRPTPDELEAVRKYFQLDVTLAQLYHHWGSVDSHFQEVAQKFQGVRLLRQDPIECLFSFICSSNNNIARITGMVERLCQAFGPRLIQLDDVTYHGFPSLQALAGPEVEAHLRKLGLGYRARYVSASARAILEEQGGLAWLQQLRESSYEEAHKALCILPGVGTKVADCICLMALDKPQAVPVDVHMWHIAQRDYSWHPTTSQAKGPSPQTNKELGNFFRSLWGPYAGWAQALCQVITTFMTFLGPHRLDQMPPEELQTSSSRLGGPPWQCI

SEQ ID NO: 192731 - DNA, 1071 bp, Artificial Sequence
  derived and/or modified sequence
atgcccgccagagccctgctgcccaggaggatggggcataggaccttggctagtacccctgccctgtgggctagtatcccctgcccgaggagcgaactcaggctcgatctggtcctcccgtccggacaatcttttagatggagagagcagagccctgcccactggtcaggagtcttagcagatcaggtttggaccttaacgcagacagaggagcagcttcactgcaccgtgtatagaggggataagagccaggcgtccaggccaactcctgacgagctcgaagccgtgcgtaaatacttccagcttgacgttactcttgcccaactgtatcatcactggggctctgtagatagccacttccaagaggtggcccaaaagttccagggagtacgcctgcttcgccaagatcccatcgaatgtctcttcagctttatctgctcctccaataacaacatcgcccggattacgggaatggtggaacgcctctgtcaggccttcgggcccagactaattcagcttgacgatgtcacataccacggatttccaagcctgcaagctctggctggcccggaggtggaggcccacctgcggaaactcggcctgggatatcgtgccagatatgtttcagcctccgctagagccattttggaagaacagggtggcttggcttggctccagcagctccgggaatctagttatgaagaagcacataaggcgctttgcattcttccaggagtaggcacgaaggtcgccgattgtatctgcctgatggccctcgataagccacaggcagtccccgtggacgtgcacatgtggcatattgcacaacgcgattattcatggcatccaaccacatcccaggccaaaggtcccagtcctcagaccaacaaggagctaggaaacttcttcagatccctgtggggcccatacgcgggttgggcccaggccctgtgtcaggtgatcacaactttcatgaccttcctggggccccatcggttggatcagatgccccccgaggagctccaaacctcgtcctcccgccttggcggccctccctggcaatgcatctag

SEQ ID NO: 192732 - DNA, 2191 bp, Artificial Sequence
  derived and/or modified sequence
ggagaattggggcacgaagcggggctttgatgacccgcaaagggcgaggcatgcaggaggtggaggaattaagtgaaacagggaaggttgttaaacagcaccgtgtgggcgaggccttaagggtcgtggtccttgtctgggcggggtctttgggcgtcgacgaggcctggttctgggtaggcggggctactacggggcggtgcctgctgtggaaatgcctgcccgcgcgcttctgcccaggcgcatggggcatcgtactctagcctccactcctgccctgtgggcctccatcccgtgccctcgctctgagctgcgcctggacctggttctgccttctggacaatctttccggtggagggagcaaagtcctgcacactggagtggtgtactagcggatcaagtatggacactgactcagactgaggagcagctccactgcactgtgtaccgaggagacaagagccaggctagcaggcccacaccagacgagctggaggccgtgcgcaagtacttccagctagatgttaccctggctcaactgtatcaccactggggttccgtggactcccacttccaagaggtggctcagaaattccaaggtgtgcgactgctgcgacaagaccccatcgaatgccttttctcttttatctgttcctccaacaacaacatcgcccgcatcactggcatggtggagcggctgtgccaggcttttggacctcggctcatccagcttgatgatgtcacctaccatggcttccccagcctgcaggccctggctgggccagaggtggaggctcatctcaggaagctgggcctgggctatcgtgcccgttacgtgagtgccagtgcccgagccatcctggaagaacagggcgggctagcctggctgcagcagctacgagagtcctcatatgaggaggcccacaaggccctctgcatcctgcctggagtgggcaccaaggtggctgactgcatctgcctgatggccctagacaagccccaggctgtgcccgtggatgtccatatgtggcacattgcccaacgtgactacagctggcaccctaccacgtcccaggcgaagggaccgagcccccagaccaacaaggaactgggaaactttttccggagcctgtggggaccttatgctggctgggcccaagcgctctgtcaggtcatcaccacttttatgacctttctcggaccccataggctggatcagatgcctcctgaagaattacagacttcttcctctagacttggagggcctccttggcaatgcatttgatggccaccagcttctgcgtcctcttatcttctgccaggatcacctccgagaaggcccccctatcgggagaggggattcacaaggtgaagaactggaaccccagcttccctccagcctctcctccattccctatgggttctgtgaccactgctggaccaaggacgtggatgaccctcccctagtcactcatccatcccctggctccagagatggtcacatgacccaggcctggccagtcaaagtagtctctcccctggccacagtaattggtcatgtgatgcaagccagcttactagcactttgagaatgagtctcctgttgagctggtaggatgtaagcctggagctaatggcgatcatctttgccaccacctggggagagcctgcttgggaatgaaattaacacaaaggaagtccaacctgagaaatggccaaatatatttcctgataacattatgtggccctctggatccagccatgcctgaggtctacccctgggcttttggattatgtgtacagttggttcatccctttttctgctaattcgagtcatggctaatttaacaccctttagaaccttaaagaaccatcagcatcacccgggaacttttttagaaatgcaaaatctctactgctttggatcctgggtcaaaaaaaagaaaaaaaaaagaaatgcaaaactttaggccctgccccagatttactaaatcaatctgcagtttaacaaaatcctcaggtgatttgtatgctcattgaactttaagaagcagtgttttagaacaggttcttaaaaaggaacaaataaactcatttaactaaagttaactgattaaagaggatttgctagggtattctttccacatctgtttgctttctctgggagaataagaagtcataagtcaaagaa

SEQ ID NO: 192733 - DNA, 1071 bp, Artificial Sequence
  derived and/or modified sequence
atgcctgcccgggccctgctgcccaggaggatgggccacaggaccctggccagcaccccagccctgtgggccagcatcccctgccccaggtctgagctgcggctggacctggtgctgcccagcggccagagcttccgctggagggagcagagccctgcccactggagcggcgtgctggccgaccaggtgtggaccctgacccagacagaggagcagctgcactgcaccgtgtacagaggagacaagagccaggccagccggcccaccccagatgagctggaggccgtgaggaagtacttccagctggatgtgaccctggcccagctgtaccaccactggggctctgtggacagccacttccaggaggtggcccagaagttccagggcgtgcggctgctgcggcaggaccccattgaatgtctcttctccttcatctgcagcagcaacaacaacatcgcccgcatcaccggcatggtggagcggctgtgccaggccttcggccccaggctcatccagctggatgatgtgacctaccacggcttccccagcctgcaggccctggccggccctgaggtggaggcccacctgaggaagctgggcctgggctaccgggcccgctacgtgtctgccagcgcccgggccatcctggaggagcagggcggcctggcctggctgcagcagctgcgggagagcagctatgaggaggcccacaaggccctgtgcatcctgcccggggtgggcaccaaggtggccgactgcatctgcctgatggccctggacaagccccaggccgtgcctgtggatgtgcacatgtggcacatcgcccagagggactacagctggcaccccaccaccagccaggccaagggccccagcccccagaccaacaaggagctgggcaacttcttccgcagcctgtggggcccctatgccggctgggcccaggccctgtgccaggtgatcaccaccttcatgaccttcctgggcccccaccggctggaccagatgcctcctgaggagctgcagaccagcagcagccggctgggcggccccccctggcagtgcatctag

SEQ ID NO: 192734 - DNA, 1071 bp, Artificial Sequence
  derived and/or modified sequence
atgcccgcccgggccctgctgccccggcggatgggccaccggaccctggccagtacaccagctctctgggcctcgattccctgcccgcggtcggagttgcgcctggatctggtgttacccagcgggcagagtttcaggtggcgtgagcagagtcctgcgcattggtcaggtgtgctcgccgatcaggtgtggaccctgactcagaccgaagagcaactgcactgcaccgtatacagaggcgacaagtcacaggccagtaggccaactcccgacgagctggaagctgtccgaaagtactttcagttggatgtcacgctcgcacagttgtatcatcactggggctcagtcgactctcactttcaagaggtcgcacaaaaattccagggggtgaggcttcttcgtcaggacccaatcgagtgcttatttagctttatctgctcgagtaataataacatcgcacggataacgggtatggtcgagcggttgtgccaagcttttggacctcgactgatccagcttgacgacgtcacatatcacggattcccctctctacaggcccttgcgggtccagaggtagaggcacacctgaggaaactcgggttgggttatagggctcggtacgtgtcagctagcgcccgagccatcctcgaggagcaaggcggactggcctggctccagcagttaagggaatcctcatatgaggaagcccacaaggcattatgcatactgccaggtgtgggaaccaaggtagcagattgcatctgtctgatggctcttgataaaccacaagccgtgccagttgacgtgcatatgtggcacattgcccagagagactacagctggcacccaacaactagccaggcaaaaggtccatcccctcagaccaataaggaactgggcaactttttccgcagcctatgggggccttatgctgggtgggctcaagccctgtgtcaggtgatcactaccttcatgaccttcctgggtccccaccgcctggatcagatgcctcccgaggagctgcagacctcgtcctcccgcctgggcggaccgccatggcagtgtatatag

SEQ ID NO: 192735 - DNA, 1071 bp, Artificial Sequence
  derived and/or modified sequence
atgcccgcaagagcattattgccccgtaggatgggccatagaacattggcatctaccccggctctgtgggccagcattccatgccctagatcagagctccgtctagacttggtgctacctagtggccaatcattccggtggcgggagcaatcgccagcacactggtccggcgtgctagctgatcaagtgtggacactgactcagactgaggaacagctccactgcacagtgtacaggggggacaagtcccaggcatcgcgacccacacccgacgagctggaagcagttcgcaaatatttccagctcgatgtgaccttagcacagctgtaccaccactggggaagcgttgactcccattttcaggaggttgcccaaaagtttcagggagtgcgactgctgagacaggatccaattgagtgtctgttttccttcatatgctcatccaacaataacatcgcacgaataacaggcatggtggaacggctctgccaggctttcggtccgcgtctcattcagctggacgatgtcacatatcatggctttccttctttacaggcgcttgccggacccgaggtcgaggcccatctgaggaaattgggcctaggatatagagccagatatgttagtgcaagtgccagagccattttagaggagcaagggggattggcttggcttcagcagctgcgcgagtctagttatgaggaggcccacaaagccttgtgcattttacccggagtaggaacgaaggtcgccgattgcatatgcctgatggccctagacaagccccaggccgtgccggtggatgtccacatgtggcatatcgcgcaacgggactactcctggcacccaactacaagtcaagcaaaaggtccttctccccagaccaacaaagagctcggtaatttttttcgctcactgtgggggccatatgcgggttgggctcaagccctgtgtcaagttattaccaccttcatgaccttccttggaccgcacagattggatcaaatgccccctgaagagctccagacgtccagtagtagactaggcggtcccccatggcagtgcatatag

SEQ ID NO: 192736 - DNA, 1071 bp, Artificial Sequence
  derived and/or modified sequence
atgcccgccagagccctgctgcccagaagaatgggccacagaaccctggccagcacccccgccctgtgggccagcatcccctgccccagaagcgagctgagactggacctggtgctgcccagcggccagagcttcagatggagagagcagagccccgcccactggagcggcgtgctggccgaccaggtgtggaccctgacccagaccgaggagcagctgcactgcaccgtgtacagaggcgacaagagccaggccagcagacccacccccgacgagctggaggccgtgagaaagtacttccagctggacgtgaccctggcccagctgtaccaccactggggcagcgtggacagccacttccaggaggtggcccagaagttccagggcgtgagactgctgagacaggaccccatcgagtgcctgttcagcttcatctgcagcagcaacaacaacatcgccagaatcaccggcatggtggagagactgtgccaggccttcggccccagactgatccagctggacgacgtgacctaccacggcttccccagcctgcaggccctggccggccccgaggtggaggcccacctgagaaagctgggcctgggctacagagccagatacgtgagcgccagcgccagagccatcctggaggagcagggcggcctggcctggctgcagcagctgagagagagcagctacgaggaggcccacaaggccctgtgcatcctgcccggcgtgggcaccaaggtggccgactgcatctgcctgatggccctggacaagccccaggccgtgcccgtggacgtgcacatgtggcacatcgcccagagagactacagctggcaccccaccaccagccaggccaagggccccagcccccagaccaacaaggagctgggcaacttcttcagaagcctgtggggcccctacgccggctgggcccaggccctgtgccaggtgatcaccaccttcatgaccttcctgggcccccacagactggaccagatgccccccgaggagctgcagaccagcagcagcagactgggcggccccccctggcagtgcatctag

SEQ ID NO: 192737 - protein, 322 aa, Artificial Sequence
  derived and/or modified sequence
MPARALLPRRMGHRTLASTPALWASIPCPRSELRLDLVLPSGQSFRWREQSPAHWSGVLADQVWTLTQTEEQLHCTVYRGDKSQASRPTPDELEAVRKYFQLDVTLAQLYHHWGSVDSHFQEVAQKFQGVRLLRQDPIECLFSFICSSNNNIARITGMVERLCQAFGPRLIQLDDVTYHGFPSLQALAGPEVEAHLRKLGLGYRARYVSASARAILEEQGGLAWLQQLRESSYEEAHKALCILPGVGTKVADCICLMALDKPQAVPVDVHMWHIAQRDYSWHPTTSQAKGPSPQTNKELGNFFRSLWGPYAGWAQAAGSDAS

SEQ ID NO: 192738 - DNA, 969 bp, Artificial Sequence
  derived and/or modified sequence
atgccagcccgcgcactgctaccaaggagaatgggccacaggactctagcctcaactcctgctctgtgggcctcgatcccttgccctaggtcagaacttcggcttgatctggttcttcccagcggtcaaagcttccgatggagagaacagtctccggcgcattggagcggggtcctggcagatcaggtgtggactttgacacagacagaagaacaactgcactgcaccgtgtaccgcggcgacaaatcccaggccagcagacctactcccgacgaactggaggccgtccgtaagtattttcagctggatgtgacactggcacagctgtaccaccactgggggtccgtggactcccatttccaagaggttgcacaaaagtttcaaggagtaagactccttagacaagacccaatcgagtgtctcttttcttttatttgttcgagtaacaataatatagctcgtatcaccggaatggtggaacgcctgtgccaggctttcggaccaaggctgatacagctcgatgacgtcacctaccacggcttcccaagccttcaggcgttagctggccccgaggtggaagcacatctgcggaagctggggctgggctacagagcaaggtacgtttcagcttcggctagagccatactcgaggagcagggaggcctcgcttggctgcagcagcttcgggagagttcctacgaagaggcacataaagccctctgtatattgcccggcgtgggaacaaaagtcgcagattgtatatgcctcatggcgctagataagccccaggctgtcccagtggacgtccacatgtggcacatagctcaacgcgattattcttggcaccccactacatcacaagctaagggtcccagtccccagaccaacaaggagttgggtaatttttttagaagcctgtggggcccatatgccggatgggcccaggcagcaggcagtgacgctagctag

SEQ ID NO: 192739 - DNA, 1815 bp, Artificial Sequence
  derived and/or modified sequence
ccagaagaacacagctgtgcgcgcccacaggctctgggggcgggagaagataagtcgcaaggagggggcgggacctacacctcaggaaagccggagaattggggcacgaagcggggctttgatgacccgcaaagggcgaggcatgcaggaggtggaggaattaagtgaaacagggaaggttgttaaacagcaccgtgtgggcgaggccttaagggtcgtggtccttgtctgggcggggtctttgggcgtcgacgaggcctggttctgggtaggcggggctactacggggcggtgcctgctgtggaaatgcctgcccgcgcgcttctgcccaggcgcatggggcatcgtactctagcctccactcctgccctgtgggcctccatcccgtgccctcgctctgagctgcgcctggacctggttctgccttctggacaatctttccggtggagggagcaaagtcctgcacactggagtggtgtactagcggatcaagtatggacactgactcagactgaggagcagctccactgcactgtgtaccgaggagacaagagccaggctagcaggcccacaccagacgagctggaggccgtgcgcaagtacttccagctagatgttaccctggctcaactgtatcaccactggggttccgtggactcccacttccaagaggtggctcagaaattccaaggtgtgcgactgctgcgacaagaccccatcgaatgccttttctcttttatctgttcctccaacaacaacatcgcccgcatcactggcatggtggagcggctgtgccaggcttttggacctcggctcatccagcttgatgatgtcacctaccatggcttccccagcctgcaggccctggctgggccagaggtggaggctcatctcaggaagctgggcctgggctatcgtgcccgttacgtgagtgccagtgcccgagccatcctggaagaacagggcgggctagcctggctgcagcagctacgagagtcctcatatgaggaggcccacaaggccctctgcatcctgcctggagtgggcaccaaggtggctgactgcatctgcctgatggccctagacaagccccaggctgtgcccgtggatgtccatatgtggcacattgcccaacgtgactacagctggcaccctaccacgtcccaggcgaagggaccgagcccccagaccaacaaggaactgggaaactttttccggagcctgtggggaccttatgctggctgggcccaagcggtgagtgtacctaggtgtcctccctaggtttcctctcctccagcccagacccagtggactcttccaccaccgccccaggtggccctaaaggactctccagccacccctgtcccaaccccagtggattctcattgccttcggccctgttccccaaggactcttccacctcccaacactgtcactagtctcaccagccctgaccccagtgtaccctcctccccacacagactccaccctcctacaggtgctgttcagtgccgacctgcgccaatcccgccatgctcaggagccaccagcaaagcgcagaaagggttccaaagggccggaaggctagatggggcaccctggacaaagaaattccccaagcaccttcccctccattccccacttctctctccccatccccacccagtctcatgttggggaggggcctccctgtgactacctcaaaggccaggcacccccaaatcaagcagtcagtttgcacaacaagatggggtgggggatattgagggagacagcgctaaggatggttttatcttccctttattacaagaagga

SEQ ID NO: 192740 - DNA, 969 bp, Artificial Sequence
  derived and/or modified sequence
atgcctgcccgggccctgctgcccaggaggatgggccacaggaccctggccagcaccccagccctgtgggccagcatcccctgccccaggtctgagctgcggctggacctggtgctgcccagcggccagagcttccgctggagggagcagagccctgcccactggagcggcgtgctggccgaccaggtgtggaccctgacccagacagaggagcagctgcactgcaccgtgtacagaggagacaagagccaggccagccggcccaccccagatgagctggaggccgtgaggaagtacttccagctggatgtgaccctggcccagctgtaccaccactggggctctgtggacagccacttccaggaggtggcccagaagttccagggcgtgcggctgctgcggcaggaccccattgaatgtctcttctccttcatctgcagcagcaacaacaacatcgcccgcatcaccggcatggtggagcggctgtgccaggccttcggccccaggctcatccagctggatgatgtgacctaccacggcttccccagcctgcaggccctggccggccctgaggtggaggcccacctgaggaagctgggcctgggctaccgggcccgctacgtgtctgccagcgcccgggccatcctggaggagcagggcggcctggcctggctgcagcagctgcgggagagcagctatgaggaggcccacaaggccctgtgcatcctgcccggggtgggcaccaaggtggccgactgcatctgcctgatggccctggacaagccccaggccgtgcctgtggatgtgcacatgtggcacatcgcccagagggactacagctggcaccccaccaccagccaggccaagggccccagcccccagaccaacaaggagctgggcaacttcttccgcagcctgtggggcccctatgccggctgggcccaggccgccggcagtgatgccagctag

SEQ ID NO: 192741 - DNA, 969 bp, Artificial Sequence
  derived and/or modified sequence
atgcccgcccgggccctgctgccccggcggatgggccaccggaccctggcctcaaccccagcgttatgggcctctataccctgtccacgctctgaacttcgcctggatctcgtgctcccttctggtcagagctttagatggcgtgagcaatcaccagctcattggtccggcgtactggcagaccaggtgtggacccttacacagacggaagagcagctccactgcacagtctatcgaggggataagtcccaggcatcccggcccacaccagatgaactggaagctgtccggaaatactttcagctggacgttacactcgctcaattgtatcatcattggggctctgtggacagccacttccaggaggtagcacagaaattccagggagtgagactccttcgtcaggatcctattgaatgccttttttcatttatctgctcttccaacaacaacatcgccagaatcactggcatggtagaacgactttgccaggcctttggcccgcgattaattcagttagacgacgtgacatatcatggtttcccatccttgcaggccctcgctgggcccgaggtggaggcccacctgagaaagcttggacttggctatagagcccggtacgtgagcgcttcagccagggcgatcctggaggagcagggcggcctggcctggctccagcaactgagggagagctcatatgaggaggcacataaagcactgtgcattctgcctggggtcgggacaaaggttgcagattgcatatgtttgatggctctggataagccccaagctgtgccggtggatgtccatatgtggcatatcgcgcagcgcgattacagttggcaccccactacttcccaagccaaggggccttcccctcaaacaaacaaagaactaggaaatttcttccgctccctgtggggtccttatgccggatgggcgcaagctgccgggagcgacgccagttag

SEQ ID NO: 192742 - DNA, 969 bp, Artificial Sequence
  derived and/or modified sequence
atgccggcaagagcactactgccacggcgaatgggtcaccggactctggcaagcacgcccgcactgtgggcttccataccttgtcccaggtccgaactccggctggacttggttctgccctccggacagtccttcaggtggcgcgagcagtccccagctcattggtcgggcgtgctagccgaccaggtgtggactcttacgcagaccgaagaacagctccattgtaccgtttacaggggtgacaaaagccaggccagtcggcctacaccggacgaactagaagcggttcgcaaatattttcaacttgatgttacgctggcacagttatatcatcactgggggagtgtagattcccattttcaggaggttgcccaaaagtttcagggtgtgcggttgctaaggcaagatccaattgagtgcttgttctcctttatttgctcctctaataataatattgctcgtatcaccgggatggtagagcgtctttgccaggccttcggccctcgcctgatccaactggacgatgtgacataccatggatttccttcactgcaagccctggctggacccgaggttgaggctcatctgcgcaaactcggcttgggctaccgcgctaggtatgtctcagcctctgccagagccatcctggaggagcaaggcggtcttgcttggctgcaacagctgcgcgaatctagctacgaggaggctcataaggctttatgtattttacctggagtgggcaccaaggtagcagactgcatttgcctgatggcactggataaaccccaagctgtgcctgtggacgtgcacatgtggcacatagcccagagggactacagctggcatccaaccacatcccaggccaagggtcctagcccccagaccaataaggaactggggaatttcttccggtcactgtggggtccttacgccggttgggcacaagctgccggatcagacgcgtcttag

SEQ ID NO: 192743 - DNA, 969 bp, Artificial Sequence
  derived and/or modified sequence
atgcccgccagagccctgctgcccagaagaatgggccacagaaccctggccagcacccccgccctgtgggccagcatcccctgccccagaagcgagctgagactggacctggtgctgcccagcggccagagcttcagatggagagagcagagccccgcccactggagcggcgtgctggccgaccaggtgtggaccctgacccagaccgaggagcagctgcactgcaccgtgtacagaggcgacaagagccaggccagcagacccacccccgacgagctggaggccgtgagaaagtacttccagctggacgtgaccctggcccagctgtaccaccactggggcagcgtggacagccacttccaggaggtggcccagaagttccagggcgtgagactgctgagacaggaccccatcgagtgcctgttcagcttcatctgcagcagcaacaacaacatcgccagaatcaccggcatggtggagagactgtgccaggccttcggccccagactgatccagctggacgacgtgacctaccacggcttccccagcctgcaggccctggccggccccgaggtggaggcccacctgagaaagctgggcctgggctacagagccagatacgtgagcgccagcgccagagccatcctggaggagcagggcggcctggcctggctgcagcagctgagagagagcagctacgaggaggcccacaaggccctgtgcatcctgcccggcgtgggcaccaaggtggccgactgcatctgcctgatggccctggacaagccccaggccgtgcccgtggacgtgcacatgtggcacatcgcccagagagactacagctggcaccccaccaccagccaggccaagggccccagcccccagaccaacaaggagctgggcaacttcttcagaagcctgtggggcccctacgccggctgggcccaggccgccggcagcgacgccagctag

SEQ ID NO: 192744 - protein, 116 aa, Artificial Sequence
  derived and/or modified sequence
MSAPAQPPAEGTEGTAPGGGPPGPPPNMTSNRRLQQTQAQVEEVVDIIRVNVDKVLERDQKLSELDDRADALQAGASQFESSAAKLKRKYWWKNCKMMIMLGAICAIIVVVIVRRD

SEQ ID NO: 192745 - DNA, 351 bp, Artificial Sequence
  derived and/or modified sequence
atgagcgcccccgcccagccccccgccgagggcaccgagggcaccgcccccggcggcggcccccccggccccccccccaacatgaccagcaacagaagactgcagcagacccaggcccaggtggaggaggtggtggacatcatcagagtgaacgtggacaaggtgctggagagagaccagaagctgagcgagctggacgacagagccgacgccctgcaggccggcgccagccagttcgagagcagcgccgccaagctgaagagaaagtactggtggaagaactgcaagatgatgatcatgctgggcgccatctgcgccatcatcgtggtggtgatcgtgagaagagactag

SEQ ID NO: 192746 - DNA, 351 bp, Artificial Sequence
  derived and/or modified sequence
atgtccgcacccgcacaaccgcctgccgaaggcactgagggtactgcccccggcggtggacctcctgggcctcctcccaacatgaccagcaatcggaggctccagcagactcaggcacaggtcgaggaagtggtcgatattattcgcgtaaatgtcgacaaggttcttgagagggatcagaaactcagcgaactggacgacagggccgacgcacttcaggctggcgcctcacagttcgaatcgtccgcggcaaagttaaaacggaagtattggtggaaaaactgtaagatgatgattatgcttggtgctatttgcgccatcatcgtcgtggtgatcgtccgacgcgactag

SEQ ID NO: 192747 - DNA, 351 bp, Artificial Sequence
  derived and/or modified sequence
atgtctgccccagcccagcccccagctgagggcacagagggcacagcccctgggggcggccccccaggccccccacccaacatgaccagcaacagaaggctgcagcagacccaggcccaggtggaggaggtggtggacatcatccgggtgaatgtggacaaggtgctggagcgggaccagaagctgtctgagctggatgacagagcagatgccctgcaggccggggccagccagtttgagagcagcgctgccaagctgaagaggaagtactggtggaagaactgcaagatgatgatcatgctgggcgccatctgtgccatcatcgtggtggtgattgtgcggcgggactag

SEQ ID NO: 192748 - DNA, 351 bp, Artificial Sequence
  derived and/or modified sequence
atgagcgcccccgcccagccccccgccgagggcaccgagggcaccgcccctggcggcggaccacctgggccacctcccaacatgacctccaacagacggcttcaacaaactcaggcgcaggtggaagaggtcgtagatatcatcagagtgaatgtagataaggtgctggaaagagaccagaaactctccgaactagatgatcgagctgacgccctccaggccggggccagtcagtttgagagcagcgccgctaagcttaagaggaagtactggtggaaaaactgtaagatgatgatcatgcttggagcaatctgtgccattatcgtagttgttatcgttcggcgggactag

SEQ ID NO: 192749 - DNA, 351 bp, Artificial Sequence
  derived and/or modified sequence
atgtcagcccctgctcagcctcctgctgaaggtacggagggcaccgcccctggtggcggaccacctgggccaccccctaatatgacatctaaccgtcggctacagcagacccaggcgcaggtcgaggaagtagtggatatcattcgggtaaatgtggacaaggtcttggagcgtgaccagaagttaagcgaactggatgaccgtgccgatgctctgcaggccggagctagccagttcgagtcgagtgctgcgaaactcaagagaaaatactggtggaaaaattgcaagatgatgattatgcttggagcgatctgtgccattatcgtagtagtgattgttagacgagactag

SEQ ID NO: 192750 - protein, 383 aa, Artificial Sequence
  derived and/or modified sequence
MAEPRQEFEVMEDHAGTYGLGDRKDQGGYTMHQDQEGDTDAGLKAEEAGIGDTPSLEDEAAGHVTQARMVSKSKDGTGSDDKKAKGADGKTKIATPRGAAPPGQKGQANATRIPAKTPPAPKTPPSSGEPPKSGDRSGYSSPGSPGTPGSRSRTPSLPTPPTREPKKVAVVRTPPKSPSSAKSRLQTAPVPMPDLKNVKSKIGSTENLKHQPGGGKVQIINKKLDLSNVQSKCGSKDNIKHVPGGGSVQIVYKPVDLSKVTSKCGSLGNIHHKPGGGQVEVKSEKLDFKDRVQSKIGSLDNITHVPGGGNKKIETHKLTFRENAKAKTDHGAEIVYKSPVVSGDTSPRHLSNVSSTGSIDMVDSPQLATLADEVSASLAKQGL

SEQ ID NO: 192751 - DNA, 1152 bp, Artificial Sequence
  derived and/or modified sequence
atggccgagcccagacaggagttcgaggtgatggaggaccacgccggcacctacggcctgggcgacagaaaggaccagggcggctacaccatgcaccaggaccaggagggcgacaccgacgccggcctgaaggccgaggaggccggcatcggcgacacccccagcctggaggacgaggccgccggccacgtgacccaggccagaatggtgagcaagagcaaggacggcaccggcagcgacgacaagaaggccaagggcgccgacggcaagaccaagatcgccacccccagaggcgccgccccccccggccagaagggccaggccaacgccaccagaatccccgccaagaccccccccgcccccaagaccccccccagcagcggcgagccccccaagagcggcgacagaagcggctacagcagccccggcagccccggcacccccggcagcagaagcagaacccccagcctgcccaccccccccaccagagagcccaagaaggtggccgtggtgagaaccccccccaagagccccagcagcgccaagagcagactgcagaccgcccccgtgcccatgcccgacctgaagaacgtgaagagcaagatcggcagcaccgagaacctgaagcaccagcccggcggcggcaaggtgcagatcatcaacaagaagctggacctgagcaacgtgcagagcaagtgcggcagcaaggacaacatcaagcacgtgcccggcggcggcagcgtgcagatcgtgtacaagcccgtggacctgagcaaggtgaccagcaagtgcggcagcctgggcaacatccaccacaagcccggcggcggccaggtggaggtgaagagcgagaagctggacttcaaggacagagtgcagagcaagatcggcagcctggacaacatcacccacgtgcccggcggcggcaacaagaagatcgagacccacaagctgaccttcagagagaacgccaaggccaagaccgaccacggcgccgagatcgtgtacaagagccccgtggtgagcggcgacaccagccccagacacctgagcaacgtgagcagcaccggcagcatcgacatggtggacagcccccagctggccaccctggccgacgaggtgagcgccagcctggccaagcagggcctgtag

SEQ ID NO: 192752 - DNA, 1152 bp, Artificial Sequence
  derived and/or modified sequence
atggccgaaccgcgtcaggaatttgaagtgatggaagatcatgccgggacatatggccttggggatagaaaggaccagggcggctatactatgcatcaggatcaggaaggcgacaccgacgctggactgaaggcggaagaggccggtattggtgacacaccttctctggaagatgaggctgcaggccacgtgacacaggcaagaatggtcagtaaatctaaggacggcacaggttccgacgacaaaaaagctaaaggggctgacggaaagactaagatcgcaaccccgcggggcgctgccccaccagggcagaaggggcaggctaacgccacccgcatccccgcaaaaactccgccagctcccaagaccccaccaagttccggagaacctcctaagtctggcgatcgttcaggctattcatctcctggttcccctgggacccctggtagccgttctcgtactccgagtctaccaacccccccaacaagagagcccaagaaggtcgcggtcgttcgcacgcctcctaagtcaccctcaagcgcgaaaagtaggctccagactgctcctgttccgatgcctgacttaaagaacgtgaaatcgaagatagggtcgaccgagaacctgaagcaccagccaggcggagggaaagtacagatcataaataagaaactagacctgtctaacgtgcaatccaagtgtggatccaaagacaacatcaagcacgttcctggcggtggatcagtgcagatcgtctacaaacccgtcgacctgtccaaggttacatcaaagtgtggatctcttggcaatatacaccacaaacccggaggcggtcaagttgaagtgaagtccgagaagcttgattttaaagatcgggtacagtcaaagatcggaagcctcgataatattacccacgtcccaggcgggggcaataaaaagatcgaaactcataagttgactttccgcgaaaatgcaaaggccaaaaccgatcacggggcagagatagtgtataagtctccagttgtttctggggacaccagccctaggcatctgtctaacgtgtcatcaaccggttctatcgatatggtggacagtcctcagctggctacccttgcagatgaagtctcagcctcactggctaaacagggcctctag

SEQ ID NO: 192753 - DNA, 1152 bp, Artificial Sequence
  derived and/or modified sequence
atggccgagccacgacaggaattcgaggtgatggaggatcatgctggaacctacggccttggtgatagaaaggatcaaggtgggtacaccatgcaccaagaccaggagggcgacacagatgcgggactaaaagctgaggaggctggtatcggcgataccccctctttagaggacgaggccgcaggccacgtcacacaggcgaggatggtaagcaagagtaaagatgggacaggctcagacgacaagaaggcgaagggggcagacggtaaaacaaagatagctacaccaaggggcgccgctccccctggacagaagggccaggcgaatgccaccagaattcctgccaagaccccacctgccccgaagacacctccatcttcgggtgaaccgcccaagagtggtgatcgatctggctactcatctcccgggtccccaggcacacccggtagcagatccagaaccccatccctacctacaccccccacccgtgaacccaagaaggtggcggtcgtgaggacgccacctaagagcccctcatcagcgaagtcaaggctgcagacggcccccgtgcccatgccggacctcaagaacgtcaaaagcaaaatcggaagcacggagaatctcaagcatcagcctggcggaggaaaggtgcaaattattaataagaaactggatctgtcaaacgtgcagtctaagtgtgggagtaaagataacatcaagcacgtaccggggggaggaagcgtgcaaattgtctataaacccgtggacttgtccaaggttacttctaaatgcggcagccttggcaacatacatcacaaaccaggggggggccaggtcgaagtaaagagtgagaagctggacttcaaggaccgagtccagtctaagatagggtctctcgacaacattacgcatgtgccaggcggaggcaacaaaaaaatagaaacacacaaactcacctttcgcgaaaatgccaaagcaaaaaccgatcacggcgccgaaatcgtgtataagtcaccagtcgtgagcggcgataccagtccgagacacctgtctaacgttagttctaccggcagcatcgatatggtcgactcccctcagctggcgactctcgccgacgaggtgtccgcatctcttgccaagcagggattgtag

SEQ ID NO: 192754 - DNA, 1152 bp, Artificial Sequence
  derived and/or modified sequence
atggccgagccccggcaggagtttgaggtgatggaggaccatgctggcacctacggcctgggggacaggaaggaccagggcggctacaccatgcaccaggaccaggagggggacacagatgctggcctgaaggccgaggaggccggcatcggggacacccccagcctggaggatgaggccgccggccacgtgacccaggccaggatggtgtccaagagcaaggatggcactggaagtgatgacaagaaggccaagggagcagatggcaagaccaagatcgccaccccaagaggagctgcccctcctggccagaagggccaggccaatgccacccgcatcccagccaagaccccaccagcccccaagaccccacccagcagtggagagccccccaagagcggggacagaagtggctacagcagccctggcagccctggcaccccaggcagccgcagcaggacccccagcctgcccaccccacccacccgggagcccaagaaggtggccgtggtgaggaccccacccaagagccccagcagcgccaagagccggctgcagacagcccctgtgcccatgccagacctgaagaatgtgaagagcaagattggcagcacagagaacctgaagcaccagcccggcggcggcaaggtgcagatcatcaacaagaagctggacctgagcaatgtgcagagcaaatgtggcagcaaggacaacatcaagcacgtgcctgggggcggctctgtgcagatcgtgtacaagcctgtggacctgagcaaggtgaccagcaaatgtggcagcctgggcaacatccaccacaagccaggcggcggccaggtggaggtgaagtctgagaagctggacttcaaggacagagtgcagagcaagattggcagcctggacaacatcacccacgtgcctgggggcggcaacaagaagattgagacccacaagctgaccttccgggagaatgccaaggccaagacagaccacggggctgagatcgtgtacaagagccctgtggtgtctggggacaccagccccaggcacctgagcaatgtgagcagcacaggcagcattgacatggtggacagcccccagctggccaccctggctgatgaggtgtctgccagcctggccaagcagggcctgtag

SEQ ID NO: 192755 - DNA, 1152 bp, Artificial Sequence
  derived and/or modified sequence
atggccgagccccggcaggagttcgaggtgatggaggaccacgccggaacgtacggcttgggagatcgcaaagatcagggcggctacacgatgcatcaggaccaagaaggggacaccgacgcagggctgaaggctgaggaggcaggcatcggcgatacaccttctttagaagacgaagctgccggacatgtcactcaggccagaatggtgtcaaaatctaaagatgggaccggatcagacgataaaaaggctaagggggccgatgggaagacgaagatagctacgcccaggggggcagccccccctgggcagaagggtcaggccaacgcgactaggatccctgcaaaaaccccgcccgccccgaaaacacccccatcctctggtgagcctcccaagtcaggggatcgctctgggtactcatcacctggctctccaggaacccctggcagtcgatccagaacccccagcctgccaactccccccacacgggaacccaaaaaagtggctgtcgtgagaacacctcccaaaagtccctcatccgccaaatcccgcctgcagaccgcacccgtcccaatgcccgacctcaaaaatgtgaaaagtaagattgggagcaccgaaaacctgaagcaccagcccgggggcggcaaagtgcagataataaataaaaagctggatttaagcaatgtgcagagcaagtgtgggtcaaaagataatattaagcatgtccccggagggggcagtgtgcaaattgtatacaagcctgtcgacttatctaaggtaacctctaagtgcggctcacttgggaatatccaccacaaacctggcggcggacaagttgaagtgaagagcgagaaactcgattttaaagatcgagtgcaaagtaagatcggaagtcttgacaatattacccacgtacccggcgggggtaataagaaaatcgaaacacacaaactcaccttccgcgaaaacgcgaaagccaagacggatcatggggctgagatcgtgtacaagagtcctgttgtttccggcgacacttccccccgacacctctccaacgtttcttccactggcagtatagacatggtcgatagccctcagctagcaacactcgctgacgaagtgagtgcaagcctggcgaagcagggactctag

SEQ ID NO: 192756 - DNA, 1152 bp, Artificial Sequence
  derived and/or modified sequence
atggccgagccccggcaggagttcgaggtgatggaggaccacgccggcacctatggcctcggcgatagaaaggaccaggggggatatactatgcatcaggaccaagagggggacacggacgccggactgaaggccgaggaagcgggcatcggcgacacacctagtcttgaagatgaggctgctggtcatgttactcaggccaggatggtgagtaagtcgaaagacgggacaggcagtgacgacaagaaggctaagggggccgacggcaagaccaagattgctacacctcgtggagctgccccccccggccagaaaggccaagccaacgccacccggatcccagccaagactccaccagcccctaaaacgcccccatcaagtggggagccccctaagagcggtgatagaagcggatattccagtcctggaagccccgggactcccggctctagatcccgcactccaagtctcccgacccccccaactagagagcccaaaaaggtcgcagtggtgagaacacccccgaagtcacctagctccgccaagagtcggctgcagaccgcacctgtacccatgccggatctaaagaatgtcaaatcaaagattggtagcacagaaaatctcaaacatcagccaggcgggggaaaagtgcaaatcatcaacaaaaagctcgatctaagcaatgttcaatctaaatgcggaagcaaggacaacataaagcatgtgcctggcgggggaagtgttcagatagtgtacaaacctgtcgacctctcaaaagttaccagcaaatgtggatctcttggaaacattcaccataagccaggaggagggcaggttgaggtgaaatccgagaagctggatttcaaagatcgcgtgcaaagcaagatcggatcactcgataacattacccacgtgcccggtgggggcaataaaaagatcgaaactcataagcttaccttccgcgagaacgccaaggccaaaaccgaccatggagccgaaatagtgtacaaatcaccagtggttagtggcgataccagccctagacacctttctaatgtgagttccacaggtagtatagatatggtggatagtccgcaactcgccactctggctgacgaggtttccgcgtcactcgccaaacaggggctttag

SEQ ID NO: 192757 - DNA, 1200 bp, Artificial Sequence
  derived and/or modified sequence
tgtcgactatcaggtgagctttgaaccaggatggctgagccccgccaggagttcgaagtgatggaagatcacgctgggacgtacgggttgggggacaggaaagatcaggggggctacaccatgcaccaagaccaagagggtgacacggacgctggcctgaaagctgaagaagcaggcattggagacacccccagcctggaagacgaagctgctggtcacgtgacccaagctcgcatggtcagtaaaagcaaagacgggactggaagcgatgacaaaaaagccaagggggctgatggtaaaacgaagatcgccacaccgcggggagcagcccctccaggccagaagggccaggccaacgccaccaggattccagcaaaaaccccacccgctccaaagacaccacccagctctggtgaacctccaaaatcaggggatcgcagcggctacagcagccccggctccccaggcactcccggcagccgctcccgcaccccgtcccttccaaccccacccacccgggagcccaagaaggtggcggtggtccgtactccacccaagtcgccgtcttccgccaagagccgcctgcagacagcccccgtgcccatgccagacctgaagaacgtcaagtccaagatcggctccactgagaacctgaagcaccagccgggaggcgggaaggtgcagataattaataagaagctggatcttagcaacgtccagtccaagtgtggctcaaaggataatatcaaacacgtcccgggaggcggcagtgtgcaaatagtctacaaaccagttgacctgagcaaggtgacctccaagtgtggctcattaggcaacatccatcataaaccaggaggtggccaggtggaagtaaaatctgagaagcttgacttcaaggacagagtccagtcgaagattgggtccctggacaatatcacccacgtccctggcggaggaaataaaaagattgaaacccacaagctgaccttccgcgagaacgccaaagccaagacagaccacggggcggagatcgtgtacaagtcgccagtggtgtctggggacacgtctccacggcatctcagcaatgtctcctccaccggcagcatcgacatggtagactcgccccagctcgccacgctagctgacgaggtgtctgcctccctggccaagcagggtttgtgatcaggcccctggggcggt

SEQ ID NO: 192758 - DNA, 2351 bp, Artificial Sequence
  derived and/or modified sequence
caggtgagctttgaaccaggatggctgagccccgccaggagttcgaagtgatggaagatcacgctgggacgtacgggttgggggacaggaaagatcaggggggctacaccatgcaccaagaccaagagggtgacacggacgctggcctgaaagctgaagaagcaggcattggagacacccccagcctggaagacgaagctgctggtcacgtgacccaagctcgcatggtcagtaaaagcaaagacgggactggaagcgatgacaaaaaagccaagggggctgatggtaaaacgaagatcgccacaccgcggggagcagcccctccaggccagaagggccaggccaacgccaccaggattccagcaaaaaccccacccgctccaaagacaccacccagctctggtgaacctccaaaatcaggggatcgcagcggctacagcagccccggctccccaggcactcccggcagccgctcccgcaccccgtcccttccaaccccacccacccgggagcccaagaaggtggcggtggtccgtactccacccaagtcgccgtcttccgccaagagccgcctgcagacagcccccgtgcccatgccagacctgaagaacgtcaagtccaagatcggctccactgagaacctgaagcaccagccgggaggcgggaaggtgcagataattaataagaagctggatcttagcaacgtccagtccaagtgtggctcaaaggataatatcaaacacgtcccgggaggcggcagtgtgcaaatagtctacaaaccagttgacctgagcaaggtgacctccaagtgtggctcattaggcaacatccatcataaaccaggaggtggccaggtggaagtaaaatctgagaagcttgacttcaaggacagagtccagtcgaagattgggtccctggacaatatcacccacgtccctggcggaggaaataaaaagattgaaacccacaagctgaccttccgcgagaacgccaaagccaagacagaccacggggcggagatcgtgtacaagtcgccagtggtgtctggggacacgtctccacggcatctcagcaatgtctcctccaccggcagcatcgacatggtagactcgccccagctcgccacgctagctgacgaggtgtctgcctccctggccaagcagggtttgtgatcaggcccctggggcggtcaataatcgtggagaggagagaatgagagagtgtggaaaaaaaaagaataatgacccggcccccgccctctgcccccagctgctcctcgcagttcggttaattggttaatcacttaacctgcttttgtcactcggctttggctcgggacttcaaaatcagtgatgggagtaagagcaaatttcatctttccaaattgatgggtgggctagtaataaaatattttaaaaaaaaacattcaaaaacatggccacatccaacatttcctcaggcaattccttttgattcttttttcttcccccctccatgtagaagagggggaaggagaggctctgaaagctgcttctgggggatttcaagggactgggggtgccaaccacctctggccctgttgtgggggtgtcacagaggcagtggcagcaacaaaggatttgaaacttggtgtgttcgtggagccacaggcagacgatgtcaaccttgtgtgagtgtgacgggggttggggtggggcgggaggccacgggggaggccgaggcaggggctgggcagaggggagaggaagcacaagaagtgggagtgggagaggaagccacgtgctggagagtagacatccccctccttgccgctgggagagccaaggcctatgccacctgcagcgtctgagcggccgcctgtccttggtggccgggggtgggggcctgctgtgggtcagtgtgccaccctctgcagggcagcctgtgggagaagggacagcgggtaaaaagagaaggcaagctggcaggagggtggcacttcgtggatgacctccttagaaaagactgaccttgatgtcttgagagcgctggcctcttcctccctccctgcagggtagggggcctgagttgaggggcttccctctctgctccacagaaaccctgttttattgagttctgaaggttggaactgctgccatgattttggccactttgcagacctgggactttagggctaaccagttctctttgtaaggacttgtgcctcttgggagacgtccacccgtttccaagcctgggccaccggcatctctggagtgtgtgggggtctgggaggcgggtcccgagccccctgtccttcccacggccactgcagtcacccctgtctgccccgctgtgctgttgtctgccgt

SEQ ID NO: 192759 - DNA, 1152 bp, Artificial Sequence
  derived and/or modified sequence
atggccgaacccaggcaggaatttgaggtcatggaggaccacgccggaacctatggccttggggaccgcaaagaccagggcggatacacaatgcaccaggatcaggagggagatacggacgcaggtttaaaagcagaggaagcaggtatcggggatacaccaagcctcgaagacgaagccgcaggacatgttacccaggccagaatggtatccaaatccaaggatggcaccggtagtgacgataaaaaggcgaaaggggctgatgggaagaccaagatagcaaccccaaggggggctgctccccctggccagaaggggcaggctaacgcaacaaggatcccagccaagaccccacccgcaccgaaaacaccaccatcctctggagagccccctaaatctggtgatcggtccggctactcttcgcccggaagtccgggtactccaggatccagatctcggaccccatctctgcctacaccacccacacgagaaccaaaaaaagtggctgtggtccggactccgccaaaaagtccatctagtgctaagtcccggttacagaccgcccctgttcctatgccggacctgaagaacgtgaaatccaagatcggttccaccgagaatttgaaacaccagcccggagggggaaaggtccagatcataaataagaaactggatctttccaacgtgcagagcaaatgtgggagtaaagataacattaaacatgtgcccggaggtgggtctgtgcaaattgtttacaagcccgttgacctgagtaaagtcacatccaagtgcggatcactggggaatatccaccacaaaccaggtggcggacaggtcgaggtgaagtccgaaaagctggattttaaggatcgggtacagtcaaagattggttctctggataatatcacccatgttcctgggggtggtaacaagaagattgagacccacaagctaacatttcgggaaaacgcaaaggccaaaactgaccatggggctgagattgtgtataaatcaccagtcgtgagtggcgatacttccccacggcacctgtctaacgtcagctcaaccggcagcatcgatatggttgacagccctcaactcgccactttggctgatgaagttagtgcgagcctggccaaacaggggttatag

SEQ ID NO: 192760 - DNA, 1152 bp, Artificial Sequence
  derived and/or modified sequence
atggctgaacccaggcaggagttcgaagtgatggaagaccatgctgggacatatggcttgggggataggaaagaccaaggcggttataccatgcaccaagatcaggagggcgatactgatgcaggccttaaggccgaagaggccggaattggagacacacctagcttagaggacgaggcagcgggacacgtgactcaggcaaggatggttagtaagtctaaggacggaacaggctcggacgacaaaaaagccaaaggggctgatgggaaaacaaaaatcgctacgcctcgcggagcggcacctcccggacagaagggacaggctaatgctactagaattccagctaagaccccacccgcacccaagactccccctagtagcggagagccaccaaagtctggtgacagatcaggttactcttcacctggaagccccggaacgccaggatcccggtctagaacccccagcctccccactcctcctactagggagcctaaaaaggttgcagtggttagaactccccctaaatccccttcctctgctaagtccagactgcagaccgctcccgtgccaatgcccgacctcaagaatgtcaagagtaaaatcggtagtaccgagaatttgaaacaccagcccggtggcggaaaggtacaaatcataaataagaaactggacctgtcaaatgttcagagcaaatgcggcagcaaggataacattaagcacgtccccggaggtgggagtgtgcagattgtatacaaaccagtggatcttagcaaagtaacatctaaatgtggcagcctgggaaacatccatcacaagccaggagggggacaggtcgaggttaagtccgaaaaactggactttaaggaccgcgtacagagcaagatagggtccctagataatattactcatgtgcctggaggtggtaacaaaaagatagaaactcacaagctgacatttagagagaacgcaaaagccaagacggatcacggagccgagatcgtgtataaaagccctgtcgtatccggggatacttcgcccagacatttatcaaatgtgagctctacagggagcatcgatatggtcgattcacctcagctcgcgactcttgctgatgaggtcagcgccagcctggccaagcagggcctctag

SEQ ID NO: 192761 - DNA, 1152 bp, Artificial Sequence
  derived and/or modified sequence
atggctgagccaaggcaggagtttgaggtcatggaggatcatgcgggcacatatggattgggggatcgaaaggatcaagggggatatacaatgcaccaggatcaagagggcgataccgacgccgggcttaaagctgaagaagccggcattggggatacgccgtctctggaggacgaagctgccggacacgtgactcaagcgagaatggtgtctaaatccaaggatggcactggcagtgacgataagaaggcgaaaggagcagacggcaaaaccaaaatagctacaccccgaggtgcggctccacccggccagaaggggcaggccaatgccactcggatacccgctaaaacgcctcctgccccgaaaactccacccagttcaggggaaccaccaaaatccggagaccgttctgggtattcttcgccaggaagccctggcacaccagggtcaagatctagaacgccgtctctccccaccccacccactagggaaccaaaaaaagtcgctgtggtccggactccccccaaatcaccttcctctgctaagtctcggttgcagactgctcctgtccccatgcccgatctgaaaaatgtgaagagcaaaatcggttctaccgaaaaccttaaacaccagcccggcggtgggaaggtccagattatcaacaagaagctggacctgtcaaacgtccagtctaagtgcggcagcaaagacaacataaagcatgtgccgggcggcggctctgtgcaaattgtttataagcctgtggacttgagcaaggtcacttccaagtgcggaagccttggaaacatacaccacaaacccggaggcggccaggtggaagtgaagtccgaaaagctggatttcaaagatagagttcagagcaaaatagggtctttggacaacattacccacgtgcccggaggcggaaataaaaagatcgaaacccacaagctcacatttcgcgagaacgccaaggccaaaactgatcacggcgcagagattgtgtacaaatccccagtcgtttctggtgacacctcacctcgccacctctccaacgtgtcctcgacaggctctatcgatatggtggattcgccgcagctggctacgctcgcagacgaagtatccgcctcactggctaagcagggcctgtag

SEQ ID NO: 192762 - DNA, 2363 bp, Artificial Sequence
  derived and/or modified sequence
tcgcctctgtcgactatcaggtgaactttgaaccaggatggctgagccccgccaggagttcgaagtgatggaagatcacgctgggacgtacgggttgggggacaggaaagatcaggggggctacaccatgcaccaagaccaagagggtgacacggacgctggcctgaaagctgaagaagcaggcattggagacacccccagcctggaagacgaagctgctggtcacgtgacccaagctcgcatggtcagtaaaagcaaagacgggactggaagcgatgacaaaaaagccaagggggctgatggtaaaacgaagatcgccacaccgcggggagcagcccctccaggccagaagggccaggccaacgccaccaggattccagcaaaaaccccgcccgctccaaagacaccacccagctctggtgaacctccaaaatcaggggatcgcagcggctacagcagccccggctccccaggcactcccggcagccgctcccgcaccccgtcccttccaaccccacccacccgggagcccaagaaggtggcagtggtccgtactccacccaagtcgccgtcttccgccaagagccgcctgcagacagcccccgtgcccatgccagacctgaagaatgtcaagtccaagatcggctccactgagaacctgaagcaccagccgggaggcgggaaggtgcagataattaataagaagctggatcttagcaacgtccagtccaagtgtggctcaaaggataatatcaaacacgtcccgggaggcggcagtgtgcaaatagtctacaaaccagttgacctgagcaaggtgacctccaagtgtggctcattaggcaacatccatcataaaccaggaggtggccaggtggaagtaaaatctgagaagcttgacttcaaggacagagtccagtcgaagattgggtccctggacaatatcacccacgtccctggcggaggaaataaaaagattgaaacccacaagctgaccttccgcgagaacgccaaagccaagacagaccacggggcggagatcgtgtacaagtcgccagtggtgtctggggacacgtctccacggcatctcagcaatgtctcctccaccggcagcatcgacatggtagactcgccccagctcgccacgctagctgacgaggtgtctgcctccctggccaagcagggtttgtgatcaggcccctggggcggtcaataattgtggagaggagagaatgagagagtgtggaaaaaaaaagaataatgacccggcccccgccctctgcccccagctgctcctcgcagttcggttaattggttaatcacttaacctgcttttgtcactcggctttggctcgggacttcaaaatcagtgatgggagtaagagcaaatttcatctttccaaattgatgggtgggctagtaataaaatatttaaaaaaaaacattcaaaaacatggccacatccaacatttcctcaggcaattccttttgattcttttttcttccccctccatgtagaagagggagaaggagaggctctgaaagctgcttctgggggatttcaagggactgggggtgccaaccacctctggccctgttgtgggggtgtcacagaggcagtggcagcaacaaaggatttgaaacttggtgtgttcgtggagccacaggcagacgatgtcaaccttgtgtgagtgtgacgggggttggggtggggcgggaggccacgggggaggccgaggcaggggctgggcagaggggagaggaagcacaagaagtgggagtgggagaggaagccacgtgctggagagtagacatccccctccttgccgctgggagagccaaggcctatgccacctgcagcgtctgagcggccgcctgtccttggtggccgggggtgggggcctgctgtgggtcagtgtgccaccctctgcagggcagcctgtgggagaagggacagcgggtaaaaagagaaggcaagctggcaggagggtggcacttcgtggatgacctccttagaaaagactgaccttgatgtcttgagagcgctggcctcttcctccctccctgcagggtagggggcctgagttgaggggcttccctctgctccacagaaaccctgttttattgagttctgaaggttggaactgctgccatgattttggccactttgcagacctgggactttagggctaaccagttctctttgtaaggacttgtgcctcttgggagacgtccacccgtttccaagcctgggccactggcatctctggagtgtgtgggggtctgggaggcaggtcccgagccccctgtccttcccacggccactgcagtcaccccgtctgcgccgctgtgctgttgtctgccgt

SEQ ID NO: 192763 - DNA, 1152 bp, Artificial Sequence
  derived and/or modified sequence
atggccgagccccggcaggagttcgaggtgatggaggaccacgccggaacctatgggcttggagaccgcaaagaccagggcggttatacaatgcatcaagatcaagagggcgataccgatgccggattgaaggccgaggaggcagggatcggtgacactccgtccctggaagatgaagccgccggacacgtgacccaggcacgcatggtgtccaagtcaaaggatggtactgggtccgacgataaaaaggccaaaggcgcagatggcaaaactaagatcgctactccacgcggggccgcccctcctggccagaagggccaggccaacgccacaaggatcccagcgaagacccctcctgctcctaagacaccaccatcttccggcgaacctccaaagagcggggatcgaagtggatattcctctcccgggtcacccggcacccccggcagccgctccagaactccaagcctgcctactccacccacccgcgaaccaaagaaagtcgcagttgtacgtaccccacccaagtccccttcgagtgcaaaaagtcgacttcagacagctccggttccaatgcctgatctgaagaacgttaaatccaagatcggcagcactgaaaatctgaaacaccagcccggggggggaaaagtacaaataataaataaaaaactggacctgtccaacgtccaatccaagtgcggaagcaaagacaacattaaacacgttcccggcggaggctcagtacagatcgtttacaagcctgtggatctgtccaaagttactagtaaatgcggcagcctaggtaacatacatcataagccaggcggcggccaagtggaagtgaagtctgagaagttggattttaaagaccgagtgcagtcgaaaatcggaagtctcgacaacatcactcatgtgccagggggcgggaacaaaaaaatcgaaacacacaaacttacctttcgtgagaatgccaaggcaaaaaccgaccatggagccgagatagtgtataagtcgcccgtggtatccggcgacacatcacctcggcacttatccaacgtctcatcaacaggatctatcgatatggtcgatagcccccagctggctactctggctgatgaagttagtgcttcgcttgctaagcagggcctgtag

SEQ ID NO: 192764 - DNA, 1152 bp, Artificial Sequence
  derived and/or modified sequence
atggccgagccaagacaagagttcgaagtgatggaggaccacgctggaacatacgggttgggagacagaaaggaccagggaggatacactatgcaccaggatcaggaaggagataccgacgcaggcttaaaagcagaggaggccggaattggcgatacaccatcactcgaagacgaggctgctggacacgtcacacaagccagaatggtgtcaaaatcaaaagatggaaccgggagtgacgataaaaaagccaaaggagctgacggcaaaacaaagatagcgacacccagaggggctgcgccacccggacagaagggccaggcgaatgccactcgcatacctgcaaaaaccccccctgcgccaaaaactcccccttcgtccggagaaccccctaagagcggcgatcgatccggatatagctctcccggaagcccaggtacgcccggatcaagatcacgaacacccagtctgccaaccccacctactagagagcctaaaaaagtggccgtagtgagaacacctcccaagtccccttccagtgcgaagtctcggctgcaaacagcccctgtgccaatgcctgacctgaagaacgtgaaatccaagatcggctccacagaaaacttaaagcatcagccaggaggcggaaaagttcagattatcaacaaaaagctggatctttccaatgttcagtccaagtgtggttctaaagacaacatcaagcatgtcccaggtggagggtctgtgcagattgtttataaacccgttgatctgagcaaggtgaccagtaaatgtggaagcctgggcaatatacaccacaagccagggggtggccaggtggaggtaaagagcgaaaagctggatttcaaagatagagtccagagtaagataggaagccttgacaatataacccatgtaccaggaggcggaaataagaaaattgaaacacacaaattaacttttagggagaatgctaaggcgaagactgatcacggagccgaaatcgtgtacaaatccccggtggtgtctggagacacatctcctcgccatctgagtaacgtgagttccaccggcagtatcgatatggttgatagccctcagttagcaacgctggcagacgaagtctccgccagccttgccaagcagggactgtag

SEQ ID NO: 192765 - protein, 758 aa, Artificial Sequence
  derived and/or modified sequence
MAEPRQEFEVMEDHAGTYGLGDRKDQGGYTMHQDQEGDTDAGLKESPLQTPTEDGSEEPGSETSDAKSTPTAEDVTAPLVDEGAPGKQAAAQPHTEIPEGTTAEEAGIGDTPSLEDEAAGHVTQEPESGKVVQEGFLREPGPPGLSHQLMSGMPGAPLLPEGPREATRQPSGTGPEDTEGGRHAPELLKHQLLGDLHQEGPLLKGAGGKERPGSKEEVDEDRDVDESSPQDSPPSKASPAQDGRPPQTAAREATSIPGFPAEGAIPLPVDFLSKVSTEIPASEPNGPSAGRAKGQDAPLEFTFHVEITPNVQKEQAHSEEHLGRAAFPGAPGEGPEARGPSLGEDTKEADLPEPSEKQPAAAPRGKPVSWVPQLKARMVSKSKDGTGSDDKKAKTSTRSSAKTLKNRPCLSPKHPTPGSSDPLIQPSSPAVCPEPPSSPKYVSSVTPRTGSSGAKEMKLKGADGKTKIATPRGAAPPGQKGQANATRIPAKTPPAPKTPPSSGEPPKSGDRSGYSSPGSPGTPGSRSRTPSLPTPPTREPKKVAVVRTPPKSPSSAKSRLQTAPVPMPDLKNVKSKIGSTENLKHQPGGGKVQIINKKLDLSNVQSKCGSKDNIKHVPGGGSVQIVYKPVDLSKVTSKCGSLGNIHHKPGGGQVEVKSEKLDFKDRVQSKIGSLDNITHVPGGGNKKIETHKLTFRENAKAKTDHGAEIVYKSPVVSGDTSPRHLSNVSSTGSIDMVDSPQLATLADEVSASLAKQGL

SEQ ID NO: 192766 - protein, 758 aa, Artificial Sequence
  derived and/or modified sequence
MAEPRQEFEVMEDHAGTYGLGDRKDQGGYTMHQDQEGDTDAGLKESPLQTPTEDGSEEPGSETSDAKSTPTAEDVTAPLVDEGAPGKQAAAQPHTEIPEGTTAEEAGIGDTPSLEDEAAGHVTQEPESGKVVQEGFLREPGPPGLSHQLMSGMPGAPLLPEGPREATRQPSGTGPEDTEGGRHAPELLKHQLLGDLHQEGPPLKGAGGKERPGSKEEVDEDRDVDESSPQDSPPSKASPAQDGRPPQTAAREATSIPGFPAEGAIPLPVDFLSKVSTEIPASEPDGPSVGRAKGQDAPLEFTFHVEITPNVQKEQAHSEEHLGRAAFPGAPGEGPEARGPSLGEDTKEADLPEPSEKQPAAAPRGKPVSRVPQLKARMVSKSKDGTGSDDKKAKTSTRSSAKTLKNRPCLSPKHPTPGSSDPLIQPSSPAVCPEPPSSPKYVSSVTSRTGSSGAKEMKLKGADGKTKIATPRGAAPPGQKGQANATRIPAKTPPAPKTPPSSGEPPKSGDRSGYSSPGSPGTPGSRSRTPSLPTPPTREPKKVAVVRTPPKSPSSAKSRLQTAPVPMPDLKNVKSKIGSTENLKHQPGGGKVQIINKKLDLSNVQSKCGSKDNIKHVPGGGSVQIVYKPVDLSKVTSKCGSLGNIHHKPGGGQVEVKSEKLDFKDRVQSKIGSLDNITHVPGGGNKKIETHKLTFRENAKAKTDHGAEIVYKSPVVSGDTSPRHLSNVSSTGSIDMVDSPQLATLADEVSASLAKQGL

SEQ ID NO: 192767 - DNA, 2277 bp, Artificial Sequence
  derived and/or modified sequence
atggccgagcccagacaggagttcgaggtgatggaggaccacgccggcacctacggcctgggcgacagaaaggaccagggcggctacaccatgcaccaggaccaggagggcgacaccgacgccggcctgaaggagagccccctgcagacccccaccgaggacggcagcgaggagcccggcagcgagaccagcgacgccaagagcacccccaccgccgaggacgtgaccgcccccctggtggacgagggcgcccccggcaagcaggccgccgcccagccccacaccgagatccccgagggcaccaccgccgaggaggccggcatcggcgacacccccagcctggaggacgaggccgccggccacgtgacccaggagcccgagagcggcaaggtggtgcaggagggcttcctgagagagcccggcccccccggcctgagccaccagctgatgagcggcatgcccggcgcccccctgctgcccgagggccccagagaggccaccagacagcccagcggcaccggccccgaggacaccgagggcggcagacacgcccccgagctgctgaagcaccagctgctgggcgacctgcaccaggagggccccctgctgaagggcgccggcggcaaggagagacccggcagcaaggaggaggtggacgaggacagagacgtggacgagagcagcccccaggacagcccccccagcaaggccagccccgcccaggacggcagacccccccagaccgccgccagagaggccaccagcatccccggcttccccgccgagggcgccatccccctgcccgtggacttcctgagcaaggtgagcaccgagatccccgccagcgagcccaacggccccagcgccggcagagccaagggccaggacgcccccctggagttcaccttccacgtggagatcacccccaacgtgcagaaggagcaggcccacagcgaggagcacctgggcagagccgccttccccggcgcccccggcgagggccccgaggccagaggccccagcctgggcgaggacaccaaggaggccgacctgcccgagcccagcgagaagcagcccgccgccgcccccagaggcaagcccgtgagctgggtgccccagctgaaggccagaatggtgagcaagagcaaggacggcaccggcagcgacgacaagaaggccaagaccagcaccagaagcagcgccaagaccctgaagaacagaccctgcctgagccccaagcaccccacccccggcagcagcgaccccctgatccagcccagcagccccgccgtgtgccccgagccccccagcagccccaagtacgtgagcagcgtgacccccagaaccggcagcagcggcgccaaggagatgaagctgaagggcgccgacggcaagaccaagatcgccacccccagaggcgccgccccccccggccagaagggccaggccaacgccaccagaatccccgccaagaccccccccgcccccaagaccccccccagcagcggcgagccccccaagagcggcgacagaagcggctacagcagccccggcagccccggcacccccggcagcagaagcagaacccccagcctgcccaccccccccaccagagagcccaagaaggtggccgtggtgagaaccccccccaagagccccagcagcgccaagagcagactgcagaccgcccccgtgcccatgcccgacctgaagaacgtgaagagcaagatcggcagcaccgagaacctgaagcaccagcccggcggcggcaaggtgcagatcatcaacaagaagctggacctgagcaacgtgcagagcaagtgcggcagcaaggacaacatcaagcacgtgcccggcggcggcagcgtgcagatcgtgtacaagcccgtggacctgagcaaggtgaccagcaagtgcggcagcctgggcaacatccaccacaagcccggcggcggccaggtggaggtgaagagcgagaagctggacttcaaggacagagtgcagagcaagatcggcagcctggacaacatcacccacgtgcccggcggcggcaacaagaagatcgagacccacaagctgaccttcagagagaacgccaaggccaagaccgaccacggcgccgagatcgtgtacaagagccccgtggtgagcggcgacaccagccccagacacctgagcaacgtgagcagcaccggcagcatcgacatggtggacagcccccagctggccaccctggccgacgaggtgagcgccagcctggccaagcagggcctgtag

SEQ ID NO: 192768 - DNA, 2277 bp, Artificial Sequence
  derived and/or modified sequence
atggccgagccacgccaggaatttgaagtgatggaagaccacgctggcacctatggtctgggcgacagaaaagatcagggcggatatacaatgcaccaagaccaagaaggggacaccgacgctgggcttaaggagagtcctctgcaaacacccaccgaagacggaagtgaagaaccaggcagcgagacaagcgacgcaaaatcgacgcccaccgctgaggacgtcacagcccccctggtggacgaaggtgccccagggaaacaggctgccgcacaacctcatacggaaattccggaaggaacaactgccgaggaggcgggcattggcgatacaccgtctctcgaggacgaggctgctggccatgtcacccaggagccagagtccggcaaggtggtgcaggagggttttctcagagagcccggaccgcctggactctcacaccagttgatgtctggcatgcctggggctccactactgcccgaagggccgagagaggctaccagacagcctagcgggacaggtccagaggacactgaaggaggcagacacgctccagagctgcttaaacaccagctgctgggagatttgcatcaggaggggccattgctgaagggggctggaggaaaagagcggcccgggagcaaagaggaggtcgatgaagaccgtgacgtggacgaaagctcgccacaggattcccccccaagcaaggcttccccagcccaggatggacgaccaccccagactgctgcacgcgaagcgaccagcataccaggattccctgcagaaggcgccattcccctccctgtcgattttctatctaaggtatccacagagatacctgcctcagagcctaatgggccatccgcaggacgagcaaagggccaggacgcaccattggagtttactttccacgtcgaaattacacctaatgttcagaaggagcaagcgcactctgaagaacaccttggacgggccgcttttccaggtgcaccaggggaaggtccggaggccagagggccatcactgggcgaggataccaaggaagcagacctgcccgagccctccgaaaagcaacccgctgcagctccaagaggaaaaccagtgagttgggtcccgcagcttaaagcaaggatggtgtcaaaatcaaaagacggtactggcagcgatgacaaaaaagcaaagacctccacacggagctctgccaaaactctgaagaacaggccttgtttgagtccaaagcaccccacgcccggcagcagcgatcctctgatacagcccagctcacccgccgtgtgtccagaacccccgtcgagtccaaagtatgtcagtagtgtgacgccaaggaccggtagtagcggggccaaagaaatgaagcttaagggcgccgatggtaaaaccaagatagcaaccccaaggggcgcggcgccgcccggccagaaaggccaagccaatgctacccggattcctgctaaaaccccacccgccccaaaaacccctccctccagtggagagccccccaagtcaggtgaccgatccggatatagttcacctggcagccctggcactccaggtagtaggagcaggactccttccctcccgactccccctacccgggagcctaagaaagttgctgtggtgcgaactccacccaaatctcccagctccgctaaaagcaggctgcagaccgcaccggtgcccatgccagacctgaaaaacgtgaaatctaagatcggtagcaccgaaaatctaaagcaccagcctggtggcgggaaagtgcagatcatcaacaaaaagttggacctttcaaacgttcaatccaaatgtggctcaaaggataatataaagcacgtgcccgggggcgggtcagtgcaaattgtgtacaaaccagttgatctgtctaaagttacatctaaatgtggttctttaggcaacatccaccataaaccaggcgggggacaagttgaggtcaaaagcgagaagctcgactttaaagacagagtccaatccaaaattggctctctggataacattacccacgtcccggggggcggtaacaagaagatcgagacccataaactcacctttcgcgaaaacgcgaaggctaagacagatcacggcgcagagatcgtgtataagagccctgtcgtctccggagacactagccccagacatttgagcaacgtgagctccacaggctctattgacatggtcgactccccacaactggccacactggccgacgaggtcagtgcaagccttgccaaacaaggcctttag

SEQ ID NO: 192769 - DNA, 2277 bp, Artificial Sequence
  derived and/or modified sequence
atggccgagccccggcaggagtttgaggtgatggaggaccatgctggcacctacggcctgggggacaggaaggaccagggcggctacaccatgcaccaggaccaggagggggacacagatgctggcctgaaggagagccccctgcagacccccacagaagatggcagcgaggagcccggcagcgagaccagtgatgccaagagcacccccacagcagaagatgtgacagcccccctggtggatgaaggagcccctgggaagcaggccgccgcccagccccacacagagatccctgagggcaccacagctgaggaggccggcatcggggacacccccagcctggaggatgaggccgccggccacgtgacccaggagcctgagagcggcaaggtggtgcaggagggcttcctgcgggagcccggccccccaggcctgagccaccagctgatgagcggcatgcctggggcccccctgctgcctgagggcccccgggaggccacccggcagcccagcggcactggacctgaggacacagagggcggcagacatgcccctgagctgctgaagcaccagctgctgggggacctgcaccaggagggccccctgctgaagggggccggcggcaaggagcggcccggcagcaaggaggaggtggatgaggacagagatgtggatgagagcagcccccaggacagcccccccagcaaggccagccctgcccaggacggccggcccccccagacagctgcccgggaggccaccagcatccctggcttccctgctgagggcgccatccccctgcctgtggacttcctgagcaaggtgtccacagagatcccagccagcgagcccaacggccccagcgctggccgggccaagggccaggatgcccccctggagttcaccttccacgtggagatcacccccaacgtgcagaaggagcaggcccacagcgaggagcacctgggccgggccgccttccctggggcccctggagagggccctgaggcccggggccccagcctgggggaggacaccaaggaggccgacctgcctgagcccagcgagaagcagcctgctgctgccccccggggcaagcctgtgtcctgggtgccccagctgaaggccaggatggtgtccaagagcaaggatggcaccggcagtgatgacaagaaggccaagaccagcaccaggagcagcgccaagaccctgaagaaccggccctgcctgagccccaagcaccccaccccaggcagcagtgaccccctcatccagcccagcagccctgctgtgtgcccagagccccccagcagccccaagtatgtgtcctctgtgacccccaggacaggcagcagcggggccaaggagatgaagctgaagggagcagatggcaagaccaagatcgccacccccaggggggccgcccctcctggccagaagggccaggccaatgccacccgcatcccagccaagaccccaccagcccccaagaccccacccagcagcggggagccccccaagagcggggacaggagcggctacagcagccctggcagccctggcaccccaggcagccgcagcaggacccccagcctgcccaccccacccacccgggagcccaagaaggtggccgtggtgaggaccccacccaagagccccagcagcgccaagagccggctgcagacagcccctgtgcccatgccagacctgaagaatgtgaagagcaagattggcagcacagagaacctgaagcaccagcccggcggcggcaaggtgcagatcatcaacaagaagctggacctgagcaatgtgcagagcaaatgtggcagcaaggacaacatcaagcacgtgcctgggggcggctctgtgcagatcgtgtacaagcctgtggacctgagcaaggtgaccagcaaatgtggcagcctgggcaacatccaccacaagccaggcggcggccaggtggaggtgaagtctgagaagctggacttcaaggacagagtgcagagcaagattggcagcctggacaacatcacccacgtgcctgggggcggcaacaagaagattgagacccacaagctgaccttcagagaaaatgccaaggccaagacagaccatggagctgagatcgtgtacaagagccctgtggtgtctggggacaccagccccaggcacctgagcaatgtgagcagcacaggcagcattgacatggtggacagcccccagctggccaccctggctgatgaggtgtctgccagcctggccaagcagggcctgtag

SEQ ID NO: 192770 - DNA, 2277 bp, Artificial Sequence
  derived and/or modified sequence
atggccgagccccggcaggagttcgaggtgatggaggaccacgccgggacatacggtttgggagatcgtaaagaccagggcgggtacacaatgcaccaggaccaggagggcgacaccgatgccggactgaaggagagcccgttgcagactccaacagaggacggcagcgaagagcctggcagtgaaacctccgatgcgaaatccacaccgacggccgaggacgtaaccgcaccacttgtggatgaaggcgctcccggaaaacaggctgccgcacagccgcacacagagattcccgaaggcactaccgccgaggaggccggcattggcgacacaccatctttagaggatgaagccgccggacatgttacccaggagcctgagtcaggaaaggtagttcaggagggcttccttcgagaacctggccctcccgggctaagtcaccagctgatgtcgggaatgcctggcgccccgctgctccctgagggacctagagaggccacacgccagcccagcgggacaggccccgaagacacagagggcggccggcacgctcccgagttgttgaagcaccagcttctcggggacttgcaccaagaaggtcccctcttgaaaggcgcaggaggcaaggaacgcccaggttcaaaggaggaggtcgatgaagatcgagacgtggatgaatccagcccacaggatagccctcccagcaaggcaagccccgcccaggacgggaggcctccccaaacggctgctcgggaggcaacaagcatccctggattcccagcagagggggctattccgttaccagtggattttctgtccaaggtgtctaccgagatacccgcttctgaacccaatggcccttcagcaggacgggctaaggggcaagacgcacctctggagtttacattccatgtagagattacacccaatgttcaaaaggaacaggcccatagtgaggagcacctgggaagggcagctttccccggcgcaccaggcgagggcccagaagcgagaggccccagtctgggagaagacaccaaggaggctgacctgcccgagccgtccgaaaagcagcctgctgcagcgccaagaggcaagcccgtgagctgggttccccagctaaaggcaaggatggtgtctaaatcgaaggatggaaccggttccgacgacaagaaggcaaaaacctccacgaggtctagcgccaagaccttgaagaacagaccctgcctgtccccaaagcaccccacgcctggttccagtgacccactgatacagccttcttcccccgcagtgtgccctgaaccccctagctctcccaagtacgtatccagtgtcactccgaggacaggctcctctggggccaaagaaatgaaactgaaaggcgcggacggaaagaccaagatcgccacacctagaggggccgctccaccaggccaaaagggccaggctaatgcgaccaggattcccgctaagaccccaccggcgcccaaaacacctcctagctctggcgagccaccaaaaagcggggatcggtccggctacagctcacccggctcccccggcacacctggtagccgcagcagaactccctccctccccacaccgccaacacgagagcccaaaaaggtcgcagtcgtgagaaccccacctaaatccccttcttcggcaaaaagccgattgcagaccgcccccgtcccaatgcccgatctaaagaatgtcaagtccaagataggatctactgaaaacctaaagcatcagcccggcggcggaaaagtgcagattattaataagaaactggacctgtcgaacgtccagtcaaaatgtggctccaaggataacattaaacacgtccctggaggcggtagtgttcagatcgtgtacaaacccgtggacctttctaaagtgacctcgaaatgtgggtccctgggcaacattcatcacaagcccgggggcggccaagtggaggttaagtccgagaagcttgatttcaaggacagggtgcagtcaaaaatcggatcgttggacaatatcacccatgtgcccggcgggggaaataagaagattgaaacacacaagctgacttttcgcgagaacgccaaagctaagacagaccacggagccgaaatcgtttataaatcgccggtggtgtcaggcgatacgtccccaaggcatttgtctaacgtttcgtcaacgggatcaattgacatggtggactccccccagctcgcaaccttagcagacgaggtatccgcatccctagccaagcagggcctgtag

SEQ ID NO: 192771 - DNA, 3476 bp, Artificial Sequence
  derived and/or modified sequence
caggtgagctttgaaccaggatggctgagccccgccaggagttcgaagtgatggaagatcacgctgggacgtacgggttgggggacaggaaagatcaggggggctacaccatgcaccaagaccaagagggtgacacggacgctggcctgaaagaatctcccctgcagacccccactgaggacggatctgaggaaccgggctctgaaacctctgatgctaagagcactccaacagcggaagatgtgacagcacccttagtggatgagggagctcccggcaagcaggctgccgcgcagccccacacggagatcccagaaggaaccacagctgaagaagcaggcattggagacacccccagcctggaagacgaagctgctggtcacgtgacccaagagcctgaaagtggtaaggtggtccaggaaggcttcctccgagagccaggccccccaggtctgagccaccagctcatgtccggcatgcctggggctcccctcctgcctgagggccccagagaggccacacgccaaccttcggggacaggacctgaggacacagagggcggccgccacgcccctgagctgctcaagcaccagcttctaggagacctgcaccaggaggggccgctgctgaagggggcagggggcaaagagaggccggggagcaaggaggaggtggatgaagaccgcgacgtcgatgagtcctccccccaagactcccctccctccaaggcctccccagcccaagatgggcggcctccccagacagccgccagagaagccaccagcatcccaggcttcccagcggagggtgccatccccctccctgtggatttcctctccaaagtttccacagagatcccagcctcagagcccaacgggcccagtgcagggcgggccaaagggcaggatgcccccctggagttcacgtttcacgtggaaatcacacccaacgtgcagaaggagcaggcgcactcggaggagcatttgggaagggctgcatttccaggggcccctggagaggggccagaggcccggggcccctctttgggagaggacacaaaagaggctgaccttccagagccctctgaaaagcagcctgctgctgctccgcgggggaagcccgtcagctgggtccctcaactcaaagctcgcatggtcagtaaaagcaaagacgggactggaagcgatgacaaaaaagccaagacatccacacgttcctctgctaaaaccttgaaaaataggccttgccttagccccaaacaccccactcctggtagctcagaccctctgatccaaccctccagccctgctgtgtgcccagagccaccttcctctcctaaatacgtctcttctgtcactccccgaactggcagttctggagcaaaggagatgaaactcaagggggctgatggtaaaacgaagatcgccacaccgcggggagcagcccctccaggccagaagggccaggccaacgccaccaggattccagcaaaaaccccacccgctccaaagacaccacccagctctggtgaacctccaaaatcaggggatcgcagcggctacagcagccccggctccccaggcactcccggcagccgctcccgcaccccgtcccttccaaccccacccacccgggagcccaagaaggtggcggtggtccgtactccacccaagtcgccgtcttccgccaagagccgcctgcagacagcccccgtgcccatgccagacctgaagaacgtcaagtccaagatcggctccactgagaacctgaagcaccagccgggaggcgggaaggtgcagataattaataagaagctggatcttagcaacgtccagtccaagtgtggctcaaaggataatatcaaacacgtcccgggaggcggcagtgtgcaaatagtctacaaaccagttgacctgagcaaggtgacctccaagtgtggctcattaggcaacatccatcataaaccaggaggtggccaggtggaagtaaaatctgagaagcttgacttcaaggacagagtccagtcgaagattgggtccctggacaatatcacccacgtccctggcggaggaaataaaaagattgaaacccacaagctgaccttccgcgagaacgccaaagccaagacagaccacggggcggagatcgtgtacaagtcgccagtggtgtctggggacacgtctccacggcatctcagcaatgtctcctccaccggcagcatcgacatggtagactcgccccagctcgccacgctagctgacgaggtgtctgcctccctggccaagcagggtttgtgatcaggcccctggggcggtcaataatcgtggagaggagagaatgagagagtgtggaaaaaaaaagaataatgacccggcccccgccctctgcccccagctgctcctcgcagttcggttaattggttaatcacttaacctgcttttgtcactcggctttggctcgggacttcaaaatcagtgatgggagtaagagcaaatttcatctttccaaattgatgggtgggctagtaataaaatattttaaaaaaaaacattcaaaaacatggccacatccaacatttcctcaggcaattccttttgattcttttttcttcccccctccatgtagaagagggggaaggagaggctctgaaagctgcttctgggggatttcaagggactgggggtgccaaccacctctggccctgttgtgggggtgtcacagaggcagtggcagcaacaaaggatttgaaacttggtgtgttcgtggagccacaggcagacgatgtcaaccttgtgtgagtgtgacgggggttggggtggggcgggaggccacgggggaggccgaggcaggggctgggcagaggggagaggaagcacaagaagtgggagtgggagaggaagccacgtgctggagagtagacatccccctccttgccgctgggagagccaaggcctatgccacctgcagcgtctgagcggccgcctgtccttggtggccgggggtgggggcctgctgtgggtcagtgtgccaccctctgcagggcagcctgtgggagaagggacagcgggtaaaaagagaaggcaagctggcaggagggtggcacttcgtggatgacctccttagaaaagactgaccttgatgtcttgagagcgctggcctcttcctccctccctgcagggtagggggcctgagttgaggggcttccctctctgctccacagaaaccctgttttattgagttctgaaggttggaactgctgccatgattttggccactttgcagacctgggactttagggctaaccagttctctttgtaaggacttgtgcctcttgggagacgtccacccgtttccaagcctgggccaccggcatctctggagtgtgtgggggtctgggaggcgggtcccgagccccctgtccttcccacggccactgcagtcacccctgtctgccccgctgtgctgttgtctgccgt

SEQ ID NO: 192772 - DNA, 2277 bp, Artificial Sequence
  derived and/or modified sequence
atggccgaacccagacaagagttcgaggtgatggaggatcacgcaggaacctacgggctcggcgatcgcaaggaccagggaggctacacgatgcatcaggatcaggagggcgataccgacgccggacttaaggaaagccccctccagaccccaacggaagatggatccgaggagccaggatcagagacatctgacgctaagtccacccctacagctgaggacgttacagctcctctggtggatgagggtgcacctggaaagcaggcggcagcacagcctcacaccgagattcccgaaggcacaacagccgaggaagccggaattggtgatacaccatcacttgaggatgaggcggctggccacgtcacgcaagaacccgagtctggcaaggtggtccaggaaggctttctccgtgagcccggaccacctggcctgtctcatcagttaatgagcggtatgcctggtgctccacttctccctgaggggccacgagaagccacacgacagccgtccggcactggccctgaggatacagagggaggtcgccatgccccagaactgctgaagcatcagttgctgggagacctgcatcaagaaggaccactgctgaaaggcgctggaggcaaagagaggcccggatccaaggaagaagtggatgaagatcgtgacgttgatgaaagcagtccacaggacagtcccccttcaaaggccagtccagcccaggacggcagaccacctcagaccgctgcaagggaagcaacgagcatccctggattccccgctgagggtgccatccccttgcccgtagattttctctccaaggtctctaccgagattccggctagcgagccaaatggtcccagtgctggccgtgcgaaggggcaagatgccccactggagttcacttttcacgttgaaattacccctaatgtgcagaaggagcaggcccattctgaggagcatctaggccgagcagctttccccggagccccaggggaaggcccagaggctcgaggcccttctctcggtgaggatacgaaggaagccgacctcccagagcccagcgagaaacagccagctgctgcaccacggggaaagcctgtgtcttgggtcccacagttaaaagccagaatggtctcaaagagcaaagatggaactgggtctgacgataagaaggctaaaacgagcacaaggagtagcgctaagactctgaaaaatcgcccatgcctgtcgcctaagcatcccacccccggtagctcggatccactgattcagccttctagccctgccgtctgcccagaacctccctcgagcccaaaatatgtctccagcgtaactcctcgaacagggagctctggggctaaagagatgaagttgaaaggggcagatggaaagacaaaaattgctacccccagaggcgcagcacccccaggtcaaaagggacaggcaaatgcaacaagaattcccgctaaaacacctccagccccaaaaacccctcctagctccggtgaacctcccaaaagcggagaccgaagcggttattcctcccccggttcccccggaacacccggatctcggtcacgcaccccttccctgcccacaccgccaactcgagagcctaagaaagtggccgtcgtgaggacaccgcctaaatccccaagcagcgccaaaagcagactccagactgccccagtccctatgcccgacctgaagaatgtgaagagcaagattggatctacggagaatcttaagcatcagccaggtggaggtaaagtgcagatcatcaacaagaagcttgacctcagcaatgtgcagagcaagtgtggaagtaaggacaatatcaagcacgtccccggtgggggtagcgttcagatagtctacaagcccgtcgacctgagcaaggtaactagcaaatgcggctctttgggcaacatacaccataagccagggggtggacaggtcgaggtcaagagcgaaaaattagattttaaagacagagtgcagtctaaaatcggttccctggataacattacacacgttcccggaggcggtaacaaaaagatcgaaacccacaaacttaccttcagagaaaacgctaaagctaaaacagatcatggagccgaaatcgtatataagtcccccgtagtcagtggtgacacaagcccacgacacttaagtaacgtgagcagcactggcagcattgacatggtggacagcccccaactggcaactcttgctgacgaggtgtcagcctcactcgctaaacagggactttag

SEQ ID NO: 192773 - DNA, 2277 bp, Artificial Sequence
  derived and/or modified sequence
atggcagagccccggcaggagtttgaagtgatggaggatcatgctggcacctacggcctgggggataggaaggatcagggcggctacacaatgcaccaggaccaggagggcgacacagatgccgggctcaaggagtcccctctccagactccaacagaagacgggagtgaggagcccgggtcagaaacttctgacgctaaatccacacccactgcggaggacgtgacagcccccctggtcgatgaaggagcccccggcaaacaggccgctgctcagccgcacaccgaaatccccgaggggaccacagccgaggaagccggcatcggcgataccccttccctggaagatgaggctgcaggccacgtaacgcaggagcctgagtctgggaaggtggtgcaggagggtttcttaagagagcccgggccacccgggctctcccatcagctgatgtcaggcatgccaggcgctcccctgctacctgagggaccacgcgaggccaccagacagcctagcggcaccgggcccgaagatacagagggagggcggcacgctcctgagctcctgaagcatcagctcctaggggacctccaccaggaggggcctcccctcaagggagccggaggaaaagagcgaccagggagcaaagaggaggtggacgaagacagagatgttgatgaaagctcgcctcaggactccccgccctctaaggctagcccagctcaagatggaaggccaccccaaacagccgcacgagaagcgacaagcatccctggtttcccagccgagggtgcaatacccctcccagttgattttctgagcaaagtcagcacagagattcccgcttcagagcccgacgggccgagcgtcgggcgcgctaagggacaagatgcccccctggaattcacatttcatgtcgagattacccccaacgtgcaaaaggagcaggcgcatagcgaggagcaccttggcagagccgcgttcccaggcgctccgggagagggccccgaagcaaggggtccatcgctgggcgaggatacaaaagaggctgatctccccgagccatctgagaaacagcccgctgccgcacctaggggaaagccagtgagccgagtcccccaattgaaagctcgaatggtaagcaaaagtaaagatgggacaggtagcgatgataagaaggccaagacaagcactcggagctccgctaagacactgaagaatagaccgtgtctgtctcctaagcatccaacaccagggtccagtgatccgttgatacagcctagcagccccgccgtgtgcccagagccaccgtcatccccgaagtatgtgtccagcgttacctcccgtactgggtcatctggtgccaaggaaatgaagttgaagggcgcagatggtaaaaccaaaatagccaccccacgaggagccgctccaccaggccagaagggccaggccaatgctacccgcattccagcaaagactccccccgccccaaaaacaccaccatcttccggcgaaccccctaagagcggggaccggtcgggctacagttctccaggcagccccggaacccccgggtctagaagtaggacacccagtctgcctaccccacctacacgggagcctaagaaggtcgctgtggtcagaacaccgcctaaaagccctagcagtgccaagagtcggctccagaccgcacccgtgcctatgcctgatctaaagaacgtcaagtctaaaattgggagcaccgagaatcttaagcatcagcctggaggagggaaggttcagataattaataagaagctcgatctgtcaaacgtacaaagcaagtgcggctctaaggataacatcaagcacgtgcctggaggtggcagcgtgcagatagtttacaaacctgtcgacctgagtaaggtgacctctaaatgtggatcactgggcaacatccaccataaacccgggggtggccaggtcgaggtgaagtccgaaaagctagattttaaagaccgcgtgcaatcaaaaattgggagcctggataacattacacacgttccagggggaggcaataaaaagatagaaacacacaagctcacgtttcgcgagaatgcgaaagccaagaccgaccacggggctgagattgtgtacaagagccctgtggtttctggggatacttccccccgacatttgtcaaatgtttcctcaacaggtagcatcgacatggtagacagtcctcagctggctactctggctgatgaggtgtccgctagcttggcaaagcaggggctttag

SEQ ID NO: 192774 - DNA, 2277 bp, Artificial Sequence
  derived and/or modified sequence
atggccgagccccggcaggagtttgaggtgatggaggaccatgctggcacctacggcctgggggacaggaaggaccagggcggctacaccatgcaccaggaccaggagggggacacagatgctggcctgaaggagagccccctgcagacccccacagaagatggcagcgaggagcccggcagcgagaccagtgatgccaagagcacccccacagcagaagatgtgacagcccccctggtggatgaaggagcccctgggaagcaggccgccgcccagccccacacagagatccctgagggcaccacagctgaggaggccggcatcggggacacccccagcctggaggatgaggccgccggccacgtgacccaggagcctgagagcggcaaggtggtgcaggagggcttcctgcgggagcccggccccccaggcctgagccaccagctgatgagcggcatgcctggggcccccctgctgcctgagggcccccgggaggccacccggcagcccagcggcactggacctgaggacacagagggcggcagacatgcccctgagctgctgaagcaccagctgctgggggacctgcaccaggagggcccccccctgaagggggccggcggcaaggagcggcccggcagcaaggaggaggtggatgaggacagagatgtggatgagagcagcccccaggacagcccccccagcaaggccagccctgcccaggacggccggcccccccagacagctgcccgggaggccaccagcatccctggcttccctgctgagggcgccatccccctgcctgtggacttcctgagcaaggtgtccacagagatcccagccagcgagccagatggccccagcgtgggccgggccaagggccaggatgcccccctggagttcaccttccacgtggagatcacccccaacgtgcagaaggagcaggcccacagcgaggagcacctgggccgggccgccttccctggggcccctggagagggccctgaggcccggggccccagcctgggggaggacaccaaggaggccgacctgcctgagcccagcgagaagcagcctgctgctgccccccggggcaagcctgtgtcccgggtgccccagctgaaggccaggatggtgtccaagagcaaggatggcaccggcagtgatgacaagaaggccaagaccagcaccaggagcagcgccaagaccctgaagaaccggccctgcctgagccccaagcaccccaccccaggcagcagtgaccccctcatccagcccagcagccctgctgtgtgcccagagccccccagcagccccaagtatgtgtcctctgtgaccagcaggacaggcagcagcggggccaaggagatgaagctgaagggagcagatggcaagaccaagatcgccacccccaggggggccgcccctcctggccagaagggccaggccaatgccacccgcatcccagccaagaccccaccagcccccaagaccccacccagcagcggggagccccccaagagcggggacaggagcggctacagcagccctggcagccctggcaccccaggcagccgcagcaggacccccagcctgcccaccccacccacccgggagcccaagaaggtggccgtggtgaggaccccacccaagagccccagcagcgccaagagccggctgcagacagcccctgtgcccatgccagacctgaagaatgtgaagagcaagattggcagcacagagaacctgaagcaccagcccggcggcggcaaggtgcagatcatcaacaagaagctggacctgagcaatgtgcagagcaaatgtggcagcaaggacaacatcaagcacgtgcctgggggcggctctgtgcagatcgtgtacaagcctgtggacctgagcaaggtgaccagcaaatgtggcagcctgggcaacatccaccacaagccaggcggcggccaggtggaggtgaagtctgagaagctggacttcaaggacagagtgcagagcaagattggcagcctggacaacatcacccacgtgcctgggggcggcaacaagaagattgagacccacaagctgaccttcagagaaaatgccaaggccaagacagaccatggagctgagatcgtgtacaagagccctgtggtgtctggggacaccagccccaggcacctgagcaatgtgagcagcacaggcagcattgacatggtggacagcccccagctggccaccctggctgatgaggtgtctgccagcctggccaagcagggcctgtag

SEQ ID NO: 192775 - DNA, 6762 bp, Artificial Sequence
  derived and/or modified sequence
ggacggccgagcggcagggcgctcgcgcgcgcccactagtggccggaggagaaggctcccgcggaggccgcgctgcccgccccctcccctggggaggctcgcgttcccgctgctcgcgcctgcgccgcccgccggcctcaggaacgcgccctcttcgccggcgcgcgccctcgcagtcaccgccacccaccagctccggcaccaacagcagcgccgctgccaccgcccaccttctgccgccgccaccacagccaccttctcctcctccgctgtcctctcccgtcctcgcctctgtcgactatcaggtgaactttgaaccaggatggctgagccccgccaggagttcgaagtgatggaagatcacgctgggacgtacgggttgggggacaggaaagatcaggggggctacaccatgcaccaagaccaagagggtgacacggacgctggcctgaaagaatctcccctgcagacccccactgaggacggatctgaggaaccgggctctgaaacctctgatgctaagagcactccaacagcggaagatgtgacagcacccttagtggatgagggagctcccggcaagcaggctgccgcgcagccccacacggagatcccagaaggaaccacagctgaagaagcaggcattggagacacccccagcctggaagacgaagctgctggtcacgtgacccaagagcctgaaagtggtaaggtggtccaggaaggcttcctccgagagccaggccccccaggtctgagccaccagctcatgtccggcatgcctggggctcccctcctgcctgagggccccagagaggccacacgccaaccttcggggacaggacctgaggacacagagggcggccgccacgcccctgagctgctcaagcaccagcttctaggagacctgcaccaggaggggccgccgctgaagggggcagggggcaaagagaggccggggagcaaggaggaggtggatgaagaccgcgacgtcgatgagtcctccccccaagactcccctccctccaaggcctccccagcccaagatgggcggcctccccagacagccgccagagaagccaccagcatcccaggcttcccagcggagggtgccatccccctccctgtggatttcctctccaaagtttccacagagatcccagcctcagagcccgacgggcccagtgtagggcgggccaaagggcaggatgcccccctggagttcacgtttcacgtggaaatcacacccaacgtgcagaaggagcaggcgcactcggaggagcatttgggaagggctgcatttccaggggcccctggagaggggccagaggcccggggcccctctttgggagaggacacaaaagaggctgaccttccagagccctctgaaaagcagcctgctgctgctccgcgggggaagcccgtcagccgggtccctcaactcaaagctcgcatggtcagtaaaagcaaagacgggactggaagcgatgacaaaaaagccaagacatccacacgttcctctgctaaaaccttgaaaaataggccttgccttagccccaaacaccccactcctggtagctcagaccctctgatccaaccctccagccctgctgtgtgcccagagccaccttcctctcctaaatacgtctcttctgtcacttcccgaactggcagttctggagcaaaggagatgaaactcaagggggctgatggtaaaacgaagatcgccacaccgcggggagcagcccctccaggccagaagggccaggccaacgccaccaggattccagcaaaaaccccgcccgctccaaagacaccacccagctctggtgaacctccaaaatcaggggatcgcagcggctacagcagccccggctccccaggcactcccggcagccgctcccgcaccccgtcccttccaaccccacccacccgggagcccaagaaggtggcagtggtccgtactccacccaagtcgccgtcttccgccaagagccgcctgcagacagcccccgtgcccatgccagacctgaagaatgtcaagtccaagatcggctccactgagaacctgaagcaccagccgggaggcgggaaggtgcagataattaataagaagctggatcttagcaacgtccagtccaagtgtggctcaaaggataatatcaaacacgtcccgggaggcggcagtgtgcaaatagtctacaaaccagttgacctgagcaaggtgacctccaagtgtggctcattaggcaacatccatcataaaccaggaggtggccaggtggaagtaaaatctgagaagcttgacttcaaggacagagtccagtcgaagattgggtccctggacaatatcacccacgtccctggcggaggaaataaaaagattgaaacccacaagctgaccttccgcgagaacgccaaagccaagacagaccacggggcggagatcgtgtacaagtcgccagtggtgtctggggacacgtctccacggcatctcagcaatgtctcctccaccggcagcatcgacatggtagactcgccccagctcgccacgctagctgacgaggtgtctgcctccctggccaagcagggtttgtgatcaggcccctggggcggtcaataattgtggagaggagagaatgagagagtgtggaaaaaaaaagaataatgacccggcccccgccctctgcccccagctgctcctcgcagttcggttaattggttaatcacttaacctgcttttgtcactcggctttggctcgggacttcaaaatcagtgatgggagtaagagcaaatttcatctttccaaattgatgggtgggctagtaataaaatatttaaaaaaaaacattcaaaaacatggccacatccaacatttcctcaggcaattccttttgattcttttttcttccccctccatgtagaagagggagaaggagaggctctgaaagctgcttctgggggatttcaagggactgggggtgccaaccacctctggccctgttgtgggggtgtcacagaggcagtggcagcaacaaaggatttgaaacttggtgtgttcgtggagccacaggcagacgatgtcaaccttgtgtgagtgtgacgggggttggggtggggcgggaggccacgggggaggccgaggcaggggctgggcagaggggagaggaagcacaagaagtgggagtgggagaggaagccacgtgctggagagtagacatccccctccttgccgctgggagagccaaggcctatgccacctgcagcgtctgagcggccgcctgtccttggtggccgggggtgggggcctgctgtgggtcagtgtgccaccctctgcagggcagcctgtgggagaagggacagcgggtaaaaagagaaggcaagctggcaggagggtggcacttcgtggatgacctccttagaaaagactgaccttgatgtcttgagagcgctggcctcttcctccctccctgcagggtagggggcctgagttgaggggcttccctctgctccacagaaaccctgttttattgagttctgaaggttggaactgctgccatgattttggccactttgcagacctgggactttagggctaaccagttctctttgtaaggacttgtgcctcttgggagacgtccacccgtttccaagcctgggccactggcatctctggagtgtgtgggggtctgggaggcaggtcccgagccccctgtccttcccacggccactgcagtcaccccgtctgcgccgctgtgctgttgtctgccgtgagagcccaatcactgcctatacccctcatcacacgtcacaatgtcccgaattcccagcctcaccaccccttctcagtaatgaccctggttggttgcaggaggtacctactccatactgagggtgaaattaagggaaggcaaagtccaggcacaagagtgggaccccagcctctcactctcagttccactcatccaactgggaccctcaccacgaatctcatgatctgattcggttccctgtctcctcctcccgtcacagatgtgagccagggcactgctcagctgtgaccctaggtgtttctgccttgttgacatggagagagccctttcccctgagaaggcctggccccttcctgtgctgagcccacagcagcaggctgggtgtcttggttgtcagtggtggcaccaggatggaagggcaaggcacccagggcaggcccacagtcccgctgtcccccacttgcaccctagcttgtagctgccaacctcccagacagcccagcccgctgctcagctccacatgcatagtatcagccctccacacccgacaaaggggaacacacccccttggaaatggttcttttcccccagtcccagctggaagccatgctgtctgttctgctggagcagctgaacatatacatagatgttgccctgccctccccatctgcaccctgttgagttgtagttggatttgtctgtttatgcttggattcaccagagtgactatgatagtgaaaagaaaaaaaaaaaaaaaaaaggacgcatgtatcttgaaatgcttgtaaagaggtttctaacccaccctcacgaggtgtctctcacccccacactgggactcgtgtggcctgtgtggtgccaccctgctggggcctcccaagttttgaaaggctttcctcagcacctgggacccaacagagaccagcttctagcagctaaggaggccgttcagctgtgacgaaggcctgaagcacaggattaggactgaagcgatgatgtccccttccctacttccccttggggctccctgtgtcagggcacagactaggtcttgtggctggtctggcttgcggcgcgaggatggttctctctggtcatagcccgaagtctcatggcagtcccaaaggaggcttacaactcctgcatcacaagaaaaaggaagccactgccagctggggggatctgcagctcccagaagctccgtgagcctcagccacccctcagactgggttcctctccaagctcgccctctggaggggcagcgcagcctcccaccaagggccctgcgaccacagcagggattgggatgaattgcctgtcctggatctgctctagaggcccaagctgcctgcctgaggaaggatgacttgacaagtcaggagacactgttcccaaagccttgaccagagcacctcagcccgctgaccttgcacaaactccatctgctgccatgagaaaagggaagccgcctttgcaaaacattgctgcctaaagaaactcagcagcctcaggcccaattctgccacttctggtttgggtacagttaaaggcaaccctgagggacttggcagtagaaatccagggcctcccctggggctggcagcttcgtgtgcagctagagctttacctgaaaggaagtctctgggcccagaactctccaccaagagcctccctgccgttcgctgagtcccagcaattctcctaagttgaagggatctgagaaggagaaggaaatgtggggtagatttggtggtggttagagatatgcccccctcattactgccaacagtttcggctgcatttcttcacgcacctcggttcctcttcctgaagttcttgtgccctgctcttcagcaccatgggccttcttatacggaaggctctgggatctcccccttgtggggcaggctcttggggccagcctaagatcatggtttagggtgatcagtgctggcagataaattgaaaaggcacgctggcttgtgatcttaaatgaggacaatccccccagggctgggcactcctcccctcccctcacttctcccacctgcagagccagtgtccttgggtgggctagataggatatactgtatgccggctccttcaagctgctgactcactttatcaatagttccatttaaattgacttcagtggtgagactgtatcctgtttgctattgcttgttgtgctatggggggaggggggaggaatgtgtaagatagttaacatgggcaaagggagatcttggggtgcagcacttaaactgcctcgtaacccttttcatgatttcaaccacatttgctagagggagggagcagccacggagttagaggcccttggggtttctcttttccactgacaggctttcccaggcagctggctagttcattccctccccagccaggtgcaggcgtaggaatatggacatctggttgctttggcctgctgccctctttcaggggtcctaagcccacaatcatgcctccctaagaccttggcatccttccctctaagccgttggcacctctgtgccacctctcacactggctccagacacacagcctgtgcttttggagctgagatcactcgcttcaccctcctcatctttgttctccaagtaaagccacgaggtcggggcgagggcagaggtgatcacctgcgtgtcccatctacagacctgcagcttcataaaacttctgatttctcttcagctttgaaaagggttaccctgggcactggcctagagcctcacctcctaatagacttagccccatgagtttgccatgttgagcaggactatttctggcacttgcaagtcccatgatttcttcggtaattctgagggtggggggagggacatgaaatcatcttagcttagctttctgtctgtgaatgtctatatagtgtattgtgtgttttaacaaatgatttacactgactgttgctgtaaaagtgaatttggaaataaagttattactctgattaaa

SEQ ID NO: 192776 - DNA, 2277 bp, Artificial Sequence
  derived and/or modified sequence
atggccgagccccggcaggagttcgaggtgatggaggaccacgccggtacatatggattgggagacagaaaggaccagggcggttacaccatgcaccaagatcaagagggcgatacagatgcaggactgaaagagtctccactgcagacccccacggaagacggcagtgaggagccagggtcagagacctccgacgcaaaatctactcccaccgccgaagacgtgactgcaccattggtcgacgaaggggcaccaggtaagcaggcagccgcccagcctcatactgaaattcctgaggggaccactgccgaagaggccggcataggggatactcccagtttggaggacgaagctgctggtcacgtcactcaggagccagaaagcggtaaggtcgtgcaggagggttttctacgggaacctggaccaccaggcctgtctcatcaactcatgagcggaatgccaggagctcctttattgcccgagggaccccgcgaggccacgcggcagcccagcggcactggacctgaagataccgagggcgggcgccacgctcccgagctgctcaagcaccaactgttgggagacttgcaccaggagggaccccccctgaagggcgcagggggaaaagagaggccggggagcaaggaagaggtggatgaggacagagatgtggatgaatcctctcctcaggactcacctcccagtaaggcgagcccagcacaggatggccgaccccctcagacggctgccagggaagccacctcaattccaggtttccccgcagagggagcaatccctctgcccgtcgactttctcagcaaagttagcactgaaatccctgcatcagagccagacggccctagcgtgggtagagccaagggacaggatgcacctctggagttcaccttccacgtagagattacacctaatgtgcagaaggagcaggcccattcagaagagcatttggggagagccgccttccccggggcgccgggtgaagggccagaggctagaggacccagcctgggagaggataccaaagaggccgatctgcccgagccatccgaaaagcagcctgccgcggcgccgaggggaaagcccgtaagccgggtgcctcagctaaaggcccgcatggtttcgaagtctaaggacggaaccggaagcgacgataagaaagcaaagaccagcacacgatctagtgcaaaaacattgaaaaatagaccatgccttagcccgaagcaccccacaccaggctccagtgaccctctcatccaaccaagctcacctgccgtgtgcccagagccgccatctagccccaagtacgtctcgtcagtcaccagcaggacagggagcagtggggctaaggagatgaagctgaaaggcgcagatggaaagaccaaaattgcaaccccacgcggcgccgcgcctcctggacagaagggccaggctaatgccacgcggatccccgcaaaaacgccacccgcccccaaaacaccacctagtagtggagaaccccctaagtccggtgatcgctctggctactcctcgcccggtagccccggtacacccgggagtcgctctcgcacaccttcactgccgaccccccccacgcgcgagcccaagaaggttgccgtcgttcggacgcctcctaaaagtcccagctctgccaagagtcggctgcagacagccccagtccctatgccagacctgaaaaacgttaaaagcaaaatagggagtactgagaatctaaaacatcagcccggaggcgggaaggttcaaattatcaataaaaagcttgacctttcgaacgtgcaaagcaagtgtgggagtaaagataatataaagcatgtgcccggggggggctcggtacaaattgtgtataaaccagtggacctcagcaaagtcacttcaaaatgtggttcactgggcaatatacatcacaagccgggtggcggacaggtggaagtgaaatcagagaaattagactttaaggaccgagtccagtccaaaatcggctccttagacaatataacccatgtgcctggagggggaaacaaaaaaattgaaacccataaacttacctttcgtgagaacgccaaggcaaagacggaccacggggctgaaatagtttacaaatccccggtcgtgagcggcgatacaagtcctagacacttgtctaacgtgtcttccactggatctatcgacatggttgacagcccccagctggccactctcgctgacgaggtgagcgcgtcccttgcaaagcaaggtctgtag

SEQ ID NO: 192777 - DNA, 2277 bp, Artificial Sequence
  derived and/or modified sequence
atggccgagcccagacaggaattcgaggttatggaggatcacgcgggaacctacgggctcggcgacagaaaagatcaggggggatacactatgcatcaagaccaggaaggagatacggatgccggtctcaaggaatcccctctgcagacccctacggaagatggcagcgaggaacctggaagtgagaccagcgacgctaaatccactccgacggcagaggatgttaccgcaccactggtcgacgaaggggctcccggtaagcaggccgcagctcagccacacactgagataccggaaggaacaactgctgaggaagccggaataggagatacgcccagtcttgaagatgaggcagccggtcatgtgactcaggaacccgagagcggaaaggttgtacaagagggattcttaagagagccaggtccacctggactgagtcaccaattgatgtccggaatgcctggcgcacctctgcttcccgaaggaccaagagaggcaaccaggcagccctcggggaccggtcccgaagacaccgaaggcggtaggcacgctcccgagctgctcaagcatcagcttctgggagacctccatcaggaaggaccaccactgaaaggagctggtggtaaggagcggcctggctctaaggaggaagtggatgaagatcgggacgttgatgaatccagcccccaagacagccctccatccaaagccagtcccgctcaggatgggaggcccccacagacagcggctagagaagccacgtccattcccggatttcccgctgaaggcgctattccacttcccgtggattttctgtccaaggtcagcaccgaaataccggctagtgagcctgatggcccaagcgtggggagagccaaagggcaagatgctcctctggagtttacatttcacgttgagataacgcctaacgtccagaaagagcaagcccatagcgaggaacacctcggccgagcagcctttcctggcgcaccgggtgagggcccagaggcacgaggtccaagtctaggagaggacacgaaggaggctgacttacctgagccgagcgaaaaacagcccgctgctgccccacgagggaagcctgtttcaagggtgcctcaacttaaggctaggatggtctccaaatccaaagacggcaccggctccgacgataagaaagctaaaacttccacgaggagtagcgccaagacactaaagaaccggccatgtctttcgcccaagcaccccacccccggaagctctgacccactgatacagccgtcttctcccgctgtctgcccagaaccaccctcctcccctaagtacgtctcatcggtgacgagcagaacgggctcctccggcgctaaagaaatgaagcttaagggggctgatggtaagaccaagatcgccacacccagaggagcggcaccgccaggccagaaaggacaggcgaacgcaacacgcatccccgcaaaaacgcctcctgctccgaagactcccccttcatctggtgaacctcccaagagtggggacaggagcggctattcctcaccgggatcgcccggaacacctggaagtcgcagcagaacacccagtcttcccacacctccaactcgtgaacccaagaaagtcgcagtggtaagaactccgcctaaatccccttctagtgctaaatcacgtctccagaccgcaccggttcctatgccggacctcaaaaacgttaagagtaagataggaagtacagagaatcttaaacatcagccagggggagggaaagtccaaatcattaacaaaaagctagatctatccaacgtgcaaagcaaatgcggtagtaaggacaacataaagcacgtgcctgggggaggaagcgtgcagattgtgtataagccggttgatctgtccaaggtcacatctaaatgcggctctcttggcaacatacaccacaagccgggaggtggccaggtggaggtgaaaagtgagaaactggattttaaggaccgagttcagagtaagataggctcactggataacataacacatgtgcccggaggcggaaacaaaaagattgaaacacacaagctcacattcagagaaaacgcgaaggcaaaaacagaccatggtgccgagatcgtctataaaagccccgtagttagtggagatacttccccacggcacttaagcaacgtctcttctacaggatccatcgatatggtggacagtcctcagctggcaacgctggcagacgaggtgtctgccagtcttgcgaaacaggggctctag

SEQ ID NO: 192778 - DNA, 2277 bp, Artificial Sequence
  derived and/or modified sequence
atggccgagcccagacaggagttcgaggtgatggaggaccacgccggcacctacggcctgggcgacagaaaggaccagggcggctacaccatgcaccaggaccaggagggcgacaccgacgccggcctgaaggagagccccctgcagacccccaccgaggacggcagcgaggagcccggcagcgagaccagcgacgccaagagcacccccaccgccgaggacgtgaccgcccccctggtggacgagggcgcccccggcaagcaggccgccgcccagccccacaccgagatccccgagggcaccaccgccgaggaggccggcatcggcgacacccccagcctggaggacgaggccgccggccacgtgacccaggagcccgagagcggcaaggtggtgcaggagggcttcctgagagagcccggcccccccggcctgagccaccagctgatgagcggcatgcccggcgcccccctgctgcccgagggccccagagaggccaccagacagcccagcggcaccggccccgaggacaccgagggcggcagacacgcccccgagctgctgaagcaccagctgctgggcgacctgcaccaggagggcccccccctgaagggcgccggcggcaaggagagacccggcagcaaggaggaggtggacgaggacagagacgtggacgagagcagcccccaggacagcccccccagcaaggccagccccgcccaggacggcagacccccccagaccgccgccagagaggccaccagcatccccggcttccccgccgagggcgccatccccctgcccgtggacttcctgagcaaggtgagcaccgagatccccgccagcgagcccgacggccccagcgtgggcagagccaagggccaggacgcccccctggagttcaccttccacgtggagatcacccccaacgtgcagaaggagcaggcccacagcgaggagcacctgggcagagccgccttccccggcgcccccggcgagggccccgaggccagaggccccagcctgggcgaggacaccaaggaggccgacctgcccgagcccagcgagaagcagcccgccgccgcccccagaggcaagcccgtgagcagagtgccccagctgaaggccagaatggtgagcaagagcaaggacggcaccggcagcgacgacaagaaggccaagaccagcaccagaagcagcgccaagaccctgaagaacagaccctgcctgagccccaagcaccccacccccggcagcagcgaccccctgatccagcccagcagccccgccgtgtgccccgagccccccagcagccccaagtacgtgagcagcgtgaccagcagaaccggcagcagcggcgccaaggagatgaagctgaagggcgccgacggcaagaccaagatcgccacccccagaggcgccgccccccccggccagaagggccaggccaacgccaccagaatccccgccaagaccccccccgcccccaagaccccccccagcagcggcgagccccccaagagcggcgacagaagcggctacagcagccccggcagccccggcacccccggcagcagaagcagaacccccagcctgcccaccccccccaccagagagcccaagaaggtggccgtggtgagaaccccccccaagagccccagcagcgccaagagcagactgcagaccgcccccgtgcccatgcccgacctgaagaacgtgaagagcaagatcggcagcaccgagaacctgaagcaccagcccggcggcggcaaggtgcagatcatcaacaagaagctggacctgagcaacgtgcagagcaagtgcggcagcaaggacaacatcaagcacgtgcccggcggcggcagcgtgcagatcgtgtacaagcccgtggacctgagcaaggtgaccagcaagtgcggcagcctgggcaacatccaccacaagcccggcggcggccaggtggaggtgaagagcgagaagctggacttcaaggacagagtgcagagcaagatcggcagcctggacaacatcacccacgtgcccggcggcggcaacaagaagatcgagacccacaagctgaccttcagagagaacgccaaggccaagaccgaccacggcgccgagatcgtgtacaagagccccgtggtgagcggcgacaccagccccagacacctgagcaacgtgagcagcaccggcagcatcgacatggtggacagcccccagctggccaccctggccgacgaggtgagcgccagcctggccaagcagggcctgtag

SEQ ID NO: 192779 - protein, 406 aa, Artificial Sequence
  derived and/or modified sequence
MGKVWKQQMYPQYATYYYPQYLQAKQSLVPAHPMAPPSPSTTSSNNNSSSSSNSGWDQLSKTNLYIRGLPPHTTDQDLVKLCQPYGKIVSTKAILDKTTNKCKGYGFVDFDSPAAAQKAVSALKASGVQAQMAKQQEQDPTNLYISNLPLSMDEQELENMLKPFGQVISTRILRDSSGTSRGVGFARMESTEKCEAVIGHFNGKFIKTPPGVSAPTEPLLCKFADGGQKKRQNPNKYIPNGRPWHREGEVRLAGMTLTYDPTTAAIQNGFYPSPYSIATNRMITQTSITPYIASPVSAYQVQSPSWMQPQPYILQHPGAVLTPSMEHTMSLQPASMISPLAQQMSHLSLGSTGTYMPATSAMQGAYLPQYAHMQTTAVPVEEASGQQQVAVETSNDHSPYTFQPNK

SEQ ID NO: 192780 - DNA, 4273 bp, Artificial Sequence
  derived and/or modified sequence
caccaagcgcagccgccgctgccgcactttccacttgtattgatcacctctcagccccgcgcagccggctcgcccgagcggaccgcggccagcgcgccagcccttggcagccccggagcagtcgggctccgggaggaaactccttgggagcgccctgtccggggtgccctctgcgctctgcagtgtctttctttctgcctgggaggaggaggaggaggaggaagaggaggaggaggaggaggaggaggaggaagaggaggaggaggaggaggacgtctggtcccggctgggaggtggagcagcggcagcagcagcagccgccgccgccgccgccgctgccgccgccgccggaaagggagaggcaggagagcccgagacttggaaaccccaaagtgtccgcgaccctgcacggcaggctcccttccagcttcatgggcaaagtgtggaaacagcagatgtaccctcagtacgccacctactattacccccagtatctgcaagccaagcagtctctggtcccagcccaccccatggcccctcccagtcccagcaccaccagcagtaataacaacagtagcagcagtagcaactcaggatgggatcagctcagcaaaacgaacctctatatccgaggactgcctccccacaccaccgaccaggacctggtgaagctctgtcaaccatatgggaaaatagtctccacaaaggcaattttggataagacaacgaacaaatgcaaaggttatggttttgtcgactttgacagccctgcagcagctcaaaaagctgtgtctgccctgaaggccagtggggttcaagctcaaatggcaaagcaacaggaacaagatcctaccaacctctacatttctaatttgccactctccatggatgagcaagaactagaaaatatgctcaaaccatttggacaagttatttctacaaggatactacgtgattccagtggtacaagtcgtggtgttggctttgctaggatggaatcaacagaaaaatgtgaagctgttattggtcattttaatggaaaatttattaagacaccaccaggagtttctgcccccacagaacctttattgtgtaagtttgctgatggaggacagaaaaagagacagaacccaaacaaatacatccctaatggaagaccatggcatagagaaggagaggtgagacttgctggaatgacacttacttacgacccaactacagctgctatacagaacggattttatccttcaccatacagtattgctacaaaccgaatgatcactcaaacttctattacaccctatattgcatctcctgtatctgcctaccaggtgcaaagtccttcgtggatgcaacctcaaccatatattctacagcaccctggtgccgtgttaactccctcaatggagcacaccatgtcactacagcccgcatcaatgatcagccctctggcccagcagatgagtcatctgtcactaggcagcaccggaacatacatgcctgcaacgtcagctatgcaaggagcctacttgccacagtatgcacatatgcagacgacagcggttcctgttgaggaggcaagtggtcaacagcaggtggctgtcgagacgtctaatgaccattctccatatacctttcaacctaataagtaactgtgagatgtacagaaaggtgttcttacatgaagaagggtgtgaaggctgaacaatcatggatttttctgatcaattgtgctttaggaaattattgacagttttgcacaggttcttgaaaacgttatttataatgaaatcaactaaaactatttttgctataagttctataaggtgcataaaacccttaaattcatctagtagctgttcccccgaacaggtttattttagtaaaaaaaaaaaaacaaaaaacaaaaacaaaagatttttatcaaatgttatgatgcaaaaaaagaaaaagaaaaaaaaaaagaaaagaaaacttcaattttctgggtatgcacaaagaccatgaagacttatccaagtgcatgaccggatttttgtggttttgttcattttgtgtttaatttgtgttttttttttccagctgtatgaaatgggctttctgaagtttaaatagtccgacttcacccatggtgttctgtgcttgcagtgcgagtgttgctgtaattcagtgttgccgtcagtgtctcttttcttagctttctgtctttctttcaacgtagtgtgaagtgtcttatccttttctatgaattccaatttgccttaactcttttgatgctgtagctgtttcagtaaaagttagttcaaactaatgatgtagaatgctttgaccaaatgagctggtctattatgccttgtaaaacagcagcatagggcttttaaaaggtagtcaataaaagttgctgaaattttggcttttttaaatatgtagtaggtgtttttaatgatttttcacataatgtgtaaggtagtgaaatgcaagaagggaaaaatgttttgtgtgaaacacattttctgactggggaacttttattagggtaaattgtttgtaaggctgtacgccaacagtttcctctgatagtttgactgatttaggatatctgctgtatgatgcaatgtaaagtcttttttgccttttttcaggaaaaaaaaaaagctaacttgatgtactagatttagtgtaggtagtgttggggttggggatgggggtgggggaggggagtcactgaatgttttgtccttcctttatactaatgatagtgctttagaatgagaattatgcctgaaatctggcaaaccgaaaaatgttgctattgcaacaaagtggcaaaagctaaaagtaaggatttatcttcaaacataagctgagataacgaatagaagcaaaacgattggctactagctctctctctctctctctattaggtaaatttgaaaaataaaaatgacttggcacttttaaaggtaacttcaccaaagaccgaagagccagtaaccagtagctccaacttgtctcagcatcacatcttctgtgctctttatttttgccggaccagtttgcggttaggagaatgtgccttttttgtacctttgcatttaggttttataattttaattgatgtatggacacacacaaacaaaaaagcatgaaggaagatttggatccaagcagtgccacactttacatcatcactacaagtgttcaagtgtaaagaaaaccaattttgaaactatgaaattcctgattcataaatacacagttatttctactttagtacatataagataattcactgttattaaagctcttttattaaggcaattgcatatgttttaaaagcaatggtaaattaagttgtcttccaaaactgtgtacttgtctggtcagctgtgtatgatcagttatctacctcagagtctattttcttttgtgctgggacaggttgctggccctccctgtttccacagaccaaatcctcctagctcaggagctagggctaagcagttatttctttcaagtattttttagttcttaaattttatgcttgtatttgatgatagatgtcagtgacatttcatagtttcaaaagtccttgctgctctgagaagtgtagattctagtgaaaattacatagtcataagagaaatgtgtttttgtttttgtttttgtttcatttttttaaagttgtggtattattggttctatgctccctggaatattactgctttgtgaaagtccagactgaacgcagcaccctctgtgtacctagtacagttataaacctgggtctctcactacttgatatttttgcattagttaagacagaaatttgatagctcggttagaggggaggggaaatctgctgctagaaatgtctgaactaagtgccatactcgtctgggtaagatttgggaaacataacctctgtacataaaaaaaaaaaaatcagttaaacatcacatagtagacagccattaaattataaaaaaattaatttatgaagaaagaccttttgtacagattgaaaaaaaaagattttcatagagatatctatatgatcaagagagttaattttttatttttgttttactagtgccacagacttgccagtggtaacttatttgtccggttcaagataactctgtagttttctttcctaggacttgttgttaaacgccaaaagacatttttgaactgtacatttgatcagattgttagcttttctgttttatttcttttgagaacctttgaataaaaaacatctgaaatttta

SEQ ID NO: 192781 - DNA, 1221 bp, Artificial Sequence
  derived and/or modified sequence
atggggaaagtgtggaagcaacagatgtaccctcaatacgccacatactattacccgcagtacctgcaggccaagcagtcacttgtaccggctcaccccatggcccctccatccccatccacaacttcctcaaacaacaattcttccagctcttcgaattctgggtgggatcagctgagcaagaccaacctctatattaggggattgccgcctcataccacagaccaggatttggtcaagctgtgccagccatacgggaagatagtaagtacaaaggcaatactagataaaactactaataagtgcaaaggctatggcttcgtggacttcgattccccagcagccgctcagaaagccgtgtcagccctgaaggcttctggcgtgcaagcacagatggccaaacagcaggaacaggatcctacaaacctctacatctcaaacctcccgttatcaatggacgagcaggaactggagaatatgttaaaaccattcgggcaagtcatctccacaaggattcttcgggatagttcagggacatcaagaggcgtcgggtttgccagaatggaaagcacagaaaaatgtgaggccgtgatcgggcacttcaacggcaaatttatcaaaacccctcctggagtgtccgcgcctaccgaacctttgttatgtaaattcgcagacgggggacagaaaaagcggcagaatcctaacaagtacattcccaatgggagaccatggcaccgcgagggagaagtgcggctggctggaatgacgctaacgtacgaccccaccacagccgccatccagaatggcttctacccctcaccctacagtatcgctacaaatcgcatgataacacagacatcgatcactccctatatcgcatctcctgtctccgcataccaagttcagtcacctagctggatgcaacctcagccctatattctgcaacacccaggagcagtgttgaccccctctatggaacacacaatgtcactccaaccggcttctatgatctctccgctggcccagcagatgtctcatctgagcctcgggtctacaggaacctacatgcctgcaacctcagctatgcagggtgcatacctaccacaatatgcccatatgcaaacaaccgccgttccagttgaggaggcctctggtcagcaacaggtggccgttgaaacatctaacgaccattcaccttataccttccagcccaacaagtag

SEQ ID NO: 192782 - DNA, 1221 bp, Artificial Sequence
  derived and/or modified sequence
atgggcaaggtgtggaagcagcagatgtacccccagtatgccacctactactacccccagtacctgcaggccaagcagagcctggtgcctgcccaccccatggccccacccagccccagcaccaccagcagcaacaacaacagcagcagcagcagcaacagcggctgggaccagctgagcaagaccaacctgtacatccggggcctgcccccccacaccacagaccaggacctggtgaagctgtgccagccctacggcaagatcgtgtccaccaaggccatcctggacaagaccaccaacaagtgcaagggctacggctttgtggactttgacagccctgctgctgcccagaaggctgtgtctgccctgaaggccagcggcgtgcaggcccagatggccaagcagcaggagcaggaccccaccaacctgtacatcagcaacctgcccctgtccatggatgagcaggagctggagaacatgctgaagcccttcggccaggtgatcagcacccgcatcctgcgggacagcagcggcaccagccggggcgtgggctttgccaggatggagagcacagagaagtgtgaggccgtcatcggccacttcaacgggaagttcatcaagaccccacctggggtgtctgcccccacagagcccctgctgtgcaagtttgctgatggcggccagaagaagaggcagaaccccaacaagtacatccccaacggccggccctggcaccgggagggggaggtgcggctggccggcatgaccctgacctatgaccccaccacagctgccatccagaatggcttctaccccagcccctacagcatcgccaccaacaggatgatcacccagaccagcatcaccccctacatcgccagccctgtgtctgcctaccaggtgcagagccccagctggatgcagccccagccctacatcctgcagcaccctggagctgtgctgacccccagcatggagcacaccatgagcctgcagcctgcctccatgatcagccccctggcccagcagatgagccacctgagcctgggcagcacaggcacctacatgcctgccaccagcgccatgcagggcgcctacctgccccagtatgcccacatgcagaccacagctgtgcctgtggaggaggccagcggccagcagcaggtggccgtggagaccagcaatgaccacagcccctacaccttccagcccaacaagtag

SEQ ID NO: 192783 - DNA, 1221 bp, Artificial Sequence
  derived and/or modified sequence
atgggcaaggtgtggaagcagcagatgtacccccagtacgccacctattactaccctcagtacctgcaagcaaagcaaagtctcgtgcccgctcatccaatggcacccccctcaccttctacaacgtccagcaacaataattcttcctcatcctctaatagcggttgggatcagctgtcaaaaacaaatctctacatacgcggactgcctcctcacaccaccgaccaggacctggtaaagctctgccagccttatgggaagattgtctccacgaaggccattctggacaagaccactaataaatgcaagggttatggcttcgttgatttcgatagtcctgccgcagcccagaaagctgttagcgccctgaaggcctccggcgtgcaggcccagatggccaagcagcaggaacaagatccaactaatctatatataagcaatttgccactgagtatggacgagcaggaattagagaatatgctaaaaccctttggccaggtcatcagcacgaggatactgagagacagttctggcacatcaagaggggtgggtttcgcccgaatggaaagcacagagaagtgcgaagccgtgatcgggcacttcaatggcaaattcataaagaccccccccggggtaagcgcaccaacagagccactcctctgcaaattcgctgatggaggccaaaaaaaacgccagaatccaaacaaatatatcccaaatggtagaccctggcacagagaaggagaggtcagactagctgggatgaccttgacgtacgaccccaccaccgctgctatacaaaacggcttttatccttccccctactcaatcgcaacaaacaggatgattacccagacttccatcaccccatacatagctagcccagtatccgcataccaagtgcagtctccatcttggatgcagccgcagccctatatcctacagcaccctggggcagtgttgacccctagtatggagcacactatgtccctacaacctgcgtccatgatatcaccccttgcacaacaaatgtctcaccttagcctagggtcaacaggtacgtatatgcctgccacaagcgctatgcaaggggcatatttgccgcagtatgcccatatgcagacgaccgccgtcccagttgaagaggcttcagggcagcagcaggtggccgtagaaacgtcaaacgatcacagtccttacacttttcaacctaacaagtag

SEQ ID NO: 192784 - DNA, 1221 bp, Artificial Sequence
  derived and/or modified sequence
atgggcaaggtatggaaacagcagatgtatccccaatacgctacctactattacccccagtacctgcaggctaagcagagtctcgtcccagcccatcccatggcccctccatcccctagcactacctccagtaacaacaatagcagtagtagcagcaacagtggatgggatcaactgtccaagaccaatctgtacatccgagggcttccaccgcacacgacagaccaagatctggttaaactctgccagccatacggtaagattgtatcaacaaaagccatcctcgataagaccacaaacaagtgtaagggctatggattcgtagacttcgactcccctgcggcagctcaaaaggcagtgagtgccctgaaggctagcggcgtccaagcccagatggctaagcagcaggagcaggatccaactaatttgtacatcagcaatcttcccctgtccatggatgagcaagaactcgaaaatatgctcaagcccttcgggcaagtgattagtactagaatccttcgcgacagctccggaacatcccgtggagtgggctttgcaaggatggagtctaccgagaagtgcgaagctgtgattggtcatttcaacggaaagttcataaaaaccccccctggagtttcagcccctaccgaacccctgctatgtaagttcgcagatggagggcagaaaaagcggcagaaccccaataagtacataccaaatggcaggccctggcatcgtgaaggcgaggttcggctggcaggcatgactctcacatacgaccctaccactgctgctatccagaacgggttctaccccagcccctactccatcgccacgaatcggatgatcacacagactagcattactccgtacatcgctagccccgtcagcgcctaccaggtgcagagtcccagttggatgcaaccccagccttacatcttgcagcaccccggagctgtgctcactcccagcatggagcacacaatgagcctgcaaccagcaagcatgatttcacctctggcccaacagatgagtcatctgagtctggggagcaccggaacctatatgcccgctacctctgcgatgcagggtgcttatctacctcagtacgcacacatgcaaaccacggcagtgcccgtcgaagaggcttccggccagcagcaggtggcagttgaaaccagcaacgatcatagtccctacactttccaaccaaataagtag

SEQ ID NO: 192785 - DNA, 1221 bp, Artificial Sequence
  derived and/or modified sequence
atgggcaaggtgtggaagcagcagatgtacccccagtacgccacctactactacccccagtacctgcaggccaagcagagcctggtgcccgcccaccccatggccccccccagccccagcaccaccagcagcaacaacaacagcagcagcagcagcaacagcggctgggaccagctgagcaagaccaacctgtacatcagaggcctgcccccccacaccaccgaccaggacctggtgaagctgtgccagccctacggcaagatcgtgagcaccaaggccatcctggacaagaccaccaacaagtgcaagggctacggcttcgtggacttcgacagccccgccgccgcccagaaggccgtgagcgccctgaaggccagcggcgtgcaggcccagatggccaagcagcaggagcaggaccccaccaacctgtacatcagcaacctgcccctgagcatggacgagcaggagctggagaacatgctgaagcccttcggccaggtgatcagcaccagaatcctgagagacagcagcggcaccagcagaggcgtgggcttcgccagaatggagagcaccgagaagtgcgaggccgtgatcggccacttcaacggcaagttcatcaagaccccccccggcgtgagcgcccccaccgagcccctgctgtgcaagttcgccgacggcggccagaagaagagacagaaccccaacaagtacatccccaacggcagaccctggcacagagagggcgaggtgagactggccggcatgaccctgacctacgaccccaccaccgccgccatccagaacggcttctaccccagcccctacagcatcgccaccaacagaatgatcacccagaccagcatcaccccctacatcgccagccccgtgagcgcctaccaggtgcagagccccagctggatgcagccccagccctacatcctgcagcaccccggcgccgtgctgacccccagcatggagcacaccatgagcctgcagcccgccagcatgatcagccccctggcccagcagatgagccacctgagcctgggcagcaccggcacctacatgcccgccaccagcgccatgcagggcgcctacctgccccagtacgcccacatgcagaccaccgccgtgcccgtggaggaggccagcggccagcagcaggtggccgtggagaccagcaacgaccacagcccctacaccttccagcccaacaagtag

SEQ ID NO: 192786 - protein, 352 aa, Artificial Sequence
  derived and/or modified sequence
MAEPRQEFEVMEDHAGTYGLGDRKDQGGYTMHQDQEGDTDAGLKAEEAGIGDTPSLEDEAAGHVTQARMVSKSKDGTGSDDKKAKGADGKTKIATPRGAAPPGQKGQANATRIPAKTPPAPKTPPSSGEPPKSGDRSGYSSPGSPGTPGSRSRTPSLPTPPTREPKKVAVVRTPPKSPSSAKSRLQTAPVPMPDLKNVKSKIGSTENLKHQPGGGKVQIVYKPVDLSKVTSKCGSLGNIHHKPGGGQVEVKSEKLDFKDRVQSKIGSLDNITHVPGGGNKKIETHKLTFRENAKAKTDHGAEIVYKSPVVSGDTSPRHLSNVSSTGSIDMVDSPQLATLADEVSASLAKQGL

SEQ ID NO: 192787 - DNA, 795 bp, Artificial Sequence
  derived and/or modified sequence
accagagaggccgagggcgccgacggcaagaccaagatcgccacccccaagggccaggccaacgccaccagaatccccgccaagaccccccccgcccccaagaccccccccagcagcggcgagccccccaagagcggcgacagaagcggctacagcagccccggcagccccggcacccccggcagcagaagcagaacccccagcctgcccaccccccccaccagagagcccaagaaggtggccgtggtgagaaccccccccaagagccccagcagcgccaagagcagactgcagaccgcccccgtgcccatgcccgacctgaagaacgtgaagagcaagatcggcagcaccgagaacctgaagcaccagcccggcggcggcaaggtgcagatcgtgtacaagcccgtggacctgagcaaggtgaccagcaagtgcggcagcctgggcaacatccaccacaagcccggcggcggccaggtggaggtgaagagcgagaagctggacttcaaggacagagtgcagagcaagatcggcagcctggacaacatcacccacgtgcccggcggcggcaacaagaagatcgagacccacaagctgaccttcagagagaacgccaaggccaagaccgaccacggcgccgagatcgtgtacaagagccccgtggtgagcggcgacaccagccccagacacctgagcaacgtgagcagcaccggcagcatcgacatggtggacagcccccagctggccaccctggccgacgaggtgagcgccagcctggccaagcagggcctgtag

SEQ ID NO: 192788 - DNA, 651 bp, Artificial Sequence
  derived and/or modified sequence
atggccgagcccagacaggagttcgaggtgatggaggaccacgccggcacctacggcctgggcgacagaaaggaccagagagagcccaagaaggtggccgtggtgagaaccccccccaagagccccagcagcgccaagagcagactgcagaccgcccccgtgcccatgcccgacctgaagaacgtgaagagcaagatcggcagcaccgagaacctgaagcaccagcccggcggcggcaaggtgcagatcgtgtacaagcccgtggacctgagcaaggtgaccagcaagtgcggcagcctgggcaacatccaccacaagcccggcggcggccaggtggaggtgaagagcgagaagctggacttcaaggacagagtgcagagcaagatcggcagcctggacaacatcacccacgtgcccggcggcggcaacaagaagatcgagacccacaagctgaccttcagagagaacgccaaggccaagaccgaccacggcgccgagatcgtgtacaagagccccgtggtgagcggcgacaccagccccagacacctgagcaacgtgagcagcaccggcagcatcgacatggtggacagcccccagctggccaccctggccgacgaggtgagcgccagcctggccaagcagggcctgtag

SEQ ID NO: 192789 - DNA, 951 bp, Artificial Sequence
  derived and/or modified sequence
atgctgagagccctgcagcagagaaagagagaggccggcatcggcgacacccccagcctggaggacgaggccgccggccacgtgacccaggccagaatggtgagcaagagcaaggacggcaccggcagcgacgacaagaaggccaagggcgccgacggcaagaccaagatcgccacccccagaggcgccgccccccccggccagaagggccaggccaacgccaccagaatccccgccaagaccccccccgcccccaagaccccccccagcagcggcgagccccccaagagcggcgacagaagcggctacagcagccccggcagccccggcacccccggcagcagaagcagaacccccagcctgcccaccccccccaccagagagcccaagaaggtggccgtggtgagaaccccccccaagagccccagcagcgccaagagcagactgcagaccgcccccgtgcccatgcccgacctgaagaacgtgaagagcaagatcggcagcaccgagaacctgaagcaccagcccggcggcggcaaggtgcagatcgtgtacaagcccgtggacctgagcaaggtgaccagcaagtgcggcagcctgggcaacatccaccacaagcccggcggcggccaggtggaggtgaagagcgagaagctggacttcaaggacagagtgcagagcaagatcggcagcctggacaacatcacccacgtgcccggcggcggcaacaagaagatcgagacccacaagctgaccttcagagagaacgccaaggccaagaccgaccacggcgccgagatcgtgtacaagagccccgtggtgagcggcgacaccagccccagacacctgagcaacgtgagcagcaccggcagcatcgacatggtggacagcccccagctggccaccctggccgacgaggtgagcgccagcctggccaagcagggcctgtag

SEQ ID NO: 192790 - DNA, 795 bp, Artificial Sequence
  derived and/or modified sequence
acacgtgaggctgaaggggccgacggcaagacaaagatcgcgacacctaagggtcaagccaacgccacacggatccccgctaagactccgcctgctcccaaaacacccccatccagcggcgagcccccaaaatctggggacaggtcgggctattcaagcccaggatcaccaggaacaccgggctcccgatcacgcacgccctcgctgccgacccctcctacaagggagcctaagaaggtggcggtagtgaggacgcctccaaagtctccaagctcggctaaatccaggctacagacagccccagtacccatgcccgatttgaagaacgtgaaatctaagataggcagcaccgagaatctgaaacaccagccaggcggaggtaaggtccaaatcgtatacaagccggtggatctctctaaagtgacctctaagtgtggttccctcggaaacatccaccacaaacccggaggcggtcaagtagaagtgaagtctgagaagcttgattttaaggatcgcgtgcaaagcaagatcggctcccttgacaacataacccacgtgccaggcggaggtaataagaagattgaaacccataaacttaccttcagggagaacgccaaagcaaagaccgaccacggcgccgaaatcgtgtataagagcccagtcgtgagtggcgacacctctcccagacacctctcaaacgtttcatctacaggttcgatcgacatggtggattcaccccagctcgctacacttgccgacgaagtctctgcgagcttagctaagcaaggcctgtag

SEQ ID NO: 192791 - DNA, 651 bp, Artificial Sequence
  derived and/or modified sequence
atggcggagccccggcaggaattcgaagtaatggaggaccacgccggcacctatggtctgggggatcgcaaggatcagcgggaacccaaaaaggtggccgtggtgcggaccccccccaagtctccatcttctgccaagtccagactccagactgctccggtacccatgcctgacctgaaaaacgtgaaatccaaaattgggtctacggagaaccttaagcatcaacctgggggcggaaaggtccagatagtttacaagcccgtggatctgtccaaagtgaccagcaagtgcggatccttggggaacatccaccataagccaggagggggccaagtggaggtgaagtccgagaaactcgatttcaaggatagagtgcagagcaagattgggagcctggacaatataacccatgtgccagggggagggaataaaaagatcgagactcataagttaactttccgcgaaaatgcaaaggccaagacagaccacggcgcagagatcgtctacaaatccccagttgtgagcggcgacaccagccctcgacacttgtccaatgtctcctcgaccggcagcattgacatggtggacagtccacagctcgccacgcttgctgacgaggttagtgccagcctggccaaacaaggtctctag

SEQ ID NO: 192792 - DNA, 951 bp, Artificial Sequence
  derived and/or modified sequence
atgcttagggccctgcaacagcgcaagcgcgaggcaggaataggcgataccccgagccttgaagatgaggcggccgggcatgtgacccaagccaggatggtctctaaaagtaaggatggcactggctcagacgacaaaaaggctaagggcgccgacgggaaaaccaaaatagccaccccacggggggctgctccccctggccagaaaggccaggcgaatgcgacacgcattcctgctaaaactccacctgctccgaaaacgccgccatcatcaggggagcccccaaagagtggcgaccggagcgggtattcttccccagggtcccccggcactcccggatcccgttcccgaacccctagcctaccaactcctcctacaagggaaccaaagaaggtagcagtagtgcggactccgccaaaatcaccctcctccgccaaatctcggctgcaaaccgctccagtacctatgcctgacctcaaaaacgtcaaatcaaaaatcgggagcacagagaatctgaaacaccaaccaggcggtgggaaagtccaaatcgtttacaaacctgtagatctgtcaaaggttacctccaaatgcggttcactgggaaatatccaccataagcccggaggtggtcaggttgaagtgaagtctgagaaactggattttaaggatcgcgttcaatcaaagatcggaagtctggacaatattactcacgtaccagggggaggcaataaaaagatcgaaacacacaaactgacattcagagagaacgccaaagctaaaactgatcatggcgccgaaatagtatacaagtccccagtcgtgagcggggacacttctcctaggcacctgagcaatgtgtccagcaccggatccatcgacatggtagattccccccaactcgcaaccctagccgacgaggtaagcgccagcctggcaaaacaaggactgtag

SEQ ID NO: 192793 - DNA, 795 bp, Artificial Sequence
  derived and/or modified sequence
acccgggaggccgagggcgcagatggcaagaccaagatcgccacccccaagggccaggccaatgccacccgcatcccagccaagaccccaccagcccccaagaccccacccagcagtggagagccccccaagagcggggacagaagtggctacagcagccctggcagccctggcaccccaggcagccgcagcaggacccccagcctgcccaccccacccacccgggagcccaagaaggtggccgtggtgaggaccccacccaagagccccagcagcgccaagagccggctgcagacagcccctgtgcccatgccagacctgaagaatgtgaagagcaagattggcagcacagagaacctgaagcaccagcccggcggcggcaaggtgcagatcgtgtacaagcctgtggacctgagcaaggtgaccagcaaatgtggcagcctgggcaacatccaccacaagccaggcggcggccaggtggaggtgaagtctgagaagctggacttcaaggacagagtgcagagcaagattggcagcctggacaacatcacccacgtgcctgggggcggcaacaagaagattgagacccacaagctgaccttcagagaaaatgccaaggccaagacagaccatggagctgagatcgtgtacaagagccctgtggtgtctggggacaccagccccaggcacctgagcaatgtgagcagcacaggcagcattgacatggtggacagcccccagctggccaccctggctgatgaggtgtctgccagcctggccaagcagggcctgtag

SEQ ID NO: 192794 - DNA, 651 bp, Artificial Sequence
  derived and/or modified sequence
atggccgagccccggcaggagtttgaggtgatggaggaccatgctggcacctacggcctgggggacaggaaggaccagcgggagcccaagaaggtggccgtggtgaggaccccacccaagagccccagcagcgccaagagccggctgcagacagcccctgtgcccatgccagacctgaagaatgtgaagagcaagattggcagcacagagaacctgaagcaccagcccggcggcggcaaggtgcagatcgtgtacaagcctgtggacctgagcaaggtgaccagcaaatgtggcagcctgggcaacatccaccacaagccaggcggcggccaggtggaggtgaagtctgagaagctggacttcaaggacagagtgcagagcaagattggcagcctggacaacatcacccacgtgcctgggggcggcaacaagaagattgagacccacaagctgaccttcagagaaaatgccaaggccaagacagaccatggagctgagatcgtgtacaagagccctgtggtgtctggggacaccagccccaggcacctgagcaatgtgagcagcacaggcagcattgacatggtggacagcccccagctggccaccctggctgatgaggtgtctgccagcctggccaagcagggcctgtag

SEQ ID NO: 192795 - DNA, 951 bp, Artificial Sequence
  derived and/or modified sequence
atgctgcgggccctgcagcagaggaagcgggaggccggcatcggggacacccccagcctggaggatgaggccgccggccacgtgacccaggccaggatggtgtccaagagcaaggatggcactggaagtgatgacaagaaggccaagggagcagatggcaagaccaagatcgccaccccaagaggagctgcccctcctggccagaagggccaggccaatgccacccgcatcccagccaagaccccaccagcccccaagaccccacccagcagtggagagccccccaagagcggggacagaagtggctacagcagccctggcagccctggcaccccaggcagccgcagcaggacccccagcctgcccaccccacccacccgggagcccaagaaggtggccgtggtgaggaccccacccaagagccccagcagcgccaagagccggctgcagacagcccctgtgcccatgccagacctgaagaatgtgaagagcaagattggcagcacagagaacctgaagcaccagcccggcggcggcaaggtgcagatcgtgtacaagcctgtggacctgagcaaggtgaccagcaaatgtggcagcctgggcaacatccaccacaagccaggcggcggccaggtggaggtgaagtctgagaagctggacttcaaggacagagtgcagagcaagattggcagcctggacaacatcacccacgtgcctgggggcggcaacaagaagattgagacccacaagctgaccttcagagaaaatgccaaggccaagacagaccatggagctgagatcgtgtacaagagccctgtggtgtctggggacaccagccccaggcacctgagcaatgtgagcagcacaggcagcattgacatggtggacagcccccagctggccaccctggctgatgaggtgtctgccagcctggccaagcagggcctgtag

SEQ ID NO: 192796 - DNA, 795 bp, Artificial Sequence
  derived and/or modified sequence
acccgggaggccgagggcgccgacggcaagaccaagatcgccacccccaaaggacaagccaatgctacgcgaatccccgctaagaccccaccggcaccaaaaactccaccatccagcggcgagcccccaaagagcggggatcgatctggctacagtagccctgggagccccggcaccccggggagccggtctcgcacgccaagtctaccaactccccccactcgggaacccaaaaaagtggctgtagtgcggaccccacctaaatccccatcctccgccaagtctcggctccagactgcgcctgttccaatgccagatctcaaaaatgtcaaaagcaaaataggctccacggaaaacctcaaacaccagcccggaggaggcaaagtacagattgtgtataagcccgtcgatctctcgaaggttacctctaagtgcgggagcctgggaaatatacatcacaaacccggtggtggtcaggtcgaagttaagagcgaaaaacttgatttcaaggacagggttcagagcaaaataggatccctggacaatatcacccacgtacctggtggcggtaacaagaaaattgaaacacataagctcactttccgagaaaacgcaaaggcgaaaactgaccatggtgctgagatcgtgtacaaatccccggttgtgtctggcgacacttcccctcggcacttatccaacgtcagcagtaccgggtctattgacatggtggatagcccccaactggccacgctcgcagatgaagtttccgcctctctggcaaagcagggcctatag

SEQ ID NO: 192797 - DNA, 651 bp, Artificial Sequence
  derived and/or modified sequence
atggccgagccccggcaggagttcgaggtgatggaggaccacgccggcacttatggactcggcgatagaaaggaccagcgggagccgaagaaggtggcagttgtgcggactcctccaaagtccccgtccagtgccaagtcccggttgcagaccgcccccgtgccaatgcccgacctgaagaatgtgaaatctaagatagggagcactgagaacttaaagcaccagcctggcgggggtaaagtgcagatcgtgtacaagccagtcgatctctctaaagtgacatctaagtgcgggagcctcggcaacatccatcacaagccaggtgggggccaggtggaagtgaagagcgagaaactggatttcaaggatagggtccagtcaaaaattgggagtctggacaatattacgcatgtgcccggaggagggaataagaagatcgagactcataagctcacatttcgcgagaacgccaaggctaagactgaccacggcgccgagatcgtgtacaaaagcccagtcgtgtcgggtgataccagccctagacatctgtcgaatgtgtctagtaccggatcaatcgacatggtagattctccacagcttgccaccctggccgatgaagtctctgcctcgcttgccaaacagggactgtag

SEQ ID NO: 192798 - DNA, 951 bp, Artificial Sequence
  derived and/or modified sequence
atgctgcgggccctgcagcagcggaagcgggaggccggcatcggcgatactccttctctggaggacgaggcagcggggcacgtcacacaagcccggatggtgagcaagagcaaggatggcactgggagcgacgacaagaaggctaagggcgcagacggaaaaaccaagattgcaactccgcgaggcgcagccccccccggacagaagggtcaggccaatgctaccagaattcccgcaaaaacccctcctgcccccaaaacccccccaagcagtggtgagcctcccaagagcggcgataggagtggctatagcagccctggctcccccggaacacctggcagtcgcagccgtacgccatccctcccgacaccgccgacccgtgaaccaaagaaagtggccgtagttcggactccacccaaaagccctagttctgcaaaatctagactccagacagcaccagttcctatgccagacctgaaaaatgtgaaatctaaaattggctctacggaaaacctgaaacatcagcctgggggcggcaaagtccagattgtgtataagcctgtggacctgagcaaggtgacttccaagtgtggttcactgggtaatatacatcacaagcctggcgggggacaggtggaagttaagagcgagaagctggacttcaaggacagagtccagtctaaaatcgggtcacttgataacatcactcatgtacctgggggcggaaacaagaagatcgagacacacaagctgaccttccgcgaaaatgcaaaggctaaaacagaccacggtgccgaaatcgtctacaagtcacccgtggtgagcggggacacaagtccgcggcacctgagcaatgtttccagcaccggtagtatcgacatggtcgacagtccccagctggcaacacttgccgacgaggtctcagcatctctggcaaagcagggcctttag

SEQ ID NO: 192799 - DNA, 1974 bp, Artificial Sequence
  derived and/or modified sequence
actcgggaggctgagggggctgatggtaaaacgaagatcgccacaccgaagggccaggccaacgccaccaggattccagcaaaaaccccacccgctccaaagacaccacccagctctggtgaacctccaaaatcaggggatcgcagcggctacagcagccccggctccccaggcactcccggcagccgctcccgcaccccgtcccttccaaccccacccacccgggagcccaagaaggtggcggtggtccgtactccacccaagtcgccgtcttccgccaagagccgcctgcagacagcccccgtgcccatgccagacctgaagaacgtcaagtccaagatcggctccactgagaacctgaagcaccagccgggaggcgggaaggtgcaaatagtctacaaaccagttgacctgagcaaggtgacctccaagtgtggctcattaggcaacatccatcataaaccaggaggtggccaggtggaagtaaaatctgagaagcttgacttcaaggacagagtccagtcgaagattgggtccctggacaatatcacccacgtccctggcggaggaaataaaaagattgaaacccacaagctgaccttccgcgagaacgccaaagccaagacagaccacggggcggagatcgtgtacaagtcgccagtggtgtctggggacacgtctccacggcatctcagcaatgtctcctccaccggcagcatcgacatggtagactcgccccagctcgccacgctagctgacgaggtgtctgcctccctggccaagcagggtttgtgatcaggcccctggggcggtcaataatcgtggagaggagagaatgagagagtgtggaaaaaaaaagaataatgacccggcccccgccctctgcccccagctgctcctcgcagttcggttaattggttaatcacttaacctgcttttgtcactcggctttggctcgggacttcaaaatcagtgatgggagtaagagcaaatttcatctttccaaattgatgggtgggctagtaataaaatattttaaaaaaaaacattcaaaaacatggccacatccaacatttcctcaggcaattccttttgattcttttttcttcccccctccatgtagaagagggggaaggagaggctctgaaagctgcttctgggggatttcaagggactgggggtgccaaccacctctggccctgttgtgggggtgtcacagaggcagtggcagcaacaaaggatttgaaacttggtgtgttcgtggagccacaggcagacgatgtcaaccttgtgtgagtgtgacgggggttggggtggggcgggaggccacgggggaggccgaggcaggggctgggcagaggggagaggaagcacaagaagtgggagtgggagaggaagccacgtgctggagagtagacatccccctccttgccgctgggagagccaaggcctatgccacctgcagcgtctgagcggccgcctgtccttggtggccgggggtgggggcctgctgtgggtcagtgtgccaccctctgcagggcagcctgtgggagaagggacagcgggtaaaaagagaaggcaagctggcaggagggtggcacttcgtggatgacctccttagaaaagactgaccttgatgtcttgagagcgctggcctcttcctccctccctgcagggtagggggcctgagttgaggggcttccctctctgctccacagaaaccctgttttattgagttctgaaggttggaactgctgccatgattttggccactttgcagacctgggactttagggctaaccagttctctttgtaaggacttgtgcctcttgggagacgtccacccgtttccaagcctgggccaccggcatctctggagtgtgtgggggtctgggaggcgggtcccgagccccctgtccttcccacggccactgcagtcacccctgtctgccccgctgtgctgttgtctgccgt

SEQ ID NO: 192800 - DNA, 1830 bp, Artificial Sequence
  derived and/or modified sequence
atggctgagccccgccaggagttcgaagtgatggaagatcacgctgggacgtacgggttgggggacaggaaagatcagcgggagcccaagaaggtggcggtggtccgtactccacccaagtcgccgtcttccgccaagagccgcctgcagacagcccccgtgcccatgccagacctgaagaacgtcaagtccaagatcggctccactgagaacctgaagcaccagccgggaggcgggaaggtgcaaatagtctacaaaccagttgacctgagcaaggtgacctccaagtgtggctcattaggcaacatccatcataaaccaggaggtggccaggtggaagtaaaatctgagaagcttgacttcaaggacagagtccagtcgaagattgggtccctggacaatatcacccacgtccctggcggaggaaataaaaagattgaaacccacaagctgaccttccgcgagaacgccaaagccaagacagaccacggggcggagatcgtgtacaagtcgccagtggtgtctggggacacgtctccacggcatctcagcaatgtctcctccaccggcagcatcgacatggtagactcgccccagctcgccacgctagctgacgaggtgtctgcctccctggccaagcagggtttgtgatcaggcccctggggcggtcaataatcgtggagaggagagaatgagagagtgtggaaaaaaaaagaataatgacccggcccccgccctctgcccccagctgctcctcgcagttcggttaattggttaatcacttaacctgcttttgtcactcggctttggctcgggacttcaaaatcagtgatgggagtaagagcaaatttcatctttccaaattgatgggtgggctagtaataaaatattttaaaaaaaaacattcaaaaacatggccacatccaacatttcctcaggcaattccttttgattcttttttcttcccccctccatgtagaagagggggaaggagaggctctgaaagctgcttctgggggatttcaagggactgggggtgccaaccacctctggccctgttgtgggggtgtcacagaggcagtggcagcaacaaaggatttgaaacttggtgtgttcgtggagccacaggcagacgatgtcaaccttgtgtgagtgtgacgggggttggggtggggcgggaggccacgggggaggccgaggcaggggctgggcagaggggagaggaagcacaagaagtgggagtgggagaggaagccacgtgctggagagtagacatccccctccttgccgctgggagagccaaggcctatgccacctgcagcgtctgagcggccgcctgtccttggtggccgggggtgggggcctgctgtgggtcagtgtgccaccctctgcagggcagcctgtgggagaagggacagcgggtaaaaagagaaggcaagctggcaggagggtggcacttcgtggatgacctccttagaaaagactgaccttgatgtcttgagagcgctggcctcttcctccctccctgcagggtagggggcctgagttgaggggcttccctctctgctccacagaaaccctgttttattgagttctgaaggttggaactgctgccatgattttggccactttgcagacctgggactttagggctaaccagttctctttgtaaggacttgtgcctcttgggagacgtccacccgtttccaagcctgggccaccggcatctctggagtgtgtgggggtctgggaggcgggtcccgagccccctgtccttcccacggccactgcagtcacccctgtctgccccgctgtgctgttgtctgccgt

SEQ ID NO: 192801 - DNA, 2130 bp, Artificial Sequence
  derived and/or modified sequence
atgctaagagcactccaacagcggaagcgtgaagcaggcattggagacacccccagcctggaagacgaagctgctggtcacgtgacccaagctcgcatggtcagtaaaagcaaagacgggactggaagcgatgacaaaaaagccaagggggctgatggtaaaacgaagatcgccacaccgcggggagcagcccctccaggccagaagggccaggccaacgccaccaggattccagcaaaaaccccacccgctccaaagacaccacccagctctggtgaacctccaaaatcaggggatcgcagcggctacagcagccccggctccccaggcactcccggcagccgctcccgcaccccgtcccttccaaccccacccacccgggagcccaagaaggtggcggtggtccgtactccacccaagtcgccgtcttccgccaagagccgcctgcagacagcccccgtgcccatgccagacctgaagaacgtcaagtccaagatcggctccactgagaacctgaagcaccagccgggaggcgggaaggtgcaaatagtctacaaaccagttgacctgagcaaggtgacctccaagtgtggctcattaggcaacatccatcataaaccaggaggtggccaggtggaagtaaaatctgagaagcttgacttcaaggacagagtccagtcgaagattgggtccctggacaatatcacccacgtccctggcggaggaaataaaaagattgaaacccacaagctgaccttccgcgagaacgccaaagccaagacagaccacggggcggagatcgtgtacaagtcgccagtggtgtctggggacacgtctccacggcatctcagcaatgtctcctccaccggcagcatcgacatggtagactcgccccagctcgccacgctagctgacgaggtgtctgcctccctggccaagcagggtttgtgatcaggcccctggggcggtcaataatcgtggagaggagagaatgagagagtgtggaaaaaaaaagaataatgacccggcccccgccctctgcccccagctgctcctcgcagttcggttaattggttaatcacttaacctgcttttgtcactcggctttggctcgggacttcaaaatcagtgatgggagtaagagcaaatttcatctttccaaattgatgggtgggctagtaataaaatattttaaaaaaaaacattcaaaaacatggccacatccaacatttcctcaggcaattccttttgattcttttttcttcccccctccatgtagaagagggggaaggagaggctctgaaagctgcttctgggggatttcaagggactgggggtgccaaccacctctggccctgttgtgggggtgtcacagaggcagtggcagcaacaaaggatttgaaacttggtgtgttcgtggagccacaggcagacgatgtcaaccttgtgtgagtgtgacgggggttggggtggggcgggaggccacgggggaggccgaggcaggggctgggcagaggggagaggaagcacaagaagtgggagtgggagaggaagccacgtgctggagagtagacatccccctccttgccgctgggagagccaaggcctatgccacctgcagcgtctgagcggccgcctgtccttggtggccgggggtgggggcctgctgtgggtcagtgtgccaccctctgcagggcagcctgtgggagaagggacagcgggtaaaaagagaaggcaagctggcaggagggtggcacttcgtggatgacctccttagaaaagactgaccttgatgtcttgagagcgctggcctcttcctccctccctgcagggtagggggcctgagttgaggggcttccctctctgctccacagaaaccctgttttattgagttctgaaggttggaactgctgccatgattttggccactttgcagacctgggactttagggctaaccagttctctttgtaaggacttgtgcctcttgggagacgtccacccgtttccaagcctgggccaccggcatctctggagtgtgtgggggtctgggaggcgggtcccgagccccctgtccttcccacggccactgcagtcacccctgtctgccccgctgtgctgttgtctgccgt

SEQ ID NO: 192802 - DNA, 795 bp, Artificial Sequence
  derived and/or modified sequence
actcgtgaggccgagggagctgatggcaagacaaaaatcgcgacgccaaagggacaggctaacgcaaccaggatcccagcaaagacaccaccagcccctaaaacgccccctagttccggcgagcctccaaaatctggcgaccgctcgggttattctagccccggatcaccgggtacccctggatctcggtctcgcacgccgagcctgccaacccccccaacccgcgagcccaagaaagtggctgtggttagaaccccccctaagagtccttcttctgcaaagtctcgcctgcagaccgctcctgtgcctatgccagacctgaagaatgtaaagtcaaaaattggcagcaccgaaaatttgaaacatcagccaggcggtgggaaggtacaaattgtgtacaagcctgttgacctgtccaaggtgactagcaagtgtggctccttaggcaacatccatcacaagcctgggggaggccaggtggaggtcaaatcagagaaactcgactttaaggaccgggttcagagcaagattggaagtttagacaacatcactcacgtgccaggtggaggcaacaaaaaaattgaaacccataaactcacgttcagggaaaatgccaaagccaagaccgaccatggagctgagattgtatacaagagccctgtggtgtctggtgatacctcccctaggcatcttagcaacgtcagcagtactggcagtatcgatatggtggatagtccacagctcgctaccttagcagacgaggtatccgcctcgttagcaaaacagggactctag

SEQ ID NO: 192803 - DNA, 651 bp, Artificial Sequence
  derived and/or modified sequence
atggccgagccaaggcaggagttcgaggtaatggaagatcacgccggtacttacggactgggagacaggaaagatcagagagagcccaagaaggtcgcagtggtacggacccctcccaagagccctagcagcgcaaaatcgagactgcagacagccccagtcccaatgcctgacttaaaaaacgtcaagtccaaaataggatccacggaaaatcttaaacatcagccgggtggaggtaaggtgcagatcgtgtacaagcctgtggatctctctaaagtgacctccaaatgtgggtcgttagggaatatccaccacaagccgggaggaggccaggttgaagtcaaaagcgaaaaactggacttcaaggatagagtgcagagtaagattgggtccttggacaacattactcacgtgcctggaggaggaaacaagaaaatcgagactcataaattgacatttcgtgaaaacgctaaagccaagaccgatcacggggctgaaattgtgtacaagagccctgtggtgtcaggagacacatctcctcggcatttatcgaatgtgagttcaacaggcagtatcgacatggtggactccccccagctcgccaccctggccgacgaagtgtcagcatctttggccaagcagggtctttag

SEQ ID NO: 192804 - DNA, 951 bp, Artificial Sequence
  derived and/or modified sequence
atgctcagagctctccagcagcgcaagcgtgaggcaggtatcggagacactccttctctggaggacgaagctgctggacacgtcacccaggcaagaatggttagtaaatccaaagacgggactgggtctgacgacaagaaagccaagggagcagatggaaaaactaagatcgccacccctcgcggagccgcaccacctgggcagaaaggtcaggccaacgcaacaaggattccagctaaaaccccacccgcacccaaaacccccccatcttcaggcgagccaccaaagtccggcgacaggtccggctattcctcgccaggctcccctgggacgcctggatcgcgctccaggaccccctcgctacctaccccccctacaagagagcccaagaaggtggcagtggtgcgtactccaccaaagtctccttcttctgcaaagtcgaggttgcagacagcacccgtgccaatgcccgacctcaagaacgtgaagagcaagattggatccaccgaaaacctgaagcatcagcctggcggtggaaaggtgcagatcgtctataaaccagtagatttgtctaaggttacttcaaagtgcggttctctggggaacatccatcacaagccaggaggcggacaggtcgaagtgaagagcgaaaaattggattttaaagacagagtacagtccaagatcgggtctttagacaacattacacacgttccgggaggagggaataagaaaatagaaacccacaagctgacctttcgtgagaacgccaaggctaaaacagatcacggcgctgaaatagtgtataagtctcctgtcgtgtcaggggacacatcacctcgtcacttaagcaatgtgtcatcaactggttctattgacatggtagattccccacagctggcaaccttagccgatgaagtttctgcatctcttgctaagcaggggctgtag

SEQ ID NO: 192805 - DNA, 951 bp, Artificial Sequence
  derived and/or modified sequence
atgctgagagccttgcagcagcgcaaaagggaggctggtatcggggacaccccatccctggaggacgaggccgctgggcacgtgacccaagcccgaatggtgagtaagtcaaaggacggtaccggatccgacgataagaaggcgaaaggggccgatggtaagacaaagattgccacgcctcggggagccgcccctcccggccagaaaggtcaggcaaatgctactagaatccccgctaaaactcctcccgcacctaagaccccgccaagcagcggagagcctcccaaaagcggcgaccgttccggctactctagtccaggcagccctgggacaccaggctctcgtagcagaacgccaagcctgccaaccccaccaactagagagccaaagaaagtcgctgttgtgaggacacccccgaagtctccttcctccgccaagtcacgactgcagaccgctccagttcctatgccagatctcaagaacgttaaaagcaaaatcggttccactgagaacctgaagcaccagcccggtggcggtaaggttcagattgtctataagcccgttgatctctccaaggtgacgagcaagtgcggatccctggggaatatacaccataagccaggtgggggacaggtggaggtaaagagcgagaagctggactttaaagatagagtccagagtaaaatcggctcactcgacaacattactcatgtccctggaggcggcaataaaaagatcgagactcacaaacttacctttcgggagaatgccaaagccaaaacagatcatggcgctgagattgtgtacaaatccccagtcgtatccggcgacacatctcctaggcacctgagcaatgtgtcatcaactggctcaattgacatggtggattctccccagctggccacactggccgacgaggtgagcgccagtttagcaaaacaggggctgtag

SEQ ID NO: 192806 - DNA, 795 bp, Artificial Sequence
  derived and/or modified sequence
actagagaggccgaaggcgctgacggcaaaactaaaattgccacgcctaaaggccaggcaaacgcgacccgaatccctgctaaaacccccccggcacctaagacgccgcccagtagcggggagccacccaaatccggcgaccgcagcggctactcctcccccggcagcccaggtactcccggatctcgctcacggacaccctccctgccaaccccaccaacaagggaaccaaagaaggtggccgttgtccggacccctcccaaatccccatcatctgctaagtcaaggctgcagaccgccccggtccccatgcctgacctgaagaacgtgaaatctaaaatcggctctaccgagaacctaaaacaccagccgggaggcgggaaagtgcaaatcgtgtacaagcccgtggacctttccaaagtcaccagtaagtgtggatctctcggaaacatccaccacaaacctgggggaggccaggtcgaggtgaagtcagagaagctcgactttaaagatagggttcagagtaagattgggagcctggacaacattactcatgttccaggaggaggaaacaagaaaatcgaaacacataagctcactttccgtgagaacgctaaggctaagaccgatcacggtgcagaaattgtctataagtctcctgtggtttccggagatacttcaccgaggcatctgtcgaatgtctcttctactggctctatcgatatggtggactccccccagttagccaccctagcagacgaggtgagcgccagtcttgctaagcagggtttgtag

SEQ ID NO: 192807 - DNA, 1059 bp, Artificial Sequence
  derived and/or modified sequence
atggctgagcctcgccaggagtttgaagtaatggaggatcacgccggtacctacggtttgggcgaccgcaaggaccagggcgggtacactatgcaccaggatcaggagggcgatacagacgctggactcaaagcagaggaagcagggataggtgatacaccatcactcgaagacgaggcggcaggacatgtgactcaggcacgtatggtcagcaagagtaaggatggcaccggtagcgatgataagaaagccaagggcgccgacgggaagaccaagatcgccaccccacgtggagcagctcctcctggacagaaggggcaggccaatgctaccagaatcccagccaaaaccccccccgctcctaagacccctccttcctctggtgaaccgcctaagagcggagatcggagtgggtactcatcacctggatcaccggggacaccaggctctaggtctaggaccccgagtctccctacccctcccaccagagagcccaaaaaagttgcggtggtgcgcacccccccaaagagcccttctagtgccaagtcgcggttgcagactgcgcctgtccccatgccggatcttaagaacgttaaaagcaaaatcggttccacagagaatctcaagcaccaaccaggtggggggaaggtgcaaatcgtatacaagcctgtggatctgtctaaggttacatctaagtgcggctccctggggaacatccaccataagcccgggggaggtcaggtcgaggtcaagtcagaaaagttggactttaaagacagggttcaatctaaaataggtagccttgacaacatcacacacgttcccggcggcgggaacaaaaagatcgaaactcacaaactgacttttcgggaaaatgcaaaagccaagactgatcatggcgccgaaatagtgtataagtcccccgtggtctcaggcgatactagtccaagacacctctccaacgtgtcaagcaccggttccatagacatggtggactcacctcagctggcgactctggccgacgaggtgagcgcatctctcgccaaacagggtctctag

SEQ ID NO: 192808 - DNA, 1059 bp, Artificial Sequence
  derived and/or modified sequence
atggccgagccccggcaggagtttgaggtgatggaggaccatgctggcacctacggcctgggggacaggaaggaccagggcggctacaccatgcaccaggaccaggagggggacacagatgctggcctgaaggccgaggaggccggcatcggggacacccccagcctggaggatgaggccgccggccacgtgacccaggccaggatggtgtccaagagcaaggatggcactggaagtgatgacaagaaggccaagggagcagatggcaagaccaagatcgccaccccaagaggagctgcccctcctggccagaagggccaggccaatgccacccgcatcccagccaagaccccaccagcccccaagaccccacccagcagtggagagccccccaagagcggggacagaagtggctacagcagccctggcagccctggcaccccaggcagccgcagcaggacccccagcctgcccaccccacccacccgggagcccaagaaggtggccgtggtgaggaccccacccaagagccccagcagcgccaagagccggctgcagacagcccctgtgcccatgccagacctgaagaatgtgaagagcaagattggcagcacagagaacctgaagcaccagcccggcggcggcaaggtgcagatcgtgtacaagcctgtggacctgagcaaggtgaccagcaaatgtggcagcctgggcaacatccaccacaagccaggcggcggccaggtggaggtgaagtctgagaagctggacttcaaggacagagtgcagagcaagattggcagcctggacaacatcacccacgtgcctgggggcggcaacaagaagattgagacccacaagctgaccttcagagaaaatgccaaggccaagacagaccatggagctgagatcgtgtacaagagccctgtggtgtctggggacaccagccccaggcacctgagcaatgtgagcagcacaggcagcattgacatggtggacagcccccagctggccaccctggctgatgaggtgtctgccagcctggccaagcagggcctgtag

SEQ ID NO: 192809 - DNA, 4958 bp, Artificial Sequence
  derived and/or modified sequence
actcgggaggctgagggggctgatggtaaaacgaagatcgccacaccgaagggccaggccaacgccaccaggattccagcaaaaaccccgcccgctccaaagacaccacccagctctggtgaacctccaaaatcaggggatcgcagcggctacagcagccccggctccccaggcactcccggcagccgctcccgcaccccgtcccttccaaccccacccacccgggagcccaagaaggtggcagtggtccgtactccacccaagtcgccgtcttccgccaagagccgcctgcagacagcccccgtgcccatgccagacctgaagaatgtcaagtccaagatcggctccactgagaacctgaagcaccagccgggaggcgggaaggtgcaaatagtctacaaaccagttgacctgagcaaggtgacctccaagtgtggctcattaggcaacatccatcataaaccaggaggtggccaggtggaagtaaaatctgagaagcttgacttcaaggacagagtccagtcgaagattgggtccctggacaatatcacccacgtccctggcggaggaaataaaaagattgaaacccacaagctgaccttccgcgagaacgccaaagccaagacagaccacggggcggagatcgtgtacaagtcgccagtggtgtctggggacacgtctccacggcatctcagcaatgtctcctccaccggcagcatcgacatggtagactcgccccagctcgccacgctagctgacgaggtgtctgcctccctggccaagcagggtttgtgatcaggcccctggggcggtcaataattgtggagaggagagaatgagagagtgtggaaaaaaaaagaataatgacccggcccccgccctctgcccccagctgctcctcgcagttcggttaattggttaatcacttaacctgcttttgtcactcggctttggctcgggacttcaaaatcagtgatgggagtaagagcaaatttcatctttccaaattgatgggtgggctagtaataaaatatttaaaaaaaaacattcaaaaacatggccacatccaacatttcctcaggcaattccttttgattcttttttcttccccctccatgtagaagagggagaaggagaggctctgaaagctgcttctgggggatttcaagggactgggggtgccaaccacctctggccctgttgtgggggtgtcacagaggcagtggcagcaacaaaggatttgaaacttggtgtgttcgtggagccacaggcagacgatgtcaaccttgtgtgagtgtgacgggggttggggtggggcgggaggccacgggggaggccgaggcaggggctgggcagaggggagaggaagcacaagaagtgggagtgggagaggaagccacgtgctggagagtagacatccccctccttgccgctgggagagccaaggcctatgccacctgcagcgtctgagcggccgcctgtccttggtggccgggggtgggggcctgctgtgggtcagtgtgccaccctctgcagggcagcctgtgggagaagggacagcgggtaaaaagagaaggcaagctggcaggagggtggcacttcgtggatgacctccttagaaaagactgaccttgatgtcttgagagcgctggcctcttcctccctccctgcagggtagggggcctgagttgaggggcttccctctgctccacagaaaccctgttttattgagttctgaaggttggaactgctgccatgattttggccactttgcagacctgggactttagggctaaccagttctctttgtaaggacttgtgcctcttgggagacgtccacccgtttccaagcctgggccactggcatctctggagtgtgtgggggtctgggaggcaggtcccgagccccctgtccttcccacggccactgcagtcaccccgtctgcgccgctgtgctgttgtctgccgtgagagcccaatcactgcctatacccctcatcacacgtcacaatgtcccgaattcccagcctcaccaccccttctcagtaatgaccctggttggttgcaggaggtacctactccatactgagggtgaaattaagggaaggcaaagtccaggcacaagagtgggaccccagcctctcactctcagttccactcatccaactgggaccctcaccacgaatctcatgatctgattcggttccctgtctcctcctcccgtcacagatgtgagccagggcactgctcagctgtgaccctaggtgtttctgccttgttgacatggagagagccctttcccctgagaaggcctggccccttcctgtgctgagcccacagcagcaggctgggtgtcttggttgtcagtggtggcaccaggatggaagggcaaggcacccagggcaggcccacagtcccgctgtcccccacttgcaccctagcttgtagctgccaacctcccagacagcccagcccgctgctcagctccacatgcatagtatcagccctccacacccgacaaaggggaacacacccccttggaaatggttcttttcccccagtcccagctggaagccatgctgtctgttctgctggagcagctgaacatatacatagatgttgccctgccctccccatctgcaccctgttgagttgtagttggatttgtctgtttatgcttggattcaccagagtgactatgatagtgaaaagaaaaaaaaaaaaaaaaaaggacgcatgtatcttgaaatgcttgtaaagaggtttctaacccaccctcacgaggtgtctctcacccccacactgggactcgtgtggcctgtgtggtgccaccctgctggggcctcccaagttttgaaaggctttcctcagcacctgggacccaacagagaccagcttctagcagctaaggaggccgttcagctgtgacgaaggcctgaagcacaggattaggactgaagcgatgatgtccccttccctacttccccttggggctccctgtgtcagggcacagactaggtcttgtggctggtctggcttgcggcgcgaggatggttctctctggtcatagcccgaagtctcatggcagtcccaaaggaggcttacaactcctgcatcacaagaaaaaggaagccactgccagctggggggatctgcagctcccagaagctccgtgagcctcagccacccctcagactgggttcctctccaagctcgccctctggaggggcagcgcagcctcccaccaagggccctgcgaccacagcagggattgggatgaattgcctgtcctggatctgctctagaggcccaagctgcctgcctgaggaaggatgacttgacaagtcaggagacactgttcccaaagccttgaccagagcacctcagcccgctgaccttgcacaaactccatctgctgccatgagaaaagggaagccgcctttgcaaaacattgctgcctaaagaaactcagcagcctcaggcccaattctgccacttctggtttgggtacagttaaaggcaaccctgagggacttggcagtagaaatccagggcctcccctggggctggcagcttcgtgtgcagctagagctttacctgaaaggaagtctctgggcccagaactctccaccaagagcctccctgccgttcgctgagtcccagcaattctcctaagttgaagggatctgagaaggagaaggaaatgtggggtagatttggtggtggttagagatatgcccccctcattactgccaacagtttcggctgcatttcttcacgcacctcggttcctcttcctgaagttcttgtgccctgctcttcagcaccatgggccttcttatacggaaggctctgggatctcccccttgtggggcaggctcttggggccagcctaagatcatggtttagggtgatcagtgctggcagataaattgaaaaggcacgctggcttgtgatcttaaatgaggacaatccccccagggctgggcactcctcccctcccctcacttctcccacctgcagagccagtgtccttgggtgggctagataggatatactgtatgccggctccttcaagctgctgactcactttatcaatagttccatttaaattgacttcagtggtgagactgtatcctgtttgctattgcttgttgtgctatggggggaggggggaggaatgtgtaagatagttaacatgggcaaagggagatcttggggtgcagcacttaaactgcctcgtaacccttttcatgatttcaaccacatttgctagagggagggagcagccacggagttagaggcccttggggtttctcttttccactgacaggctttcccaggcagctggctagttcattccctccccagccaggtgcaggcgtaggaatatggacatctggttgctttggcctgctgccctctttcaggggtcctaagcccacaatcatgcctccctaagaccttggcatccttccctctaagccgttggcacctctgtgccacctctcacactggctccagacacacagcctgtgcttttggagctgagatcactcgcttcaccctcctcatctttgttctccaagtaaagccacgaggtcggggcgagggcagaggtgatcacctgcgtgtcccatctacagacctgcagcttcataaaacttctgatttctcttcagctttgaaaagggttaccctgggcactggcctagagcctcacctcctaatagacttagccccatgagtttgccatgttgagcaggactatttctggcacttgcaagtcccatgatttcttcggtaattctgagggtggggggagggacatgaaatcatcttagcttagctttctgtctgtgaatgtctatatagtgtattgtgtgttttaacaaatgatttacactgactgttgctgtaaaagtgaatttggaaataaagttattactctgattaaa

SEQ ID NO: 192810 - DNA, 5362 bp, Artificial Sequence
  derived and/or modified sequence
cccaccagctccggcaccaacagcagcgccgctgccaccgcccaccttctgccgccgccaccacagccaccttctcctcctccgctgtcctctcccgtcctcgcctctgtcgactatcaggtgaactttgaaccaggatggctgagccccgccaggagttcgaagtgatggaagatcacgctgggacgtacgggttgggggacaggaaagatcaggggggctacaccatgcaccaagaccaagagggtgacacggacgctggcctgaaagctgaagaagcaggcattggagacacccccagcctggaagacgaagctgctggtcacgtgacccaagctcgcatggtcagtaaaagcaaagacgggactggaagcgatgacaaaaaagccaagggggctgatggtaaaacgaagatcgccacaccgcggggagcagcccctccaggccagaagggccaggccaacgccaccaggattccagcaaaaaccccgcccgctccaaagacaccacccagctctggtgaacctccaaaatcaggggatcgcagcggctacagcagccccggctccccaggcactcccggcagccgctcccgcaccccgtcccttccaaccccacccacccgggagcccaagaaggtggcagtggtccgtactccacccaagtcgccgtcttccgccaagagccgcctgcagacagcccccgtgcccatgccagacctgaagaatgtcaagtccaagatcggctccactgagaacctgaagcaccagccgggaggcgggaaggtgcaaatagtctacaaaccagttgacctgagcaaggtgacctccaagtgtggctcattaggcaacatccatcataaaccaggaggtggccaggtggaagtaaaatctgagaagcttgacttcaaggacagagtccagtcgaagattgggtccctggacaatatcacccacgtccctggcggaggaaataaaaagattgaaacccacaagctgaccttccgcgagaacgccaaagccaagacagaccacggggcggagatcgtgtacaagtcgccagtggtgtctggggacacgtctccacggcatctcagcaatgtctcctccaccggcagcatcgacatggtagactcgccccagctcgccacgctagctgacgaggtgtctgcctccctggccaagcagggtttgtgatcaggcccctggggcggtcaataattgtggagaggagagaatgagagagtgtggaaaaaaaaagaataatgacccggcccccgccctctgcccccagctgctcctcgcagttcggttaattggttaatcacttaacctgcttttgtcactcggctttggctcgggacttcaaaatcagtgatgggagtaagagcaaatttcatctttccaaattgatgggtgggctagtaataaaatatttaaaaaaaaacattcaaaaacatggccacatccaacatttcctcaggcaattccttttgattcttttttcttccccctccatgtagaagagggagaaggagaggctctgaaagctgcttctgggggatttcaagggactgggggtgccaaccacctctggccctgttgtgggggtgtcacagaggcagtggcagcaacaaaggatttgaaacttggtgtgttcgtggagccacaggcagacgatgtcaaccttgtgtgagtgtgacgggggttggggtggggcgggaggccacgggggaggccgaggcaggggctgggcagaggggagaggaagcacaagaagtgggagtgggagaggaagccacgtgctggagagtagacatccccctccttgccgctgggagagccaaggcctatgccacctgcagcgtctgagcggccgcctgtccttggtggccgggggtgggggcctgctgtgggtcagtgtgccaccctctgcagggcagcctgtgggagaagggacagcgggtaaaaagagaaggcaagctggcaggagggtggcacttcgtggatgacctccttagaaaagactgaccttgatgtcttgagagcgctggcctcttcctccctccctgcagggtagggggcctgagttgaggggcttccctctgctccacagaaaccctgttttattgagttctgaaggttggaactgctgccatgattttggccactttgcagacctgggactttagggctaaccagttctctttgtaaggacttgtgcctcttgggagacgtccacccgtttccaagcctgggccactggcatctctggagtgtgtgggggtctgggaggcaggtcccgagccccctgtccttcccacggccactgcagtcaccccgtctgcgccgctgtgctgttgtctgccgtgagagcccaatcactgcctatacccctcatcacacgtcacaatgtcccgaattcccagcctcaccaccccttctcagtaatgaccctggttggttgcaggaggtacctactccatactgagggtgaaattaagggaaggcaaagtccaggcacaagagtgggaccccagcctctcactctcagttccactcatccaactgggaccctcaccacgaatctcatgatctgattcggttccctgtctcctcctcccgtcacagatgtgagccagggcactgctcagctgtgaccctaggtgtttctgccttgttgacatggagagagccctttcccctgagaaggcctggccccttcctgtgctgagcccacagcagcaggctgggtgtcttggttgtcagtggtggcaccaggatggaagggcaaggcacccagggcaggcccacagtcccgctgtcccccacttgcaccctagcttgtagctgccaacctcccagacagcccagcccgctgctcagctccacatgcatagtatcagccctccacacccgacaaaggggaacacacccccttggaaatggttcttttcccccagtcccagctggaagccatgctgtctgttctgctggagcagctgaacatatacatagatgttgccctgccctccccatctgcaccctgttgagttgtagttggatttgtctgtttatgcttggattcaccagagtgactatgatagtgaaaagaaaaaaaaaaaaaaaaaaggacgcatgtatcttgaaatgcttgtaaagaggtttctaacccaccctcacgaggtgtctctcacccccacactgggactcgtgtggcctgtgtggtgccaccctgctggggcctcccaagttttgaaaggctttcctcagcacctgggacccaacagagaccagcttctagcagctaaggaggccgttcagctgtgacgaaggcctgaagcacaggattaggactgaagcgatgatgtccccttccctacttccccttggggctccctgtgtcagggcacagactaggtcttgtggctggtctggcttgcggcgcgaggatggttctctctggtcatagcccgaagtctcatggcagtcccaaaggaggcttacaactcctgcatcacaagaaaaaggaagccactgccagctggggggatctgcagctcccagaagctccgtgagcctcagccacccctcagactgggttcctctccaagctcgccctctggaggggcagcgcagcctcccaccaagggccctgcgaccacagcagggattgggatgaattgcctgtcctggatctgctctagaggcccaagctgcctgcctgaggaaggatgacttgacaagtcaggagacactgttcccaaagccttgaccagagcacctcagcccgctgaccttgcacaaactccatctgctgccatgagaaaagggaagccgcctttgcaaaacattgctgcctaaagaaactcagcagcctcaggcccaattctgccacttctggtttgggtacagttaaaggcaaccctgagggacttggcagtagaaatccagggcctcccctggggctggcagcttcgtgtgcagctagagctttacctgaaaggaagtctctgggcccagaactctccaccaagagcctccctgccgttcgctgagtcccagcaattctcctaagttgaagggatctgagaaggagaaggaaatgtggggtagatttggtggtggttagagatatgcccccctcattactgccaacagtttcggctgcatttcttcacgcacctcggttcctcttcctgaagttcttgtgccctgctcttcagcaccatgggccttcttatacggaaggctctgggatctcccccttgtggggcaggctcttggggccagcctaagatcatggtttagggtgatcagtgctggcagataaattgaaaaggcacgctggcttgtgatcttaaatgaggacaatccccccagggctgggcactcctcccctcccctcacttctcccacctgcagagccagtgtccttgggtgggctagataggatatactgtatgccggctccttcaagctgctgactcactttatcaatagttccatttaaattgacttcagtggtgagactgtatcctgtttgctattgcttgttgtgctatggggggaggggggaggaatgtgtaagatagttaacatgggcaaagggagatcttggggtgcagcacttaaactgcctcgtaacccttttcatgatttcaaccacatttgctagagggagggagcagccacggagttagaggcccttggggtttctcttttccactgacaggctttcccaggcagctggctagttcattccctccccagccaggtgcaggcgtaggaatatggacatctggttgctttggcctgctgccctctttcaggggtcctaagcccacaatcatgcctccctaagaccttggcatccttccctctaagccgttggcacctctgtgccacctctcacactggctccagacacacagcctgtgcttttggagctgagatcactcgcttcaccctcctcatctttgttctccaagtaaagccacgaggtcggggcgagggcagaggtgatcacctgcgtgtcccatctacagacctgcagcttcataaaacttctgatttctcttcagctttgaaaagggttaccctgggcactggcctagagcctcacctcctaatagacttagccccatgagtttgccatgttgagcaggactatttctggcacttgcaagtcccatgatttcttcggtaattctgagggtggggggagggacatgaaatcatcttagcttagctttctgtctgtgaatgtctatatagtgtattgtgtgttttaacaaatgatttacactgactgttgctgtaaaagtgaatttggaaataaagttattactctgattaaataa

SEQ ID NO: 192811 - DNA, 951 bp, Artificial Sequence
  derived and/or modified sequence
atgctgcgggccctgcagcagcggaagcgggaggccggcatcggcgacacaccttctctcgaggatgaagctgcggggcacgttacacaagcacgcatggtgagcaagtctaaagacggaaccggcagtgacgacaagaaagcgaaaggagcggatggaaaaacgaagatcgccacgccccgaggggcggctcctcccgggcagaagggacaggcaaacgcgacgcgaataccagcaaagactcctcccgccccaaaaacccctcccagttcaggtgagccccccaaaagtggtgatcgctccggctattctagccctggcagcccgggaactcccgggagccgaagccgaaccccatctctccccacgcctcctacacgcgagcccaagaaagtggcagtggtacgcacacctccaaagtccccaagttctgctaagtcaagactgcaaacggcccctgtgcctatgcctgatctcaagaatgtaaaatccaaaatcgggagtaccgaaaatctaaagcatcagccaggaggcggcaaagttcagatagtgtacaagcctgttgatctgtctaaggtgacatccaagtgcggtagcctcgggaacatacatcacaagcccggaggcggccaggtggaggttaagagtgagaagctcgatttcaaagaccgtgtccaaagtaaaattggaagtttggacaacattacacacgtgccaggtggtggaaacaagaaaattgaaactcataagcttactttcagagaaaacgccaaagctaagacagatcatggcgccgagattgtttataagtctcctgtggtctccggtgacacaagccccaggcatcttagcaatgtgagctcaaccggtagcatcgatatggtggacagcccacagctggctactctcgcagacgaagtgtccgcatcactcgccaaacagggcctgtag

SEQ ID NO: 192812 - DNA, 795 bp, Artificial Sequence
  derived and/or modified sequence
acccgggaggccgagggcgccgacggcaagaccaagatcgccaccccaaaagggcaggctaacgctacacgcatccctgccaaaacccctccagcaccaaaaactcccccgtcttctggagagccccctaagtccggcgataggtccggctactcgtcccctggcagccccggaacacctgggagccgctcccgcacacccagtttgcctacccctcctaccagagagccgaaaaaagttgcagtggttaggactccacctaagagcccatcttccgccaagtcgcgtttgcaaaccgccccagtacccatgccggacctcaagaacgtcaaaagcaaaatcggatctacagagaaccttaagcatcaaccaggggggggaaaggtgcagatagtatataagccagtggatctgtctaaggtgactagtaagtgcggatcacttgggaacattcaccataagccaggagggggccaagtggaagtaaagtccgagaagctcgatttcaaggaccgagttcagtcgaaaattggcagtctggacaatatcacgcacgtgcctggaggtggcaataagaagatcgaaacacataaactcacctttcgcgaaaacgccaaagccaagaccgatcacggggcggagatagtctacaaaagcccagttgtctctggagacacttcaccccgccatttgtctaacgtttcgagcactggaagtatagacatggtggactcaccacaacttgcaacacttgctgatgaagttagtgccagtttggccaagcaggggttatag

SEQ ID NO: 192813 - DNA, 1059 bp, Artificial Sequence
  derived and/or modified sequence
atggccgagccccggcaggagttcgaggtgatggaggaccacgccggaacgtacggcctgggggaccggaaggaccagggtggatacactatgcatcaagatcaggaaggtgatacagacgcaggcctgaaggccgaggaagccggaattggtgatacaccctctctcgaagatgaggctgccggtcatgtaactcaggcccgcatggtttccaaatctaaggacggtaccggatctgatgacaagaaagcgaaaggcgccgacggaaagaccaaaatcgccacaccgagaggagccgccccccccggacagaagggccaagctaacgccacgcggattccagccaagacacctcctgctcccaaaacgcccccgagttctggagaaccgcccaagtccggagatcgtagcggctattcatctccaggctcccctggcacacctggaagccgcagcagaactccatctctccctactcccccgactagggaacccaagaaggtggccgtcgttaggacaccacccaaatcaccttccagcgctaagagccggttgcaaaccgccccagtccccatgccagatcttaagaacgttaagagcaagatcgggtcaactgaaaatctgaagcaccagccgggaggaggcaaagtgcagatagtgtataagccggttgatctcagcaaggtgactagcaagtgtggatcactgggtaacatccaccataaacctgggggaggccaggtcgaagtgaagagcgaaaagttggattttaaagatcgtgttcagagtaagataggctcgctcgacaacatcactcacgttcccggcggcggcaacaagaagatcgagacccataagcttacgttcagagaaaatgccaaggccaaaacagaccacggcgccgagatagtgtataaatcacctgtggtcagtggcgacacttccccacgccacctctccaacgtgtcaagtacaggctctattgatatggttgactccccccagctcgccactctcgctgatgaggtgtcggctagtctggccaagcagggtctgtag

SEQ ID NO: 192814 - DNA, 951 bp, Artificial Sequence
  derived and/or modified sequence
atgctgagggctctacagcaacgtaagcgtgaagccggaatcggggatactccgtcactggaagacgaagccgctgggcatgtcactcaagctcggatggttagtaaaagcaaagatggtacaggaagcgacgacaagaaagccaaaggcgcagatgggaagacaaaaatcgccaccccacgaggggctgcaccacctgggcagaaggggcaggcaaacgctacacggattcctgccaagacacctcccgctcccaaaactcccccttccagcggcgagcccccaaaatcaggagacagaagtggatactcctcaccagggagcccgggtacccctgggtctcggtctagaacaccatccctcccgacgcccccaactagggagccaaaaaaagttgccgtggtgagaactccaccaaagagccctagctctgcgaagagtaggctgcaaactgccccagtcccaatgcccgatctgaaaaacgttaagtccaagatcggtagcactgagaatcttaagcaccagccaggcggagggaaagtgcaaatcgtgtacaagcccgtggacttatccaaagtaaccagtaaatgcgggagcttagggaacatccaccataaaccgggagggggacaagttgaagttaagagcgaaaagctggatttcaaagaccgcgtgcagagcaagatcggtagcctcgataatataactcatgtccccggaggagggaacaagaaaatagagacacacaagctgacatttcgcgaaaacgccaaagcaaagacggaccacggggctgagatcgtgtataaatcgcctgtcgtgtctggcgacactagccccaggcatctgtcaaacgtgtctagcaccggctccattgatatggtggacagcccccagctggccactttagccgacgaagtctcggctagcctcgcaaaacagggcctctag

SEQ ID NO: 192815 - DNA, 795 bp, Artificial Sequence
  derived and/or modified sequence
acacgcgaagcagaaggggctgatggtaagacaaaaatcgcaacacctaaaggacaggccaacgccacacggatacccgcaaaaactccaccagctcccaagaccccaccaagttccggagagcctccgaagagcggagacagatcgggttattcttctcctggctctccaggaactccaggatcacgatcgcgcactccctccctgccaacaccgcctacacgggaacctaagaaggtggctgtcgtgaggactccccctaagtcgccaagctcggctaagtcaaggcttcaaaccgctcccgtcccaatgccagaccttaaaaacgtaaagagcaagattggatctacagaaaatttgaagcatcagcctggtggcggtaaggtccagattgtttataaacccgtggacctgagcaaagtgaccagtaaatgtggctcactgggtaacatccatcacaaacctggcggagggcaggtggaagtgaagtcagaaaaactcgatttcaaagaccgtgtacagagcaagattggcagcctggataacatcacacatgttcccggaggcggtaacaagaagatcgaaactcacaagctgactttcagggaaaacgccaaagctaaaaccgaccacggtgcagagattgtgtataagtccccagttgtgagcggggacacatctcccagacacctgtctaacgtttctagcaccgggtccattgatatggtagattccccccagttggctacactggcggacgaggtgagtgcttcactcgctaaacaggggttgtag

SEQ ID NO: 192816 - DNA, 1059 bp, Artificial Sequence
  derived and/or modified sequence
atggctgaaccgaggcaagagttcgaggtgatggaagaccacgctggcacatacggactcggagacaggaaggatcagggaggttatacgatgcatcaggatcaggagggcgataccgacgctggattaaaggctgaggaagctggcatcggagataccccaagtctggaagacgaggctgcgggtcacgtcactcaggctagaatggtgtctaaatctaaagatggaacaggatctgacgataagaaagcgaaaggagccgacggaaaaaccaaaatcgccacacccagaggagcagcaccacctggacaaaaagggcaagcgaatgcaactcggatcccggcaaaaactccccctgccccaaagacgcccccttccagtggggagcctccaaaaagcggggaccggagcggctacagtagccccggttcacccggtacccccggatccaggtcccgcacaccaagtttgcctacacccccaaccagggaacccaaaaaagtggctgtcgtcaggacaccacccaaaagcccatcatccgctaaatccaggctccagaccgccccagtgccgatgccagatctgaaaaatgtgaaaagcaaaatcggctccacagaaaacctcaagcaccaaccgggaggcggtaaagttcagattgtttataagcccgtggatctctcaaaggttacttccaagtgcgggagtctgggaaatatacatcacaagccgggtggtggccaagtggaggtgaagtcagaaaaactagattttaaggaccgggtccaatcaaaaatcggcagcttagacaacataacccacgtacctgggggtggaaacaaaaagattgagacacataaactcacatttagggagaatgccaaagccaagacagatcatggtgctgaaatcgtgtataaaagtcctgtcgtgagtggtgacacttctccacggcacttgtcaaatgtatcctctactgggtccattgacatggtcgactcacctcagctggccaccctggcagatgaagtcagcgctagtttggcaaaacagggcctctag

SEQ ID NO: 192817 - DNA, 1059 bp, Artificial Sequence
  derived and/or modified sequence
atggccgagcccagacaggagttcgaggtgatggaggaccacgccggcacctacggcctgggcgacagaaaggaccagggcggctacaccatgcaccaggaccaggagggcgacaccgacgccggcctgaaggccgaggaggccggcatcggcgacacccccagcctggaggacgaggccgccggccacgtgacccaggccagaatggtgagcaagagcaaggacggcaccggcagcgacgacaagaaggccaagggcgccgacggcaagaccaagatcgccacccccagaggcgccgccccccccggccagaagggccaggccaacgccaccagaatccccgccaagaccccccccgcccccaagaccccccccagcagcggcgagccccccaagagcggcgacagaagcggctacagcagccccggcagccccggcacccccggcagcagaagcagaacccccagcctgcccaccccccccaccagagagcccaagaaggtggccgtggtgagaaccccccccaagagccccagcagcgccaagagcagactgcagaccgcccccgtgcccatgcccgacctgaagaacgtgaagagcaagatcggcagcaccgagaacctgaagcaccagcccggcggcggcaaggtgcagatcgtgtacaagcccgtggacctgagcaaggtgaccagcaagtgcggcagcctgggcaacatccaccacaagcccggcggcggccaggtggaggtgaagagcgagaagctggacttcaaggacagagtgcagagcaagatcggcagcctggacaacatcacccacgtgcccggcggcggcaacaagaagatcgagacccacaagctgaccttcagagagaacgccaaggccaagaccgaccacggcgccgagatcgtgtacaagagccccgtggtgagcggcgacaccagccccagacacctgagcaacgtgagcagcaccggcagcatcgacatggtggacagcccccagctggccaccctggccgacgaggtgagcgccagcctggccaagcagggcctgtag

SEQ ID NO: 192818 - protein, 594 aa, Artificial Sequence
  derived and/or modified sequence
MLPRTKYNRFRNDSVTSVDDLLHSLSVSGGGGKVSAARATPAAAPYLVSGEALRKAPDDGPGSLGHLLHKVSHLKLSSSGLRGLSSAARERAGARLSGSCSAPSLAAPDGSAPSAPRAPAMSAARKGRPGDEPLPRPPRGAPHASDQVLGPGVTYVVKYLGCIEVLRSMRSLDFSTRTQITREAISRVCEAVPGAKGAFKKRKPPSKMLSSILGKSNLQFAGMSISLTISTASLNLRTPDSKQIIANHHMRSISFASGGDPDTTDYVAYVAKDPVNRRACHILECCDGLAQDVIGSIGQAFELRFKQYLQCPTKIPALHDRMQSLDEPWTEEEGDGSDHPYYNSIPSKMPPPGGFLDTRLKPRPHAPDTAQFAGKEQTYYQGRHLGDTFGEDWQQTPLRQGSSDIYSTPEGKLHVAPTGEAPTYVNTQQIPPQAWPAAVSSAESSPRKDLFDMKPFEDALKNQPLGPVLSKAASVECISPVSPRAPDAKMLEELQAETWYQGEMSRKEAEGLLEKDGDFLVRKSTTNPGSFVLTGMHNGQAKHLLLVDPEGTIRTKDRVFDSISHLINHHLESSLPIVSAGSELCLQQPVERKQ

SEQ ID NO: 192819 - DNA, 1785 bp, Artificial Sequence
  derived and/or modified sequence
atgctgcccagaaccaagtacaacagattcagaaacgacagcgtgaccagcgtggacgacctgctgcacagcctgagcgtgagcggcggcggcggcaaggtgagcgccgccagagccacccccgccgccgccccctacctggtgagcggcgaggccctgagaaaggcccccgacgacggccccggcagcctgggccacctgctgcacaaggtgagccacctgaagctgagcagcagcggcctgagaggcctgagcagcgccgccagagagagagccggcgccagactgagcggcagctgcagcgcccccagcctggccgcccccgacggcagcgcccccagcgcccccagagcccccgccatgagcgccgccagaaagggcagacccggcgacgagcccctgcccagaccccccagaggcgccccccacgccagcgaccaggtgctgggccccggcgtgacctacgtggtgaagtacctgggctgcatcgaggtgctgagaagcatgagaagcctggacttcagcaccagaacccagatcaccagagaggccatcagcagagtgtgcgaggccgtgcccggcgccaagggcgccttcaagaagagaaagccccccagcaagatgctgagcagcatcctgggcaagagcaacctgcagttcgccggcatgagcatcagcctgaccatcagcaccgccagcctgaacctgagaacccccgacagcaagcagatcatcgccaaccaccacatgagaagcatcagcttcgccagcggcggcgaccccgacaccaccgactacgtggcctacgtggccaaggaccccgtgaacagaagagcctgccacatcctggagtgctgcgacggcctggcccaggacgtgatcggcagcatcggccaggccttcgagctgagattcaagcagtacctgcagtgccccaccaagatccccgccctgcacgacagaatgcagagcctggacgagccctggaccgaggaggagggcgacggcagcgaccacccctactacaacagcatccccagcaagatgcccccccccggcggcttcctggacaccagactgaagcccagaccccacgcccccgacaccgcccagttcgccggcaaggagcagacctactaccagggcagacacctgggcgacaccttcggcgaggactggcagcagacccccctgagacagggcagcagcgacatctacagcacccccgagggcaagctgcacgtggcccccaccggcgaggcccccacctacgtgaacacccagcagatccccccccaggcctggcccgccgccgtgagcagcgccgagagcagccccagaaaggacctgttcgacatgaagcccttcgaggacgccctgaagaaccagcccctgggccccgtgctgagcaaggccgccagcgtggagtgcatcagccccgtgagccccagagcccccgacgccaagatgctggaggagctgcaggccgagacctggtaccagggcgagatgagcagaaaggaggccgagggcctgctggagaaggacggcgacttcctggtgagaaagagcaccaccaaccccggcagcttcgtgctgaccggcatgcacaacggccaggccaagcacctgctgctggtggaccccgagggcaccatcagaaccaaggacagagtgttcgacagcatcagccacctgatcaaccaccacctggagagcagcctgcccatcgtgagcgccggcagcgagctgtgcctgcagcagcccgtggagagaaagcagtag

SEQ ID NO: 192820 - DNA, 1785 bp, Artificial Sequence
  derived and/or modified sequence
atgttacctcgaactaaatacaatcggttccggaacgattccgtgaccagtgtcgacgatctgctgcactcactctctgtgtccgggggcggtgggaaggtgtctgctgctagggctactcccgccgcagcaccttacttagtttccggggaggcactgaggaaggcccccgatgatggccctggctcactcgggcatctcctccacaaagtgtcacatctcaagctgtcttccagtggcttgagaggcctgtcttccgcggctcgggagagggctggtgctagactgtcaggttcctgctccgcccccagcctggctgctccagacgggagcgcacccagtgctcctcgcgctcctgctatgtcggccgctaggaagggcagacccggggacgagccactcccaaggcctccacggggtgcacctcacgcatccgaccaggttcttggtcccggcgtgacatatgtggtgaagtatctgggttgtatcgaagttctccggagcatgaggtctctcgatttctctactaggacccagattaccagagaagcgatctctcgcgtttgcgaggccgtgcccggtgccaagggcgcttttaagaaacgtaagccaccctccaagatgcttagctctatattaggtaagagcaacctccagtttgctgggatgagtattagtttaactatttccactgcttcacttaatttgcgcaccccggattctaagcaaatcattgcgaaccaccacatgagatccatcagttttgcaagcggtggcgatccagacaccacagactacgtcgcatatgtcgccaaagacccagtaaacaggcgggcctgtcacattttagaatgttgtgacggcttggcacaagacgtcatcggaagtatcggtcaagcctttgaactgaggttcaaacaatatcttcagtgccctactaagatcccagctttacacgacaggatgcagtccctcgatgaaccctggacagaggaggaaggagacggctctgaccacccatattacaactccatcccctctaagatgccccccccgggaggattcctggacacaaggcttaagccaagaccccacgcacctgatactgcgcagtttgcgggtaaagaacaaacctactaccagggacgccatctcggggatacctttggtgaggattggcagcagaccccgcttagacagggcagctccgatatctacagtactcccgaaggcaaattgcacgtcgcccccaccggtgaggcaccgacttacgtgaacacgcaacaaatacccccacaggcctggcctgcggccgtttcatctgctgagtcctcaccccgtaaggacctcttcgacatgaaaccatttgaagacgctctgaaaaaccagcccctggggcctgtgttaagcaaggctgcctctgtggaatgcatctcacctgtgtcccctcgagcccccgatgctaaaatgttggaagaacttcaagccgagacatggtaccaaggcgaaatgtcccggaaggaagcagagggcctgttggaaaaggacggcgacttcctggtaagaaaatccactactaaccccggatctttcgtactgacgggtatgcacaatggccaggcaaaacacttactgcttgtcgaccccgaggggaccatccggactaaagatagggtcttcgacagcatctcccatcttattaaccaccatctcgaatcaagtttacctattgtgagcgccggcagtgaactgtgtctccagcagccagtggaacgtaagcaatag

SEQ ID NO: 192821 - DNA, 1981 bp, Artificial Sequence
  derived and/or modified sequence
tgcttttgctgtgagcagccccaagcagctgggcgctccatcagaggcaactatgacttttgcaaagcaaacgtgcaaccccaagcagcggtctcccgggccggggctgcgcggccgccgctgtgctggcttttaacggtgggagggcaccatcctcttgctctgctctcgttctccagaaggctgtcccggggcccccactctccgtcccgctccggggacagtggctcgcctgctatgcgcggcagcccgcgccggggccggcaccagcagcgcccgggcggatgcagcgagcccacggaggggcatgcttccacgcaccaagtataaccgcttcaggaatgactcggtgacatcggtcgatgaccttctccacagcctgtcggtgagcggcggcggaggcaaggtttcggcggcgcgcgcgaccccggcggcggctccctacttggtgtccggcgaggcgctgcgcaaggcgcccgacgatgggcccggcagcctgggccacctgctccacaaggtgtcccacctgaaactctccagctcgggcctccgcggcctgtcgtcggccgcccgggagcgggcgggcgcgcggctctcgggcagctgcagcgcgcccagcctggccgccccggacggcagtgcgccctcggcgccccgcgccccggccatgagcgccgccaggaagggccggcccggcgacgagccgctgcccaggccccctcggggggcgccgcacgccagcgaccaggtgctggggcccggagtcacctacgtggtcaagtacttggggtgcattgaagttctgcgctcaatgaggtctcttgacttcagtacaagaacacaaattaccagggaagccatcagccgcgtctgtgaagctgtgcctggtgcgaagggagccttcaagaagagaaagcctccaagcaaaatgctgtccagcatcttgggaaagagcaacctccagtttgcgggaatgagcatctctctgaccatctccacggccagtctgaacctgcgaactccggactccaaacagatcatagcgaatcaccacatgcggtccatctccttcgcctctgggggagacccggacacaactgactatgttgcatatgtggctaaggaccctgttaatcgcagagcttgtcacattttggaatgctgtgatgggctggcccaggatgtcatcggctccatcggacaagcctttgagctccggtttaagcaatatttacagtgtcctaccaagattcccgctctccatgatcgaatgcagagtctggatgagccatggacggaagaggagggagatggctcagaccacccatactacaacagcatcccaagcaagatgcctcctccagggggctttcttgatactagactgaaacccagaccccatgctcctgacacagcccagtttgcaggaaaagagcagacttattaccagggaagacacttaggagacacttttggcgaagactggcagcaaacacctttaaggcaagggtcctcggacatctacagcacgccagaagggaaactgcacgtggcccccacgggagaagcacccacctacgtcaacactcagcagatcccaccacaggcctggccggctgcggtcagcagtgctgagagcagcccaaggaaagacctctttgacatgaaaccttttgaagatgctctcaagaaccagcccttggggcccgtgttaagcaaggcagcctccgtggagtgcatcagccctgtgtcacctagagccccagatgccaagatgctggaggaactgcaagccgagacttggtaccaaggagagatgagcaggaaggaggcagaggggctgctggagaaagacggagacttcctggtcaggaagagcaccaccaacccgggctcctttgtcctcacgggcatgcacaatggccaggccaagcacctgctgctcgtggacccagaaggcacgagaagtaactcctactga

SEQ ID NO: 192822 - DNA, 2394 bp, Artificial Sequence
  derived and/or modified sequence
tgcttttgctgtgagcagccccaagcagctgggcgctccatcagaggcaactatgacttttgcaaagcaaacgtgcaaccccaagcagcggtctcccgggccggggctgcgcggccgccgctgtgctggcttttaacggtgggagggcaccatcctcttgctctgctctcgttctccagaaggctgtcccggggcccccactctccgtcccgctccggggacagtggctcgcctgctatgcgcggcagcccgcgccggggccggcaccagcagcgcccgggcggatgcagcgagcccacggaggggcatgcttccacgcaccaagtataaccgcttcaggaatgactcggtgacatcggtcgatgaccttctccacagcctgtcggtgagcggcggcggaggcaaggtttcggcggcgcgcgcgaccccggcggcggctccctacttggtgtccggcgaggcgctgcgcaaggcgcccgacgatgggcccggcagcctgggccacctgctccacaaggtgtcccacctgaaactctccagctcgggcctccgcggcctgtcgtcggccgcccgggagcgggcgggcgcgcggctctcgggcagctgcagcgcgcccagcctggccgccccggacggcagtgcgccctcggcgccccgcgccccggccatgagcgccgccaggaagggccggcccggcgacgagccgctgcccaggccccctcggggggcgccgcacgccagcgaccaggtgctggggcccggagtcacctacgtggtcaagtacttggggtgcattgaagttctgcgctcaatgaggtctcttgacttcagtacaagaacacaaattaccagggaagccatcagccgcgtctgtgaagctgtgcctggtgcgaagggagccttcaagaagagaaagcctccaagcaaaatgctgtccagcatcttgggaaagagcaacctccagtttgcgggaatgagcatctctctgaccatctccacggccagtctgaacctgcgaactccggactccaaacagatcatagcgaatcaccacatgcggtccatctccttcgcctctgggggagacccggacacaactgactatgttgcatatgtggctaaggaccctgttaatcgcagagcttgtcacattttggaatgctgtgatgggctggcccaggatgtcatcggctccatcggacaagcctttgagctccggtttaagcaatatttacagtgtcctaccaagattcccgctctccatgatcgaatgcagagtctggatgagccatggacggaagaggagggagatggctcagaccacccatactacaacagcatcccaagcaagatgcctcctccagggggctttcttgatactagactgaaacccagaccccatgctcctgacacagcccagtttgcaggaaaagagcagacttattaccagggaagacacttaggagacacttttggcgaagactggcagcaaacacctttaaggcaagggtcctcggacatctacagcacgccagaagggaaactgcacgtggcccccacgggagaagcacccacctacgtcaacactcagcagatcccaccacaggcctggccggctgcggtcagcagtgctgagagcagcccaaggaaagacctctttgacatgaaaccttttgaagatgctctcaagaaccagcccttggggcccgtgttaagcaaggcagcctccgtggagtgcatcagccctgtgtcacctagagccccagatgccaagatgctggaggaactgcaagccgagacttggtaccaaggagagatgagcaggaaggaggcagaggggctgctggagaaagacggagacttcctggtcaggaagagcaccaccaacccgggctcctttgtcctcacgggcatgcacaatggccaggccaagcacctgctgctcgtggacccagaaggcacgatccggacaaaggacagagtctttgacagtatcagccacctcatcaaccaccacctagaaagcagcctgcccattgtctctgcagggagtgagctgtgtctccagcagccagtggagaggaagcagtgacctggccagcactgctcccagcactgcgcaccaggtcaggaggacctggagtggactagaatcggggctgctggaactgggacagctgcctgtggctcagagccttcttcaaaagcttcaaaaggaaggcttcctttaaggtcaagtttcataaacttggttctgaatttctcatatgcatattaaaggtgtacatacctatacatcctgtacaaattatccctctatatttatattttttaagactaagaaagatgtaagactaatgttctgtgctgtatgtttttaatgaaaaaaaaaaa

SEQ ID NO: 192823 - DNA, 1785 bp, Artificial Sequence
  derived and/or modified sequence
atgctgcccaggaccaagtacaaccgcttcagaaatgacagcgtgacctctgtggatgacctgctgcacagcctgtctgtgtctgggggcggcggcaaggtgtctgctgcccgggccaccccagctgctgccccctacctggtgtctggagaggccctgaggaaggccccagatgatggccctggcagcctgggccacctgctgcacaaggtgagccacctgaagctgagcagcagcggcctgcggggcctgagcagcgctgcccgggagcgggccggggcccggctgagcggcagctgcagcgcccccagcctggccgccccagatggcagcgcccccagcgccccccgggccccagccatgtctgctgccaggaagggccggcctggagatgagcccctgcccaggcctcccaggggggcccctcatgccagtgaccaggtgctgggccctggggtgacctacgtggtgaagtacctgggctgcatcgaggtgctgcgctccatgaggagcctggacttcagcaccaggacccagatcacccgggaggccatcagccgggtgtgtgaggccgtgcctggggccaagggggccttcaagaagaggaagccacccagcaagatgctgagcagcatcctgggcaagagcaacctgcagtttgctggcatgagcatcagcctgaccatcagcacagccagcctgaacctgcggaccccagacagcaagcagatcatcgccaaccaccacatgaggagcatcagctttgccagcggcggggaccctgacaccacagattatgtggcctacgtggccaaggaccctgtgaacagaagagcctgccacatcctggagtgctgtgatggcctggcccaggacgtcatcggcagcatcggccaggcctttgagctgcgcttcaagcagtacctgcagtgccccaccaagatcccagccctgcatgacaggatgcagagcctggatgagccctggacagaggaggagggagatggcagtgaccacccctactacaacagcatccccagcaagatgcctcctcctgggggcttcctggacacccggctgaagccccggccccacgccccagacacagcccagtttgctgggaaggagcagacctactaccagggccgccacctgggggacacctttggagaggactggcagcagacccccctgcggcagggcagcagtgacatctacagcaccccagagggcaagctgcacgtggcccccaccggggaggcccccacctacgtgaacacccagcagatccccccccaggcctggccagctgctgtgtcctctgctgagagcagccccaggaaggacctgtttgacatgaagccctttgaagatgccctgaagaaccagcccctgggccctgtgctgagcaaggccgcctctgtggagtgcatcagccctgtgagcccccgggccccagatgccaagatgctggaggagctgcaggccgagacctggtaccagggcgagatgagcaggaaggaggccgagggcctgctggagaaggatggagacttcctggtgaggaagagcaccaccaaccctggcagctttgtgctgaccggcatgcacaacggccaggccaagcacctgctgctggtggaccctgagggcaccatccgcaccaaggacagagtgtttgacagcatcagccacctgatcaaccaccacctggagagcagcctgcccatcgtgtctgctggcagcgagctgtgcctgcagcagcctgtggagaggaagcagtag

SEQ ID NO: 192824 - DNA, 1785 bp, Artificial Sequence
  derived and/or modified sequence
atgctgccccggaccaagtacaaccggttccggaacgacagcgtgacaagtgtagacgatctgctccacagtctgtcggtgagcgggggcgggggcaaagtttcagcagctagggcaactcctgccgcggctccgtatttggtaagtggcgaggctctccggaaggcacccgatgatggtcccggctcactgggccatctactgcataaggtgtcccacttgaaactgagctcctcaggcttaagagggctctcctcagccgcccgagagcgggcgggtgccaggctgtctggatcttgctccgcgccaagtctcgcagctcctgacggcagcgctccgagcgccccacgtgctcccgccatgagtgccgcccgcaaagggagacctggagacgagccgctgccgaggcccccaagaggagcacctcacgcatcagatcaagtcttggggcccggagttacctatgttgtcaaataccttgggtgcattgaggtgcttcgaagcatgcgcagtcttgacttttcaaccaggacacagattacgcgcgaagcaatttctagagtctgtgaggcggtgccgggagccaagggggcatttaaaaagcggaagccaccgtcaaagatgctgagcagcatattggggaagagtaacctgcagttcgctggcatgagtatctcccttactatcagcactgcaagcttgaacctacggacaccggattcaaaacaaataatcgctaaccaccacatgcggtcaatctctttcgcctctgggggtgatcccgacaccacagactacgtggcatacgtcgcaaaagatcccgttaaccgcagggcatgtcatatcctggagtgctgtgatggactggctcaggatgtgattggatctattggtcaggcttttgaattgaggttcaaacagtatctgcagtgtcctacaaagatccccgcactccatgaccgcatgcagtctctggatgagccctggaccgaggaggagggggacgggagcgaccacccctactataactcgataccaagtaagatgcctccccccggaggctttctggacaccagattaaagcctcgtccacacgcgccagataccgcgcagtttgccgggaaggaacagacttattaccaaggccggcacttgggtgacacatttggcgaggactggcaacagacacccctgcgtcaggggagttcagacatctacagcacgcctgagggcaagctacacgtggcaccgaccggagaagccccgacatacgtcaacacccagcaaatccctccccaggcttggcccgcagccgtttcctccgccgagtcttcccccaggaaagacctgttcgacatgaaacctttcgaagacgctcttaaaaaccagccccttggtcccgtcttatcgaaggctgctagcgttgaatgtatctcaccagtgtcccctcgggcccctgacgcgaagatgctcgaggagctgcaggccgaaacctggtaccagggcgagatgtcccgtaaagaagcagagggactactcgaaaaggacggggatttcctggtaaggaagtccactaccaatcccggaagttttgtcctcactggaatgcacaatggtcaggccaagcatttgctgctcgtggaccccgagggaacaattcggactaaggatcgggtttttgacagcatttcgcatctgataaaccaccaccttgaaagctctctgcctattgtctctgccgggtccgagctttgcctgcagcagcctgtcgaaagaaagcaatag

SEQ ID NO: 192825 - DNA, 1785 bp, Artificial Sequence
  derived and/or modified sequence
atgttgccgcgaaccaagtacaaccggtttaggaacgactccgtgacttccgtagacgacctacttcacagcctttctgtgtcaggaggcggtggcaaagtttccgccgctagggctacgccggcagccgcaccttacctcgtctctggagaagccctgaggaaagcccctgatgatggccctggctctctggggcacctgcttcataaggtcagccatctgaagttatcctcgtctggcctccggggactgtcctccgccgcaagggaaagggcaggggcacggctatctggaagttgctccgctccatcactagctgcccctgatggtagcgccccaagtgcgcctagagctcccgcaatgtcagccgctcggaaggggaggccaggcgacgagcctcttccgaggccgcctcgcggtgcaccccacgccagcgaccaagttttgggcccaggcgttacctacgtcgtaaagtacctgggctgtatcgaagtgcttcgttctatgaggtcactggatttctctacacgcacccagatcacgcgggaggctattagccgcgtttgcgaagccgtacccggtgctaagggcgcttttaagaaaaggaagcctccgagtaaaatgttgagctccattctgggcaaatcaaatctgcagtttgccggtatgtccatctcacttacgatttccaccgccagtctgaatctgcgcacccccgactcgaagcagataattgccaatcaccacatgaggtccataagcttcgcgagcggaggcgacccagatacaactgactatgtggcttatgtggcaaaagacccagtcaatcgccgtgcctgccacatactcgagtgctgtgacggcctggcgcaggacgttatcggctcaattggacaggcctttgagctaagattcaaacagtacctgcagtgcccaacaaagattcccgctctgcacgacagaatgcagtcccttgacgaaccatggacagaggaggaaggagacggctccgaccacccgtattataactcaataccctctaagatgcctccccctggcggttttctagacacccgcctgaagcccagaccacatgcaccagatacagcccaattcgcagggaaggagcaaacttactatcagggtcgccatttgggagatacgttcggggaggactggcagcagacaccccttagacaagggtctagtgatatttattccactccggagggaaaactgcacgtggccccaacgggagaggctcccacctatgtgaatactcagcagatcccaccccaagcctggccagcagccgtgagttcagccgagagcagcccccgaaaagatcttttcgatatgaagcccttcgaagacgctctgaagaaccaaccgcttggacctgtgctgagcaaagccgcttcagttgagtgtatttctcctgtgagtccccgtgcccctgacgcaaagatgctagaggagttgcaggccgaaacctggtaccagggagaaatgtctcggaaagaggcagaggggctattagagaaggacggcgacttcttagttagaaaaagtactaccaatcctggatccttcgttctgacaggcatgcacaacggccaggctaaacacttactgttggttgacccggaaggcacaatacgcacaaaagatagagtgttcgactcgatttcccaccttattaatcaccatctggagtccagcttgccaatcgtgagcgctggtagcgaactgtgtcttcagcagcccgttgaacgcaaacagtag

SEQ ID NO: 192826 - protein, 251 aa, Artificial Sequence
  derived and/or modified sequence
MTDSATANGDDRDPEIELFVKAGIDGESIGNCPFSQRLFMILWLKGVVFNVTTVDLKRKPADLHNLAPGTHPPFLTFNGDVKTDVNKIEEFLEETLTPEKYPKLAAKHRESNTAGIDIFSKFSAYIKNTKQQNNAALERGLTKALKKLDDYLNTPLPEEIDANTCGEDKGSRRKFLDGDELTLADCNLLPKLHVVKIVAKKYRNYDIPAEMTGLWRYLKNAYARDEFTNTCAADSEIELAYADVAKRLSRS

SEQ ID NO: 192827 - DNA, 756 bp, Artificial Sequence
  derived and/or modified sequence
atgaccgacagcgccaccgccaacggcgacgacagagaccccgagatcgagctgttcgtgaaggccggcatcgacggcgagagcatcggcaactgccccttcagccagagactgttcatgatcctgtggctgaagggcgtggtgttcaacgtgaccaccgtggacctgaagagaaagcccgccgacctgcacaacctggcccccggcacccacccccccttcctgaccttcaacggcgacgtgaagaccgacgtgaacaagatcgaggagttcctggaggagaccctgacccccgagaagtaccccaagctggccgccaagcacagagagagcaacaccgccggcatcgacatcttcagcaagttcagcgcctacatcaagaacaccaagcagcagaacaacgccgccctggagagaggcctgaccaaggccctgaagaagctggacgactacctgaacacccccctgcccgaggagatcgacgccaacacctgcggcgaggacaagggcagcagaagaaagttcctggacggcgacgagctgaccctggccgactgcaacctgctgcccaagctgcacgtggtgaagatcgtggccaagaagtacagaaactacgacatccccgccgagatgaccggcctgtggagatacctgaagaacgcctacgccagagacgagttcaccaacacctgcgccgccgacagcgagatcgagctggcctacgccgacgtggccaagagactgagcagaagctag

SEQ ID NO: 192828 - DNA, 2390 bp, Artificial Sequence
  derived and/or modified sequence
cggatcctgtgacacctccgggcagcccggcacttgttgctcccacgacctgttgtcattcccttaacccggctttccccgtggccccccgcctcctcccggcttcgctccttttcatgtgagcatctgggacactgatctctcagaccccgctgctcgggctggagaatagatggttttgtgaaaaattaaacaccgccctgaagaggagccccgctgggcagcggcaggagcgcagagtgctggcccaggtgctgcagaggtggcgcctccccggcccgggacggtagccccgggcgccaacggcatgacagactcggcgacagctaacggggacgacagggaccccgagatcgagctctttgtgaaggctggaatcgatggagaaagcatcggcaactgtcctttctctcagcgcctcttcatgatcctctggctgaaaggagtcgtgttcaatgtcaccactgtggatctgaaaagaaagccagctgacctgcacaacctagcccccggcacgcacccgcccttcctgaccttcaacggggacgtgaagacagacgtcaataagatcgaggagttcctggaggagaccttgacccctgaaaagtaccccaaactggctgcaaaacaccgggaatccaacacagcgggcatcgacatcttttccaagttttctgcctacatcaaaaataccaagcagcagaacaatgctgctcttgaaagaggcctaaccaaggctctaaagaaattggatgactacctgaacacccctctaccagaggagattgacgccaacacttgtggggaagacaaggggtcccggcgcaagttcctggatggggatgagctgaccctggctgactgcaatctgttgcccaagctccatgtggtcaagattgtggccaagaaataccgcaactatgatatcccggctgagatgacaggcctgtggcggtacctcaagaacgcctatgcccgtgatgagttcaccaacacctgtgcagctgacagtgagatcgagttggcctacgctgatgtcgccaaacgcctcagccgatcctgagcacagccattttgccccatccccgctgcagaaggactcaaccactcccctaagactccagcttcatagactcctctgtatcactgccttgaggcgcactttttataatcaagcctcatcttgctggtatcatgggaactccagcctgctatctttcatgaaggtcagcaccatccctggcctcctcacataggaatctagcagaaatgatagacacagtccacctttcggccggccagcctgatctgggctcagcatgtttggggtcagtcagtgttggagagcccacatatgggattgccactagcttcttctgccaatatcaaaataccttctcagatgctttagaaacatgcaacaccaactccttttctaccctcctctccgtccatacctacaaggccaaggacaaacgccatcttcatccttcttagaaagagatctattaccccattaggggagacagagagagtgaatggaggagtaccgagctggctatggacttgggtgtctggcaaacacagcttcagtctcactacttctgacactctggttattgggcactaagggccagactggaaagtcacttgagacacattctcagtttgttgcagtgccaggaatgctgcgctgctgctgctgcgcacctggcccatgctgtccctggcttccatgccgtccaggccctgccagaaaaggaaattggcatgcaattctaaactgcagtgactgggatgggaggggaggggagcagtgttgatgccaaaatacccacggggtctaccagccatggggtttgcttgcttaggagtagttgtttcagaggtgattacaggcctgggtttgactgtgcttaccaatgagtggtttttgagctatgagaaagtggatgggagtgggaggaggagagatgggtgaagacaaaagagttctttatgagcctcgatgttccctggtaaacttttaaaaaggccttctctcatgatctaagtcttggactggtggcatcatgtaactgctaaccttacagtaaaaacccaagaatgggtcaaaaatgtcttcccagtttctccaagctgcttctggaatgcaggtctgtcggctgggtgctctccagcagctgctcctgcctgattcaactgtagcctgtaatgggtaaaagccacatttaggaggtggtctgatcatagaacaccttaggaagaaagtccatgagactttctgactaggaaaccatgtggtttgaacttgaagaaaaatgtagacccatctgggttaattttcctacaatctgactcaactgccaggtgaaaaaaaaaaggaaaaa

SEQ ID NO: 192829 - DNA, 756 bp, Artificial Sequence
  derived and/or modified sequence
atgactgatagtgccacggcaaatggcgatgatagggacccggagatcgagctctttgtgaaagccggtattgacggagaatccatcggcaattgccccttcagccaaaggctgtttatgatactttggctcaaaggcgtggtcttcaatgtgaccacagtggacctaaaacgcaaacccgctgacctgcacaacctggctcccggcacccatccaccattcctaacatttaatggcgatgtgaagacagacgtgaacaaaatcgaagaattcctggaggagactctgactcctgagaaatatcctaagctggctgccaagcatcgagagtccaacaccgctggaattgacatcttttccaaattcagcgcctatataaagaataccaaacaacagaataacgcagccctggagcggggcctgaccaaagctcttaaaaaactggacgactatctgaatactccactacctgaggagatcgatgcgaacacctgcggtgaagacaaaggtagtcgaaggaagttcctggatggagatgaattaaccctggcagattgcaatctgctgccaaaattacacgtggtgaagatagtggcaaaaaaatacagaaactacgatatccccgccgaaatgacaggcctctggcggtacctgaagaatgcctacgcccgggacgaatttacgaatacatgtgccgctgattccgagattgaacttgcatacgcagatgtggcaaagcgcttgagccgctcgtag

SEQ ID NO: 192830 - DNA, 756 bp, Artificial Sequence
  derived and/or modified sequence
atgacagacagcgccacagccaatggagatgaccgggaccctgagattgagctgtttgtgaaggccggcattgatggagagagcatcggcaactgccccttcagccagaggctcttcatgatcctgtggctgaagggcgtggtgttcaacgtgaccaccgtggacctgaagaggaagccagctgacctgcacaacctggcccctggcacccacccccccttcctgaccttcaatggagatgtgaagacagatgtgaacaagattgaggagttcctggaggagaccctgaccccagagaagtaccccaagctggccgccaagcaccgggagagcaacacagctggcatcgacatcttcagcaagttcagcgcctacatcaagaacaccaagcagcagaacaatgctgccctggagcggggcctgaccaaggccctgaagaagctggatgactacctgaacacccccctgcctgaggagattgatgccaacacctgtggagaagataaaggcagcaggaggaagttcctggatggagatgagctgaccctggccgactgcaacctgctgcccaagctgcacgtggtgaagatcgtggccaagaagtacagaaattatgacatcccagctgagatgacaggcctgtggagatacctgaagaatgcctatgccagagatgagttcaccaacacctgtgccgctgacagcgagattgagctggcctatgcagatgtggccaagaggctgagccgctcctag

SEQ ID NO: 192831 - DNA, 756 bp, Artificial Sequence
  derived and/or modified sequence
atgaccgacagcgccaccgccaacggcgacgaccgggaccccgagatcgagctgtttgtaaaggccggcattgacggcgagagcatcggcaactgcccattttctcaaaggttattcatgatcctgtggttaaagggagtcgtcttcaacgtgacgactgtggatcttaagcgcaagcctgccgatttacataatctggctccgggcactcacccgccttttctgacgtttaacggcgacgtaaagaccgatgtaaataagatcgaggagttcctggaagagacactcacaccggagaagtatcccaagttggcagccaaacatcgggaaagcaacaccgcaggtatcgacatttttagcaaatttagtgcctacatcaaaaatactaaacagcagaacaatgcagcccttgaacgcggattgacaaaagccctcaagaagttagacgattacttaaatactcctcttcctgaggagattgatgcgaatacttgtggggaagacaagggttcccgcagaaagtttctcgatggtgatgagctgaccctggcagattgcaatctcctgcccaagctacatgttgtgaagattgtcgctaagaaatatcgtaattacgacatcccggctgaaatgaccggattatggagatacctgaagaacgcctatgctagggacgagttcaccaatacttgtgccgccgactccgagatagagcttgcctacgcggatgtagctaagaggcttagccgctcatag

SEQ ID NO: 192832 - DNA, 756 bp, Artificial Sequence
  derived and/or modified sequence
atgactgactccgctactgccaatggtgatgatagggatcccgaaatcgagctatttgtgaaagctggtattgacggtgagtccattggcaattgccctttttcacaacgccttttcatgatcctgtggctgaaaggcgtcgtgtttaatgtgaccacagtggatttaaaaaggaagccagctgatctgcacaacttagcacccggaacgcatcctcccttcctaaccttcaatggcgatgtgaagaccgacgtcaacaaaattgaggaattcttagaggagacactcacacctgaaaagtatccaaagcttgcagcaaagcatcgggagagcaatacagcagggattgacatcttctctaagttttccgcctatataaagaacacaaaacagcaaaacaatgccgctctggagaggggcctgacaaaagcactcaaaaagctggacgattacctgaatacccccttgccagaggagattgatgcaaacacctgtggcgaggataagggatcacgacgaaagtttttggacggagatgagctaaccttggccgactgtaatcttcttccaaaactacatgttgtcaaaatcgtggccaagaagtacagaaactatgacataccagccgaaatgaccggcctctggcgttacctcaaaaacgcttacgcacgcgatgaattcaccaatacgtgtgccgctgactctgagatagagctggcatacgccgatgttgccaaaaggctctcccgaagctag

SEQ ID NO: 192833 - protein, 335 aa, Artificial Sequence
  derived and/or modified sequence
MAVDITLLFRASVKTVKTRNKALGVAVGGGVDGSRDELFRRSPRPKGDFSSRAREVISHIGKLRDFLLEHRKDYINAYSHTMSEYGRMTDTERDQIDQDAQIFMRTCSEAIQQLRTEAHKEIHSQQVKEHRTAVLDFIEDYLKRVCKLYSEQRAIRVKRVVDKKRLSKLEPEPNTKTRESTSSEKVSQSPSKDSEENPATEERPEKILAETQPELGTWGDGKGEDELSPEEIQMFEQENQRLIGEMNSLFDEVRQIEGRVVEISRLQEIFTEKVLQQEAEIDSIHQLVVGATENIKEGNEDIREAIKNNAGFRVWILFFLVMCSFSLLFLDWYDS

SEQ ID NO: 192834 - DNA, 1008 bp, Artificial Sequence
  derived and/or modified sequence
atggccgtggacatcaccctgctgttcagagccagcgtgaagaccgtgaagaccagaaacaaggccctgggcgtggccgtgggcggcggcgtggacggcagcagagacgagctgttcagaagaagccccagacccaagggcgacttcagcagcagagccagagaggtgatcagccacatcggcaagctgagagacttcctgctggagcacagaaaggactacatcaacgcctacagccacaccatgagcgagtacggcagaatgaccgacaccgagagagaccagatcgaccaggacgcccagatcttcatgagaacctgcagcgaggccatccagcagctgagaaccgaggcccacaaggagatccacagccagcaggtgaaggagcacagaaccgccgtgctggacttcatcgaggactacctgaagagagtgtgcaagctgtacagcgagcagagagccatcagagtgaagagagtggtggacaagaagagactgagcaagctggagcccgagcccaacaccaagaccagagagagcaccagcagcgagaaggtgagccagagccccagcaaggacagcgaggagaaccccgccaccgaggagagacccgagaagatcctggccgagacccagcccgagctgggcacctggggcgacggcaagggcgaggacgagctgagccccgaggagatccagatgttcgagcaggagaaccagagactgatcggcgagatgaacagcctgttcgacgaggtgagacagatcgagggcagagtggtggagatcagcagactgcaggagatcttcaccgagaaggtgctgcagcaggaggccgagatcgacagcatccaccagctggtggtgggcgccaccgagaacatcaaggagggcaacgaggacatcagagaggccatcaagaacaacgccggcttcagagtgtggatcctgttcttcctggtgatgtgcagcttcagcctgctgttcctggactggtacgacagctag

SEQ ID NO: 192835 - DNA, 1008 bp, Artificial Sequence
  derived and/or modified sequence
atggcggtggatattaccttattattccgagcatctgtgaagacagtgaaaacgcgcaataaggcactaggcgtcgctgtcggtggcggcgtcgacggaagtcgagatgaactgtttaggcggtccccgaggccgaaaggagatttcagttcccgggcccgggaagtgatttcccacattggtaaactgcgggattttttgctcgagcaccgcaaagactatatcaacgcttactcgcacacgatgagcgaatatgggcggatgaccgacaccgagcgagatcagatcgatcaagacgcccaaatctttatgcgaacctgctcagaggctattcagcagctccggactgaggctcacaaggagattcactcgcagcaagtgaaggaacatcggaccgccgtgctggacttcatcgaggattatctaaagcgagtgtgtaaactgtatagtgagcaacgggccatcagggtgaaacgagtggtagacaaaaagaggctctccaaactggagccggaaccgaacactaagacacgggaaagtaccagtagtgagaaagtcagccagagcccttccaaagattctgaagagaacccggcgacagaagagcgccctgagaaaatcctcgcagagactcagcccgagctgggcacctggggcgatggcaaaggagaagatgaattgagtccagaagaaattcagatgtttgagcaggagaaccagaggctcataggcgaaatgaactctctgtttgatgaagtgaggcagattgaggggcgcgtggttgagatcagcaggctccaggagatctttaccgaaaaagttctgcagcaggaagctgagatcgatagtatccaccagctcgttgttggggccaccgagaatattaaggaggggaacgaagatatccgcgaggctatcaagaataatgccggcttcagagtgtggatcctgttttttctggttatgtgcagcttcagcctgctttttctggattggtacgactcctag

SEQ ID NO: 192836 - DNA, 1008 bp, Artificial Sequence
  derived and/or modified sequence
atggctgtggacatcaccctgctcttccgggcctctgtgaagacagtgaagaccaggaacaaggccctgggcgtggccgtgggcggcggcgtggatggcagcagagatgagctgttccgccgcagcccccggcccaagggggacttcagcagccgggcccgggaggtgatcagccacatcggcaagctgcgggacttcctgctggagcacaggaaggactacatcaatgcctacagccacaccatgtctgaatatggccgcatgacagacacagagcgggaccagattgaccaggatgcccagatcttcatgaggacctgcagcgaggccatccagcagctgaggacagaggcccacaaggagatccacagccagcaggtgaaggagcacaggacagctgtgctggacttcatcgaggactacctgaagagggtgtgcaagctgtacagcgagcagagggccatccgggtgaagagggtggtggacaagaagaggctgagcaagctggagcctgagcccaacaccaagacccgggagagcaccagcagcgagaaggtgtcccagagccccagcaaggacagcgaggagaacccagccacagaggagaggcctgagaagatcctggccgagacccagcctgagctgggcacctggggagatggcaagggggaggatgagctgagccctgaggagatccagatgtttgagcaggagaaccagaggctgattggagagatgaacagcctgtttgatgaggtgcggcagatcgagggccgggtggtggagatcagccggctgcaggagatcttcacagagaaggtgctgcagcaggaggccgagattgacagcatccaccagctggtggtgggcgccacagagaacatcaaggagggcaatgaagacatccgggaggccatcaagaacaatgccggcttccgggtgtggatcctcttcttcctggtgatgtgcagcttcagcctgctcttcctggactggtatgacagctag

SEQ ID NO: 192837 - DNA, 1008 bp, Artificial Sequence
  derived and/or modified sequence
atggccgtggacatcaccctgctgttccgggccagcgtgaagaccgtgaagacaaggaataaagcattgggtgtggccgtggggggaggggttgacggatctcgtgatgaactgttcagaaggtcacccagacctaaaggcgacttctcatcaagagccagggaggtgatcagccacatcggaaagctgcgagatttcctgctcgaacaccgcaaagattatattaacgcttactcacacacaatgtcggagtacggacgcatgaccgacacagagagagaccagatcgatcaggatgcccagatttttatgcgaacctgttccgaggccatccagcaactgaggacagaagcgcataaagaaatccactcccagcaagtgaaggaacataggaccgcagtgctcgacttcattgaagattatttaaagcgcgtgtgcaagttgtattctgaacagcgggctataagagttaaacgagttgtcgataaaaaaaggctatcaaagcttgagccagagcccaacactaagacgagagaatcaaccagttcagaaaaggtgagtcaaagccctagtaaggattctgaggaaaatcccgccacagaggagcggcccgaaaaaatcctcgccgaaacccagcctgaattaggcacctggggggacggcaaaggagaggacgagctgtcccccgaagagattcagatgtttgagcaagagaaccagcggctgatcggagaaatgaacagtctgttcgacgaagtaagacagatcgaaggtcgcgtggtagagatttcccgactccaggaaatttttaccgaaaaagtgcttcagcaggaggcagagatagacagcattcaccagctggtcgtcggggccaccgaaaatattaaagaggggaatgaggatataagagaggctatcaaaaacaacgccggatttcgcgtgtggattctgttctttcttgtcatgtgttctttttccctgttgtttctcgactggtacgactcttag

SEQ ID NO: 192838 - DNA, 1008 bp, Artificial Sequence
  derived and/or modified sequence
atggctgtcgatataacactgctttttagggctagcgtgaaaacagtcaagacaagaaacaaagctctcggcgtggccgtgggagggggtgtcgatggctctcgcgatgagctgtttaggcgcagtcccagacccaagggcgatttctcatcacgggcacgggaagtgatttcacacattggtaaacttagagacttcctcttggagcatagaaaagattacattaacgcttattctcacactatgtcagaatatgggaggatgacggacacagagcgagaccaaatagatcaggatgctcagatctttatgcgtacttgtagtgaagcgatacagcagctccggactgaagcccacaaggaaatccactcccagcaagtgaaagagcacagaactgctgtactcgatttcatcgaggattatctgaagagggtttgtaaactctactccgagcagcgcgcaattagggtcaaaagagtggtggacaagaaaaggctgtctaagctcgagccagagcccaatacaaaaacgagagagtccacctctagcgagaaagtttcccaaagtccttccaaagattccgaagaaaatccggcaacagaagagcggccagagaagatactcgctgaaacacaaccagagcttggcacctggggagacggcaagggcgaggacgagctgtcccctgaagagatccagatgttcgaacaggagaatcagcgtctcatcggtgagatgaactccctgtttgatgaggtgcgccagattgaaggtagggtggtggaaatctcccgcctgcaggagatcttcacagaaaaagtacttcagcaggaggccgagatcgattctattcatcagcttgtggtcggcgctaccgaaaacatcaaagaaggcaacgaggatattcgggaggctataaagaataacgcgggattccgcgtgtggatcctattcttcctagtaatgtgttcgtttagtttgttatttctggactggtacgacagctag

SEQ ID NO: 192839 - DNA, 2138 bp, Artificial Sequence
  derived and/or modified sequence
cgcgccgcggtcgccggctgcttacgtgggcgggcctagtgtggggctgagggtgcgggtcgctatggcggtggacatcacgctgctattccgggccagcgtcaagaccgtgaagacgcggaacaaggcgctgggagtggcggtgggcggcggggtcgatggcagccgggacgagctgttccgccggagcccccggcccaagggcgacttctccagccgggcccgcgaagtgatttctcacattggcaaactgagagattttcttctggaacacaggaaagattatattaatgcttatagccataccatgtctgaatatgggaggatgacagacacagaacgagaccagatagaccaggatgcccagatattcatgaggacctgttcagaagcaattcagcaactacgaacagaagctcacaaggagatacattcccagcaagtgaaggagcacaggaccgctgttttggatttcattgaagattacttgaaaagagtatgtaaactttactcagaacagagagccatccgagttaaaagagtggtggataagaaaagattatctaagctggaaccagaaccaaatacaaagacaagagaatccacatcttctgagaaagtttcacagagtccttcaaaagactctgaagaaaaccctgccactgaagaacgtccagaaaaaattttggctgaaacacaacctgaattgggaacgtggggagatggcaaaggcgaagatgagttatccccagaagaaatacaaatgtttgaacaggaaaatcagcgactaattggtgaaatgaacagcttgtttgatgaagtgaggcaaatcgaagggagagtggttgagatttccagactccaagagatattcacggaaaaggttttgcaacaggaagctgagattgacagcattcaccagttagttgtgggggcaactgaaaatatcaaggaaggcaacgaagacataagagaggccattaaaaacaacgctggcttccgcgtgtggatcctcttcttcctcgtgatgtgctccttctccttgctcttcctcgactggtacgacagctagccagggccacgggggcccagcacgagagtcctcatgggcactcacagactgcgtgctttcatgtacttccagtgctggagcatggtatgaccagattttatcacagtgccatttgaagggaaaggagttcagacagacagacgtattccccaaaaagggataccccaggccgatggtgttcagccatttagcagctgaaaaaggaaacagtgcacaccaatgggaggcagcctgcgtagccctcatcaggcaagacagactgaatgcaggagtgggtgattagctgctccttgaacttgaggctgccttggcagcaggggcacagcaggcctcaagagcccctaattgtctcagggttcaaaggaagacactgacctttcccatcccggtagcttcagggaagatcatagttaataacgtctctcaacaaatgattacttctttgtttccttgtggcttcttgtctgtctgagtcaacgaatacacagacttactggattatagaagagaaaattcacatctgccttgttaatctaataaatataattacagccccttaatgtgttgtcaatgagtctaagttgacaaattcagtggcagcccagccacctcctatcaatcaatcagggaagaaatgcaggggagactggggccctcagtgaggggctgcctggcattactcctccaaagactgctgcccccagaacaggcagggggtgtgggagggccagtttcccgccactgggtccaaggagcctttgttcaaaggaagaagtgggccacggaagaacgggcctgcttctctcgtgcctgtgcttctgacctccaggaactgtaaacaggaacacctatgtgtaactgaaggcatgagacatctgtacaggaagcatcccagcgcccacatgggcatgagacagtctgcactgcgcctggtgaaatgcgtgtgtgtacagacagtccactgggcagcacaggtatcctcatgttctttatttgcacagagtgaaatgtcagaagttacatgtaaatgaattcacagtcaataaagtccacgtctacctggaaa

SEQ ID NO: 192840 - protein, 578 aa, Artificial Sequence
  derived and/or modified sequence
MAVSWRSWLANEGVKHLCLFIWLSMNVLLFWKTFLLYNQGPEYHYLHQMLGLGLCLSRASASVLNLNCSLILLPMCRTLLAYLRGSQKVPSRRTRRLLDKSRTFHITCGVTICIFSGVHVAAHLVNALNFSVNYSEDFVELNAARYRDEDPRKLLFTTVPGLTGVCMVVVLFLMITASTYAIRVSNYDIFWYTHNLFFVFYMLLTLHVSGGLLKYQTNLDTHPPGCISLNRTSSQNISLPEYFSEHFHEPFPEGFSKPAEFTQHKFVKICMEEPRFQANFPQTWLWISGPLCLYCAERLYRYIRSNKPVTIISVMSHPSDVMEIRMVKENFKARPGQYITLHCPSVSALENHPFTLTMCPTETKATFGVHLKIVGDWTERFRDLLLPPSSQDSEILPFIQSRNYPKLYIDGPFGSPFEESLNYEVSLCVAGGIGVTPFASILNTLLDDWKPYKLRRLYFIWVCRDIQSFRWFADLLCMLHNKFWQENRPDYVNIQLYLSQTDGIQKIIGEKYHALNSRLFIGRPRWKLLFDEIAKYNRGKTVGVFCCGPNSLSKTLHKLSNQNNSYGTRFEYNKESFS

SEQ ID NO: 192841 - protein, 54 aa, Artificial Sequence
  derived and/or modified sequence
MAVSWRSWLANEGVKHLCLFIWLSMNVLLFWKTFLLYNQGPEYHYLHQMLGELS

SEQ ID NO: 192842 - DNA, 1737 bp, Artificial Sequence
  derived and/or modified sequence
atggccgtgtcctggcgctcgtggctcgctaatgaaggcgtcaaacacttatgcctcttcatctggctgtctatgaacgtcctactgttctggaagacattcttgctctataaccaggggccagagtaccactacctccaccagatgctgggcttggggctctgcctctcacgagcctcagccagtgtattaaacctcaactgttcgctgatacttctgccaatgtgtcgtaccttattagcatacctccggggctcccaaaaggtcccctctcgacggactagaaggcttttagataaaagcaggacatttcatatcacatgtggcgtgacgatctgcatatttagcggagtccatgttgctgcccatctggttaatgccctgaacttcagcgtaaactattcagaggacttcgtggagctgaacgccgcacggtacagggacgaagatcctagaaaactcttattcacaaccgtccccggattgaccggggtgtgcatggtcgtggtgctgttcctgatgataacagcgtccacgtacgccattcgagtgagcaactatgacatcttttggtatactcacaacctcttttttgtgttctacatgctgctgaccctccacgtttccggcggactgctcaaataccaaacaaatctcgatactcaccccccaggctgtatctcgctcaaccgaacaagctctcagaatatcagtctccccgagtacttcagtgagcatttccacgagccattccctgaagggtttagcaaacccgcggaattcacccagcacaaatttgtgaaaatttgtatggaagagcccagattccaagccaatttccctcagacctggctctggataagtggccccctgtgtctctactgcgctgagcgcctgtacaggtacattagatccaacaaaccggttaccatcatctccgtcatgtcacatcccagtgacgtcatggaaatccgtatggtgaaggaaaacttcaaagcgcggccagggcaatacattaccctgcattgtcctagtgttagcgccctggaaaatcacccttttaccctgaccatgtgtccaacagagactaaagccacattcggtgtccacctaaaaatagtcggagactggacagaacggtttcgcgatctgctgctgccacctagttcccaggatagcgagatcctgccctttattcaaagtaggaactaccccaaactgtacatcgacggccccttcgggagtcctttcgaggagagcctgaactatgaggtgtccctgtgtgtcgcgggaggtattggcgttaccccatttgctagcatccttaacacccttctcgacgactggaaaccctataagcttcgaagactttacttcatctgggtatgccgcgacattcagtcattccggtggtttgccgatcttctgtgtatgctgcacaacaagttctggcaagagaatcgtccggactatgtgaacattcagttgtacctgagtcagaccgacgggatccagaagatcatcggagagaagtatcatgccctcaactctcgcctgttcataggtcgcccccggtggaaattactgtttgatgagattgctaagtataaccgtgggaaaactgtcggtgtattctgctgcggtcccaactccctgagcaaaactctgcataaacttagcaaccagaacaacagctacggcactcgctttgagtataataaagagagcttcagctag

SEQ ID NO: 192843 - DNA, 1737 bp, Artificial Sequence
  derived and/or modified sequence
atggctgtgtcctggaggtcctggctggccaatgaaggagtgaagcacctgtgcctcttcatctggctgtccatgaatgtgctgctcttctggaagaccttcctgctgtacaaccagggccctgagtaccactacctgcaccagatgctgggcctgggcctgtgcctgagccgggccagcgcctctgtgctgaacctgaactgcagcctcatcctgctgcccatgtgcaggaccctgctggcctacctgcggggcagccagaaggtgcccagcaggaggacccggcggctgctggacaagagcaggaccttccacatcacctgtggggtgaccatctgcatcttcagcggcgtgcacgtggccgcccacctggtgaatgccctgaacttctctgtgaactacagcgaggactttgtggagctgaatgctgcccgctacagagatgaggaccccaggaagctgctcttcaccaccgtgcccggcctgactggagtgtgcatggtggtggtgctcttcctgatgatcacagccagcacctacgccatccgggtgagcaactatgacatcttctggtacacccacaacctcttctttgtgttctacatgctgctgaccctgcacgtgtctgggggcctgctgaagtaccagaccaacctggacacccaccccccaggctgcatcagcctgaacagaaccagcagccagaacatcagcctgcctgagtacttcagcgagcacttccacgagcccttccctgagggcttcagcaagccagctgagttcacccagcacaagtttgtgaagatctgcatggaggagccccgcttccaggccaacttcccccagacctggctgtggatcagcggccccctgtgcctgtactgtgccgagcggctgtaccgctacatccgcagcaacaagcctgtgaccatcatctctgtgatgagccaccccagtgatgtgatggagatccgcatggtgaaggagaacttcaaggcccggcccggccagtacatcaccctgcactgccccagcgtgtctgccctggagaaccaccccttcaccctgaccatgtgccccacagagaccaaggccacctttggagtgcacctgaagatcgtgggggactggacagagcgcttccgggacctgctgctgccccccagcagccaggacagcgagatcctgcccttcatccagagcaggaactaccccaagctgtacattgatggccccttcggcagcccctttgaggagagcctgaactatgaggtgtccctgtgtgtggccggcggcattggagtgaccccatttgccagcatcctgaacaccctgctggatgactggaagccctacaagctgcggcggctgtacttcatctgggtgtgccgggacatccagagcttccgctggtttgctgacctgctgtgcatgctgcacaacaagttctggcaggagaacagaccagactatgtgaacatccagctgtacctgagccagacagatggcatccagaagatcatcggggagaagtaccacgccctgaacagccgcctcttcatcggccggccccgctggaagctgctgtttgatgaaattgccaagtacaacagaggcaagacagtgggcgtcttctgctgcggccccaacagcctgagcaagaccctgcacaagctgagcaaccagaacaacagctatggcaccaggtttgagtacaacaaggagagcttctcctag

SEQ ID NO: 192844 - DNA, 2388 bp, Artificial Sequence
  derived and/or modified sequence
tgagtgggcagagctgacccggtgcgggtgggagtcagggcgcccggaaaacccggctctgggtagcagaccccgcccgggctggctcggcgccgggccttcgggcttccactcagtctttgaccctcggtcctcgctcagcggcccggcaggccgcacaactgtaaccgctgccccggccgccgcccgctccttctcggtccggcgggcacagagcgcagcgcggcggggccggcggcatggctgtgtcctggaggagctggctcgccaacgaaggggttaaacacctctgcctgttcatctggctctccatgaatgtcctgcttttctggaaaaccttcttgctgtataaccaagggccagagtatcactacctccaccagatgttggggctaggattgtgtctaagcagagcctcagcatctgttcttaacctcaactgcagccttatccttttacccatgtgccgaacactcttggcttacctccgaggatcacagaaggttccaagcaggagaaccaggagattgttggataaaagcagaacattccatattacctgtggtgttactatctgtattttctcaggcgtgcatgtggctgcccatctggtgaatgccctcaacttctcagtgaattacagtgaagactttgttgaactgaatgcagcaagataccgagatgaggatcctagaaaacttctcttcacaactgttcctggcctgacaggggtctgcatggtggtggtgctattcctcatgatcacagcctctacatatgcaataagagtttctaactatgatatcttctggtatactcataacctcttctttgtcttctacatgctgctgacgttgcatgtttcaggagggctgctgaagtatcaaactaatttagatacccaccctcccggctgcatcagtcttaaccgaaccagctctcagaatatttccttaccagagtatttctcagaacattttcatgaacctttccctgaaggattttcaaaaccggcagagtttacccagcacaaatttgtgaagatttgtatggaagagcccagattccaagctaattttccacagacttggctttggatttctggacctttgtgcctgtactgtgccgaaagactttacaggtatatccggagcaataagccagtcaccatcatttcggtcatgagtcatccctcagatgtcatggaaatccgaatggtcaaagaaaattttaaagcaagacctggtcagtatattactctacattgtcccagtgtatctgcattagaaaatcatccatttaccctcacaatgtgtccaactgaaaccaaagcaacatttggggttcatcttaaaatagtaggagactggacagaacgatttcgagatttactactgcctccatctagtcaagactccgaaattctgcccttcattcaatctagaaattatcccaagctgtatattgatggtccttttggaagtccatttgaggaatcactgaactatgaggtcagcctctgcgtggctggaggcattggagtaactccatttgcatcaatactcaacaccctgttggatgactggaaaccatacaagcttagaagactatactttatttgggtatgcagagatatccagtccttccgttggtttgcagatttactctgtatgttgcataacaagttttggcaagagaacagacctgactatgtcaacatccagctgtacctcagtcaaacagatgggatacagaagataattggagaaaaatatcatgcactgaattcaagactgtttataggacgtcctcggtggaaacttttgtttgatgaaatagcaaaatataacagaggaaaaacagttggtgttttctgttgtggacccaattcactatccaagactcttcataaactgagtaaccagaacaactcatatgggacaagatttgaatacaataaagagtctttcagctgaaaacttttgccatgaagcaggactctaaagaaggaatgagtgcaatttctaagactttgaaactcagcggaatcaatcagctgtgttatgccaaagaatagtaaggttttcttatttatgattatttaaaatggaaatgtgagaatgtggcaagatgaccgtcacattacatgtttaatctggaaaccaaagagaccctgaagaatatttgatgtgatgattcacttttcagttctcaaattaaaagaaaactgttagatgcacactgttgattttcatggtggattcaagaactccctagtgaggagctgaacttgctcaatctaaggctgattgtcgtgttcctctttaaattgtttttggttgaacaaatgcaagattgaacaaaattaaaaattcattgaagctgaaa

SEQ ID NO: 192845 - DNA, 4376 bp, Artificial Sequence
  derived and/or modified sequence
tgagtgggcagagctgacccggtgcgggtgggagtcagggcgcccggaaaacccggctctgggtagcagaccccgcccgggctggctcggcgccgggccttcgggcttccactcagtctttgaccctcggtcctcgctcagcggcccggcaggccgcacaactgtaaccgctgccccggccgccgcccgctccttctcggtccggcgggcacagagcgcagcgcggcggggccggcggcatggctgtgtcctggaggagctggctcgccaacgaaggggttaaacacctctgcctgttcatctggctctccatgaatgtcctgcttttctggaaaaccttcttgctgtataaccaagggccagagtatcactacctccaccagatgttggggctaggattgtgtctaagcagagcctcagcatctgttcttaacctcaactgcagccttatccttttacccatgtgccgaacactcttggcttacctccgaggatcacagaaggttccaagcaggagaaccaggagattgttggataaaagcagaacattccatattacctgtggtgttactatctgtattttctcaggcgtgcatgtggctgcccatctggtgaatgccctcaacttctcagtgaattacagtgaagactttgttgaactgaatgcagcaagataccgagatgaggatcctagaaaacttctcttcacaactgttcctggcctgacaggggtctgcatggtggtggtgctattcctcatgatcacagcctctacatatgcaataagagtttctaactatgatatcttctggtatactcataacctcttctttgtcttctacatgctgctgacgttgcatgtttcaggagggctgctgaagtatcaaactaatttagatacccaccctcccggctgcatcagtcttaaccgaaccagctctcagaatatttccttaccagagtatttctcagaacattttcatgaacctttccctgaaggattttcaaaaccggcagagtttacccagcacaaatttgtgaagatttgtatggaagagcccagattccaagctaattttccacagacttggctttggatttctggacctttgtgcctgtactgtgccgaaagactttacaggtatatccggagcaataagccagtcaccatcatttcggtcatgagtcatccctcagatgtcatggaaatccgaatggtcaaagaaaattttaaagcaagacctggtcagtatattactctacattgtcccagtgtatctgcattagaaaatcatccatttaccctcacaatgtgtccaactgaaaccaaagcaacatttggggttcatcttaaaatagtaggagactggacagaacgatttcgagatttactactgcctccatctagtcaagactccgaaattctgcccttcattcaatctagaaattatcccaagctgtatattgatggtccttttggaagtccatttgaggaatcactgaactatgaggtcagcctctgcgtggctggaggcattggagtaactccatttgcatcaatactcaacaccctgttggatgactggaaaccatacaagcttagaagactatactttatttgggtatgcagagatatccagtccttccgttggtttgcagatttactctgtatgttgcataacaagttttggcaagagaacagacctgactatgtcaacatccagctgtacctcagtcaaacagatgggatacagaagataattggagaaaaatatcatgcactgaattcaagactgtttataggacgtcctcggtggaaacttttgtttgatgaaatagcaaaatataacagaggaaaaacagttggtgttttctgttgtggacccaattcactatccaagactcttcataaactgagtaaccagaacaactcatatgggacaagatttgaatacaataaagagtctttcagctgaaaacttttgccatgaagcaggactctaaagaaggaatgagtgcaatttctaagactttgaaactcagcggaatcaatcagctgtgttatgccaaagaatagtaaggttttcttatttatgattatttaaaatggaaatgtgagaatgtggcaagatgaccgtcacattacatgtttaatctggaaaccaaagagaccctgaagaatatttgatgtgatgattcacttttcagttctcaaattaaaagaaaactgttagatgcacactgttgattttcatggtggattcaagaactccctagtgaggagctgaacttgctcaatctaaggctgattgtcgtgttcctctttaaattgtttttggttgaacaaatgcaagattgaacaaaattaaaaattcattgaagctgaaattccattttctgtgttgtgtataaacagagtagctttaatttgcaagcactccaggcaaatatattagatgtttgaaaacacagcacaagactctgtattgatacgggtactttgtgtcaatatctaatcgtctccactacttatgctaatacctctatttgatatctgaagactatatgctaactgaaccttcctcaaatgttgttatagtatctatttttatatatttttttctttttattcctctctctagggaaatatgccttcccttagcatgcattagacataatgatttaataggtccctttcatcttcatttaaatctatcactattgcatggtaatgaaaatattcctactataaattataaagggatatatatatatggatatatatatgtatatacacatatatatatacacacacacacacatatatatatatatatatatatatacacatatactaataacttttcccttttttcagcatttttgtctctattattattattgtttttttcccaggtagggtttgtcttaggctgtagcctctaaggatagttagttaatttgcactttgagaccaaaggacatcatgtgtgtcagtagggactgaatataagatttatctcctttgccacacattggtttatgatggagacattgaaagtctagtcatattcctgaacagtaaaacctgtattttaccttttaagtaagaggaaatatgatattcttattcaaacttaagtttagaatccagaatattactgtcgcactttttggtatcctgagtttccatagggaactattgggtttaaagtcaccgttggaactacactgtgtgatcttataaacttatgttccctggctatcatattcttggctcagaacaatatttcccattactatcttaagaattaaggcattcatggctcacgcctgtaatcccggcactttgggaggccaaggcaggtggatcacgaggtcagagttcaagaccagcctgaccaagttggtgaaaccccatcgctactaaaaatacaaatattaggcgggtgtggtggcgggtgcctataatcccaactactcgggagactgaggcaaagaatcgcttgaacccggtgggcggaggttgcagtgagccaagattgcaccactgcactccagcctgggtgacagagcaagattccatctcaaaaaaaaaaaaaaaaaaaaaaaaaaagaattaaagcattcatacagtttagtgattttgtttagtagtcggctatcaattgctatcaaatataacactgctgaaatcagcagtgtgacttaccttgccattgttaaaatgttacataaaacataacatgatagatgctaaggcctttttttgctataattcaccaatagcaatcaagcatgctaacccatactgaatgatatttacttgtagatatttcttcctttccttgaaattctcctttctatggaaagaagatgaacccaaaaaagtgataggaaatgtggaatgctcatgcagatttagctctgaaggcatatttaataactagtatgtcttgacaacagtctttagattaaaaagaattttcatggaaacatttaacagaaagaactagtaaaaagacactttgagttagtccaggcttaatgtgcaatactgactctatactgatcataatttatttatgcgatcatattaatagacctaatttcattaaaacaggtagaagatttttcaaaagaaagatgatgtttcaaagctggtctgccattctagatgagcctccttgcttatttaagttccagtaggtgttcaaatgttaaatgttaaacataggtcatctttgcttctgcagggcttcatcttgcatgtttaagagaactttgttttattttgagggattatttctctggggatcattcttataatacaagccttaaatcactaattttagtagcaataaatgttaaaattg

SEQ ID NO: 192846 - DNA, 1737 bp, Artificial Sequence
  derived and/or modified sequence
atggccgtgagctggcggagctggctggccaacgagggcgtgaagcacctgtgcttgtttatttggcttagcatgaacgtgttgctgttctggaagacttttcttctctataatcaaggacctgagtaccactacctgcatcagatgctcggactgggtctctgtctctcgcgcgcttctgctagcgtcctcaatctcaactgttctcttatcctgctgcctatgtgcaggacacttttggcctatcttcgtgggtcacagaaagttcctagtcggcgaacccggcggcttctggacaaatccagaaccttccacatcacttgtggcgtgaccatctgtattttctccggcgtgcacgtggcagcacatcttgtcaatgcactcaatttctctgtcaactacagcgaagactttgtcgagctgaacgctgcccggtatagggatgaggacccacgcaaactgctattcacaacagtgcctgggttgactggagtatgcatggtggtggtgctcttcctgatgatcactgccagcacatatgccatcagggtgagcaactacgacattttttggtacacccacaacctgttcttcgtgttttatatgctactgacccttcatgtcagcggggggctgttaaagtaccaaacaaacttggatacccatccacccggctgtatctccttaaatcgcacttccagccagaacattagcctgcccgagtatttttcagagcactttcacgaaccttttccggagggcttttcaaaacctgcagagtttactcagcacaaattcgtgaaaatctgtatggaggaaccgcggttccaggccaactttccacaaacttggttatggatatccggacctttatgtctctattgtgccgagagattatatagatatattcgcagcaataaacctgtgacaatcattagcgtgatgagtcacccttctgatgtgatggagatccgtatggtgaaggaaaactttaaggcaaggcccgggcagtatatcacccttcactgcccctccgtttctgccctggaaaaccacccattcaccctgaccatgtgccctacagaaactaaggctacttttggagtccacctgaaaatcgtgggggattggactgaaaggttcagggacctgctgctgccacctagcagccaagattccgaaatcttgcccttcatccagtcaaggaactaccccaaactttacatcgacggaccattcggaagcccttttgaagagtctttgaattacgaagtctccctgtgtgtggccggcggtatcggagtgactcctttcgcatccattttgaatacgctattggatgattggaaaccatacaagctgaggaggttatatttcatctgggtttgccgagatattcaatcttttcggtggttcgctgacctcctgtgcatgctgcataataaattttggcaggaaaatcgtcccgactatgtgaacatccagttatacctatcacagactgatggcattcagaaaattattggcgaaaagtaccatgcgctgaacagcagactgtttatcgggagacctcgctggaagctgctgtttgatgaaatcgcaaaatataatcgaggaaagactgtgggggtgttttgttgcggccccaactccctgtctaagacacttcacaaactctcgaatcagaataattcctacggcacccggttcgagtataataaagagagtttttcctag

SEQ ID NO: 192847 - DNA, 1737 bp, Artificial Sequence
  derived and/or modified sequence
atggccgtttcatggagatcttggctcgcaaacgaaggcgtgaagcatctgtgcctgttcatctggctctccatgaatgttttactcttttggaaaacctttctgctctacaaccaagggcctgagtatcactatcttcaccagatgctcggcttgggcctgtgcctgtcccgcgcatctgctagcgtcttgaatctgaattgtagcctgattctgctaccaatgtgccggactcttctcgcttacctgcggggttctcagaaggtaccctcccggaggaccaggcggctgctggataagtcccggacctttcacatcacctgcggagtcaccatatgcattttctctggcgtgcacgtcgccgctcatctggtgaatgcactgaacttttccgtgaactattccgaggattttgttgaacttaatgcggctaggtatcgcgacgaagatccacgcaagcttcttttcactacggtgccgggtctgaccggggtgtgtatggtagtggtgttgttcctaatgattacagcaagtacatatgcgattcgtgtttctaactacgacatcttttggtatactcataacctcttttttgtcttctatatgcttctgaccctgcatgtgtcagggggtttgcttaagtaccaaacaaacttggacacacaccctccgggatgcatcagtttaaaccgcaccagcagccaaaacatctctctgccagagtactttagtgagcactttcacgaaccatttcccgaagggttcagcaagccagcggagttcactcagcataagttcgttaaaatttgtatggaagaacctcggtttcaggccaattttccccaaacatggctgtggatctctggtcccctatgcctgtactgtgctgaaaggctgtaccggtacatccgctctaataagccagtcaccatcatctctgtaatgtcccatccttccgatgtcatggaaataaggatggtgaaggagaatttcaaagcccgtccaggacagtacattacactacattgcccttccgtgtcggcactggaaaatcaccccttcactctgacgatgtgtcccacagagactaaagccacatttggcgtacacctcaagattgtaggcgactggacagaacggtttagggatctgttattgccacctagttctcaagacagtgaaatacttccgtttatccagtccaggaactaccctaaactgtatattgatggccctttcggctccccttttgaagaatccctgaattatgaagtgagcctctgtgttgcagggggaataggtgttactccttttgcgtccattctcaacacactgttggatgattggaagccttacaaactgcgaaggctttacttcatctgggtgtgcagagatatccaatcctttaggtggttcgctgatctcctgtgcatgctccataataaattctggcaagagaaccgaccagactatgttaatattcagctgtacctgagccagacagacgggatccagaagatcatcggtgaaaaatatcatgccctcaactctcggctgttcattggcagaccgcgatggaagttgctcttcgatgagattgcaaagtataaccggggaaaaactgtaggggtgttttgctgcgggcctaattcgctttctaagacactgcacaagttatctaaccaaaataacagctacggaactagattcgagtacaataaagagagcttttcctag

SEQ ID NO: 192848 - DNA, 1737 bp, Artificial Sequence
  derived and/or modified sequence
atggccgtgagctggagaagctggctggccaacgagggcgtgaagcacctgtgcctgttcatctggctgagcatgaacgtgctgctgttctggaagaccttcctgctgtacaaccagggccccgagtaccactacctgcaccagatgctgggcctgggcctgtgcctgagcagagccagcgccagcgtgctgaacctgaactgcagcctgatcctgctgcccatgtgcagaaccctgctggcctacctgagaggcagccagaaggtgcccagcagaagaaccagaagactgctggacaagagcagaaccttccacatcacctgcggcgtgaccatctgcatcttcagcggcgtgcacgtggccgcccacctggtgaacgccctgaacttcagcgtgaactacagcgaggacttcgtggagctgaacgccgccagatacagagacgaggaccccagaaagctgctgttcaccaccgtgcccggcctgaccggcgtgtgcatggtggtggtgctgttcctgatgatcaccgccagcacctacgccatcagagtgagcaactacgacatcttctggtacacccacaacctgttcttcgtgttctacatgctgctgaccctgcacgtgagcggcggcctgctgaagtaccagaccaacctggacacccacccccccggctgcatcagcctgaacagaaccagcagccagaacatcagcctgcccgagtacttcagcgagcacttccacgagcccttccccgagggcttcagcaagcccgccgagttcacccagcacaagttcgtgaagatctgcatggaggagcccagattccaggccaacttcccccagacctggctgtggatcagcggccccctgtgcctgtactgcgccgagagactgtacagatacatcagaagcaacaagcccgtgaccatcatcagcgtgatgagccaccccagcgacgtgatggagatcagaatggtgaaggagaacttcaaggccagacccggccagtacatcaccctgcactgccccagcgtgagcgccctggagaaccaccccttcaccctgaccatgtgccccaccgagaccaaggccaccttcggcgtgcacctgaagatcgtgggcgactggaccgagagattcagagacctgctgctgccccccagcagccaggacagcgagatcctgcccttcatccagagcagaaactaccccaagctgtacatcgacggccccttcggcagccccttcgaggagagcctgaactacgaggtgagcctgtgcgtggccggcggcatcggcgtgacccccttcgccagcatcctgaacaccctgctggacgactggaagccctacaagctgagaagactgtacttcatctgggtgtgcagagacatccagagcttcagatggttcgccgacctgctgtgcatgctgcacaacaagttctggcaggagaacagacccgactacgtgaacatccagctgtacctgagccagaccgacggcatccagaagatcatcggcgagaagtaccacgccctgaacagcagactgttcatcggcagacccagatggaagctgctgttcgacgagatcgccaagtacaacagaggcaagaccgtgggcgtgttctgctgcggccccaacagcctgagcaagaccctgcacaagctgagcaaccagaacaacagctacggcaccagattcgagtacaacaaggagagcttcagctag

SEQ ID NO: 192849 - protein, 291 aa, Artificial Sequence
  derived and/or modified sequence
MSMLPTFGFTQEQVACVCEVLQQGGNIERLGRFLWSLPACEHLHKNESVLKAKAVVAFHRGNFRELYKILESHQFSPHNHAKLQQLWLKAHYIEAEKLRGRPLGAVGKYRVRRKFPLPRSIWDGEETSYCFKEKSRSVLREWYAHNPYPSPREKRELAEATGLTTTQVSNWFKNRRQRDRAAEAKERENNENSNSNSHNPLNGSGKSVLGSSEDEKTPSGTPDHSSSSPALLLSPPPPGLPSLHSLGHPPGPSAVPVPVPGGGGADPLQHHHGLQDSILNPMSANLVDLGS

SEQ ID NO: 192850 - DNA, 2178 bp, Artificial Sequence
  derived and/or modified sequence
gcgagggaacggcgggcgggcgcggagcatgcggagcggcgccccgggcggcccccgggcttgggcgagggcttgggccaggcgcgcgggccgttggggttcggagcttcgtgggacccgcggccggcgcggggacgtacggcagtgactcggggctcaccgggggccagtgccgggccagggggccagccccgcccgcgtctcggcccggacggcccggcgaggaagctcccatgcgggaccgcgcggcccggtgagggcgcgcgcgggcgggcggggacgcagccggcaccatgtccatgctgcccaccttcggcttcacgcaggagcaagtggcgtgcgtgtgcgaggtgctgcagcagggcggcaacatcgagcggctgggccgcttcctgtggtcgctgcccgcctgcgagcaccttcacaagaatgaaagcgtgctcaaggccaaggccgtggtggccttccaccgcggcaacttccgcgagctctacaagatcctggagagccaccagttctcgccgcacaaccacgccaagctgcagcagctgtggctcaaggcacactacatcgaggcggagaagctgcgcggccgacccctgggcgccgtgggcaaataccgcgtgcgccgcaaattcccgctgccgcgctccatctgggacggcgaggagaccagctactgcttcaaggaaaagagtcgcagcgtgctgcgcgagtggtacgcgcacaacccctacccttcaccccgcgagaagcgtgagctggcggaggccacgggcctcaccaccacacaggtcagcaactggttcaagaaccggcggcagcgcgaccgggcggccgaggccaaggaaagggagaacaacgagaactccaattctaacagccacaacccgctgaatggcagcggcaagtcggtgttaggcagctcggaggatgagaagactccatcggggacgccagaccactcatcatccagccccgcactgctcctcagcccgccgccccctgggctgccgtccctgcacagcctgggccaccctccgggccccagcgcagtgccagtgccggtgccaggcggaggtggagcggacccactgcaacaccaccatggcctgcaggactccatcctcaaccccatgtcagccaacctcgtggacctgggctcctagaacccatttgccttgatgagcttgccttttgtgacttgacactggggacgtggagtggcggtgtccaggggcgccccgcccctgcggccccaccaggtactgaaagacccgcaggctgagcgggtagaacagccgggtagggcagatagctgtctatgttggttcttgtttgggatttattttcaacaagttacttttaggatccttttggggctggagactgagtcttgaaccacagaagggaataaattatacaccactgtcattctctctctccctctgtctcttccttttaccctctcttgtcttgccttttccccctttcctcttcctttcccttccttctcttttcttttttctgctttctgtctttctccctctccttgtattgctttccttctagatttctagcttgccaccgttcattctctccttctgtctctccctttctctctccttctctgtttctcctctcttctctcctgccagtctcttgtactctgtgtcctggtccctccgtatgtacccctgtctttctcctcctgactggtggtctatctgcccctacctctggccctcgctttaccggagtagggggtgggagagggaagaggagagaaaatacagggactttgaacctaggccatctcctgaggccttttccctcgcccatgtgggtcagtgggagctgcaggtgtcagcttttcgtctagtaacttaagtgagagagaaagggcagcgccacagaagcccctaaacgccgcctcgtcatacgcccctcctccttctctcttggcgaggccccgccacaccgcgctcttcctcccgggactgtgactacagcgctcccggctgagcgcgccccccgagccgccgacttgccgtctccccgtaatgccctcatgtgaatgttcttcgggaaatatttctgcttttattttataataaaattagaaatcataaatatataaatggttatatgccaaaaaaaaaaaaaaaaaaaaaaaaa

SEQ ID NO: 192851 - DNA, 876 bp, Artificial Sequence
  derived and/or modified sequence
atgtccatgctgccgaccttcggatttacacaagagcaggtagcttgcgtatgcgaagtcttacagcagggcggtaatattgagaggctgggccgattcctgtggagcttgcctgcttgcgaacacctgcataaaaatgaaagtgtgctgaaggcgaaagcggtggtagcctttcaccggggcaacttccgggagctgtacaagattctggagagccaccagtttagcccacacaaccatgctaaacttcagcaactctggctgaaggcacattacatcgaggccgagaaattgcgcggcaggcctctaggcgcggtgggaaagtatcgcgtcaggaggaagtttccactaccacgcagtatctgggacggagaggaaactagttactgcttcaaggagaagtctcggagcgttctccgagaatggtacgcgcacaacccctacccgagcccacgggaaaagcgcgagctcgctgaggctaccggtctgactaccacgcaagtttcaaactggttcaagaaccggaggcagcgcgatcgcgcagcagaggcgaaggagagagagaacaacgagaactccaacagcaactctcacaacccgctgaacgggtccggcaaatctgtccttggttccagcgaagacgaaaagactccatccggaacacctgaccactcatcatcttctcctgcgctactgctatccccccctccaccaggtttaccaagtctacactccctgggacatccaccaggaccgagtgcagtacccgttccagtgcccggcggcggaggcgcagacccgctgcagcaccatcacggcctgcaggattcaatcttgaatcctatgagcgctaatctcgttgatctggggtcttag

SEQ ID NO: 192852 - DNA, 876 bp, Artificial Sequence
  derived and/or modified sequence
atgtccatgctgcccaccttcggcttcacccaggagcaggtggcctgtgtgtgtgaggtgctgcagcagggcggcaacatcgagcggctgggccgcttcctgtggagcctgcctgcctgtgagcacctgcacaagaatgaatctgtgctgaaggccaaggctgtggtggccttccaccggggcaacttccgggagctgtacaagatcctggagagccaccagttcagcccccacaaccacgccaagctgcagcagctgtggctgaaggcccactacattgaagctgagaagctgcggggccggcccctgggcgctgtgggcaagtacagagtgcggaggaagttccccctgcccaggagcatctgggatggagaggagaccagctactgcttcaaggagaagagccgctctgtgctgcgggagtggtacgcccacaacccctaccccagcccccgggagaagcgggagctggccgaggccaccggcctgaccaccacccaggtgagcaactggttcaagaacagacggcagagggacagagctgctgaggccaaggagcgggagaacaatgaaaacagcaacagcaacagccacaaccccctgaatggcagcggcaagtctgtgctgggcagcagtgaagatgagaagaccccatctggcaccccagaccacagcagcagcagccctgccctgctgctgagccccccacctcctggcctgcccagcctgcacagcctgggccaccccccaggccccagcgctgtgcctgtgcctgtgcctgggggcggcggcgctgaccccctgcagcaccaccacggcctgcaggacagcatcctgaaccccatgtctgccaacctggtggacctgggcagctag

SEQ ID NO: 192853 - DNA, 876 bp, Artificial Sequence
  derived and/or modified sequence
atgagcatgctgcccaccttcggcttcacccaggagcaggtggcctgtgtgtgcgaggtgttacagcagggcggtaacatcgagaggctcggtcgattcctgtggtctcttcctgcatgcgaacatttgcataagaatgaaagtgttctgaaagccaaagccgtggtcgccttccatcgagggaactttcgcgagctatacaagatactagagtcccatcagttctccccacacaaccacgctaaactgcagcagttgtggcttaaggcccactatatagaagcagagaaactgagaggacgcccgctgggtgcggttggtaagtacagggtccgacgaaagtttccactgcccaggtccatctgggacggcgaagagacctcttactgttttaaggagaaaagcaggtctgtactgcgagagtggtatgcccacaatccatacccatcacctcgcgaaaaaagggagttggcggaagccaccggcctcactactacccaagtttcaaactggtttaaaaaccggagacagagagacagagcagcagaggccaaggagcgagaaaataatgaaaactctaactctaacagtcacaaccccctgaatggctcggggaaaagtgtcttgggatcgtccgaagacgaaaagacccccagcggcactccagatcattccagttcctcgccagcactactactctctcccccacctcctgggctgccctccctccactcactgggtcatccccctggtccttccgcggttccagttccagtgcctggtgggggcggggcagaccccttacagcaccatcatggcttacaggacagcattttaaaccctatgtctgctaacctcgttgatctggggtcgtag

SEQ ID NO: 192854 - DNA, 876 bp, Artificial Sequence
  derived and/or modified sequence
atgagcatgctgccaactttcggtttcacgcaggagcaggtggcctgcgtctgcgaggtactccaacagggcggtaacatcgagcggctgggcaggttcctgtggagcctgccagcatgtgaacacctgcataaaaatgaatctgttcttaaagctaaagctgttgttgctttccaccgaggcaatttcagagagctgtataagattcttgagtcacatcagttctcaccgcacaaccacgcaaagctgcagcagctatggttgaaggcacactatatagaagccgaaaagcttaggggacgtccccttggagctgttggaaagtatagagttcgcaggaagttcccacttccacgttccatttgggatggcgaggagaccagctattgttttaaggaaaagagcaggtcggtgctgagggaatggtatgcccataatccttacccatcgccacgagagaaacgcgagctcgctgaagcaacaggcctcaccaccacccaggtttccaactggtttaaaaaccggcgacagcgggacagagccgcagaggcgaaagagagggagaacaatgagaactccaatagcaactctcataaccccctcaatggttcgggcaagagtgtactgggatcttccgaagatgagaaaacaccctccggaacgcccgaccactccagcagttctcccgctcttctgctgtctccacctccgcctggactgccctccctccattccttgggccacccccctgggccttccgctgtgcccgttccagtaccaggcggtggcggagctgatccacttcagcatcatcatggtctgcaagatagcattttaaatcctatgtccgccaacctcgtagacctgggaagctag

SEQ ID NO: 192855 - DNA, 2205 bp, Artificial Sequence
  derived and/or modified sequence
acgggagggagaacgagtgagaagcgagcgagggaacggcgggcgggcgcggagcatgcggagcggcgccccgggcggcccccgggcttgggcgagggcttgggccaggcgcgcgggccgttggggttcggagcttcgtgggacccgcggccggcgcggggacgtacggcagtgactcggggctcaccgggggccagtgccgggccagggggccagccccgcccgcgtctcggcccggacggcccggcgaggaagctcccatgcgggaccgcgcggcccggtgagggcgcgcgcgggcgggcggggacgcagccggcaccatgtccatgctgcccaccttcggcttcacgcaggagcaagtggcgtgcgtgtgcgaggtgctgcagcagggcggcaacatcgagcggctgggccgcttcctgtggtcgctgcccgcctgcgagcaccttcacaagaatgaaagcgtgctcaaggccaaggccgtggtggccttccaccgcggcaacttccgcgagctctacaagatcctggagagccaccagttctcgccgcacaaccacgccaagctgcagcagctgtggctcaaggcacactacatcgaggcggagaagctgcgcggccgacccctgggcgccgtgggcaaataccgcgtgcgccgcaaattcccgctgccgcgctccatctgggacggcgaggagaccagctactgcttcaaggaaaagagtcgcagcgtgctgcgcgagtggtacgcgcacaacccctacccttcaccccgcgagaagcgtgagctggcggaggccacgggcctcaccaccacacaggtcagcaactggttcaagaaccggcggcagcgcgaccgggcggccgaggccaaggaaagggagaacaacgagaactccaattctaacagccacaacccgctgaatggcagcggcaagtcggtgttaggcagctcggaggatgagaagactccatcggggacgccagaccactcatcatccagccccgcactgctcctcagcccgccgccccctgggctgccgtccctgcacagcctgggccaccctccgggccccagcgcagtgccagtgccggtgccaggcggaggtggagcggacccactgcaacaccaccatggcctgcaggactccatcctcaaccccatgtcagccaacctcgtggacctgggctcctagaacccatttgccttgatgagcttgccttttgtgacttgacactggggacgtggagtggcggtgtccaggggcgccccgcccctgcggccccaccaggtactgaaagacccgcaggctgagcgggtagaacagccgggtagggcagatagctgtctatgttggttcttgtttgggatttattttcaacaagttacttttaggatccttttggggctggagactgagtcttgaaccacagaagggaataaattatacaccactgtcattctctctctccctctgtctcttccttttaccctctcttgtcttgccttttccccctttcctcttcctttcccttccttctcttttcttttttctgctttctgtctttctccctctccttgtattgctttccttctagatttctagcttgccaccgttcattctctccttctgtctctccctttctctctccttctctgtttctcctctcttctctcctgccagtctcttgtactctgtgtcctggtccctccgtatgtacccctgtctttctcctcctgactggtggtctatctgcccctacctctggccctcgctttaccggagtagggggtgggagagggaagaggagagaaaatacagggactttgaacctaggccatctcctgaggccttttccctcgcccatgtgggtcagtgggagctgcaggtgtcagcttttcgtctagtaacttaagtgagagagaaagggcagcgccacagaagcccctaaacgccgcctcgtcatacgcccctcctccttctctcttggcgaggccccgccacaccgcgctcttcctcccgggactgtgactacagcgctcccggctgagcgcgccccccgagccgccgacttgccgtctccccgtaatgccctcatgtgaatgttcttcgggaaatatttctgcttttattttataataaaattagaaatcataaatatataaatggttatatgccacaaggcccgcgggccgggagtgca

SEQ ID NO: 192856 - DNA, 876 bp, Artificial Sequence
  derived and/or modified sequence
atgagcatgctgcccaccttcggcttcacccaggagcaggtggcctgcgtgtgcgaggtgctgcagcagggcggcaacatcgagagactgggcagattcctgtggagcctgcccgcctgcgagcacctgcacaagaacgagagcgtgctgaaggccaaggccgtggtggccttccacagaggcaacttcagagagctgtacaagatcctggagagccaccagttcagcccccacaaccacgccaagctgcagcagctgtggctgaaggcccactacatcgaggccgagaagctgagaggcagacccctgggcgccgtgggcaagtacagagtgagaagaaagttccccctgcccagaagcatctgggacggcgaggagaccagctactgcttcaaggagaagagcagaagcgtgctgagagagtggtacgcccacaacccctaccccagccccagagagaagagagagctggccgaggccaccggcctgaccaccacccaggtgagcaactggttcaagaacagaagacagagagacagagccgccgaggccaaggagagagagaacaacgagaacagcaacagcaacagccacaaccccctgaacggcagcggcaagagcgtgctgggcagcagcgaggacgagaagacccccagcggcacccccgaccacagcagcagcagccccgccctgctgctgagcccccccccccccggcctgcccagcctgcacagcctgggccacccccccggccccagcgccgtgcccgtgcccgtgcccggcggcggcggcgccgaccccctgcagcaccaccacggcctgcaggacagcatcctgaaccccatgagcgccaacctggtggacctgggcagctag

SEQ ID NO: 192857 - protein, 1462 aa, Artificial Sequence
  derived and/or modified sequence
MAPVHGDDSLSDSGSFVSSRARREKKSKKGRQEALERLKKAKAGEKYKYEVEDFTGVYEEVDEEQYSKLVQARQDDDWIVDDDGIGYVEDGREIFDDDLEDDALDADEKGKDGKARNKDKRNVKKLAVTKPNNIKSMFIACAGKKTADKAVDLSKDGLLGDILQDLNTETPQITPPPVMILKKKRSIGASPNPFSVHTATAVPSGKIASPVSRKEPPLTPVPLKRAEFAGDDVQVESTEEEQESGAMEFEDGDFDEPMEVEEVDLEPMAAKAWDKESEPAEEVKQEADSGKGTVSYLGSFLPDVSCWDIDQEGDSSFSVQEVQVDSSHLPLVKGADEEQVFHFYWLDAYEDQYNQPGVVFLFGKVWIESAETHVSCCVMVKNIERTLYFLPREMKIDLNTGKETGTPISMKDVYEEFDEKIATKYKIMKFKSKPVEKNYAFEIPDVPEKSEYLEVKYSAEMPQLPQDLKGETFSHVFGTNTSSLELFLMNRKIKGPCWLEVKSPQLLNQPVSWCKVEAMALKPDLVNVIKDVSPPPLVVMAFSMKTMQNAKNHQNEIIAMAALVHHSFALDKAAPKPPFQSHFCVVSKPKDCIFPYAFKEVIEKKNVKVEVAATERTLLGFFLAKVHKIDPDIIVGHNIYGFELEVLLQRINVCKAPHWSKIGRLKRSNMPKLGGRSGFGERNATCGRMICDVEISAKELIRCKSYHLSELVQQILKTERVVIPMENIQNMYSESSQLLYLLEHTWKDAKFILQIMCELNVLPLALQITNIAGNIMSRTLMGGRSERNEFLLLHAFYENNYIVPDKQIFRKPQQKLGDEDEEIDGDTNKYKKGRKKAAYAGGLVLDPKVGFYDKFILLLDFNSLYPSIIQEFNICFTTVQRVASEAQKVTEDGEQEQIPELPDPSLEMGILPREIRKLVERRKQVKQLMKQQDLNPDLILQYDIRQKALKLTANSMYGCLGFSYSRFYAKPLAALVTYKGREILMHTKEMVQKMNLEVIYGDTDSIMINTNSTNLEEVFKLGNKVKSEVNKLYKLLEIDIDGVFKSLLLLKKKKYAALVVEPTSDGNYVTKQELKGLDIVRRDWCDLAKDTGNFVIGQILSDQSRDTIVENIQKRLIEIGENVLNGSVPVSQFEINKALTKDPQDYPDKKSLPHVHVALWINSQGGRKVKAGDTVSYVICQDGSNLTASQRAYAPEQLQKQDNLTIDTQYYLAQQIHPVVARICEPIDGIDAVLIATWLGLDPTQFRVHHYHKDEENDALLGGPAQLTDEEKYRDCERFKCPCPTCGTENIYDNVFDGSGTDMEPSLYRCSNIDCKASPLTFTVQLSNKLIMDIRRFIKKYYDGWLICEEPTCRNRTRHLPLQFSRTGPLCPACMKATLQPEYSDKSLYTQLCFYRYIFDAECALEKLTTDHEKDKLKKQFFTPKVLQDYRKLKNTAEQFLSRSGYSEVNLSKLFAGCAVKS

SEQ ID NO: 192858 - DNA, 4389 bp, Artificial Sequence
  derived and/or modified sequence
atggcccccgtgcacggcgacgacagcctgagcgacagcggcagcttcgtgagcagcagagccagaagagagaagaagagcaagaagggcagacaggaggccctggagagactgaagaaggccaaggccggcgagaagtacaagtacgaggtggaggacttcaccggcgtgtacgaggaggtggacgaggagcagtacagcaagctggtgcaggccagacaggacgacgactggatcgtggacgacgacggcatcggctacgtggaggacggcagagagatcttcgacgacgacctggaggacgacgccctggacgccgacgagaagggcaaggacggcaaggccagaaacaaggacaagagaaacgtgaagaagctggccgtgaccaagcccaacaacatcaagagcatgttcatcgcctgcgccggcaagaagaccgccgacaaggccgtggacctgagcaaggacggcctgctgggcgacatcctgcaggacctgaacaccgagaccccccagatcacccccccccccgtgatgatcctgaagaagaagagaagcatcggcgccagccccaaccccttcagcgtgcacaccgccaccgccgtgcccagcggcaagatcgccagccccgtgagcagaaaggagccccccctgacccccgtgcccctgaagagagccgagttcgccggcgacgacgtgcaggtggagagcaccgaggaggagcaggagagcggcgccatggagttcgaggacggcgacttcgacgagcccatggaggtggaggaggtggacctggagcccatggccgccaaggcctgggacaaggagagcgagcccgccgaggaggtgaagcaggaggccgacagcggcaagggcaccgtgagctacctgggcagcttcctgcccgacgtgagctgctgggacatcgaccaggagggcgacagcagcttcagcgtgcaggaggtgcaggtggacagcagccacctgcccctggtgaagggcgccgacgaggagcaggtgttccacttctactggctggacgcctacgaggaccagtacaaccagcccggcgtggtgttcctgttcggcaaggtgtggatcgagagcgccgagacccacgtgagctgctgcgtgatggtgaagaacatcgagagaaccctgtacttcctgcccagagagatgaagatcgacctgaacaccggcaaggagaccggcacccccatcagcatgaaggacgtgtacgaggagttcgacgagaagatcgccaccaagtacaagatcatgaagttcaagagcaagcccgtggagaagaactacgccttcgagatccccgacgtgcccgagaagagcgagtacctggaggtgaagtacagcgccgagatgccccagctgccccaggacctgaagggcgagaccttcagccacgtgttcggcaccaacaccagcagcctggagctgttcctgatgaacagaaagatcaagggcccctgctggctggaggtgaagagcccccagctgctgaaccagcccgtgagctggtgcaaggtggaggccatggccctgaagcccgacctggtgaacgtgatcaaggacgtgagccccccccccctggtggtgatggccttcagcatgaagaccatgcagaacgccaagaaccaccagaacgagatcatcgccatggccgccctggtgcaccacagcttcgccctggacaaggccgcccccaagccccccttccagagccacttctgcgtggtgagcaagcccaaggactgcatcttcccctacgccttcaaggaggtgatcgagaagaagaacgtgaaggtggaggtggccgccaccgagagaaccctgctgggcttcttcctggccaaggtgcacaagatcgaccccgacatcatcgtgggccacaacatctacggcttcgagctggaggtgctgctgcagagaatcaacgtgtgcaaggccccccactggagcaagatcggcagactgaagagaagcaacatgcccaagctgggcggcagaagcggcttcggcgagagaaacgccacctgcggcagaatgatctgcgacgtggagatcagcgccaaggagctgatcagatgcaagagctaccacctgagcgagctggtgcagcagatcctgaagaccgagagagtggtgatccccatggagaacatccagaacatgtacagcgagagcagccagctgctgtacctgctggagcacacctggaaggacgccaagttcatcctgcagatcatgtgcgagctgaacgtgctgcccctggccctgcagatcaccaacatcgccggcaacatcatgagcagaaccctgatgggcggcagaagcgagagaaacgagttcctgctgctgcacgccttctacgagaacaactacatcgtgcccgacaagcagatcttcagaaagccccagcagaagctgggcgacgaggacgaggagatcgacggcgacaccaacaagtacaagaagggcagaaagaaggccgcctacgccggcggcctggtgctggaccccaaggtgggcttctacgacaagttcatcctgctgctggacttcaacagcctgtaccccagcatcatccaggagttcaacatctgcttcaccaccgtgcagagagtggccagcgaggcccagaaggtgaccgaggacggcgagcaggagcagatccccgagctgcccgaccccagcctggagatgggcatcctgcccagagagatcagaaagctggtggagagaagaaagcaggtgaagcagctgatgaagcagcaggacctgaaccccgacctgatcctgcagtacgacatcagacagaaggccctgaagctgaccgccaacagcatgtacggctgcctgggcttcagctacagcagattctacgccaagcccctggccgccctggtgacctacaagggcagagagatcctgatgcacaccaaggagatggtgcagaagatgaacctggaggtgatctacggcgacaccgacagcatcatgatcaacaccaacagcaccaacctggaggaggtgttcaagctgggcaacaaggtgaagagcgaggtgaacaagctgtacaagctgctggagatcgacatcgacggcgtgttcaagagcctgctgctgctgaagaagaagaagtacgccgccctggtggtggagcccaccagcgacggcaactacgtgaccaagcaggagctgaagggcctggacatcgtgagaagagactggtgcgacctggccaaggacaccggcaacttcgtgatcggccagatcctgagcgaccagagcagagacaccatcgtggagaacatccagaagagactgatcgagatcggcgagaacgtgctgaacggcagcgtgcccgtgagccagttcgagatcaacaaggccctgaccaaggacccccaggactaccccgacaagaagagcctgccccacgtgcacgtggccctgtggatcaacagccagggcggcagaaaggtgaaggccggcgacaccgtgagctacgtgatctgccaggacggcagcaacctgaccgccagccagagagcctacgcccccgagcagctgcagaagcaggacaacctgaccatcgacacccagtactacctggcccagcagatccaccccgtggtggccagaatctgcgagcccatcgacggcatcgacgccgtgctgatcgccacctggctgggcctggaccccacccagttcagagtgcaccactaccacaaggacgaggagaacgacgccctgctgggcggccccgcccagctgaccgacgaggagaagtacagagactgcgagagattcaagtgcccctgccccacctgcggcaccgagaacatctacgacaacgtgttcgacggcagcggcaccgacatggagcccagcctgtacagatgcagcaacatcgactgcaaggccagccccctgaccttcaccgtgcagctgagcaacaagctgatcatggacatcagaagattcatcaagaagtactacgacggctggctgatctgcgaggagcccacctgcagaaacagaaccagacacctgcccctgcagttcagcagaaccggccccctgtgccccgcctgcatgaaggccaccctgcagcccgagtacagcgacaagagcctgtacacccagctgtgcttctacagatacatcttcgacgccgagtgcgccctggagaagctgaccaccgaccacgagaaggacaagctgaagaagcagttcttcacccccaaggtgctgcaggactacagaaagctgaagaacaccgccgagcagttcctgagcagaagcggctacagcgaggtgaacctgagcaagctgttcgccggctgcgccgtgaagagctag

SEQ ID NO: 192859 - DNA, 4389 bp, Artificial Sequence
  derived and/or modified sequence
atggcccctgtccatggtgacgatagcctgagcgattctggatcatttgtgtcatcccgcgcaagacgggagaaaaagagtaaaaaaggacggcaagaagcgttagaaaggcttaaaaaagctaaagccggcgaaaagtacaagtatgaggtggaggacttcaccggtgtctacgaagaagttgacgaggagcaatattcaaagttagtccaagcccggcaggacgatgactggatcgtcgacgacgacggaattggctatgtggaggatgggagggagatctttgatgatgacctggaagatgacgcactggacgccgatgaaaaagggaaagacggaaaagcgcgaaacaaagacaaacgcaacgtgaaaaaattggctgtgacgaaaccgaacaatattaaaagcatgtttatcgcgtgcgctggaaaaaagacagcagataaggccgtggacttgagcaaagatggtctgctcggagacattttgcaggacctgaacacagaaacaccacagatcacaccaccaccagtgatgatcctgaagaagaagaggagcatcggtgctagtcccaaccctttttccgttcataccgccactgctgttcccagcggcaagatcgcctcaccggtctcacggaaggagccgccgttgactccagtcccattaaagcgagccgaatttgcaggcgatgatgttcaagtggaatctaccgaagaagaacaggaatctggggctatggagttcgaagacggagattttgacgaacccatggaagtggaggaggttgacctcgagcccatggctgctaaagcctgggataaggaatctgaacctgcggaagaagttaagcaggaggccgatagcgggaagggcactgtgagctatttaggctcctttctgccagacgtcagctgctgggacatagaccaggagggagactcctcattttctgtgcaagaggtgcaagtagatagctcccacctcccgctcgtcaaaggggcagacgaggagcaggttttccatttctattggctggatgcttatgaagaccagtacaatcagccgggagtggtgttcctcttcgggaaggtgtggatagagtcagccgaaacgcacgtctcatgctgcgtcatggtcaaaaacatagaaagaacactgtatttcttgccgcgcgaaatgaaaatcgacctcaacacaggaaaggagacaggcactcctatcagtatgaaggacgtatatgaagagtttgacgaaaagatcgctacaaagtacaaaatcatgaaatttaagagcaaaccagtggagaaaaactacgcatttgaaattcctgatgttccagaaaaaagcgagtatctggaggtgaagtatagcgccgaaatgcctcagttgcctcaggatcttaaaggcgagacattcagccacgtcttcggcactaatacctcttctctggagctcttcctgatgaaccgaaaaatcaaaggaccctgttggctggaggttaaatctcctcagctgttgaatcagcctgtctcatggtgtaaagtggaagctatggctctgaaacccgatttggtcaatgtgatcaaggacgtcagcccccccccactggtggtaatggccttttccatgaaaactatgcagaatgctaaaaatcaccaaaacgaaatcatcgcgatggctgcattggtccaccactcatttgccttagataaggcagcccctaagcctccatttcagagtcacttctgtgtcgttagcaaaccaaaggactgtatctttccttatgcctttaaagaagtaattgaaaaaaagaatgttaaggtcgaggtggccgccactgaacgcactttgctagggtttttcttggcgaaggtgcataagatcgatccagacattattgtgggacataatatctatggcttcgaacttgaagtgcttctgcaaagaatcaatgtatgcaaggccccccactggtcaaagatcggccggctgaagaggtcaaacatgcccaaactcggcggccgctcaggttttggagagaggaacgcaacttgtggccgaatgatatgtgacgttgaaattagcgccaaagaattgatccgttgcaagtcttaccacttgtcagaactagtccagcagatcctgaagactgagcgagtagtcatccctatggagaatatccagaacatgtatagtgagagtagccagctgctctacctgctggagcacacctggaaggatgctaaattcatactgcagatcatgtgcgagctcaatgtgttgcccctcgcactgcagatcacaaatatagcagggaacatcatgtctcgcacgctcatgggcggccggtccgagaggaacgaatttctgctactgcacgccttctatgaaaataattatatagttcccgacaaacaaattttccgcaagccacagcaaaagctgggcgatgaggatgaggagatcgatggggatacgaacaagtacaaaaagggcaggaagaaagcggcgtatgccggaggcctggtcttggacccgaaggtgggcttttacgacaagttcatcctgctcctggacttcaattccctgtacccctccattatccaggagttcaatatatgcttcacgacagtgcagcgtgtcgcatctgaggcacagaaagtgaccgaggatggggaacaagagcagatccccgaactgccggatccttccttggagatgggcatcctgccccgggagattaggaaactcgttgagagacgtaaacaggtgaagcagctgatgaagcaacaggatctgaaccccgacctgatccttcaatatgacattcgtcagaaagcccttaagcttacagcgaacagcatgtacgggtgcttgggatttagttattccaggttctatgccaagccgctcgcagccctggtgacctacaagggacgggaaatccttatgcacacgaaagagatggtgcaaaagatgaacctagaggtgatctacggtgacaccgactccatcatgataaatacgaactccacaaatctcgaggaggtcttcaaactagggaacaaggttaagtcggaagtgaataagctgtacaagctgctggagattgacattgacggggtgtttaagtccctactgttgctcaagaaaaagaagtacgcagcactggtggtggaaccaaccagcgacggcaattatgtcaccaagcaagaactgaagggtctggatattgtgcgtagggattggtgtgacctggccaaggacaccgggaacttcgtgattggtcagatcctgtcagatcagtcccgggataccattgtagagaatatccagaagcgcctgatcgagattggcgaaaacgtccttaacggatcagtgcctgtctcacagttcgagattaataaggccctgacaaaggatccacaggactaccccgataaaaagtctctccctcacgtccacgtcgccttatggattaatagtcagggtggacggaaagtcaaagccggagatactgtatcttatgtgatctgccaggacggctctaacctgaccgctagtcagcgggcatacgcccctgaacagttacagaagcaggataaccttactatcgatacccagtattacctggcccagcagatacatccagtggtcgcccggatttgtgagcccatcgatggcattgatgcagtcctgatagctacatggctggggcttgaccctacgcagttcagagtacatcattatcacaaagacgaggagaatgacgctttactgggcggtcccgctcagctgactgacgaagaaaaataccgtgattgtgaaagatttaagtgcccctgtccaacgtgcgggactgagaacatctatgataacgtcttcgatgggtcagggactgacatggaaccatctctgtacaggtgctcgaacatcgactgtaaggcttctcctctcacttttacagttcagctgtccaataagttaatcatggacatacggcgtttcattaaaaagtactacgatggttggctgatttgcgaggaacctacatgtcgcaatcgcacgagacatttgccacttcagttttctagaactggacctttgtgtccagcttgcatgaaggcgacactgcagcccgagtactccgacaagtctctgtacacacagctctgcttctacaggtatatcttcgatgcggaatgcgctttggagaagctgacgaccgaccacgagaaagacaaacttaaaaaacagtttttcacacccaaggtgcttcaagattacagaaaacttaaaaacacggcagagcagtttctgtctcgcagcggatactcagaagtcaacctttcaaaactgttcgccggatgcgcagtgaaaagttag

SEQ ID NO: 192860 - DNA, 4389 bp, Artificial Sequence
  derived and/or modified sequence
atggcccctgtgcatggagatgacagcctgagtgacagcggcagctttgtgagcagccgggcccggcgggagaagaagagcaagaagggccggcaggaggccctggagcggctgaagaaggccaaggccggggagaagtacaagtatgaggtggaggacttcaccggggtgtatgaggaggtggatgaggagcagtacagcaagctggtgcaggcccggcaggatgatgactggatcgtggatgatgatggcatcggctacgtggaggatggccgggagatctttgatgatgacctggaggatgatgccctggatgctgatgagaagggcaaggatggcaaggccaggaacaaggacaagagaaatgtgaagaagctggccgtgaccaagcccaacaacatcaagtccatgtttattgcctgtgccggcaagaagacagctgacaaggctgtggacctgagcaaggatggcctgctgggggacatcctgcaggacctgaacacagagaccccccagatcaccccacctcctgtgatgatcctgaagaagaagaggagcattggagccagccccaaccccttctctgtgcacacagccacagctgtgcccagcggcaagatcgccagccctgtgtccaggaaggagccccccctgacccctgtgcccctgaagagagctgagtttgctggagatgatgtgcaggtggagagcacagaggaggagcaggagagcggggccatggagtttgaagatggagactttgatgagcccatggaggtggaggaggtggacctggagcccatggccgccaaggcctgggacaaggagagcgagcctgctgaggaggtgaagcaggaggccgacagcgggaaaggaacagtgtcctacctgggcagcttcctgcctgatgtgtcctgctgggacatcgaccaggagggggacagcagcttctctgtgcaggaggtgcaggtggacagcagccacctgcccctggtgaagggagcagatgaggagcaggtgttccacttctactggctggatgcctatgaggaccagtacaaccagcccggggtggtgttcctgtttgggaaggtgtggattgaatctgctgagacccacgtgtcctgctgcgtgatggtgaagaacattgaaagaaccctgtacttcctgccccgggagatgaagattgacctgaacacaggcaaggagaccggcacccccatctccatgaaggatgtgtatgaggagtttgatgagaagatcgccaccaagtacaagatcatgaagttcaagagcaagcctgtggagaagaactatgcctttgagatcccagatgtgcctgagaagtctgagtacctggaggtgaagtacagcgctgagatgccccagctgccccaggacctgaagggggagaccttcagccacgtgtttggcaccaacaccagcagcctggagctgttcctgatgaacaggaagatcaagggcccctgctggctggaggtgaagagcccccagctgctgaaccagcctgtgtcctggtgcaaggtggaggccatggccctgaagccagacctggtgaatgtcatcaaggatgtgagccccccacccctggtggtgatggccttctccatgaagaccatgcagaatgccaagaaccaccagaatgagatcatcgccatggccgccctggtgcaccacagctttgccctggacaaggccgcccccaagccacccttccagagccacttctgtgtggtgtccaagcccaaggactgcatcttcccctatgccttcaaggaggtgattgagaagaagaatgtgaaggtggaggtggccgccacagagaggaccctgctgggcttcttcctggccaaggtgcacaagattgatcctgacatcatcgtgggccacaacatctacggctttgagctggaggtgctgctgcagaggatcaacgtgtgcaaggccccccactggagcaagattggccgcctgaagaggagcaacatgcccaagctgggcggccgcagcggctttggagagagaaatgccacctgtggccgcatgatctgtgatgtggagatcagcgccaaggagctgatccgctgcaagagctaccacctgtctgagctggtgcagcagatcctgaagacagagcgggtggtgatccccatggagaacatccagaacatgtacagcgagagcagccagctgctgtacctgctggagcacacctggaaggatgccaagttcatcctgcagatcatgtgtgagctgaatgtgctgcccctggccctgcagatcaccaacattgctggcaacatcatgagcaggaccctgatgggcggccgctcagaaagaaatgagttcctgctgctgcacgccttctatgagaacaactacatcgtgcctgacaagcagatcttcaggaagccccagcagaagctgggagatgaagatgaggagattgatggagacaccaacaagtacaagaagggcaggaagaaggccgcctatgctgggggcctggtgctggaccccaaggtgggcttctatgacaagttcatcctgctgctggacttcaacagcctgtaccccagcatcatccaggagttcaacatctgcttcaccaccgtgcagagggtggccagcgaggcccagaaggtgacagaagatggagagcaggagcagatccctgagctgcctgaccccagcctggagatgggcatcctgccccgggagatcaggaagctggtggagaggaggaagcaggtgaagcagctgatgaagcagcaggacctgaacccagacctgatcctgcagtatgacatccggcagaaggccctgaagctgacagccaacagcatgtatggctgcctgggcttctcctacagccgcttctacgccaagcccctggccgccctggtgacctacaagggccgggagatcctgatgcacaccaaggagatggtgcagaagatgaacctggaggtgatctacggggacacagacagcatcatgatcaacaccaacagcaccaacctggaggaggtgttcaagctgggcaacaaggtgaagtctgaggtgaacaagctgtacaagctgctggagattgatattgatggagtcttcaagagcctgctgctgctgaagaagaagaagtatgctgccctggtggtggagcccaccagtgatggcaactacgtgaccaagcaggagctgaagggcctggacatcgtgagaagagactggtgtgacctggccaaggacaccggcaacttcgtcatcggccagatcctgagtgaccagagccgggacaccatcgtggagaacatccagaagaggctgattgaaattggagaaaatgtgctgaatggatctgtgcctgtgtcccagtttgagatcaacaaggccctgaccaaggacccccaggactacccagacaagaagagcctgccccacgtgcacgtggccctgtggatcaacagccagggcggcaggaaggtgaaggccggggacacagtgtcctatgtgatctgccaggacggcagcaacctgacagccagccagagggcctatgcccctgagcagctgcagaagcaggacaacctgaccatcgacacccagtactacctggcccagcagatccaccctgtggtggcccgcatctgtgagcccattgatggcattgatgctgtgctgattgccacctggctgggcctggaccccacccagttccgggtgcaccactaccacaaggatgaggagaatgatgccctgctgggcggccctgcccagctgacagatgaggagaagtacagagactgtgagcgcttcaagtgcccctgccccacctgtggcacagagaacatctatgacaacgtgtttgatggcagcggcacagacatggagcccagcctgtaccgctgcagcaacatcgactgcaaggccagccccctgaccttcaccgtgcagctgagcaacaagctgatcatggacatccgccgcttcatcaagaagtactatgatggctggctgatctgtgaggagcccacctgcaggaacagaaccaggcacctgcccctgcagttcagcaggacaggccccctgtgcccagcctgcatgaaggccaccctgcagcctgagtacagcgacaagagcctgtacacccagctgtgcttctaccgctacatctttgatgctgaatgtgccctggagaagctgaccacagaccacgagaaggacaagctgaagaagcagttcttcacccccaaggtgctgcaggactacaggaagctgaagaacacagctgagcagttcctgagccgcagcggctacagcgaggtgaacctgagcaagctgtttgctggctgtgctgtgaagagctag

SEQ ID NO: 192861 - DNA, 5440 bp, Artificial Sequence
  derived and/or modified sequence
gggagattcgggaccatggcacctgtgcacggcgacgactctctgtcagattcagggagttttgtatcttctcgagcccggcgagaaaaaaaatcaaagaaggggcgccaagaagccctagaaagactgaaaaaggctaaagctggtgagaagtataaatatgaagtcgaggacttcacaggtgtttatgaagaagttgatgaagaacagtattcgaagctggttcaggcacgccaggatgatgactggattgtggatgatgatggtattggctatgtggaagatggccgagagatttttgatgatgaccttgaagatgatgcccttgatgctgatgagaaaggaaaagatggtaaagcacgcaataaagacaagaggaatgtaaagaagctcgcagtgacaaaaccgaacaacattaagtcaatgttcattgcttgtgctggaaagaaaactgcagataaagctgtagacttgtccaaggatggtctgctaggtgacattctacaggatcttaacactgagacacctcaaataactccaccacctgtaatgatactgaagaagaaaagatccattggagcttcaccgaatcctttctctgtgcacaccgccacggcagttccttcaggaaaaattgcttcccctgtctccagaaaggagcctccattaactcctgttcctcttaaacgtgctgaatttgctggcgatgatgtacaggtcgagagtacagaagaagagcaggagtcaggggcaatggagtttgaagatggtgactttgatgagcccatggaagttgaagaggtggacctggagcctatggctgccaaggcttgggacaaagagagtgagccagcagaggaagtgaaacaagaggcggattctgggaaagggaccgtgtcctacttaggaagttttctcccggatgtctcttgttgggacattgatcaagaaggtgatagcagtttctcagtgcaagaagttcaagtggattccagtcacctcccattggtaaaaggggcagatgaggaacaagtattccacttttattggttggatgcttatgaggatcagtacaaccaaccaggtgtggtatttctgtttgggaaagtttggattgaatcagccgagacccatgtgagctgttgtgtcatggtgaaaaatatcgagcgaacgctttacttccttccccgtgaaatgaaaattgatctaaatacggggaaagaaacaggaactccaatttcaatgaaggatgtttatgaggaatttgatgagaaaatagcaacaaaatataaaattatgaagttcaagtctaagccagtggaaaagaactatgcttttgagatacctgatgttccagaaaaatctgagtacttggaagttaaatactcggctgaaatgccacagcttcctcaagatttgaaaggagaaactttttctcatgtatttgggaccaacacatctagcctggaactgttcttgatgaacagaaagatcaaaggaccttgttggcttgaagtaaaaagtccacagctcttgaatcagccagtcagttggtgtaaagttgaggcaatggctttgaaaccagacctggtgaatgtaattaaggatgtcagtccaccaccgcttgtcgtgatggctttcagcatgaagacaatgcagaatgcaaagaaccatcaaaatgagattattgctatggcagctttggtccatcacagttttgcattggataaagcagccccaaagcctccctttcagtcacacttctgtgttgtgtctaaaccaaaggactgtatttttccatatgctttcaaagaagtcattgagaaaaagaatgtgaaggttgaggttgctgcaacagaaagaacactgctaggttttttccttgcaaaagttcacaaaattgatcctgatatcattgtgggtcataatatttatgggtttgaactggaagtactactgcagagaattaatgtgtgcaaagctcctcactggtccaagataggtcgactgaagcgatccaacatgccaaagcttgggggccggagtggatttggtgaaagaaatgctacctgtggtcgaatgatctgtgatgtggaaatttcagcaaaggaattgattcgttgtaaaagctaccatctgtctgaacttgttcagcagattctaaaaactgaaagggttgtaatcccaatggaaaatatacaaaatatgtacagtgaatcttctcaactgttatacctgttggaacacacctggaaagatgccaagttcattttgcagatcatgtgtgagctaaatgttcttccattagcattgcagatcactaacatcgctgggaacattatgtccaggacgctgatgggtggacgatccgagcgtaacgagttcttgttgcttcatgcattttacgaaaacaactatattgtgcctgacaagcagattttcagaaagcctcagcaaaaactgggagatgaagatgaagaaattgatggagataccaataaatacaagaaaggacgtaagaaagcagcttatgctggaggcttggttttggaccccaaagttggtttttatgataagttcattttgcttctggacttcaacagtctatatccttccatcattcaggaatttaacatttgttttacaacagtacaaagagttgcttcagaggcacagaaagttacagaggatggagaacaagaacagatccctgagttgccagatccaagcttagaaatgggcattttgcccagagagatccggaaactggtagaacggagaaaacaagtcaaacagctaatgaaacagcaagacttaaatccagaccttattcttcagtatgacattcgacagaaggctttgaagctcacagcgaacagtatgtatggttgcctgggattttcctatagcagattttacgccaaaccactggctgccttggtgacatacaaaggaagggagattttgatgcatacgaaagagatggtacaaaagatgaatcttgaagttatttatggagatacagattcaattatgataaacaccaatagcaccaatctggaagaagtatttaagttgggaaacaaggtaaaaagtgaagtgaataagttgtacaaactgcttgaaatagacattgatggggttttcaagtctctgctactgctgaaaaaaaagaagtacgctgctctggttgttgagccaacgtcggatgggaattatgtcaccaaacaggagctcaaaggattagatatagttagaagagattggtgtgatcttgctaaagacactggaaactttgtgattggccagattctttctgatcaaagccgggacactatagtggaaaacattcagaagaggctgatagaaattggagaaaatgtgctaaatggcagtgtcccagtgagccagtttgaaattaacaaggcattgacaaaggatccccaggattaccctgataaaaaaagcctacctcatgtacatgttgccctctggataaattctcaaggaggcagaaaggtgaaagctggagatactgtgtcatatgtcatctgtcaggatggatcaaacctcactgcaagtcagagggcctatgcgcctgagcagctgcagaaacaggataatctaaccattgacacccagtactacctggcccagcagatccacccagtcgtggctcggatctgtgaaccaatagacggaattgatgctgtcctcattgcaacgtggttgggacttgaccccacccaatttagagttcatcattatcataaagatgaagagaatgatgctctacttggtggcccagcacagctcactgatgaagagaaatacagggactgtgaaagattcaaatgtccatgccctacatgtggaactgagaatatttatgataatgtctttgatggttcgggaacagatatggagcccagcttgtatcgttgcagtaacatcgattgtaaggcttcacctctgacctttacagtacaactgagcaacaaattgatcatggacattagacgtttcattaaaaagtactatgatggctggttgatatgtgaagagccaacctgtcgcaatcgaactcgtcaccttccccttcaattctcccgaactgggcctctttgcccagcctgcatgaaagctacacttcaaccagagtattctgacaagtccctgtacacccagctgtgcttttaccggtacatttttgatgcggagtgtgcactggagaaacttactaccgatcatgagaaagataaattgaagaagcaattttttacccccaaagttctgcaggactacagaaaactcaagaacacagcagagcaattcttgtcccgaagtggctactccgaagtgaatctgagcaaactcttcgctggttgtgccgtgaaatcctaagggaatcccaggagtaaccaaggagggggtagttgaaaaatcccagcttcctctgtgcctccactctggccctaaatgctcctccagcatctgtttctcccttgggactgtgtctcatgtttgtgtgaatgtagaccaggaaagggggctgcaaaaatgttgagtctaatgttcgtaagcatcatagaaattcctgtcttcatattaagatgtactgctttaaaacacaactccagagcccctccccaagctcccctccccaagctcctgaagacccggtttctgagggagggaaattgctacttggattgagagtagctggaatgtaagtgaccccaggctttgcctcagggcctttagcctatgtcccccccacataaagagagcttctcagagcctgactgaagagctgacgttttgctttttcatatgccaattaaacccggtctaaatccaaatgcttctccagccatccaggagtggctgtccttttcagtcttgtcttttatataggtagctgagggggaagatttagaagccttgcactcactaaatagattaaacagagcaggcttgtttgttgaattgctccaaagtccaacagacacacactgagcaggtgttttacactcacattccctttttgccccttaaatagaaagtgcaggtaaaggtttatacaacaagaaagcacattgaaaataatttgatactctaacaatccattaacatgtgtaggggttacggtgaggatcactgtgttgtattcagaaaaacggggagagggatgcttaattggccctggcgcttgctatttttttctcatttcttcacaataggaccgtctttggcagcagcaaaatgtatttcagtatggcagtctttcctctcttacattattggtaagattatactaacaaaatgtttccccttgtacaattatgctgtgtttttaaaaaacattgacctgtgtgtttttataaaagaaaaagtatgttgtgccttcttcttaagaataaagttttctaaagggaaa

SEQ ID NO: 192862 - DNA, 4389 bp, Artificial Sequence
  derived and/or modified sequence
atggcccccgtgcacggcgacgacagcctgagcgacagcggcagcttcgtgtcaagtcgcgccagaagggaaaagaagtccaaaaaaggtaggcaagaggctctggagaggcttaagaaagccaaagctggcgaaaaatataaatatgaggtggaagactttactggtgtttacgaggaagtcgacgaggaacagtatagtaaacttgtgcaagccaggcaggatgatgattggatcgtggacgatgatgggattgggtacgtagaagacggcagagagatttttgacgatgacctagaggatgacgcactcgatgccgacgagaagggaaaagacggtaaggcaagaaataaggacaagcggaacgttaagaaacttgccgttacaaaacctaataatatcaagagcatgttcatcgcttgtgctgggaagaaaacggcggataaggccgttgatctgtccaaagatgggctcctgggcgatattctacaagacctcaacaccgagaccccccaaattactcctccgccagtgatgatactcaagaagaaaaggagcattggcgcctcacccaatcccttcagtgtgcacaccgctactgcagtgccctctgggaaaatcgcctccccagtaagcaggaaggaaccccctttaacgccggttccactcaagcgcgccgagttcgccggcgacgacgttcaagtggaatcgaccgaagaagagcaggaatcgggagccatggaattcgaggacggtgactttgacgaacccatggaagtcgaggaggtagacctggaaccgatggccgctaaagcctgggacaaagagtctgagcctgcagaagaagtgaagcaggaggcggattctggcaagggaactgtgagttatctcggctccttcctccccgatgtttcctgttgggatatcgatcaggagggcgactcctccttttcagtgcaggaagtacaggtcgattcgagccatctgcccctggtcaagggagctgacgaggaacaggtgtttcatttttactggctggatgcgtacgaggatcaatataatcagccaggagtcgttttcctcttcgggaaagtctggatagagtctgcagaaacacatgtgtcctgctgcgtcatggtcaaaaatatcgaacgcactctgtactttttaccgagggagatgaaaatcgacctgaacaccggaaaggagaccggcacccccatcagtatgaaggatgtctacgaagaattcgacgagaagatcgcaactaagtataaaatcatgaagttcaaaagcaagccagtggagaagaactacgccttcgaaatcccagatgtgcccgaaaagagcgaatatctagaagtgaaatacagcgcggaaatgccacaactgccacaggacctcaaaggcgagacttttagccatgtgttcgggacaaataccagctcgctcgaactgttcttgatgaatcggaaaatcaagggaccatgttggctggaggtgaaaagcccccagctactgaaccagcccgtgagctggtgtaaagtggaagccatggctctaaaaccagatctcgtgaacgtgataaaagacgtgtccccaccccctttggtagtgatggcattttctatgaaaacaatgcaaaatgctaagaaccaccagaatgagattattgccatggcagccctggtacatcacagctttgcgctagacaaagcagctcccaaaccaccctttcagagccatttttgtgtagttagtaaacccaaagattgtatctttccctatgcttttaaggaggtgatcgaaaagaagaacgtgaaagtcgaagtggccgccacggagcggacgctcctgggattcttcctcgccaaggtccacaagatcgatccagatatcatagtaggacataatatatacggctttgagctggaagtactgctccaacgcattaatgtgtgtaaagctcctcactggtcgaaaatcggtaggctaaaaagatctaacatgcctaaactcgggggcagatccggttttggcgaacgtaacgctacgtgtgggcgaatgatctgtgacgtcgaaattagcgctaaggagctcatccgatgcaaatcatatcaccttagcgagctcgtccagcagatcttaaaaacagaaagggttgtgattcctatggagaatattcagaacatgtattcagagtcttcccaactgctgtatctgctggagcacacttggaaggacgctaagttcatcctccagattatgtgcgagcttaacgtcctaccactggcactgcagattacaaatattgccggaaacatcatgagccggacacttatgggcggccgatccgagcggaatgaatttctcctgctgcacgccttttacgagaataattatattgtccctgacaagcaaattttccgtaagccccagcagaagctgggagacgaagacgaggaaatcgacggcgatacaaataaatataaaaaaggcagaaaaaaggctgcatatgcaggcggcttggtactggatcctaaagttggattctacgataaatttatcctcctgctcgacttcaacagcctatatccttccataatccaggagtttaatatctgcttcaccactgttcagcgggtggcatctgaggcacagaaggtgaccgaggatggtgaacaggagcagattcctgagctgcccgacccatcactcgaaatgggaatcctccctcgagagatcagaaaattggtggaacgcaggaaacaggttaagcagctgatgaagcagcaggatctgaaccccgacctgattctgcaatatgatataagacagaaggctctgaagttgaccgccaacagcatgtatggctgcctgggcttcagctattcgagattttatgcaaagcccctggcagcgctggttacatataagggacgggaaatactgatgcacactaaggaaatggtgcagaagatgaacttagaagtgatatatggagacactgactctatcatgatcaatacaaactccacaaatctggaagaagtattcaaattggggaacaaagtgaaaagtgaggtgaacaagctgtataaacttttagaaatcgacatcgacggcgttttcaaatctttacttttgcttaagaagaagaagtatgctgctctggtggttgaaccaactagcgatggaaattacgtaaccaaacaggaacttaagggtctcgatattgtcagacgggattggtgcgatttggcaaaagacactggcaattttgtcattggccagatactttcagaccaaagcagggacactattgtggaaaacattcaaaagaggttgatagagataggggaaaacgtgctcaatggttcagtgccagtgagccaatttgagattaataaagcactcacaaaggacccacaggactatcccgataaaaaaagcttgccccatgtccatgtcgcgctttggatcaatagccagggtgggcgaaaggtgaaagcgggtgacactgttagctacgttatttgtcaggacggctctaacctaactgcttcacaacgcgcttatgcccccgagcagctacaaaagcaggacaatctgaccattgatacacaatactacttagcccaacagatacaccccgtcgtcgctagaatctgtgagccgatcgatggaatcgacgccgtccttatcgcaacttggttgggcctggacccaacgcagttcagagtccatcactaccataaggacgaggaaaacgatgccctgctgggtggccccgcccagttgaccgatgaagagaagtacagagactgtgagcggttcaagtgtccttgtcccacttgcggtaccgagaatatttacgacaatgtattcgacggaagcggcacagacatggagccctctctgtatcgctgtagcaatatcgattgtaaggcctcgccactgaccttcaccgtgcagctgtcaaacaagctgatcatggacatcaggcggttcattaagaaatactatgatgggtggctcatatgtgaggaacccacgtgtcgcaacagaacacggcatctgccgctccagttcagtcgcactggccccctgtgcccagcctgtatgaaggctaccctccaacctgaatacagcgacaagtccctctatacccagctatgcttctacagatacatttttgacgccgagtgcgcactggaaaagctgaccaccgaccacgaaaaagataaactgaaaaaacagttcttcaccccaaaggtgctgcaggattaccggaaacttaagaacaccgcagaacagttcctcagccggagtgggtatagtgaggttaatttgtctaagctgtttgccgggtgcgccgtgaaaagttag

SEQ ID NO: 192863 - DNA, 4389 bp, Artificial Sequence
  derived and/or modified sequence
atggccccagtccacggcgacgactctctgagtgattcgggcagctttgtctcctccagagcgcgacgcgaaaaaaaatcaaagaagggtcggcaggaggcactggagcgattgaaaaaagcaaaggccggagagaaatataagtatgaggtggaagactttacaggagtatatgaggaggtcgatgaagagcagtactcaaaactggtgcaggcgaggcaagatgatgattggatagttgacgatgacggaatcggctatgttgaggacggaagggagattttcgatgatgaccttgaggatgacgccctagatgctgacgagaagggaaaggacggaaaggcaagaaacaaggacaaaagaaatgttaaaaaactggcggtcaccaaaccaaataacattaaatcaatgtttatagcttgtgcaggaaagaaaacggcagataaggctgttgacttgtcgaaagatggcctgctgggggacatattgcaggacctcaatactgagacccctcaaattacccctccgcctgtcatgattcttaagaagaaacggagcattggtgcatcgcccaatcccttttcagtacacaccgcgaccgccgttccgtccggaaaaattgcctcccctgtatctcggaaagaacctccacttacccccgtgccattaaaacgggctgagttcgccggagacgatgtccaagtagaaagcacagaggaggagcaggagagtggagctatggagtttgaagacggagactttgatgagcctatggaggtggaagaagtggatctggaacccatggccgcaaaggcctgggataaagagagtgagccagcggaagaagtcaagcaggaagctgacagcgggaaaggtaccgtgtcttacctgggttcctttctaccagacgtgtcgtgttgggatatagatcaggagggggatagctcattctctgtccaggaagtgcaggtggactcatcgcaccttcctctcgtcaaaggggcagacgaggagcaggtgttccacttctattggcttgacgcatatgaggatcaatataatcaacctggagtggtttttctcttcggaaaggtctggattgagtccgctgaaacccacgtttcatgctgcgttatggtcaaaaatatcgagcggactctctatttcctgcctcgagagatgaaaattgacctaaatactgggaaggagacggggactcctatctctatgaaggatgtgtatgaggagttcgacgaaaaaatcgcgacgaagtacaagattatgaaattcaagtcaaagccagttgagaaaaactatgcatttgagatccccgatgtacctgagaaatccgagtatctggaggtgaaatactcagctgagatgcctcagttgccccaagatctcaagggagaaaccttcagtcacgttttcgggaccaacacctcatctctggagctttttttaatgaataggaaaattaagggaccgtgttggctggaggttaagagcccccaactgcttaaccagccggtatcttggtgtaaagtggaagccatggcactgaaaccagacctggttaacgtcatcaaagatgttagtccacctccgctcgttgttatggcattttccatgaagaccatgcagaatgccaaaaaccatcagaacgagatcattgctatggcggctctggtgcaccactcttttgcacttgataaggcggcaccaaaacctccttttcagagccatttttgcgtagtaagtaagccgaaggactgcatcttcccatacgccttcaaagaggtgattgagaagaagaacgtcaaagttgaagtagctgctaccgagcggactcttttgggctttttcctggccaaagtccacaagatagaccctgacatcatcgttgggcataatatctacggattcgagttggaagtcctcttgcagagaattaatgtctgcaaagcccctcattggagcaagatcggcagactgaaaagatctaacatgccaaaactcggaggtcgctcaggctttggagaacggaatgctacatgtggaaggatgatttgcgatgtagaaatttcagccaaagaactcatacggtgcaaaagctatcatttgtccgaactggtccagcagatactcaagactgagcgcgtcgtgatcccaatggagaacatccagaatatgtactctgaaagtagccaattgctgtacctgctggaacacacttggaaagacgctaagttcattctccagattatgtgcgaattaaacgttctccccctcgcactccagattaccaacatcgccggtaatataatgtcacggacgttgatgggtggccgttcagaacgtaacgaatttctgctgttgcacgccttctatgagaataattatatcgtgcctgacaaacagatttttcgaaaacctcagcagaaactgggagacgaggatgaagaaatcgacggcgatacgaacaaatacaaaaagggtcggaaaaaggctgcttacgccggagggttagtcctcgaccctaaagtgggtttctacgacaaatttattttgctgctggattttaatagcctctaccctagcatcatccaggaattcaacatctgtttcacaactgttcaacgcgttgcaagtgaagcccagaaagtgacagaggacggggagcaggagcagatccctgagctgccagaccccagcctggaaatgggcatcctgcctagggagataagaaaattggtcgagcgcaggaagcaggtgaaacagctcatgaagcaacaagacttaaaccccgacctcatactgcaatatgacatcagacaaaaagccctgaagctgaccgccaattctatgtacggatgtctgggtttcagctatagccggttttatgcaaagcccctcgctgcgctggtgacatacaaaggtagagagatactgatgcacactaaggaaatggtgcagaaaatgaaccttgaagtaatctacggtgataccgattctattatgattaacacaaacagtacaaacctagaggaggttttcaagctgggaaataaagtgaagtccgaggttaataagttgtacaaactgttagagattgacatcgatggggtgttcaaaagcttattactgctaaagaagaaaaagtatgctgctctggtggttgagccaacttccgacggcaattacgttactaaacaggagcttaaaggcctggatattgtgaggcgtgattggtgcgacttggcgaaagacacaggcaacttcgtgatcgggcagatcctgtcagaccagagccgggataccattgttgaaaatatccaaaaacggctgatagagataggggagaacgttctgaacgggtctgtccccgtgtcccagtttgaaatcaataaggccctcacaaaggatccccaagactatccagacaaaaaatctctgccacatgtgcatgttgccctgtggataaattctcagggtggtcgcaaggtcaaggcgggtgatacagtcagttacgtcatttgtcaagatgggtcaaacctgacagcctctcagcgggcatatgccccagaacagctgcagaagcaggataatttgactatcgacactcagtattacttagcacagcagatccatccggtggtcgctagaatctgcgagcccatcgatggcatagatgcagtgttgatagcgacctggctcggactggatcctacacaattccgggtgcaccattatcacaaagatgaagagaacgacgcgctcttagggggtccagctcagctgaccgatgaggagaaatatagagattgtgagagattcaaatgtccatgtcccacatgcggaacggagaatatctacgataacgttttcgacgggtctgggacagatatggagccttctctgtacaggtgtagcaatatagactgtaaggcgagccccctgacttttacagtgcagctttcaaataagttgattatggacattaggagatttattaaaaaatactacgatggctggctgatctgcgaggagcctacctgcagaaaccggacgagacatctccctctgcagtttagtcgaaccggaccattgtgccccgcatgcatgaaggctacgttacagcctgaatacagcgataagtctctttatacccagttatgcttttatcggtatattttcgatgccgagtgtgccttggagaaactcacgactgatcacgagaaggacaaactgaaaaaacagttcttcactccaaaagtgcttcaagattacagaaaacttaaaaatacagcggaacagtttcttagtagatccgggtacagtgaggtgaatctgagtaaactttttgctgggtgcgccgtcaagtcatag

SEQ ID NO: 192864 - protein, 443 aa, Artificial Sequence
  derived and/or modified sequence
MLPCASCLPGSLLLWALLLLLLGSASPQDSEEPDSYTECTDGYEWDPDSQHCRDVNECLTIPEACKGEMKCINHYGGYLCLPRSAAVINDLHGEGPPPPVPPAQHPNPCPPGYEPDDQDSCVDVDECAQALHDCRPSQDCHNLPGSYQCTCPDGYRKIGPECVDIDECRYRYCQHRCVNLPGSFRCQCEPGFQLGPNNRSCVDVNECDMGAPCEQRCFNSYGTFLCRCHQGYELHRDGFSCSDIDECSYSSYLCQYRCINEPGRFSCHCPQGYQLLATRLCQDIDECESGAHQCSEAQTCVNFHGGYRCVDTNRCVEPYIQVSENRCLCPASNPLCREQPSSIVHRYMTITSERSVPADVFQIQATSVYPGAYNAFQIRAGNSQGDFYIRQINNVSAMLVLARPVTGPREYVLDLEMVTMNSLMSYRASSVLRLTVFVGAYTF

SEQ ID NO: 192865 - protein, 202 aa, Artificial Sequence
  derived and/or modified sequence
MLPCASCLPGSLLLWALLLLLLGSASPQDSEEPDSYTECTDGYEWDPDSQHCRDVNECLTIPEACKGEMKCINHYGGYLCLPRSAAVINDLHGEGPPPPVPPAQHPNPCPPGYEPDDQDSCVDVDECAQALHDCRPSQDCHNLPGSYQCTCPDGYRKIGPECVDIDECRYRYCQHRCVNLPGSFRCQCEPGFQLGPNNRSCV

SEQ ID NO: 192866 - protein, 183 aa, Artificial Sequence
  derived and/or modified sequence
MLPCASCLPGSLLLWALLLLLLGSASPQDSEEPDSYTECTDGYEWDPDSQHCRDVNECLTIPEACKGEMKCINHYGGYLCLPRSAAVINDLHGEGPPPPVPPAQHPNPCPPGYEPDDQDSCVDVDECAQALHDCRPSQDCHNLPGSYQCTCPDGYRKIGPECVDIDECRYRYCQHRCVNLPGS

SEQ ID NO: 192867 - DNA, 1332 bp, Artificial Sequence
  derived and/or modified sequence
atgttgccatgtgcctcttgcctcccaggcagtttactactgtgggcgctcttgctgctgttgctgggctctgccagccctcaggatagtgaggagccagattcttacaccgaatgcaccgatggctacgagtgggaccccgactctcagcattgcagggacgtgaacgagtgcttgactatccccgaggcatgtaagggcgaaatgaaatgcattaatcactacgggggctatctgtgcctgccacggtcagccgccgttatcaatgacctgcacggagaggggcccccgccccccgtgcccccggcccagcaccctaacccttgtccacccggctatgaacctgacgatcaggattcatgcgtggatgtggatgagtgcgcacaggctctgcatgactgccgaccaagtcaagactgccataacctccccggatcttaccagtgtacatgtcctgatggatatcggaaaataggaccggaatgtgtcgacatcgacgaatgccgataccggtactgccagcataggtgcgtcaacctgccaggctcttttcggtgtcagtgtgaaccagggttccagctcggacccaataacaggtcctgcgtcgacgtcaatgagtgtgatatgggcgccccatgtgaacaaagatgtttcaactcgtatggaacctttctctgtcgctgtcaccagggatacgagttacaccgggacgggtttagctgcagtgacattgatgagtgcagctactcatcctatctctgccaataccggtgtatcaatgaaccgggccgattcagctgccattgcccccagggctatcaattgcttgccactcggctatgccaggacattgacgagtgcgaatcaggagctcaccagtgcagcgaggctcaaacctgcgtgaacttccacggtggctacaggtgtgttgacacgaatagatgtgtggagccctacatccaagtttccgagaaccgatgcctgtgtcccgccagtaacccactatgtcgtgaacaacctagctctatcgtacatagatatatgactataaccagcgaacgtagcgtacccgctgacgtgtttcagattcaggccaccagtgtgtatcccggggcctataatgcgttccagatcagggccgggaactcccagggagatttttatatccgacagatcaacaacgtgtccgctatgttagtactcgctcgaccagttactggtccgagagaatatgtcctggacttagagatggtcaccatgaacagtcttatgtcctacagggcctcaagtgtcctacgactcaccgtttttgtcggcgcctacaccttctag

SEQ ID NO: 192868 - DNA, 609 bp, Artificial Sequence
  derived and/or modified sequence
atgctgccgtgcgcttcatgcctgcctgggtctctcctcctttgggctctgctgctgctcctcctaggtagtgcttctccccaagattctgaagaaccagactcttataccgaatgtacagacgggtatgaatgggatccagatagccagcattgtcgagacgtgaacgagtgcttgactattcctgaagcctgtaaaggtgagatgaagtgtatcaaccattacggtgggtatctctgtttgccgcgctctgctgcggtcataaacgatctgcacggcgagggccctccccccccagtgccgcctgcccagcatcccaatccctgtccacctggctacgaacccgacgatcaggatagttgcgtagacgtggatgaatgtgcacaggccctgcacgactgtcgtccttcacaggactgccataatctccccggtagctatcaatgtacatgcccagacgggtatcggaaaatcggccccgagtgtgtcgacatcgacgagtgcaggtacagatactgccaacatagatgtgttaatctccctggttccttccggtgtcaatgtgagcccggctttcagctcggacctaacaatagatcctgtgtgtag

SEQ ID NO: 192869 - DNA, 552 bp, Artificial Sequence
  derived and/or modified sequence
atgctgccgtgtgcctcgtgcctgccaggctccctcttactgtgggcccttttgttacttttgctgggctctgcaagcccccaagattctgaagaacctgacagctacacagagtgtaccgacgggtatgagtgggacccagactcacagcattgtagggatgtgaacgaatgcctgactatcccggaagcatgcaagggcgagatgaagtgtattaatcactatggaggttacttgtgtctcccgaggtcagccgctgtcatcaatgaccttcatggcgagggacctcctccaccagtacctccagctcaacatcctaatccgtgcccgccaggttatgagcccgacgaccaggacagctgtgttgatgttgacgaatgcgctcaggcgctgcacgactgcagaccaagccaggattgccataacctcccagggtcttatcaatgcacctgtcctgacggctacaggaaaattgggccggagtgcgtcgacatagacgagtgtcggtaccggtattgtcagcaccgctgtgtgaacctccctggaagttag

SEQ ID NO: 192870 - DNA, 1332 bp, Artificial Sequence
  derived and/or modified sequence
atgctgccctgtgctagctgcctgccaggatccctgctgctatgggctttgctgctgttgctcctagggtctgccagcccccaagacagcgaggaaccagattcctacactgaatgtacggacggctacgagtgggacccagattcccagcactgtcgggatgtaaacgagtgcctgacaattcccgaagcgtgtaaaggggagatgaagtgcattaatcattacggcggctacctgtgccttccacggtcagctgcagttattaatgaccttcacggagagggcccaccaccaccagtccccccagcgcagcacccaaatccctgcccccccggttatgaacccgacgaccaggacagttgtgtcgatgtagacgagtgtgcacaggccctgcacgattgccggccatcccaggactgccataacctgcctgggagttaccagtgtacttgtccggatggataccgcaagatcgggcctgaatgcgtggatattgacgaatgtagataccgttattgtcagcatcggtgtgttaatctgcccggatcctttcgctgccagtgcgaaccaggtttccagctcggacctaacaacagaagctgtgtagacgtgaacgaatgtgacatgggagctccatgtgaacagagatgtttcaattcctatgggacatttttgtgtcgatgccatcagggatacgaactgcacagagatgggttttcctgttcagacatcgacgagtgtagctactcgtcatacctttgtcagtataggtgcatcaacgagcccggtaggttttcttgccactgtccacagggctaccagctgctggcaacccgactgtgtcaggacatcgacgagtgtgagagcggagcacaccagtgtagcgaagctcagacctgcgtcaacttccacgggggttatagatgcgttgacacaaacaggtgcgttgaaccttatattcaggtgtcagaaaacagatgcctttgccccgctagcaatccactgtgtcgcgaacagcctagctccatcgtccaccgatacatgaccataacatccgagagatccgtgcccgccgacgtgttccagatccaggccacctccgtctatcccggggcctacaacgcattccaaatccgggcaggcaacagccaaggcgatttctatattcgccaaatcaacaacgtgtccgccatgttggtcctagctcgtcctgtgacaggaccacgggagtatgtcctcgatctggagatggttaccatgaattcgctgatgagctatagagcttcttccgtgctccgacttactgtctttgtgggggcttatacattttag

SEQ ID NO: 192871 - DNA, 1332 bp, Artificial Sequence
  derived and/or modified sequence
atgctgccctgtgccagctgcctgcccggcagcctgctgctgtgggccctgctgctgctgctgctgggcagcgccagcccccaggacagcgaggagccagacagctacacagagtgcacagatggctatgagtgggaccctgacagccagcactgcagagatgtgaatgaatgtctgaccatccctgaggcctgcaagggggagatgaagtgcatcaaccactatggaggctacctgtgcctgcccaggtctgctgctgtgatcaatgacctgcacggggagggccccccacctcctgtgcccccagcccagcaccccaacccctgccccccaggctatgagccagatgaccaggacagctgtgtggatgtggatgaatgtgcccaggccctgcatgactgccggcccagccaggactgccacaacctgcccggcagctaccagtgcacctgcccagatggctacaggaagattggaccagaatgtgtggacattgatgaatgtcgctaccgctactgccagcaccgctgtgtgaacctgcccggcagcttccgctgccagtgtgagcccggcttccagctgggccccaacaacagaagctgtgtggatgtgaatgaatgtgacatgggcgccccctgtgagcagcgctgcttcaacagctatggcaccttcctgtgccgctgccaccagggctatgagctgcacagagatggcttcagctgcagcgacattgatgagtgcagctacagcagctacctgtgccagtaccgctgcatcaatgagcccggccgcttcagctgccactgcccccagggctaccagctgctggccacccggctgtgccaggacattgatgaatgtgagagcggggcccaccagtgcagcgaggcccagacctgtgtgaacttccacggcggctaccgctgtgtggacaccaacagatgtgtggagccctacatccaggtgtctgagaaccgctgcctgtgcccagccagcaaccccctgtgccgggagcagcccagcagcatcgtgcaccgctacatgaccatcaccagcgagaggtctgtgcctgcagatgtgttccagatccaggccacctctgtgtacccaggggcctacaatgccttccagatccgggccggcaacagccagggcgacttctacatccggcagatcaacaacgtgtctgccatgctggtgctggcccggcctgtgacaggcccccgggagtatgtgctggacctggagatggtgaccatgaacagcctgatgagctaccgggccagctctgtgctgcggctgactgtgtttgtgggcgcctacaccttctag

SEQ ID NO: 192872 - DNA, 609 bp, Artificial Sequence
  derived and/or modified sequence
atgctgccctgtgccagctgcctgcccggcagcctgctgctgtgggccctgctgctgctgctgctgggcagcgccagcccccaggacagcgaggagccagacagctacacagagtgcacagatggctatgagtgggaccctgacagccagcactgcagagatgtgaatgaatgtctgaccatccctgaggcctgcaagggggagatgaagtgcatcaaccactatggaggctacctgtgcctgcccaggtctgctgctgtgatcaatgacctgcacggggagggccccccacctcctgtgcccccagcccagcaccccaacccctgccccccaggctatgagccagatgaccaggacagctgtgtggatgtggatgaatgtgcccaggccctgcatgactgccggcccagccaggactgccacaacctgcccggcagctaccagtgcacctgcccagatggctacaggaagattggaccagaatgtgtggacattgatgaatgtcgctaccgctactgccagcaccgctgtgtgaacctgcccggcagcttccgctgccagtgtgagcccggcttccagctgggccccaacaacagaagctgtgtgtag

SEQ ID NO: 192873 - DNA, 552 bp, Artificial Sequence
  derived and/or modified sequence
atgctgccctgtgccagctgcctgcccggcagcctgctgctgtgggccctgctgctgctgctgctgggcagcgccagcccccaggacagcgaggagccagacagctacacagagtgcacagatggctatgagtgggaccctgacagccagcactgcagagatgtgaatgaatgtctgaccatccctgaggcctgcaagggggagatgaagtgcatcaaccactatggaggctacctgtgcctgcccaggtctgctgctgtgatcaatgacctgcacggggagggccccccacctcctgtgcccccagcccagcaccccaacccctgccccccaggctatgagccagatgaccaggacagctgtgtggatgtggatgaatgtgcccaggccctgcatgactgccggcccagccaggactgccacaacctgcccggcagctaccagtgcacctgcccagatggctacaggaagattggaccagaatgtgtggacattgatgaatgtcgctaccgctactgccagcaccgctgtgtgaacctgcccggcagctag

SEQ ID NO: 192874 - DNA, 1332 bp, Artificial Sequence
  derived and/or modified sequence
atgctgccctgcgccagctgcctgcccggcagcctgctgctgtgggcgcttctgctgctgttgctgggctccgcatcgcctcaggattccgaagagccagatagctacactgagtgcaccgatggctacgagtgggatcccgatagccagcattgccgggatgtgaatgaatgccttactatacctgaagcctgtaagggagagatgaagtgtattaaccattacggcggatacctttgtttgccacgctctgcggctgttataaacgacttgcatggagaaggtcctccgcccccggttccgccagctcagcacccaaatccttgcccaccaggttacgagcccgacgaccaggattcctgcgtggacgtggacgagtgtgcgcaggctcttcacgactgccgcccaagccaagactgtcataatttaccaggaagctatcagtgtacttgccccgacggttatagaaaaatcggtcccgagtgcgtggatatagacgaatgtagatatcgttactgccagcaccggtgcgtcaacctgcctgggtccttcagatgccagtgtgagcccggctttcaacttggtcccaacaaccggagttgcgtcgacgttaatgagtgtgacatgggagccccttgcgaacaacgttgcttcaattcctatgggaccttcttgtgtagatgccaccagggatatgagctccatcgggatggattctcctgcagtgatatagacgagtgttcttactcctcctacctttgccaataccgttgcatcaacgagcctgggcggttcagctgccattgcccacaggggtatcaactgctagcaactcgactctgtcaggacattgatgagtgcgagtcaggggcccaccagtgttccgaggcccagacgtgtgtcaatttccacggcggataccggtgtgttgatactaatcggtgcgttgagccctatattcaagtctcagaaaataggtgtctctgtccggcgtccaatccactttgccgggagcagccatccagcatagtgcatagatatatgaccattacctctgagaggtctgtgcccgccgacgtcttccaaatccaggccacaagcgtgtatcccggagcgtataatgcattccagattcgcgccggtaactctcagggcgacttctacatcaggcagatcaataatgtcagcgccatgctggtcctggctcggcctgtgaccgggccacgggagtatgtgttggacctggaaatggtgacaatgaactctctgatgtcctaccgtgcctcatctgtcctccgactcacagtatttgtcggcgcttacaccttttag

SEQ ID NO: 192875 - DNA, 609 bp, Artificial Sequence
  derived and/or modified sequence
atgctgccctgcgccagctgcctgcccggcagcctgctgctgtgggccttgctactgttgctgcttggttcggcctcgcctcaggacagcgaagagcctgactcttacaccgaatgtaccgacggatatgagtgggatcccgattcccagcactgccgcgacgtgaacgaatgccttacgattcctgaagcctgcaaaggcgagatgaagtgcatcaaccattacggcggatacctgtgtcttccgcgctctgctgctgtaatcaatgatctgcacggggaaggccccccaccacccgtcccacctgctcaacaccctaatccttgtcctcccgggtatgagccagatgaccaggatagctgtgtggacgtggatgaatgcgcccaggcactgcatgattgccgcccatcccaggattgtcacaacctgccgggaagttaccaatgtacgtgtcccgatggatatcgaaagatcgggccagaatgcgtggacattgacgagtgcagataccgctattgtcagcatagatgcgttaacctgccaggatcttttaggtgccagtgcgagccaggtttccaattgggccccaacaatcgatcatgtgtctag

SEQ ID NO: 192876 - DNA, 552 bp, Artificial Sequence
  derived and/or modified sequence
atgctgccctgcgccagctgcctgcccggcagcctgctgctgtgggctcttctgctgcttctactcggcagcgcttctccacaagatagcgaggagcccgactcatacacagaatgcactgatgggtatgagtgggatccggatagccagcactgccgagatgtgaacgaatgccttaccattcccgaagcctgcaaaggagagatgaaatgtatcaaccattatggggggtacctttgtcttccccggagtgccgctgttattaatgacctacacggagagggccccccccctcccgtgccccctgctcagcatcccaatccctgccctcctgggtatgagccagatgatcaggactcgtgtgtggacgttgatgagtgtgcgcaggccctccatgattgtaggccaagtcaggactgtcacaacctgcctgggagttatcagtgtacctgccctgatggttatcgcaagattggtccagaatgtgtggacattgacgagtgccgataccggtattgccagcaccgctgcgtgaatctccccgggagttag

SEQ ID NO: 192877 - DNA, 1332 bp, Artificial Sequence
  derived and/or modified sequence
atgctgccctgcgccagctgcctgcccggcagcctgctgctgtgggcattgctcttattgctgctggggagtgccagtcctcaggacagtgaagagccagactcatacaccgagtgtaccgatggctatgagtgggaccctgacagccagcactgtagagacgtgaacgagtgtctgacaatccctgaggcatgtaaaggagagatgaagtgcatcaatcattacggggggtacctgtgcctgcctagatctgctgctgtgatcaatgacctacacggtgagggtcctcccccgcccgtccctcccgcacagcacccaaacccctgtccccccggttatgaaccggatgaccaggactcctgtgtggacgtggacgagtgcgctcaggccctgcatgattgtcgccctagtcaggactgtcataacctcccgggaagttaccagtgtacgtgtccggatggctatcgcaaaatcggcccagagtgcgtggatattgatgaatgtcgctaccggtattgccagcaccggtgtgtcaatctgcccgggagcttcagatgtcaatgcgagccaggtttccagcttggccccaacaatcgaagctgtgtggatgtgaatgaatgcgacatgggtgcgccatgtgaacaaagatgtttcaatagctacggaaccttcctgtgccgctgtcaccaggggtacgaattacatagagacggattctcctgttctgacatcgacgagtgttcatatagctcttatctctgccaataccgatgtatcaatgaacccgggaggttctcgtgccactgcccccagggctaccaactattagctacccggttgtgtcaggacattgacgagtgtgagagcggagctcatcagtgttccgaggcccagacatgtgtgaacttccatggggggtacaggtgtgttgataccaatcggtgcgtcgagccatatatccaagtgtcagagaaccgttgcctgtgtcccgctagcaaccctctgtgtagagaacagccttcgtctattgtgcaccggtacatgacaataaccagcgagaggtccgttcccgctgacgtgtttcagatccaggcaacaagtgtgtatcctggagcgtacaatgccttccaaatccgagctggtaattcccaaggcgatttttacattaggcagatcaacaatgtttctgccatgttagttctggccagacccgtaacaggacccagggaatacgtcctggatctggagatggtaaccatgaattcccttatgtcataccgggccagctccgtcctacgcttgactgtattcgtgggggcgtatactttctag

SEQ ID NO: 192878 - DNA, 1332 bp, Artificial Sequence
  derived and/or modified sequence
atgctgccatgcgccagctgtctgcccggatcactccttctttgggcgctgctcctgctgctccttgggtcagcatctccacaagactctgaagaaccagattcatacaccgagtgtacagacggctacgagtgggaccctgacagtcagcactgccgggacgtgaacgagtgtctgacgattcctgaagcatgcaaaggggagatgaaatgcattaatcattacgggggttatctgtgtctacccaggtctgccgcagtaattaatgacctccatggagaaggtccccctccccctgtgccacctgcgcagcacccaaacccttgtcctcctgggtacgaacccgacgatcaggatagttgtgtcgacgtggacgagtgcgcccaggcactccatgattgccgtccctcacaggactgtcacaacctgcctggctcataccagtgtacctgcccagacggctacagaaagatcggcccagagtgcgttgacatcgacgaatgccgctaccggtactgtcagcaccgttgtgtgaacctgcctggcagtttccgatgccaatgtgagccagggttccagctgggccctaataacaggtcctgcgtcgacgtcaatgagtgcgacatgggtgccccttgtgaacaacggtgctttaattcctacggtacctttctttgccgttgccatcagggatacgaattacatcgcgatggattttcatgttcggatatagatgaatgctcatacagtagctatctatgccagtatcgctgcatcaatgaaccaggcagattctcctgccattgtccgcaggggtatcagcttctcgctacccgactctgccaagacatcgatgagtgtgagtccggcgcacaccaatgttccgaggctcagacgtgcgtgaactttcatggaggttacaggtgtgtggacactaatagatgcgtcgagccatatattcaggtatctgagaataggtgcctgtgccctgcttccaatccactgtgccgggaacagccaagctccattgttcatcggtacatgaccatcacctctgagcgctctgtgcccgcagacgtcttccagatccaggccacaagtgtctacccaggagcttacaatgcctttcaaattcgcgctggcaactctcaaggagacttctatattagacagataaacaacgtatctgctatgctggttctggccaggcctgtgacaggacctagggaatacgtgttggacctagagatggtcacaatgaactcattaatgtcatatagagcaagttcagtgttgcggctgacagtgttcgtgggcgcatacacgttctag

SEQ ID NO: 192879 - DNA, 609 bp, Artificial Sequence
  derived and/or modified sequence
atgctcccatgtgccagctgtctgccaggctcgctcctgctttgggcacttctcctgttgcttctcggctccgcaagtcctcaggactcagaagagcctgactcatacactgagtgcaccgatggctatgagtgggaccctgactcccaacactgtagagatgtgaatgaatgtctgacgataccggaagcatgcaagggagagatgaagtgcattaaccactacgggggttacctatgcctcccgagatccgccgctgtgataaatgatctccatggcgaagggcctccgccacctgtccctcccgcacagcatccgaacccctgccctcccggatacgagcccgacgatcaggactcctgtgtcgacgtggacgagtgtgctcaggccctgcatgactgccgcccttcccaggattgccataacctcccgggaagttaccagtgcacttgtcccgacggatatagaaaaatcgggccagaatgcgtagacatagacgaatgcaggtaccgctactgccagcacaggtgtgttaacctgcctggttcttttagatgccagtgcgaaccaggctttcaactgggacctaataatcggagctgcgtctag

SEQ ID NO: 192880 - DNA, 552 bp, Artificial Sequence
  derived and/or modified sequence
atgttgccctgtgctagctgcctccccggatctctgcttctgtgggcactcctactactgctgcttggctcagcttcgcctcaggattcagaggagcctgactcctataccgagtgtactgacggttacgaatgggatccggactcacagcactgtcgcgacgtgaatgaatgcctgaccatccctgaggcttgcaaaggagaaatgaagtgcattaaccactacggcggttacctgtgtcttccccgttcggcagccgtgattaacgacctgcatggggagggtcccccaccccctgtgccaccagcccagcaccctaatccttgcccccctggatatgaaccagatgatcaggacagctgtgtggatgtggacgagtgtgcacaggccctacacgactgcagaccatcgcaagactgccacaacctgccaggttcctaccagtgtacctgtcccgatggttatagaaaaatcggaccagagtgcgtagatatcgacgagtgcaggtacagatactgtcagcacaggtgtgtcaacctccctgggagttag

SEQ ID NO: 192881 - DNA, 1332 bp, Artificial Sequence
  derived and/or modified sequence
atgctgccatgcgcaagttgtctgcccggatccttattgctctgggctctgctgctgcttctgcttggcagcgcttctccacaggacagtgaagagccagattcctacaccgaatgcacggacggatacgaatgggatccagatagccagcattgccgggacgttaacgaatgtttgaccatccccgaagcttgcaagggcgagatgaagtgcatcaatcactatggaggctatctctgtttaccaaggagcgcagccgtcattaacgatctacatggtgagggcccaccccctcctgttccacccgctcagcaccctaacccctgtccccctggatatgaacctgacgaccaggatagctgcgtcgatgtggacgagtgcgctcaagccttgcacgactgtaggccctcacaggactgccataaccttccaggctcttatcagtgcacctgcccagatggatacaggaagatcggacccgaatgcgtcgatatcgacgaatgccgctatagatattgtcaacaccggtgtgtgaacctgccaggatcgttccgctgccaatgcgaacctggatttcagctaggtcctaataacaggtcctgtgtggatgtcaatgaatgtgacatgggtgcgccatgtgaacagcggtgctttaactcatatggaaccttcctgtgcagatgtcaccaaggttatgaactgcatagagacgggttctcctgctctgacattgacgagtgcagctattcctcttacctgtgtcagtataggtgtatcaatgaacctggcaggttttcttgccattgcccacagggatatcaattgctggccactcggctgtgccaggacatcgacgagtgtgagtcaggtgcccaccagtgcagcgaggcccagacctgtgtcaacttccatggcggatacagatgcgtcgacaccaaccggtgtgtggagccttatatccaggtgtccgaaaataggtgcttatgtcccgcaagcaatccgctgtgcagagaacagccatcttccatcgtgcatcgttacatgaccatcaccagcgagagatccgtccctgcagatgttttccagatccaggcaacaagcgtctatccgggagcttacaacgcctttcaaattcgagcaggtaactcgcagggagatttttacattcgtcaaatcaataacgtgtcagccatgcttgtgctggcccgacctgtgaccggcccaagagagtacgtgctggatttagaaatggtgaccatgaacagtcttatgagctatcgcgcatcttccgtgctcaggctgacggtgtttgtcggggcatataccttttag

SEQ ID NO: 192882 - DNA, 1332 bp, Artificial Sequence
  derived and/or modified sequence
atgctcccctgcgcatcttgcctgcccggcagccttctgctttgggctctcttgctcctcttactaggttcagccagcccccaagactctgaggaaccagactcctacaccgagtgcactgatggatacgaatgggaccccgactcccagcactgccgagatgtaaacgaatgtctgactatcccggaggcctgcaagggagaaatgaaatgtatcaatcactatggaggatatctatgtctccctcgcagtgccgcagtgattaatgacctccatggcgagggccccccaccgcccgtaccccccgcacaacatccaaacccttgcccaccaggatatgaaccagatgaccaggactcctgtgttgatgtggacgagtgcgctcaggctctgcatgactgccggccctcacaggattgccacaacctcccgggaagttaccaatgcacatgcccggatggatataggaagataggtcccgaatgtgtggacatcgatgaatgtaggtaccggtattgtcagcataggtgtgtcaacctcccaggttctttccgctgtcaatgcgagcctgggtttcagctgggccctaacaaccgttcctgtgttgacgttaatgaatgcgatatgggggccccctgcgagcaacggtgtttcaactcatatggtactttcttgtgccgctgccaccaggggtacgagctgcatcgggacggcttctcttgttccgatatcgacgaatgctcttactctagttacctctgccagtacagatgcatcaatgagccgggaaggttttcatgtcactgccctcagggctaccagctgctcgctaccagattatgtcaggatatcgatgagtgtgaatcaggagcccaccagtgctcggaagctcagacctgtgtgaacttccacggaggatacagatgtgtggatactaaccgatgtgtggaaccctatattcaggtgtcagaaaaccgttgtttgtgccccgctagcaaccctttgtgtcgcgaacagccatcctccattgtgcataggtacatgacaattacatcggagcgctctgtacctgcagacgtgtttcagattcaagctacctccgtctatccaggggcgtacaatgcattccaaatcagggctggaaactctcagggggatttttacatcagacagattaataatgtgagcgctatgctggttctcgcccgtcctgtgactggccctagagagtacgttctagacctcgaaatggtgaccatgaactctctaatgagttatcgcgcctcttcggtcttaagactcaccgtgtttgtaggtgcctatacgttttag

SEQ ID NO: 192883 - DNA, 609 bp, Artificial Sequence
  derived and/or modified sequence
atgctcccctgcgcatcgtgtctaccagggagccttctcctctgggctctacttctcctgctgctcgggtccgcctcgccgcaagactccgaagagccagattcctatactgagtgcaccgacggttatgagtgggatcctgatagtcaacattgtagagatgtgaacgagtgtctgactattcctgaagcgtgtaaaggagagatgaaatgcatcaatcactacggcgggtacctctgtctgcccaggtcagccgccgtcataaatgacctgcacggggaagggccaccccccccagtgccacctgcacaacatcccaatccctgtcctcccggttacgagcccgacgatcaggactcatgcgtggacgttgacgaatgcgcccaggcacttcacgactgccgcccctcccaggattgccacaatcttccaggaagctatcagtgtacttgcccagacggataccgaaaaatcggcccagaatgtgtggatatagatgagtgtcgctacaggtattgtcaacaccggtgcgtgaatcttccgggaagctttcgctgccagtgtgagcccggattccagctagggccaaacaacagatcatgtgtgtag

SEQ ID NO: 192884 - DNA, 552 bp, Artificial Sequence
  derived and/or modified sequence
atgctaccttgtgcctcatgtctgcccggatctctcctgttatgggcgctcttgttgctcctgctgggctccgcttcaccccaggactccgaggaacccgacagttatacagaatgtactgacggctacgagtgggatcccgactctcagcactgccgcgatgtcaacgaatgtttaaccatccccgaagcatgtaaaggtgaaatgaagtgtatcaatcattacggaggctatttgtgccttcctcgcagcgccgctgtcattaacgacctgcatggggaagggccaccccctccggttcccccggcccaacatccaaatccgtgccctcctggatacgaaccagatgaccaggactcatgtgttgacgtggacgaatgcgcccaggcccttcacgattgtagaccttcacaggactgccacaatctgccaggatcctaccagtgtacatgtcctgacggatacagaaagatcggacccgaatgtgtggacatcgacgagtgtcgttatcggtactgtcagcacaggtgcgttaatcttcctggaagttag

SEQ ID NO: 192885 - DNA, 1332 bp, Artificial Sequence
  derived and/or modified sequence
atgctgccctgtgccagctgcctcccaggatctctactcttgtgggcactgcttcttctgctcctgggatcagcttcacctcaagattctgaggagccagacagctacactgaatgcactgatggctacgaatgggaccctgactcccagcactgcagagacgtgaacgagtgtctgacaataccggaggcatgtaaaggggagatgaagtgcatcaaccactatgggggctatctctgtcttccgcggagtgcagccgtgataaacgaccttcacggtgaaggacccccccctcctgttccaccagcgcagcacccaaacccatgtccgccagggtatgaacctgacgatcaggatagctgtgtggacgttgacgaatgtgcccaggctcttcacgactgccgaccttcccaggattgccacaacctccctggaagctatcaatgcacctgtcctgatgggtaccggaagatcggacctgagtgtgtggacatagatgaatgtagatacagatattgccagcaccggtgcgtcaacctacccggttcttttagatgccagtgtgagcccgggttccaactcggcccaaacaataggtcatgtgtggatgttaacgagtgtgacatgggtgctccttgcgaacaacgctgctttaattcctacggtacatttctgtgccgctgtcatcaaggatacgaacttcaccgggatggatttagctgttctgatatagacgagtgctcatattctagctatctctgtcagtatcgatgtatcaacgaacccggtcggtttagctgccattgtcctcagggctaccaactgctcgccacacggttgtgccaagacattgatgaatgcgaaagtggcgcgcatcagtgctcagaagcccagacatgtgtgaatttccacggaggctacagatgtgttgatactaatcggtgtgtggagccgtacatccaagtcagcgagaatcgatgcttatgccctgctagcaatcctctctgtcgcgagcaaccttcatctatcgtgcaccgttatatgacgataacttcggagaggagtgtgccagcagatgttttccagatccaggccacttccgtttacccaggggcgtacaacgcattccaaatacgggccggcaattctcagggggacttttatatcagacaaatcaacaatgtgtcagcgatgctggttctggcgcggcctgtcacgggaccccgcgagtacgttctggacctcgaaatggtgacaatgaacagccttatgtcctacagggcatcttccgttctgcgtcttacagtctttgtcggagcttacaccttctag

SEQ ID NO: 192886 - DNA, 1332 bp, Artificial Sequence
  derived and/or modified sequence
atgcttccctgtgcttcatgtctgcccggatcccttctcctctgggctcttcttctgctgctgttggggtccgcatctccccaagatagtgaagaacctgactcctataccgaatgtacagacggctacgaatgggaccctgattctcaacattgcagggacgtgaacgagtgtctgaccatccccgaagcttgcaagggtgaaatgaaatgcataaatcactacggtgggtatctttgtctcccacggtccgccgccgttatcaatgatctacacggtgaaggcccacctcccccggtcccaccagcccagcaccccaacccctgtcccccaggctatgaacctgatgaccaggactcgtgcgttgatgtggatgaatgcgcccaggccctccatgattgccgaccttcccaggattgtcacaacttgcctggctcttatcagtgtacatgtcccgacggctaccgaaaaatcggaccagagtgcgtggacatcgacgagtgtaggtatagatattgccagcaccggtgtgtcaatctcccaggatcgttccggtgtcaatgtgaaccagggttccagttaggccctaataatcggtcatgtgtagatgtgaatgaatgcgatatgggagctccctgcgagcaaaggtgcttcaacagctacggaacttttttgtgcaggtgccatcagggatacgagttacatcgggatggattcagttgtagcgacatcgatgagtgctcttatagctcttacctatgtcagtaccggtgtataaatgagcccggtcgtttctcctgccactgcccccaggggtaccagctgctggccacacggctgtgtcaagatatcgatgaatgtgagagcggcgcccaccagtgcagcgaggctcagacctgtgttaacttccatgggggataccgttgtgttgatactaataggtgtgttgagccgtatattcaggtgagcgagaatcgttgcctgtgtcctgcttccaatccactgtgccgcgaacagccttcaagcatcgtgcaccgctacatgactatcacctctgaacgatctgtgccagccgatgtcttccaaatccaggccacctctgtgtatcccggagcgtacaacgcatttcaaatacgagctgggaacagtcaaggcgacttctacataaggcaaatcaacaatgtctcggcaatgcttgtccttgctcgacctgtgactggcccgagagaatacgtgctcgatctggaaatggtgacaatgaactctctgatgagctatcgcgcttcaagtgtgctcaggctgaccgttttcgttggtgcatatacgttctag

SEQ ID NO: 192887 - DNA, 609 bp, Artificial Sequence
  derived and/or modified sequence
atgttgccctgcgcaagctgcctgccggggagcttactcctctgggccctactgctccttctgcttggttctgcctccccgcaggattctgaagagcccgattcttacaccgaatgtaccgatggctacgaatgggatccagatagccagcactgccgtgacgtcaatgaatgtctcacaatcccagaggcctgtaagggagagatgaagtgtatcaaccattacggcggctacctgtgtttgccaagaagtgccgcagtcatcaacgacctccacggagagggccctcctccacccgtcccacctgcacaacatcccaatccctgtcctcccggttacgagcccgacgatcaggactcatgcgtggacgttgacgaatgcgcccaggcacttcacgactgccgcccctcccaggattgccacaatcttccaggaagctatcagtgtacttgcccagacggataccgaaaaatcggcccagaatgtgtggatatagatgagtgtcgctacaggtattgtcaacaccggtgcgtgaatcttccgggaagctttcgctgccagtgtgagcccggattccagctagggccaaacaacagatcatgcgtgtag

SEQ ID NO: 192888 - DNA, 552 bp, Artificial Sequence
  derived and/or modified sequence
atgcttccctgtgctagctgcttacctgggtcactgttactgtgggcactcttacttcttcttctcggttcagcaagccctcaagacagtgaagaaccagacagctatactgaatgtaccgacggctatgagtgggatccggattcccagcactgcagagacgttaatgagtgtctaaccattcctgaagcgtgcaagggcgaaatgaagtgcattaatcattacggtggatatttatgtttgccaagatctgccgcagtcattaacgacctacatggagaaggcccgcccccgcctgtcccccctgcccagcatcccaacccctgtcctcctggctatgagcctgatgatcaggactcgtgcgtggatgtagatgagtgcgcacaagccttgcatgactgccgaccttctcaagactgtcacaatctcccaggctcgtatcagtgcacctgtccagatggctatagaaagatcggccctgaatgcgtcgacattgatgaatgtcgctacagatactgtcagcaccgctgcgtcaatcttccaggctcttag

SEQ ID NO: 192889 - DNA, 1332 bp, Artificial Sequence
  derived and/or modified sequence
atgctcccatgcgcatcatgcctacccggaagcctgctcctctgggcactcctgctacttctccttgggtcagcttcacctcaagacagtgaagagccagatagctacacagaatgtaccgatggctatgagtgggatcctgacagtcaacattgcagagacgtcaatgagtgcctcacgattcccgaagcctgcaagggcgaaatgaaatgtattaaccactacggagggtatctgtgcttgcctcgcagcgcagcggtaatcaatgacctgcacggggagggacctccgccaccggtgccacctgctcagcaccccaacccatgtccccccggctacgaaccagatgaccaggattcttgtgtggacgtggacgagtgtgcgcaggcgctgcatgactgtagaccttcacaggactgccacaacttgcctggttcatatcagtgcacttgccccgacggctatcggaagattggaccagaatgcgtagatatcgatgaatgcagataccgctactgtcagcatcggtgcgtcaatttacccggctcatttcgttgccagtgtgaaccgggattccaactgggacctaacaatcgctcctgtgtcgacgtgaacgagtgcgacatgggagcaccatgtgagcaacggtgcttcaacagctatggaacatttctgtgcaggtgtcaccaggggtacgagctacatcgggacggattctcttgcagcgacattgatgaatgcagctacagtagctatttatgccaataccggtgcataaacgaaccaggaagattttcatgccactgtcctcagggatatcaactgctcgccaccagactgtgtcaggatattgatgaatgtgaaagtggggcgcaccaatgtagcgaggctcagacctgtgtcaactttcacggagggtaccgttgtgttgatactaatcgctgcgtggagccctatatacaggtgagtgagaataggtgcctgtgtccagcttctaacccactctgccgcgaacaaccttcttcaattgtccatcggtacatgacaattacttcagagagatctgtccctgctgatgtatttcagatccaggctaccagtgtttacccaggtgcttataacgcctttcaaatccgtgctggtaattcccagggtgatttttacatacgacagatcaataatgtgagcgctatgctcgttctagcacggcctgttacaggaccacgagaatatgtcttagatttagagatggtgacaatgaactcgctgatgtcataccgagcctccagtgtcctgcggttgaccgtttttgtaggcgcctataccttttag

SEQ ID NO: 192890 - DNA, 1332 bp, Artificial Sequence
  derived and/or modified sequence
atgctgccctgcgccagctgcctgcccggcagcctgctgctgtgggccctgctgctgctgctgctgggcagcgccagcccccaggacagcgaggagcccgacagctacaccgagtgcaccgacggctacgagtgggaccccgacagccagcactgcagagacgtgaacgagtgcctgaccatccccgaggcctgcaagggcgagatgaagtgcatcaaccactacggcggctacctgtgcctgcccagaagcgccgccgtgatcaacgacctgcacggcgagggcccccccccccccgtgccccccgcccagcaccccaacccctgcccccccggctacgagcccgacgaccaggacagctgcgtggacgtggacgagtgcgcccaggccctgcacgactgcagacccagccaggactgccacaacctgcccggcagctaccagtgcacctgccccgacggctacagaaagatcggccccgagtgcgtggacatcgacgagtgcagatacagatactgccagcacagatgcgtgaacctgcccggcagcttcagatgccagtgcgagcccggcttccagctgggccccaacaacagaagctgcgtggacgtgaacgagtgcgacatgggcgccccctgcgagcagagatgcttcaacagctacggcaccttcctgtgcagatgccaccagggctacgagctgcacagagacggcttcagctgcagcgacatcgacgagtgcagctacagcagctacctgtgccagtacagatgcatcaacgagcccggcagattcagctgccactgcccccagggctaccagctgctggccaccagactgtgccaggacatcgacgagtgcgagagcggcgcccaccagtgcagcgaggcccagacctgcgtgaacttccacggcggctacagatgcgtggacaccaacagatgcgtggagccctacatccaggtgagcgagaacagatgcctgtgccccgccagcaaccccctgtgcagagagcagcccagcagcatcgtgcacagatacatgaccatcaccagcgagagaagcgtgcccgccgacgtgttccagatccaggccaccagcgtgtaccccggcgcctacaacgccttccagatcagagccggcaacagccagggcgacttctacatcagacagatcaacaacgtgagcgccatgctggtgctggccagacccgtgaccggccccagagagtacgtgctggacctggagatggtgaccatgaacagcctgatgagctacagagccagcagcgtgctgagactgaccgtgttcgtgggcgcctacaccttctag

SEQ ID NO: 192891 - DNA, 609 bp, Artificial Sequence
  derived and/or modified sequence
atgctgccctgcgccagctgcctgcccggcagcctgctgctgtgggccctgctgctgctgctgctgggcagcgccagcccccaggacagcgaggagcccgacagctacaccgagtgcaccgacggctacgagtgggaccccgacagccagcactgcagagacgtgaacgagtgcctgaccatccccgaggcctgcaagggcgagatgaagtgcatcaaccactacggcggctacctgtgcctgcccagaagcgccgccgtgatcaacgacctgcacggcgagggcccccccccccccgtgccccccgcccagcaccccaacccctgcccccccggctacgagcccgacgaccaggacagctgcgtggacgtggacgagtgcgcccaggccctgcacgactgcagacccagccaggactgccacaacctgcccggcagctaccagtgcacctgccccgacggctacagaaagatcggccccgagtgcgtggacatcgacgagtgcagatacagatactgccagcacagatgcgtgaacctgcccggcagcttcagatgccagtgcgagcccggcttccagctgggccccaacaacagaagctgcgtgtag

SEQ ID NO: 192892 - DNA, 552 bp, Artificial Sequence
  derived and/or modified sequence
atgctgccctgcgccagctgcctgcccggcagcctgctgctgtgggccctgctgctgctgctgctgggcagcgccagcccccaggacagcgaggagcccgacagctacaccgagtgcaccgacggctacgagtgggaccccgacagccagcactgcagagacgtgaacgagtgcctgaccatccccgaggcctgcaagggcgagatgaagtgcatcaaccactacggcggctacctgtgcctgcccagaagcgccgccgtgatcaacgacctgcacggcgagggcccccccccccccgtgccccccgcccagcaccccaacccctgcccccccggctacgagcccgacgaccaggacagctgcgtggacgtggacgagtgcgcccaggccctgcacgactgcagacccagccaggactgccacaacctgcccggcagctaccagtgcacctgccccgacggctacagaaagatcggccccgagtgcgtggacatcgacgagtgcagatacagatactgccagcacagatgcgtgaacctgcccggcagctag

SEQ ID NO: 192893 - DNA, 2034 bp, Artificial Sequence
  derived and/or modified sequence
gcggggggtcggggtccctccccctggcgctggctcaggaatccgccgaagggcgggcggaggcgccggggtgggccgcgccgcggcaggcgggcgggcggggggcgcttcctggggccgcgcgtccagggagctgtgccgtccgcccgtccgtctgcccgcaggcattgcccgagccagccgagccgccagagccgcgggccgcgggggtgtcgcgggcccaaccccaggatgctcccctgcgcctcctgcctacccgggtctctactgctctgggcgctgctactgttgctcttgggatcagcttctcctcaggattctgaagagcccgacagctacacggaatgcacagatggctatgagtgggacccagacagccagcactgccgggatgtcaacgagtgtctgaccatccctgaggcctgcaagggggaaatgaagtgcatcaaccactacgggggctacttgtgcctgccccgctccgctgccgtcatcaacgacctacacggcgagggacccccgccaccagtgcctcccgctcaacaccccaacccctgcccaccaggctatgagcccgacgatcaggacagctgtgtggatgtggacgagtgtgcccaggccctgcacgactgtcgccccagccaggactgccataacttgcctggctcctatcagtgcacctgccctgatggttaccgcaagatcgggcccgagtgtgtggacatagacgagtgccgctaccgctactgccagcaccgctgcgtgaacctgcctggctccttccgctgccagtgcgagccgggcttccagctggggcctaacaaccgctcctgtgttgatgtgaacgagtgtgacatgggggccccatgcgagcagcgctgcttcaactcctatgggaccttcctgtgtcgctgccaccagggctatgagctgcatcgggatggcttctcctgcagtgatattgatgagtgtagctactccagctacctctgtcagtaccgctgcatcaacgagccaggccgtttctcctgccactgcccacagggttaccagctgctggccacacgcctctgccaagacattgatgagtgtgagtctggtgcgcaccagtgctccgaggcccaaacctgtgtcaacttccatgggggctaccgctgcgtggacaccaaccgctgcgtggagccctacatccaggtctctgagaaccgctgtctctgcccggcctccaaccctctatgtcgagagcagccttcatccattgtgcaccgctacatgaccatcacctcggagcggagcgtgcccgctgacgtgttccagatccaggcgacctccgtctaccccggtgcctacaatgcctttcagatccgtgctggaaactcgcagggggacttttacattaggcaaatcaacaacgtcagcgccatgctggtcctcgcccggccggtgacgggcccccgggagtacgtgctggacctggagatggtcaccatgaattccctcatgagctaccgggccagctctgtactgaggctcaccgtctttgtaggggcctacaccttctgaggagcaggagggagccaccctccctgcagctaccctagctgaggagcctgttgtgaggggcagaatgagaaaggcaataaagggagaaagaaagtcctggtggctgaggtgggcgggtcacactgcaggaagcctcaggctggggcagggtggcacttgggggggcaggccaagttcacctaaatgggggtctctatatgttcaggcccaggggcccccattgacaggagctgggagctctgcaccacgagcttcagtcaccccgagaggagaggaggtaacgaggagggcggactccaggccccggcccagagatttggacttggctggcttgcaggggtcctaagaaactccactctggacagcgccaggaggccctgggttccattcctaactctgcctcaaactgtacatttggataagccctagtagttccctgggcctgtttttctataaaacgaggcaactgga

SEQ ID NO: 192894 - DNA, 907 bp, Artificial Sequence
  derived and/or modified sequence
gggcgtgggccggagtctcggccgagtccgcggcagcgtagcgcccacagaggcccgcgctcctcggccttcgccgcaggggcgcggggcgggggcggggtggccggggcgggtgggcctgggacccgggcctgggacctgggcctgtgaggagtcggcccccagccctgggaggccccgaggcccaagcacggtcctgagcgggcagtggcgggggctgggctcgggctcccggtacagggagttgaggtgccgcgggcagaggcccctgacccgtgtccaccatctcgcagccccaggatgctcccctgcgcctcctgcctacccgggtctctactgctctgggcgctgctactgttgctcttgggatcagcttctcctcaggattctgaagagcccgacagctacacggaatgcacagatggctatgagtgggacccagacagccagcactgccgggatgtcaacgagtgtctgaccatccctgaggcctgcaagggggaaatgaagtgcatcaaccactacgggggctacttgtgcctgccccgctccgctgccgtcatcaacgacctacacggcgagggacccccgccaccagtgcctcccgctcaacaccccaacccctgcccaccaggctatgagcccgacgatcaggacagctgtgtggatgtggacgagtgtgcccaggccctgcacgactgtcgccccagccaggactgccataacttgcctggctcctatcagtgcacctgccctgatggttaccgcaagatcgggcccgagtgtgtggacatagacgagtgccgctaccgctactgccagcaccgctgcgtgaacctgcctggctccttccgctgccagtgcgagccgggcttccagctggggcctaacaaccgctcctgtgttg

SEQ ID NO: 192895 - DNA, 614 bp, Artificial Sequence
  derived and/or modified sequence
gacgctggtgcgaggaggtcgaggaggcgccttggcacccgactctggcatcccgcacccccaggatgctcccctgcgcctcctgcctacccgggtctctactgctctgggcgctgctactgttgctcttgggatcagcttctcctcaggattctgaagagcccgacagctacacggaatgcacagatggctatgagtgggacccagacagccagcactgccgggatgtcaacgagtgtctgaccatccctgaggcctgcaagggggaaatgaagtgcatcaaccactacgggggctacttgtgcctgccccgctccgctgccgtcatcaacgacctacacggcgagggacccccgccaccagtgcctcccgctcaacaccccaacccctgcccaccaggctatgagcccgacgatcaggacagctgtgtggatgtggacgagtgtgcccaggccctgcacgactgtcgccccagccaggactgccataacttgcctggctcctatcagtgcacctgccctgatggttaccgcaagatcgggcccgagtgtgtggacatagacgagtgccgctaccgctactgccagcaccgctgcgtgaacctgcctggctcc

SEQ ID NO: 192896 - DNA, 1813 bp, Artificial Sequence
  derived and/or modified sequence
gggcggggggcgcttcctggggccgcgcgtccagggagctgtgccgtccgcccgtccgtctgcccgcaggcattgcccgagccagccgagccgccagagccgcgggccgcgggggtgtcgcgggcccaaccccaggatgctcccctgcgcctcctgcctacccgggtctctactgctctgggcgctgctactgttgctcttgggatcagcttctcctcaggattctgaagagcccgacagctacacggaatgcacagatggctatgagtgggacccagacagccagcactgccgggatgtcaacgagtgtctgaccatccctgaggcctgcaagggggaaatgaagtgcatcaaccactacgggggctacttgtgcctgccccgctccgctgccgtcatcaacgacctacacggcgagggacccccgccaccagtgcctcccgctcaacaccccaacccctgcccaccaggctatgagcccgacgatcaggacagctgtgtggatgtggacgagtgtgcccaggccctgcacgactgtcgccccagccaggactgccataacttgcctggctcctatcagtgcacctgccctgatggttaccgcaagatcgggcccgagtgtgtggacatagacgagtgccgctaccgctactgccagcaccgctgcgtgaacctgcctggctccttccgctgccagtgcgagccgggcttccagctggggcctaacaaccgctcctgtgttgatgtgaacgagtgtgacatgggggccccatgcgagcagcgctgcttcaactcctatgggaccttcctgtgtcgctgccaccagggctatgagctgcatcgggatggcttctcctgcagtgatattgatgagtgtagctactccagctacctctgtcagtaccgctgcatcaacgagccaggccgtttctcctgccactgcccacagggttaccagctgctggccacacgcctctgccaagacattgatgagtgtgagtctggtgcgcaccagtgctccgaggcccaaacctgtgtcaacttccatgggggctaccgctgcgtggacaccaaccgctgcgtggagccctacatccaggtctctgagaaccgctgtctctgcccggcctccaaccctctatgtcgagagcagccttcatccattgtgcaccgctacatgaccatcacctcggagcggagcgtgcccgctgacgtgttccagatccaggcgacctccgtctaccccggtgcctacaatgcctttcagatccgtgctggaaactcgcagggggacttttacattaggcaaatcaacaacgtcagcgccatgctggtcctcgcccggccggtgacgggcccccgggagtacgtgctggacctggagatggtcaccatgaattccctcatgagctaccgggccagctctgtactgaggctcaccgtctttgtaggggcctacaccttctgaggagcaggagggagccaccctccctgcagctaccctagctgaggagcctgttgtgaggggcagaatgagaaaggcccaggggcccccattgacaggagctgggagctctgcaccacgagcttcagtcaccccgagaggagaggaggtaacgaggagggcggactccaggccccggcccagagatttggacttggctggcttgcaggggtcctaagaaactccactctggacagcgccaggaggccctgggttccattcctaactctgcctcaaactgtacatttggataagccctagtagttccctgggcctgtttttctataaaacgaggcaactggactgtta

SEQ ID NO: 192897 - protein, 618 aa, Artificial Sequence
  derived and/or modified sequence
MVSPRMSGLLSQTVILALIFLPQTRPAGVFELQIHSFGPGPGPGAPRSPCSARLPCRLFFRVCLKPGLSEEAAESPCALGAALSARGPVYTEQPGAPAPDLPLPDGLLQVPFRDAWPGTFSFIIETWREELGDQIGGPAWSLLARVAGRRRLAAGGPWARDIQRAGAWELRFSYRARCEPPAVGTACTRLCRPRSAPSRCGPGLRPCAPLEDECEAPLVCRAGCSPEHGFCEQPGECRCLEGWTGPLCTVPVSTSSCLSPRGPSSATTGCLVPGPGPCDGNPCANGGSCSETPRSFECTCPRGFYGLRCEVSGVTCADGPCFNGGLCVGGADPDSAYICHCPPGFQGSNCEKRVDRCSLQPCRNGGLCLDLGHALRCRCRAGFAGPRCEHDLDDCAGRACANGGTCVEGGGAHRCSCALGFGGRDCRERADPCAARPCAHGGRCYAHFSGLVCACAPGYMGARCEFPVHPDGASALPAAPPGLRPGDPQRYLLPPALGLLVAAGVAGAALLLVHVRRRGHSQDAGSRLLAGTPEPSVHALPDALNNLRTQEGSGDGPSSSVDWNRPEDVDPQGIYVISAPSIYAREVATPLFPPLHTGRAGQRQHLLFPYPSSILSVK

SEQ ID NO: 192898 - protein, 587 aa, Artificial Sequence
  derived and/or modified sequence
MVSPRMSGLLSQTVILALIFLPQTRPAGVFELQIHSFGPGPGPGAPRSPCSARLPCRLFFRVCLKPGLSEEAAESPCALGAALSARGPVYTEQPGAPAPDLPLPDGLLQVPFRDAWPGTFSFIIETWREELGDQIGGPAWSLLARVAGRRRLAAGGPWARDIQRAGAWELRFSYRARCEPPAVGTACTRLCRPRSAPSRCGPGLRPCAPLEDECEAPLVCRAGCSPEHGFCEQPGECRCLEGWTGPLCTVPVSTSSCLSPRGPSSATTGCLVPGPGPCDGNPCANGGSCSETPRSFECTCPRGFYGLRCEVSGVTCADGPCFNGGLCVGGADPDSAYICHCPPGFQGSNCEKRVDRCSLQPCRNGGLCLDLGHALRCRCRAGFAGPRCEHDLDDCAGRACANGGTCVEGGGAHRCSCALGFGGRDCRERADPCAARPCAHGGRCYAHFSGLVCACAPGYMGARCEFPVHPDGASALPAAPPGLRPGDPQRYLLPPALGLLVAAGVAGAALLLVHVRRRGHSQDAGSRLLAGTPEPSVHALPDALNNLRTQEGSGDGPSSSVDWNRPEDVDPQGIYVISAPSIYAREA

SEQ ID NO: 192899 - DNA, 1857 bp, Artificial Sequence
  derived and/or modified sequence
atggtgagccccagaatgagcggcctgctgagccagaccgtgatcctggccctgatcttcctgccccagaccagacccgccggcgtgttcgagctgcagatccacagcttcggccccggccccggccccggcgcccccagaagcccctgcagcgccagactgccctgcagactgttcttcagagtgtgcctgaagcccggcctgagcgaggaggccgccgagagcccctgcgccctgggcgccgccctgagcgccagaggccccgtgtacaccgagcagcccggcgcccccgcccccgacctgcccctgcccgacggcctgctgcaggtgcccttcagagacgcctggcccggcaccttcagcttcatcatcgagacctggagagaggagctgggcgaccagatcggcggccccgcctggagcctgctggccagagtggccggcagaagaagactggccgccggcggcccctgggccagagacatccagagagccggcgcctgggagctgagattcagctacagagccagatgcgagccccccgccgtgggcaccgcctgcaccagactgtgcagacccagaagcgcccccagcagatgcggccccggcctgagaccctgcgcccccctggaggacgagtgcgaggcccccctggtgtgcagagccggctgcagccccgagcacggcttctgcgagcagcccggcgagtgcagatgcctggagggctggaccggccccctgtgcaccgtgcccgtgagcaccagcagctgcctgagccccagaggccccagcagcgccaccaccggctgcctggtgcccggccccggcccctgcgacggcaacccctgcgccaacggcggcagctgcagcgagacccccagaagcttcgagtgcacctgccccagaggcttctacggcctgagatgcgaggtgagcggcgtgacctgcgccgacggcccctgcttcaacggcggcctgtgcgtgggcggcgccgaccccgacagcgcctacatctgccactgcccccccggcttccagggcagcaactgcgagaagagagtggacagatgcagcctgcagccctgcagaaacggcggcctgtgcctggacctgggccacgccctgagatgcagatgcagagccggcttcgccggccccagatgcgagcacgacctggacgactgcgccggcagagcctgcgccaacggcggcacctgcgtggagggcggcggcgcccacagatgcagctgcgccctgggcttcggcggcagagactgcagagagagagccgacccctgcgccgccagaccctgcgcccacggcggcagatgctacgcccacttcagcggcctggtgtgcgcctgcgcccccggctacatgggcgccagatgcgagttccccgtgcaccccgacggcgccagcgccctgcccgccgccccccccggcctgagacccggcgacccccagagatacctgctgccccccgccctgggcctgctggtggccgccggcgtggccggcgccgccctgctgctggtgcacgtgagaagaagaggccacagccaggacgccggcagcagactgctggccggcacccccgagcccagcgtgcacgccctgcccgacgccctgaacaacctgagaacccaggagggcagcggcgacggccccagcagcagcgtggactggaacagacccgaggacgtggacccccagggcatctacgtgatcagcgcccccagcatctacgccagagaggtggccacccccctgttcccccccctgcacaccggcagagccggccagagacagcacctgctgttcccctaccccagcagcatcctgagcgtgaagtag

SEQ ID NO: 192900 - DNA, 1857 bp, Artificial Sequence
  derived and/or modified sequence
atggttagccctaggatgtccggtttgctgagtcaaactgtaattttggctctcatcttcctgcctcagactcggcctgccggcgtgtttgaattgcaaattcatagctttggccccggacccggacccggcgcaccacggtccccatgctctgctcggctgccctgtagattgttcttcagggtgtgcctcaaacccgggttgagcgaggaagctgcagagagtccgtgtgcgctcggcgcagcactgagcgctcggggccctgtgtacactgaacagcctggagctccagccccagacttgccattgcccgacggtttgttgcaggttccctttcgcgatgcgtggccaggcactttttcttttatcattgaaacctggcgcgaggagcttggggaccagatcggcgggcccgcttggtcacttctggcccgggtggcaggcagaaggcgcttggcagctggtgggccttgggctcgcgacatccagcgagcaggggcatgggagctaagattttcctaccgcgcacggtgcgaacctccagccgtgggaactgcctgcactcgattatgtcggccccgaagcgccccctccaggtgtggccctggtcttcgcccatgtgccccactggaagatgagtgtgaggcccccctggtttgtcgtgccggctgctctcctgagcacggattttgcgagcaacctggcgagtgccggtgcctcgagggctggacagggcctctctgtacagtgcccgtaagcaccagctcatgcctctctccccgaggaccatcctcagcaactaccggctgcctcgttcctggccctgggccctgcgatggaaacccctgcgccaacggcggaagttgctctgagacaccccgcagcttcgaatgcacgtgccctaggggattctacggactcagatgcgaggttagtggagtaacatgcgctgacggcccctgtttcaacggcggattatgcgtcgggggggccgacccggatagcgcctacatctgtcactgtcctccaggctttcagggatcaaattgcgagaagagagttgatcgctgctcgcttcagccttgccggaatggaggattgtgtcttgatctgggccacgccctcaggtgcagatgtcgggccggattcgccggtccccggtgcgagcatgacctggacgactgcgccgggcgagcatgtgcgaatggaggcacctgtgtggagggcggcggtgcgcaccgctgttcgtgcgccctgggctttggtggccgggactgtagggagcgcgcagatccatgtgccgctcggccctgtgcgcatggcgggcggtgctacgcccacttcagcggcctggtatgcgcatgtgcccccggatacatgggagctcggtgtgagtttccagtccaccctgacggagcatccgcgctgccagctgctcccccaggactacgtccaggcgacccacagaggtacctgctgccacctgctcttggactgctggtggctgctggcgtagcgggcgctgcactcttgctggtgcacgttcgccgtaggggccacagccaggacgctgggagccgcctgctcgcagggaccccagagcctagcgtgcatgctctgccagacgcactgaataacctgcgtacacaggagggcagcggggatgggccctcaagttccgtggactggaatcgcccagaggatgtggacccccagggtatttacgtcattagcgctccaagtatttacgccagggaggttgcaactcctctcttccccccactgcacactggccgagcaggccagcggcagcacctgctgtttccctatccttcatctatcctaagcgtcaaatag

SEQ ID NO: 192901 - DNA, 1857 bp, Artificial Sequence
  derived and/or modified sequence
atggtgagccccaggatgagcggcctgctgagccagaccgtcatcctggccctgatcttcctgccccagaccaggcctgctggggtgtttgagctgcagatccacagctttggacctggccctggccctggggcccccaggagcccctgcagcgcccggctgccctgccgcctcttcttccgggtgtgcctgaagccaggcctgtctgaggaggccgctgagagcccctgtgccctgggcgccgccctgagcgcccggggccctgtgtacacagagcagcccggggccccagccccagacctgcccctgcctgatggcctgctgcaggtgcccttcagagatgcctggccaggcaccttctccttcatcatcgagacctggagggaggagctgggggaccagattggaggccctgcctggagcctgctggcccgggtggccggcagaagaaggctggccgccggcggcccctgggcccgggacatccagagagctggggcctgggagctgcgcttctcctaccgggcccgctgtgagcccccagctgtgggcacagcctgcacccggctgtgccggcccaggtctgcccccagccgctgtggccctggcctgcggccctgtgcccccctggaggatgaatgtgaggcccccctggtgtgccgggccggctgcagccctgagcacggcttctgtgagcagcccggggagtgccgctgcctggagggctggacaggccccctgtgcaccgtgcctgtgtccaccagcagctgcctgagcccccggggccccagcagcgccaccaccggctgcctggtgcccggccctggcccctgtgatggcaacccctgtgccaatggaggcagctgcagcgagacccccaggagctttgaatgtacctgcccccggggcttctacggcctgcgctgtgaggtgtctggagtgacctgtgctgatggcccctgcttcaatggaggcctgtgtgtgggcggcgctgaccctgattctgcctacatctgccactgccccccaggcttccagggcagcaactgtgagaagagggtggaccgctgcagcctgcagccctgcagaaatggaggcctgtgcctggacctgggccacgccctgcgctgccgctgcagagctggctttgctggcccccgctgtgaacatgacctggatgactgtgccggccgggcctgtgccaacggcggcacctgtgtggagggcggcggggcccaccgctgcagctgtgccctgggctttggaggccgggactgccgggagagagctgacccctgtgccgcccggccctgtgcccacggcggccgctgctacgcccacttcagcggcctggtgtgtgcctgtgcccctggctacatgggcgcccgctgtgagttccctgtgcacccagatggagccagcgccctgcctgctgcccctcctggcctgcggcctggggacccccagcgctacctgctgcccccagccctgggcctgctggtggccgccggcgtggccggggccgccctgctgctggtgcacgtgagaagaagaggccacagccaggatgctggcagccggctgctggccggcaccccagagcccagcgtgcacgccctgcctgatgccctgaacaacctgcggacccaggagggcagcggagatggccccagcagctctgtggactggaacagaccagaagatgtggacccccagggcatctacgtgatcagcgcccccagcatctatgcccgggaggtggccacccccctcttcccccccctgcacacaggccgggccggccagaggcagcacctgctcttcccctaccccagcagcatcctgtctgtgaagtag

SEQ ID NO: 192902 - DNA, 1857 bp, Artificial Sequence
  derived and/or modified sequence
atggtgagcccccggatgagcggcctgctgagccagaccgtgatcttggccctgatcttcttgccacagactagacctgctggagtctttgaactgcaaatccacagcttcgggccagggcccggccccggagccccacgcagcccttgttcggccaggctgccatgccgcctttttttcagggtctgtctgaagcctggcctctccgaggaagccgccgagagcccgtgtgctttgggagccgctctatccgcaaggggccctgtctacacggagcaacccggggccccggcccctgaccttccccttccggacgggctattacaggtcccctttcgagacgcttggcctgggactttctctttcataatcgagacatggagggaggagctgggagatcagattgggggtcctgcctggtccctgctcgcccgtgtggccggccgtaggcgcctagccgccggggggccgtgggcacgagacattcagagggctggtgcctgggagctgaggttttcgtacagggccaggtgcgaaccgcctgctgtcggcaccgcctgtactcgcctctgcaggcccagatcagccccatcccgctgcggtcccggactcagaccctgtgctcccctggaggacgagtgtgaagcccccctagtctgtagggctggatgctccccagaacatggattttgtgaacagcccggggaatgtcgctgtcttgagggatggacaggacctttgtgcactgtacctgtttcgacgtcttcttgcctttctcctcgtggtccttccagtgctactaccggctgtttggttccagggcccggtccctgtgacggaaacccttgcgccaacggagggtcctgctcagagacgcctcgaagcttcgaatgcacatgcccccggggcttctacgggctcaggtgcgaagtgtctggcgtcacctgcgcggacggcccttgctttaacggcggcctttgcgtaggaggtgccgaccctgattcagcatacatctgtcattgcccccccggcttccaaggcagcaactgcgaaaagcgcgtggacagatgtagtttacagccatgcaggaacggaggactgtgtctagacctagggcacgccctcagatgcaggtgccgtgcgggctttgccggtccacggtgcgagcacgatctggacgattgtgcagggagagcatgcgcaaatggaggcacctgtgtagaagggggcggagcccatcgctgtagctgcgccctcggcttcggtggcagggactgtcgcgaaagggccgatccttgcgccgcccggccgtgcgcccacggagggcgctgttacgcacacttctcaggtctggtttgtgcttgtgctcctggctacatgggcgctaggtgcgagttcccagtgcacccagatggagcatcagcgctccctgctgcccctcctggtcttaggcccggagatccgcagcggtacttgttgccacctgcgctgggcctcctcgtggccgccggggtggcgggcgccgccctactgctcgtgcatgtacgaagaaggggccactctcaggatgcaggcagtaggctcctagctggaactccagagccttctgtgcatgcattgccagatgcacttaacaacttgcgtacccaggaaggctccggcgacggcccatccagtagtgtcgattggaaccgccccgaagacgtcgaccctcagggaatttatgtgatcagcgcccctagtatctatgcccgcgaagtggctacgccattgttcccccccctccacactgggcgcgctggacagcggcaacacctactctttccatacccctcatcgatcctgtccgttaaatag

SEQ ID NO: 192903 - DNA, 1857 bp, Artificial Sequence
  derived and/or modified sequence
atggttagtccccgtatgagtggcttgttgtcgcagaccgtgattctcgcattaattttcctgcctcagaccagacctgcaggagtcttcgaacttcaaatccattcatttgggccaggccctggcccaggggcaccaaggagcccttgctccgccaggctcccttgccggctctttttcagagtgtgcctcaaacccggtctcagcgaagaggctgccgagagtccttgcgctctcggtgctgctctgtccgctcgtgggcctgtgtacacagagcaacccggagcgccagctccggacttgcccctacctgatgggttgcttcaggtgcccttccgcgacgcctggcctggaacattcagtttcataatcgaaacctggagagaggaattgggcgaccagattggcggaccggcatggtccctgctggctagggtagccggaagaaggcgcttggctgccggaggcccatgggccagagacattcagcgagcaggggcatgggagctgcgctttagttaccgtgctagatgtgaacctccggctgtgggcacagcttgcacccggctctgccggccacgctcggccccaagtcgctgcgggccagggctacgtccttgcgcacccctggaagatgagtgcgaggcgcctctggtgtgtcgagcaggctgctctccagagcacggtttttgtgaacagcccggagagtgtcggtgtctggaagggtggaccggacccctttgtaccgtccccgtgtcaacctcatcctgtcttagtccgaggggtcccagctcagccactaccggctgccttgtcccaggtccgggaccttgtgacggcaacccctgtgcaaatggaggcagttgttcagaaacccccaggagctttgagtgtacctgccctcgcggattttatggtcttcgttgtgaagtgagcggagttacgtgtgcggatggcccatgtttcaacggcggtctgtgcgttggaggcgcagaccctgattctgcctacatctgccattgtccccctgggtttcaaggctccaactgtgaaaaaagggtggataggtgcagcctacagccctgccgcaacggaggattatgcttggatcttggacacgcgctgcgttgtcgctgcagggcaggcttcgccggaccacgctgcgagcatgacctggatgattgcgctggcagggcatgcgccaatggcggaacatgtgtggagggtggcggagcccaccggtgttcttgcgccctagggttcggtggcagggactgtagagagagagctgacccctgtgcggcaagaccctgcgcacacggcggacggtgttacgcccacttcagcgggctcgtgtgcgcttgtgctcccggatatatgggagccaggtgcgagtttccagtgcaccccgatggggcttctgctctgcccgctgcccctcctggtctcagacccggagatccccaacgctacctcttgcccccagccctggggttgctggtagctgccggagtcgctggtgcagcgctgctgctggtgcacgtaaggcgtagaggccactcgcaggacgctggctcgaggctgctcgcaggtacaccagagcccagcgtccacgcactgccggatgcactgaacaacctaagaacccaggagggcagcggggacggaccgtccagctctgtcgattggaatcggccagaagatgttgatccccagggaatctatgtcatcagcgcccctagcatttacgccagggaagtcgccaccccactctttccgccactgcacaccggccgagccggtcagcggcaacatctgcttttcccttaccccagttcaattttatctgtgaaatag

SEQ ID NO: 192904 - DNA, 108 bp, Artificial Sequence
  derived and/or modified sequence
gtaaacaaacaatcaagcaagtaagaacagaaataacagcatttggcttttgagttaatgacaagaacactcggcatgggagcctgggtgagcaaatcacagatcttc

SEQ ID NO: 192905 - DNA, 2380 bp, Artificial Sequence
  derived and/or modified sequence
agatataaggcttggaagccagcagctgcgactcccgagacccccccaccagaaggccatggtctccccacggatgtccgggctcctctcccagactgtgatcctagcgctcattttcctcccccagacacggcccgctggcgtcttcgagctgcagatccactctttcgggccgggtccaggccctggggccccgcggtccccctgcagcgcccggctcccctgccgcctcttcttcagagtctgcctgaagcctgggctctcagaggaggccgccgagtccccgtgcgccctgggcgcggcgctgagtgcgcgcggaccggtctacaccgagcagcccggagcgcccgcgcctgatctcccactgcccgacggcctcttgcaggtgcccttccgggacgcctggcctggcaccttctctttcatcatcgaaacctggagagaggagttaggagaccagattggagggcccgcctggagcctgctggcgcgcgtggctggcaggcggcgcttggcagccggaggcccgtgggcccgggacattcagcgcgcaggcgcctgggagctgcgcttctcgtaccgcgcgcgctgcgagccgcctgccgtcgggaccgcgtgcacgcgcctctgccgtccgcgcagcgccccctcgcggtgcggtccgggactgcgcccctgcgcaccgctcgaggacgaatgtgaggcgccgctggtgtgccgagcaggctgcagccctgagcatggcttctgtgaacagcccggtgaatgccgatgcctagagggctggactggacccctctgcacggtccctgtctccaccagcagctgcctcagccccaggggcccgtcctctgctaccaccggatgccttgtccctgggcctgggccctgtgacgggaacccgtgtgccaatggaggcagctgtagtgagacacccaggtcctttgaatgcacctgcccgcgtgggttctacgggctgcggtgtgaggtgagcggggtgacatgtgcagatggaccctgcttcaacggcggcttgtgtgtcgggggtgcagaccctgactctgcctacatctgccactgcccacccggtttccaaggctccaactgtgagaagagggtggaccggtgcagcctgcagccatgccgcaatggcggactctgcctggacctgggccacgccctgcgctgccgctgccgcgccggcttcgcgggtcctcgctgcgagcacgacctggacgactgcgcgggccgcgcctgcgctaacggcggcacgtgtgtggagggcggcggcgcgcaccgctgctcctgcgcgctgggcttcggcggccgcgactgccgcgagcgcgcggacccgtgcgccgcgcgcccctgtgctcacggcggccgctgctacgcccacttctccggcctcgtctgcgcttgcgctcccggctacatgggagcgcggtgtgagttcccagtgcaccccgacggcgcaagcgccttgcccgcggccccgccgggcctcaggcccggggaccctcagcgctaccttttgcctccggctctgggactgctcgtggccgcgggcgtggccggcgctgcgctcttgctggtccacgtgcgccgccgtggccactcccaggatgctgggtctcgcttgctggctgggaccccggagccgtcagtccacgcactcccggatgcactcaacaacctaaggacgcaggagggttccggggatggtccgagctcgtccgtagattggaatcgccctgaagatgtagaccctcaagggatttatgtcatatctgctccttccatctacgctcgggaggtagcgacgccccttttccccccgctacacactgggcgcgctgggcagaggcagcacctgctttttccctacccttcctcgattctgtccgtgaaatgaattgggtagagtctctggaaggttttaagcccattttcagttctaacttactttcatcctattttgcatccctcttatcgttttgagctacctgccatcttctctttgaaaaacctatgggcttgaggaggtcacgatgccgactccgccagagcttttccactgattgtactcagcggggaggcaggggaggcagaggggcagcctctctaatgcttcctactcattttgtttctaggcctgacgcgtctcctccatccgcacctggagtcagagcgtggatttttgtatttgctcggtggtgcccagtctctgccccagaggctttggagttcaatcttgaaggggtgtctgggggaactttactgttgcaagttgtaaataatggttatttatatcctattttttctcaccccatctctctagaaacacctataaaggctattattgtgatcagttttgact

SEQ ID NO: 192906 - protein, 291 aa, Artificial Sequence
  derived and/or modified sequence
MIPIQLTVFFMIIYVLESLTIIVQSSLIVAVLGREWLQVRRLMPVDMILISLGISRFCLQWASMLNNFCSYFNLNYVLCNLTITWEFFNILTFWLNSLLTVFYCIKVSSFTHHIFLWLRWRILRLFPWILLGSLMITCVTIIPSAIGNYIQIQLLTMEHLPRNSTVTDKLENFHQYQFQAHTVALVIPFILFLASTIFLMASLTKQIQHHSTGHCNPSMKARFTALRSLAVLFIVFTSYFLTILITIIGTLFDKRCWLWVWEAFVYAFILMHSTSLMLSSPTLKRILKGKC

SEQ ID NO: 192907 - DNA, 876 bp, Artificial Sequence
  derived and/or modified sequence
atgatccccatccagctgaccgtgttcttcatgatcatctacgtgctggagagcctgaccatcatcgtgcagagcagcctgatcgtggccgtgctgggcagagagtggctgcaggtgagaagactgatgcccgtggacatgatcctgatcagcctgggcatcagcagattctgcctgcagtgggccagcatgctgaacaacttctgcagctacttcaacctgaactacgtgctgtgcaacctgaccatcacctgggagttcttcaacatcctgaccttctggctgaacagcctgctgaccgtgttctactgcatcaaggtgagcagcttcacccaccacatcttcctgtggctgagatggagaatcctgagactgttcccctggatcctgctgggcagcctgatgatcacctgcgtgaccatcatccccagcgccatcggcaactacatccagatccagctgctgaccatggagcacctgcccagaaacagcaccgtgaccgacaagctggagaacttccaccagtaccagttccaggcccacaccgtggccctggtgatccccttcatcctgttcctggccagcaccatcttcctgatggccagcctgaccaagcagatccagcaccacagcaccggccactgcaaccccagcatgaaggccagattcaccgccctgagaagcctggccgtgctgttcatcgtgttcaccagctacttcctgaccatcctgatcaccatcatcggcaccctgttcgacaagagatgctggctgtgggtgtgggaggccttcgtgtacgccttcatcctgatgcacagcaccagcctgatgctgagcagccccaccctgaagagaatcctgaagggcaagtgctag

SEQ ID NO: 192908 - DNA, 876 bp, Artificial Sequence
  derived and/or modified sequence
atgatccccattcaactcacggtctttttcatgattatctacgtgttggagtctctgacaataatcgtgcagagctcattgatagttgctgtgctcggtagggagtggttacaggtgcgcaggctcatgcccgttgatatgatactgatcagcctcggaatatcccgattttgcctgcagtgggcatccatgctaaataacttctgctcctacttcaacctgaattacgtgctgtgtaatctaacaatcacttgggagtttttcaacattctgaccttctggctgaactcactgctcactgtgttctactgtattaaggtttccagcttcactcatcacatctttctctggttgcggtggaggattctgaggcttttcccctggattctgctgggctcgctgatgattacatgtgtcacaattatcccctctgccattggtaactatatacaaattcagcttctcacaatggagcatcttcctagaaattccaccgttacggacaaactggaaaacttccatcagtaccaatttcaggctcatactgtggcacttgtgattccatttatactttttctcgcgagcacaatctttttgatggcttcactgacaaagcagattcagcaccacagcactggtcactgcaatccttctatgaaagcccgttttaccgcactgcgatccttggccgtgctttttatcgttttcacttcctattttcttacgatccttataacaatcattggaacgctatttgacaaaagatgctggctttgggtgtgggaggcattcgtctatgcattcatactgatgcactctacaagcctgatgttgagcagccccacactgaaaagaattcttaagggcaaatgctag

SEQ ID NO: 192909 - DNA, 876 bp, Artificial Sequence
  derived and/or modified sequence
atgatccccatccagctgactgtgttcttcatgatcatctacgtgctggagagcctgaccatcatcgtgcagagcagcctcatcgtggccgtgctgggccgggagtggctgcaggtgcggcggctgatgcctgtggacatgatcctgatcagcctgggcatcagccgcttctgcctgcagtgggcctccatgctgaacaacttctgcagctacttcaacctgaactacgtgctgtgcaacctgaccatcacctgggagttcttcaacatcctgaccttctggctgaacagcctgctgaccgtcttctactgcatcaaggtgtcctccttcacccaccacatcttcctgtggctgcgctggaggatcctgcggctcttcccctggatcctgctgggcagcctgatgatcacctgtgtgaccatcatccccagcgccatcggcaactacatccagatccagctgctgaccatggagcacctgcccaggaacagcacagtgacagacaagctggagaacttccaccagtaccagttccaggcccacacagtggccctggtgatccccttcatcctcttcctggccagcaccatcttcctgatggccagcctgaccaagcagatccagcaccacagcacaggccactgcaaccccagcatgaaggcccgcttcaccgccctgcggagcctggccgtgctcttcatcgtgttcaccagctacttcctgaccatcctgatcaccatcatcggcaccctgtttgacaagcgctgctggctgtgggtgtgggaggcctttgtgtatgccttcatcctgatgcacagcaccagcctgatgctgagcagccccaccctgaagaggatcctgaagggcaagtgctag

SEQ ID NO: 192910 - DNA, 876 bp, Artificial Sequence
  derived and/or modified sequence
atgatccccatccagctgaccgtgttcttcatgatcatctacgtgctcgagagcctcacgatcattgtgcagtcctctcttatcgtcgctgtgctgggacgggaatggctacaggtgaggcggctgatgcccgttgacatgattctgatctcactaggcataagccgcttctgtctacagtgggcttccatgttgaataatttctgctcgtacttcaacctgaactatgtgctgtgcaacctgacgatcacatgggagttttttaatattctgaccttctggttaaactccctgctaactgtgttctactgcatcaaggtatcatcgttcacccatcacatttttttgtggttgcgctggagaatacttagactattcccctggatactgttaggctctttgatgataacttgcgtcacaatcattcctagtgcaataggcaactacatccaaattcagctgctgaccatggagcacctgccccggaattctacagttacagataaacttgagaacttccatcagtatcaatttcaggctcacaccgttgctctcgtcattccgtttatcctctttttggcatctactatttttttaatggccagcctcactaagcagattcagcaccacagtacaggacattgtaacccttcaatgaaggcccgctttaccgctttgcggtctctggctgtgcttttcattgtgttcacttcatattttctcacaatcctgatcaccattatagggacacttttcgacaagagatgctggttgtgggtctgggaggccttcgtctatgctttcatcttgatgcactccacctccctaatgctgtccagcccaaccctgaagcgcatacttaaagggaaatgttag

SEQ ID NO: 192911 - DNA, 876 bp, Artificial Sequence
  derived and/or modified sequence
atgatcccgatccagttgacagtctttttcatgatcatttacgtcttggaaagtctgaccataattgtgcagtctagcctgattgttgctgtgttgggcagggagtggctgcaggtgaggagacttatgccagtggacatgatcctgatatcactgggaatttcccgcttctgcctgcagtgggcgagtatgctaaacaatttctgctcatatttcaatctgaattacgttctatgcaacctcacgattacctgggaattctttaatattcttactttctggttaaactccctcctcaccgtgttttattgcataaaagtgtcaagtttcacccaccatattttcctgtggctgcggtggcgtatccttcgtctgttcccatggattctccttggcagccttatgatcacctgtgttactatcattccttctgcgatcgggaactatatacagatccaactcctcactatggaacacctaccaagaaactcaactgtgactgataagctcgaaaacttccaccagtaccagttccaggcacacacagtagctctagtcatccccttcatccttttcttagcatccaccatcttcctaatggcctctctgaccaagcaaatccaacaccattctacgggtcactgcaatcctagcatgaaagccagattcacagccctgcggtccctggctgtactatttattgttttcacctcctattttctcactatcctgataaccatcattggcacactgttcgataagcgctgttggctttgggtctgggaggcgttcgtttacgccttcattctcatgcacagcacatctctgatgctatccagccctacactcaaacgaatcctcaaaggaaagtgttag

SEQ ID NO: 192912 - DNA, 996 bp, Artificial Sequence
  derived and/or modified sequence
tctctacctggaaattggtacagagattcagagtctttgtccaggaagacactttggagtagaagaatgatacccatccaactcactgtcttcttcatgatcatctatgtgcttgagtccttgacaattattgtgcagagcagcctaattgttgcagtgctgggcagagaatggctgcaagtcagaaggctgatgcctgtggacatgattctcatcagcctgggcatctctcgcttctgtctacagtgggcatcaatgctgaacaatttttgctcctattttaatttgaattatgtactttgcaacttaacaatcacctgggaattttttaatatccttacattctggttaaacagcttgcttaccgtgttctactgcatcaaggtctcttctttcacccatcacatctttctctggctgaggtggagaattttgaggttgtttccctggatattactgggttctctgatgattacttgtgtaacaatcatcccttcagctattgggaattacattcaaattcagttactcaccatggagcatctaccaagaaacagcactgtaactgacaaacttgaaaattttcatcagtatcagttccaggctcatacagttgcattggttattcctttcatcctgttcctggcctccaccatctttctcatggcatcactgaccaagcagatacaacatcatagcactggtcactgcaatccaagcatgaaagcgcgcttcactgccctgaggtcccttgccgtcttatttattgtgtttacctcttactttctaaccatactcatcaccattataggtactctatttgataagagatgttggttatgggtctgggaagcttttgtctatgctttcatcttaatgcattccacttcactgatgctgagcagccctacgttgaaaaggattctaaagggaaagtgctaggcctagaggttgcctgaggcacaggataaaagactcccgagcaattgatataat

SEQ ID NO: 192913 - protein, 299 aa, Artificial Sequence
  derived and/or modified sequence
MGTKAQVERKLLCLFILAILLCSLALGSVTVHSSEPEVRIPENNPVKLSCAYSGFSSPRVEWKFDQGDTTRLVCYNNKITASYEDRVTFLPTGITFKSVTREDTGTYTCMVSEEGGNSYGEVKVKLIVLVPPSKPTVNIPSSATIGNRAVLTCSEQDGSPPSEYTWFKDGIVMPTNPKSTRAFSNSSYVLNPTTGELVFDPLSASDTGEYSCEARNGYGTPMTSNAVRMEAVERNVGVIVAAVLVTLILLGILVFGIWFAYSRGHFDRTKKGTSSKKVIYSQPSARSEGEFKQTSSFLV

SEQ ID NO: 192914 - protein, 303 aa, Artificial Sequence
  derived and/or modified sequence
MLQAPRGRARAALRRLAVATRTMAGGSLALGSVTVHSSEPEVRIPENNPVKLSCAYSGFSSPRVEWKFDQGDTTRLVCYNNKITASYEDRVTFLPTGITFKSVTREDTGTYTCMVSEEGGNSYGEVKVKLIVLVPPSKPTVNIPSSATIGNRAVLTCSEQDGSPPSEYTWFKDGIVMPTNPKSTRAFSNSSYVLNPTTGELVFDPLSASDTGEYSCEARNGYGTPMTSNAVRMEAVERNVGVIVAAVLVTLILLGILVFGIWFAYSRGHFDRTKKGTSSKKVIYSQPSARSEGEFKQTSSFLV

SEQ ID NO: 192915 - protein, 250 aa, Artificial Sequence
  derived and/or modified sequence
MGTKAQVERKLLCLFILAILLCSLALGSVTVHSSEPEVRIPENNPVKLSCAYSGFSSPRVEWKFDQGDTTRLVCYNNKITVPPSKPTVNIPSSATIGNRAVLTCSEQDGSPPSEYTWFKDGIVMPTNPKSTRAFSNSSYVLNPTTGELVFDPLSASDTGEYSCEARNGYGTPMTSNAVRMEAVERNVGVIVAAVLVTLILLGILVFGIWFAYSRGHFDRTKKGTSSKKVIYSQPSARSEGEFKQTSSFLV

SEQ ID NO: 192916 - DNA, 900 bp, Artificial Sequence
  derived and/or modified sequence
atgggcaccaaggcccaggtggagagaaagctgctgtgcctgttcatcctggccatcctgctgtgcagcctggccctgggcagcgtgaccgtgcacagcagcgagcccgaggtgagaatccccgagaacaaccccgtgaagctgagctgcgcctacagcggcttcagcagccccagagtggagtggaagttcgaccagggcgacaccaccagactggtgtgctacaacaacaagatcaccgccagctacgaggacagagtgaccttcctgcccaccggcatcaccttcaagagcgtgaccagagaggacaccggcacctacacctgcatggtgagcgaggagggcggcaacagctacggcgaggtgaaggtgaagctgatcgtgctggtgccccccagcaagcccaccgtgaacatccccagcagcgccaccatcggcaacagagccgtgctgacctgcagcgagcaggacggcagcccccccagcgagtacacctggttcaaggacggcatcgtgatgcccaccaaccccaagagcaccagagccttcagcaacagcagctacgtgctgaaccccaccaccggcgagctggtgttcgaccccctgagcgccagcgacaccggcgagtacagctgcgaggccagaaacggctacggcacccccatgaccagcaacgccgtgagaatggaggccgtggagagaaacgtgggcgtgatcgtggccgccgtgctggtgaccctgatcctgctgggcatcctggtgttcggcatctggttcgcctacagcagaggccacttcgacagaaccaagaagggcaccagcagcaagaaggtgatctacagccagcccagcgccagaagcgagggcgagttcaagcagaccagcagcttcctggtgtag

SEQ ID NO: 192917 - DNA, 912 bp, Artificial Sequence
  derived and/or modified sequence
atgctgcaggcccccagaggcagagccagagccgccctgagaagactggccgtggccaccagaaccatggccggcggcagcctggccctgggcagcgtgaccgtgcacagcagcgagcccgaggtgagaatccccgagaacaaccccgtgaagctgagctgcgcctacagcggcttcagcagccccagagtggagtggaagttcgaccagggcgacaccaccagactggtgtgctacaacaacaagatcaccgccagctacgaggacagagtgaccttcctgcccaccggcatcaccttcaagagcgtgaccagagaggacaccggcacctacacctgcatggtgagcgaggagggcggcaacagctacggcgaggtgaaggtgaagctgatcgtgctggtgccccccagcaagcccaccgtgaacatccccagcagcgccaccatcggcaacagagccgtgctgacctgcagcgagcaggacggcagcccccccagcgagtacacctggttcaaggacggcatcgtgatgcccaccaaccccaagagcaccagagccttcagcaacagcagctacgtgctgaaccccaccaccggcgagctggtgttcgaccccctgagcgccagcgacaccggcgagtacagctgcgaggccagaaacggctacggcacccccatgaccagcaacgccgtgagaatggaggccgtggagagaaacgtgggcgtgatcgtggccgccgtgctggtgaccctgatcctgctgggcatcctggtgttcggcatctggttcgcctacagcagaggccacttcgacagaaccaagaagggcaccagcagcaagaaggtgatctacagccagcccagcgccagaagcgagggcgagttcaagcagaccagcagcttcctggtgtag

SEQ ID NO: 192918 - DNA, 753 bp, Artificial Sequence
  derived and/or modified sequence
atgggcaccaaggcccaggtggagagaaagctgctgtgcctgttcatcctggccatcctgctgtgcagcctggccctgggcagcgtgaccgtgcacagcagcgagcccgaggtgagaatccccgagaacaaccccgtgaagctgagctgcgcctacagcggcttcagcagccccagagtggagtggaagttcgaccagggcgacaccaccagactggtgtgctacaacaacaagatcaccgtgccccccagcaagcccaccgtgaacatccccagcagcgccaccatcggcaacagagccgtgctgacctgcagcgagcaggacggcagcccccccagcgagtacacctggttcaaggacggcatcgtgatgcccaccaaccccaagagcaccagagccttcagcaacagcagctacgtgctgaaccccaccaccggcgagctggtgttcgaccccctgagcgccagcgacaccggcgagtacagctgcgaggccagaaacggctacggcacccccatgaccagcaacgccgtgagaatggaggccgtggagagaaacgtgggcgtgatcgtggccgccgtgctggtgaccctgatcctgctgggcatcctggtgttcggcatctggttcgcctacagcagaggccacttcgacagaaccaagaagggcaccagcagcaagaaggtgatctacagccagcccagcgccagaagcgagggcgagttcaagcagaccagcagcttcctggtgtag

SEQ ID NO: 192919 - DNA, 900 bp, Artificial Sequence
  derived and/or modified sequence
atgggtacgaaagctcaggtggaacggaaactcctttgcctgtttatcctcgcgatcctgttgtgcagcctggcgctggggtctgttaccgtgcactcctccgagcccgaggtccgaattcccgaaaacaaccccgtgaaattgtcctgcgcttacagcggctttagctctcctagggtggaatggaagtttgaccagggggacactaccagactggtctgctacaataacaaaattaccgcttcctatgaggatcgggtgactttccttcctacagggattacattcaagtcggtgacacgggaagataccggcacttacacctgcatggtgagcgaagagggcggtaattcctatggcgaggtaaaggtgaaactgatcgttctggttcccccatccaagcccacagttaatattccttcatccgcaaccattggcaaccgtgctgtgttgacctgcagcgaacaggacggtagccctccgtccgaatatacctggtttaaagatggaattgtgatgcccaccaatcctaaatctacacgtgctttctccaatagcagctacgtgctgaacccaactaccggggagctggtattcgaccctttgagcgcttccgatacaggcgaatacagttgcgaggccaggaatggctacggtacacctatgacttccaacgctgtgagaatggaagccgtcgagaggaatgtaggcgtgatcgtcgcggctgtgctggtgactctcatactgcttggaattctggtcttcggcatctggttcgcctattctagaggccatttcgatcgcaccaaaaaaggcacgtccagcaagaaagtgatttactcacagccgtctgctagaagtgaaggagagtttaagcagactagctccttcctggtctag

SEQ ID NO: 192920 - DNA, 900 bp, Artificial Sequence
  derived and/or modified sequence
atgggcaccaaagcacaggtggaaagaaaactactatgcctgtttatactggccatcctattgtgttctctggcattaggctcagtaacagttcacagcagcgaaccagaagtccggatccccgagaataatccggtgaaactgagttgcgcttacagtggcttttcgagcccacgagtggagtggaagtttgaccagggtgacactacaagactcgtgtgttataacaacaaaatcaccgcaagctacgaggacagagtgacattccttcccaccgggattacattcaagagtgtgacgagggaggacaccgggacttacacgtgcatggtgagtgaggaaggaggaaacagctacggggaggtgaaggtaaagttaattgtccttgttcctccttccaaacctacagtcaatattccgagctccgctacaattggaaatcgcgccgttcttacgtgttcagaacaggacggcagtccaccgagcgaatatacctggtttaaagacggcatcgtaatgccaactaatcccaagtcaactagggctttctccaattcttcttatgttctgaatcccacaaccggagagctggtgttcgaccctttgtctgcaagtgatacgggtgaatactcctgtgaagctcgcaatggctacgggacccccatgaccagcaatgccgttcggatggaggccgtggaaagaaatgtgggagtgatcgtggcggcagtactggtaactttgattttgctgggtatcctcgtgttcggaatctggttcgcttactcccggggtcattttgaccgcactaaaaaaggtacttcatccaagaaggtgatttactcccagccttcagcccgctctgagggggaattcaaacagacttctagtttcctggtgtag

SEQ ID NO: 192921 - DNA, 900 bp, Artificial Sequence
  derived and/or modified sequence
atgggaaccaaggcccaagtagaacgaaaactcctgtgtctgttcatactggcaatcttactctgttctcttgctctgggatccgttactgttcatagttcggaacctgaagtccgcattcctgagaacaatcccgtgaaactgtcatgcgcttactccggattctcctctccgcgagtggaatggaagtttgatcagggcgacaccacccggctcgtgtgttataataataaaatcacagcctcttacgaggaccgagtgaccttcctgccgaccggcattaccttcaagagcgttactcgagaagatactgggacctacacgtgtatggtgagtgaggaaggcggcaattcgtacggtgaggtgaaagtgaagcttatagtgttagtaccaccaagcaaacctacagtcaatattcccagctctgccacaattggaaatagagccgtgcttacatgctcggagcaagacggatcacctccctctgaatacacctggtttaaagatggcatcgttatgcccacaaaccccaaatccacacgggctttttctaactccagctacgtgctgaaccccacaactggggagttggttttcgatcccttgtctgcctccgacacaggcgaatattcttgcgaggcacggaatggctacggcaccccaatgacctccaacgcggtgcggatggaggccgtcgaacgtaacgtgggggtcattgtggccgctgtcctagtgactctcatcctactcgggatcctggttttcggaatttggtttgcctactccaggggtcatttcgacaggaccaagaagggtacttcctctaaaaaggtcatttacagccaacctagtgctagatccgagggggaattcaagcagacatcgtcttttctcgtctag

SEQ ID NO: 192922 - DNA, 912 bp, Artificial Sequence
  derived and/or modified sequence
atgctgcaagcacctagagggagagctagagccgcgcttaggagactggctgtcgctactcggaccatggctggaggctcactcgcactcggaagcgtgaccgtccattcctcagaaccagaagtcaggattccagagaataatccagtgaaactgtcttgcgcgtactccgggttctcctctccacgcgttgaatggaagttcgatcagggcgatacaactagattggtttgctacaacaacaagataacagccagctacgaggaccgggtaaccttcctgcctacaggaatcaccttcaagtccgtgactagggaagatacgggaacctacacctgcatggtctccgaagaggggggtaacagttacggcgaggtgaaggtgaaattaattgtccttgtgccgccctcgaaaccaacagtaaacattccctcatccgccactattggtaaccgcgcggtcctgacctgcagcgagcaggatggctccccaccaagtgagtacacatggtttaaggacggcatcgttatgccaacaaatccaaagtcaacgcgtgcctttagcaacagctcttacgtcctgaaccccactacgggcgagctggtgttcgacccactgagtgcctccgacactggggaatattcttgtgaagctcgaaacggatatggtacaccgatgacatctaatgcggtgcgcatggaagccgtggaacggaatgtgggagtcatcgtggctgctgtactcgtgacattaatcctcctgggcattcttgtttttggcatctggtttgcatacagcagagggcactttgatcggaccaagaaaggaacatcaagcaagaaggtgatttacagtcaaccctccgcgagaagcgaaggcgagttcaagcaaacctcctcattcctggtgtag

SEQ ID NO: 192923 - DNA, 753 bp, Artificial Sequence
  derived and/or modified sequence
atgggaacgaaagctcaggttgaacgaaagctgctctgtttgttcattctcgcaattctgctttgttctcttgctctggggtccgtgactgtacattccagtgaacctgaagtgagaatccccgaaaataatcccgtcaaactaagctgcgcctattctggattctcctcgcctagggttgagtggaaatttgatcagggtgataccacacgcctggtttgttataataacaagataaccgtccctccaagtaaaccaacagtgaacattcctagtagcgctacaatcggaaacagagccgtcttgacatgtagcgagcaagacggaagcccccctagcgaatacacctggtttaaggacggaatagtcatgcccacaaaccccaagagcacaagggcattctctaatagtagttacgttctgaacccgacaaccggcgagcttgtgttcgatcccctatccgcctctgataccggtgaatattcttgtgaagcacgcaacggatacggtacgcctatgacttccaacgctgtcagaatggaagcagtggagcggaacgtcggagtgatagtcgccgccgtcctcgtaaccctgatcctgctcggcatcctggtctttggcatatggtttgcttatagcagagggcacttcgacagaacaaaaaaaggcacctcctccaaaaaggtcatctacagtcagcctagtgctaggtctgaaggcgagtttaagcagacttcttcatttctggtctag

SEQ ID NO: 192924 - DNA, 2096 bp, Artificial Sequence
  derived and/or modified sequence
gccgagagggcgggccagggccgcactccggagactcgcggttgctacgcgcaccatggctggagacggagtttcgctcttgatgcccagcaggctggagtgcaatggcgcgatttcagctcactgcaacctcctcctcccagaggtacttctcagccctctagctccaactgagaacccagccagtcaggaagtcgctacttcgggaacaccaaccaatcagggggccgtcacctgctgaaggagtccttcggcggctgttgtgtcgggagcctgatcgcgatggggacaaaggcgcaagtcgagaggaaactgttgtgcctcttcatattggcgatcctgttgtgctccctggcattgggcagtgttacagtgcactcttctgaacctgaagtcagaattcctgagaataatcctgtgaagttgtcctgtgcctactcgggcttttcttctccccgtgtggagtggaagtttgaccaaggagacaccaccagactcgtttgctataataacaagatcacagcttcctatgaggaccgggtgaccttcttgccaactggtatcaccttcaagtccgtgacacgggaagacactgggacatacacttgtatggtctctgaggaaggcggcaacagctatggggaggtcaaggtcaagctcatcgtgcttgtgcctccatccaagcctacagttaacatcccctcctctgccaccattgggaaccgggcagtgctgacatgctcagaacaagatggttccccaccttctgaatacacctggttcaaagatgggatagtgatgcctacgaatcccaaaagcacccgtgccttcagcaactcttcctatgtcctgaatcccacaacaggagagctggtctttgatcccctgtcagcctctgatactggagaatacagctgtgaggcacggaatgggtatgggacacccatgacttcaaatgctgtgcgcatggaagctgtggagcggaatgtgggggtcatcgtggcagccgtccttgtaaccctgattctcctgggaatcttggtttttggcatctggtttgcctatagccgaggccactttgacagaacaaagaaagggacttcgagtaagaaggtgatttacagccagcctagtgcccgaagtgaaggagaattcaaacagacctcgtcattcctggtgtgagcctggtcggctcaccgcctatcatctgcatttgccttactcaggtgctaccggactctggcccctgatgtctgtagtttcacaggatgccttatttgtcttctacaccccacagggccccctacttcttcggatgtgtttttaataatgtcagctatgtgccccatcctccttcatgccctccctccctttcctaccactgctgagtggcctggaacttgtttaaagtgtttattccccatttctttgagggatcaggaaggaatcctgggtatgccattgacttcccttctaagtagacagcaaaaatggcgggggtcgcaggaatctgcactcaactgcccacctggctggcagggatctttgaataggtatcttgagcttggttctgggctctttccttgtgtactgacgaccagggccagctgttctagagcgggaattagaggctagagcggctgaaatggttgtttggtgatgacactggggtccttccatctctggggcccactctcttctgtcttcccatgggaagtgccactgggatccctctgccctgtcctcctgaatacaagctgactgacattgactgtgtctgtggaaaatgggagctcttgttgtggagagcatagtaaattttcagagaacttgaagccaaaaggatttaaaaccgctgctctaaagaaaagaaaactggaggctgggcgcagtggctcacgcctataatcccagaggctgaggcaggcggatcacctgaggtcaggagttcaagatcagcctgaccaacatggagaaaccctactaaaaatacaaagttagccaggcatagtggtgcatgcctgtaatcccagctgctcaggagcctggcaacaagagcaaaactccagctcaaaaaaaaaaagaaagaaaagaaa

SEQ ID NO: 192925 - DNA, 2170 bp, Artificial Sequence
  derived and/or modified sequence
cactccggagactcgcggttgctacgcgcaccatggctggagaggtacttctcagccctctagctccaactgagaacccagccagtcaggaagtcgctacttcgggaacaccaaccaatcagggcggctggctctcagtcccctcgctgtagtcgcggagctgtgtctgttcccaggagtccttcggcggctgttgtgtcgggagcctgatcgcgatggggacaaaggcgcaagtcgagaggaaactgttgtgcctcttcatattggcgatcctgttgtgctccctggcattgggcagtgttacagtgcactcttctgaacctgaagtcagaattcctgagaataatcctgtgaagttgtcctgtgcctactcgggcttttcttctccccgtgtggagtggaagtttgaccaaggagacaccaccagactcgtttgctataataacaagatcacagcttcctatgaggaccgggtgaccttcttgccaactggtatcaccttcaagtccgtgacacgggaagacactgggacatacacttgtatggtctctgaggaaggcggcaacagctatggggaggtcaaggtcaagctcatcgtgcttgtgcctccatccaagcctacagttaacatcccctcctctgccaccattgggaaccgggcagtgctgacatgctcagaacaagatggttccccaccttctgaatacacctggttcaaagatgggatagtgatgcctacgaatcccaaaagcacccgtgccttcagcaactcttcctatgtcctgaatcccacaacaggagagctggtctttgatcccctgtcagcctctgatactggagaatacagctgtgaggcacggaatgggtatgggacacccatgacttcaaatgctgtgcgcatggaagctgtggagcggaatgtgggggtcatcgtggcagccgtccttgtaaccctgattctcctgggaatcttggtttttggcatctggtttgcctatagccgaggccactttgacagaacaaagaaagggacttcgagtaagaaggtgatttacagccagcctagtgcccgaagtgaaggagaattcaaacagacctcgtcattcctggtgtgagcctggtcggctcaccgcctatcatctgcatttgccttactcaggtgctaccggactctggcccctgatgtctgtagtttcacaggatgccttatttgtcttctacaccccacagggccccctacttcttcggatgtgtttttaataatgtcagctatgtgccccatcctccttcatgccctccctccctttcctaccactgctgagtggcctggaacttgtttaaagtgtttattccccatttctttgagggatcaggaaggaatcctgggtatgccattgacttcccttctaagtagacagcaaaaatggcgggggtcgcaggaatctgcactcaactgcccacctggctggcagggatctttgaataggtatcttgagcttggttctgggctctttccttgtgtactgacgaccagggccagctgttctagagcgggaattagaggctagagcggctgaaatggttgtttggtgatgacactggggtccttccatctctggggcccactctcttctgtcttcccatgggaagtgccactgggatccctctgccctgtcctcctgaatacaagctgactgacattgactgtgtctgtggaaaatgggagctcttgttgtggagagcatagtaaattttcagagaacttgaagccaaaaggatttaaaaccgctgctctaaagaaaagaaaactggaggctgggcgcagtggctcacgcctataatcccagaggctgaggcaggcggatcacctgaggtcaggagttcaagatcagcctgaccaacatggagaaaccctactaaaaatacaaagttagccaggcatagtggtgcatgcctgtaatcccagctgctcaggagcctggcaacaagagcaaaactccagctcaaaaaaaaaaagaaagaaaagaaagctggagctggtggcttaggccatcacccttcccttggctggaactactggacagacccttttgagatgtgcctgtggtgctgtggagatgtgtgtagtggtcttagctctttgttgagcttgtgtgtgtgttgtgtagtc

SEQ ID NO: 192926 - DNA, 4665 bp, Artificial Sequence
  derived and/or modified sequence
ggggttccacctggcggctggctctcagtcccctcgctgtagtcgcggagctgtgtctgttcccaggagtccttcggcggctgttgtgtcgggagcctgatcgcgatggggacaaaggcgcaagtcgagaggaaactgttgtgcctcttcatattggcgatcctgttgtgctccctggcattgggcagtgttacagtgcactcttctgaacctgaagtcagaattcctgagaataatcctgtgaagttgtcctgtgcctactcgggcttttcttctccccgtgtggagtggaagtttgaccaaggagacaccaccagactcgtttgctataataacaagatcacagcttcctatgaggaccgggtgaccttcttgccaactggtatcaccttcaagtccgtgacacgggaagacactgggacatacacttgtatggtctctgaggaaggcggcaacagctatggggaggtcaaggtcaagctcatcgtgcttgtgcctccatccaagcctacagttaacatcccctcctctgccaccattgggaaccgggcagtgctgacatgctcagaacaagatggttccccaccttctgaatacacctggttcaaagatgggatagtgatgcctacgaatcccaaaagcacccgtgccttcagcaactcttcctatgtcctgaatcccacaacaggagagctggtctttgatcccctgtcagcctctgatactggagaatacagctgtgaggcacggaatgggtatgggacacccatgacttcaaatgctgtgcgcatggaagctgtggagcggaatgtgggggtcatcgtggcagccgtccttgtaaccctgattctcctgggaatcttggtttttggcatctggtttgcctatagccgaggccactttgacagaacaaagaaagggacttcgagtaagaaggtgatttacagccagcctagtgcccgaagtgaaggagaattcaaacagacctcgtcattcctggtgtgagcctggtcggctcaccgcctatcatctgcatttgccttactcaggtgctaccggactctggcccctgatgtctgtagtttcacaggatgccttatttgtcttctacaccccacagggccccctacttcttcggatgtgtttttaataatgtcagctatgtgccccatcctccttcatgccctccctccctttcctaccactgctgagtggcctggaacttgtttaaagtgtttattccccatttctttgagggatcaggaaggaatcctgggtatgccattgacttcccttctaagtagacagcaaaaatggcgggggtcgcaggaatctgcactcaactgcccacctggctggcagggatctttgaataggtatcttgagcttggttctgggctctttccttgtgtactgacgaccagggccagctgttctagagcgggaattagaggctagagcggctgaaatggttgtttggtgatgacactggggtccttccatctctggggcccactctcttctgtcttcccatgggaagtgccactgggatccctctgccctgtcctcctgaatacaagctgactgacattgactgtgtctgtggaaaatgggagctcttgttgtggagagcatagtaaattttcagagaacttgaagccaaaaggatttaaaaccgctgctctaaagaaaagaaaactggaggctgggcgcagtggctcacgcctataatcccagaggctgaggcaggcggatcacctgaggtcaggagttcaagatcagcctgaccaacatggagaaaccctactaaaaatacaaagttagccaggcatagtggtgcatgcctgtaatcccagctgctcaggagcctggcaacaagagcaaaactccagctcaaaaaaaaaaagaaagaaaagaaagctggagctggtggcttaggccatcacccttcccttggctggaactactggacagacccttttgagatgtgcctgtggtgctgtggagatgtgtgtagtggtcttagctctttgttgagcttgtgtgtgtgttgtgtagtcttagctgtatgctgaaattgggcgtgtgttggagggcttcttagctctttggtgagattgtatttctatgtgtttgtatcagctgaatgttgctggaaataaaaccttggtttgtcaaggctcttttttgtgggaagtaagtaggggaaaaggtctttgagggttcctaggctcctttgtacaacaggaaaatgcctcaaagccttgcttcccagcaacctggggctggttcccagtgcctggtcctgccccttcctggttcttatctcaaggcagagcttctgaatttcaggccttcattccagagccctcttgtggccaggccttcctttgctggaggaaggtacacagggtgaagctgatgctgtacttgggggatctccttggcctgttccaccaagtgagagaaggtacttactcttgtacctcctgttcagccaggtgcattaacagacctccctacagctgtaggaactactgtcccagagctgaggcaaggggatttctcaggtcatttggagaacaagtgctttagtagtagtttaaagtagtaactgctactgtatttagtggggtggaattcagaagaaatttgaagaccagatcatgggtggtctgcatgtgaatgaacaggaatgagccggacagcctggctgtcattgctttcttcctccccatttggacccttctctgcccttacatttttgtttctccatctaccaccatccaccagtctatttattaacttagcaagaggacaagtaaagggccctcttggcttgattttgcttctttctttctgtggaggatatactaagtgcgactttgccctatcctatttggaaatccctaacagaattgagttttctattaaggatccaaaaagaaaaacaaaatgctaatgaagccatcagtcaagggtcacatgccaataaacaataaattttccagaagaaatgaaatccaactagacaaataaagtagagcttatgaaatggttcagtaaagatgagtttgttgttttttgttttgttttgttttgtttttttaaagacggagtctcgctctgtcacccaggctggagtgcagtggtatgatcttggctcactgtaacctccgcctcccgggttcaagccattctcctgcctcagtctcctgagtagctgggattacgggtgcgtgccaccatgcctggctaatttttgtgtttttagtagagacagggtttcaccatgttggtcgggctggtctcaaactcctgacctcttgatccgcctgccttggcctcccaaagtgatgggattacagatgtgagccaccgtgcctagccaaggatgagatttttaaagtatgtttcagttctgtgtcatggttggaagacagagtaggaaggatatggaaaaggtcatggggaagcagaggtgattcatggctctgtgaatttgaggtgaatggttccttattgtctaggccacttgtgaagaatatgagtcagttattgccagccttggaatttacttctctagcttacaatggaccttttgaactggaaaacaccttgtctgcattcactttaaaatgtcaaaactaatttttataataaatgtttattttcacattgagtttgtttaaatcctgaagttcttaccttaagagaattgggactcctagagtgattggacattcaaaatattcctgatagtcttgttaattaagagattaggatatctttccattaccttgataattacgttttaatttagcttttttcattggcctgtgtttaaatgcaaataaccccacaatggacatttcctatgttaaagtgacatttaggggataaaaaatgagagcagttccatggattttggtgtttcccctgagacatgaactcagcataatctgggataaaatgattgagtgttaaggatgtgtttgttgttcctgtcgtttttttattttcttcaaagtatacaacatggtttgatatgcacatacatttgtgtaatgattgccatggtcaattaacacatcaccatttttgtgtgtgtgtgtgtgtgtgtgtgtgagggagtcttgctccgttgccaggctggagtgcaatggtacaaccttggctcactgcaacctccacctcctgggttcaagcaattctcttgcctcagcctcctaagtagctgggactataggcgtgtgccaccatgcccagctaatttttgtatttttagtagagacggggtttcaccatgttggccaggatgatctcgatcccttgacctcatgatccgcccacctcggcctcccaaagtgctgggattacaggcgtgagtcactgcacccggccacatcacctcccatgttctatcttacgtattcagaacttgttcatcttgtaactgaaagcgtgtaccctttgaccaacactgtttttcctgtcttaacaggatctacagatcaaggacaggggaggggatagtggaggaaaacggagttagtctgtttctaaatgaggggacagtatgtttcttggggcctgaggacagcttaataaagtagacaaatgaagaaaaacaacaatttgcattaaaaaatatccaattcttta

SEQ ID NO: 192927 - DNA, 1162 bp, Artificial Sequence
  derived and/or modified sequence
gcttccggatccggtctcagctctgggagggaacgggagatgttgcaggcgccgagagggcgggccagggccgcactccggagactcgcggttgctacgcgcaccatggctggaggctccctggcattgggcagtgttacagtgcactcttctgaacctgaagtcagaattcctgagaataatcctgtgaagttgtcctgtgcctactcgggcttttcttctccccgtgtggagtggaagtttgaccaaggagacaccaccagactcgtttgctataataacaagatcacagcttcctatgaggaccgggtgaccttcttgccaactggtatcaccttcaagtccgtgacacgggaagacactgggacatacacttgtatggtctctgaggaaggcggcaacagctatggggaggtcaaggtcaagctcatcgtgcttgtgcctccatccaagcctacagttaacatcccctcctctgccaccattgggaaccgggcagtgctgacatgctcagaacaagatggttccccaccttctgaatacacctggttcaaagatgggatagtgatgcctacgaatcccaaaagcacccgtgccttcagcaactcttcctatgtcctgaatcccacaacaggagagctggtctttgatcccctgtcagcctctgatactggagaatacagctgtgaggcacggaatgggtatgggacacccatgacttcaaatgctgtgcgcatggaagctgtggagcggaatgtgggggtcatcgtggcagccgtccttgtaaccctgattctcctgggaatcttggtttttggcatctggtttgcctatagccgaggccactttgacagaacaaagaaagggacttcgagtaagaaggtgatttacagccagcctagtgcccgaagtgaaggagaattcaaacagacctcgtcattcctggtgtgagcctggtcggctcaccgcctatcatctgcatttgccttactcaggtgctaccggactctggcccctgatgtctgtagtttcacaggatgccttatttgtcttctacaccccacagggccccctacttcttcggatgtgtttttaataatgtcagctatgtgccccatcctccttcatgccctccctccctttcctaccactgctgagtggc

SEQ ID NO: 192928 - DNA, 1245 bp, Artificial Sequence
  derived and/or modified sequence
gttgtgtcgggagcctgatcgcgatggggacaaaggcgcaagtcgagaggaaactgttgtgcctcttcatattggcgatcctgttgtgctccctggcattgggcagtgttacagtgcactcttctgaacctgaagtcagaattcctgagaataatcctgtgaagttgtcctgtgcctactcgggcttttcttctccccgtgtggagtggaagtttgaccaaggagacaccaccagactcgtttgctataataacaagatcacagtgcctccatccaagcctacagttaacatcccctcctctgccaccattgggaaccgggcagtgctgacatgctcagaacaagatggttccccaccttctgaatacacctggttcaaagatgggatagtgatgcctacgaatcccaaaagcacccgtgccttcagcaactcttcctatgtcctgaatcccacaacaggagagctggtctttgatcccctgtcagcctctgatactggagaatacagctgtgaggcacggaatgggtatgggacacccatgacttcaaatgctgtgcgcatggaagctgtggagcggaatgtgggggtcatcgtggcagccgtccttgtaaccctgattctcctgggaatcttggtttttggcatctggtttgcctatagccgaggccactttgacagaacaaagaaagggacttcgagtaagaaggtgatttacagccagcctagtgcccgaagtgaaggagaattcaaacagacctcgtcattcctggtgtgagcctggtcggctcaccgcctatcatctgcatttgccttactcaggtgctaccggactctggcccctgatgtctgtagtttcacaggatgccttatttgtcttctacaccccacagggccccctacttcttcggatgtgtttttaataatgtcagctatgtgccccatcctccttcatgccctccctccctttcctaccactgctgagtggcctggaacttgtttaaagtgtttattccccatttctttgagggatcaggaaggaatcctgggtatgccattgacttcccttctaagtagacagcaaaaatggcgggggtcgcaggaatctgcactcaactgcccacctggctggcagggatctttgaataggtatcttgagcttggttctgggctctttccttgtgtactgacgaccagggccagctgttctagagcgggaattagaggctagagcggctgaaatggtt

SEQ ID NO: 192929 - DNA, 900 bp, Artificial Sequence
  derived and/or modified sequence
atgggcaccaaggcccaggtggagaggaagctgctgtgcctcttcatcctggccatcctgctgtgcagcctggccctgggctctgtgacagtgcacagcagcgagcctgaggtgcgcatccctgagaacaaccctgtgaagctgagctgtgcctacagcggcttcagcagcccccgggtggagtggaagtttgaccagggcgacaccacccggctggtgtgctacaacaacaagatcacagccagctatgaggacagagtgaccttcctgcccaccggcatcaccttcaagtctgtgacccgggaggacaccggcacctacacctgcatggtgtctgaggagggcggcaacagctatggagaggtgaaggtgaagctgattgtgctggtgccccccagcaagcccaccgtgaacatccccagcagcgccaccatcggcaacagagctgtgctgacctgcagcgagcaggacggcagcccccccagcgagtacacctggttcaaggatggcatcgtgatgcccaccaaccccaagagcacccgggccttcagcaacagcagctatgtgctgaaccccaccaccggggagctggtgtttgaccccctgagcgccagtgacacaggagagtacagctgtgaggccagaaatggctacggcacccccatgaccagcaatgctgtgaggatggaggccgtggagagaaatgtgggcgtgattgtggccgctgtgctggtgaccctcatcctgctgggcatcctggtgtttggcatctggtttgcctacagccggggccactttgacaggaccaagaagggcaccagcagcaagaaggtgatctacagccagcccagcgcccggtctgagggggagttcaagcagaccagcagcttcctggtgtag

SEQ ID NO: 192930 - DNA, 912 bp, Artificial Sequence
  derived and/or modified sequence
atgctgcaggccccccggggccgggcccgggccgccctgcggcggctggccgtggccaccaggaccatggccggcggcagcctggccctgggctctgtgacagtgcacagcagcgagcctgaggtgcgcatccctgagaacaaccctgtgaagctgagctgtgcctacagcggcttcagcagcccccgggtggagtggaagtttgaccagggcgacaccacccggctggtgtgctacaacaacaagatcacagccagctatgaggacagagtgaccttcctgcccaccggcatcaccttcaagtctgtgacccgggaggacaccggcacctacacctgcatggtgtctgaggagggcggcaacagctatggagaggtgaaggtgaagctgattgtgctggtgccccccagcaagcccaccgtgaacatccccagcagcgccaccatcggcaacagagctgtgctgacctgcagcgagcaggacggcagcccccccagcgagtacacctggttcaaggatggcatcgtgatgcccaccaaccccaagagcacccgggccttcagcaacagcagctatgtgctgaaccccaccaccggggagctggtgtttgaccccctgagcgccagtgacacaggagagtacagctgtgaggccagaaatggctacggcacccccatgaccagcaatgctgtgaggatggaggccgtggagagaaatgtgggcgtgattgtggccgctgtgctggtgaccctcatcctgctgggcatcctggtgtttggcatctggtttgcctacagccggggccactttgacaggaccaagaagggcaccagcagcaagaaggtgatctacagccagcccagcgcccggtctgagggggagttcaagcagaccagcagcttcctggtgtag

SEQ ID NO: 192931 - DNA, 753 bp, Artificial Sequence
  derived and/or modified sequence
atgggcaccaaggcccaggtggagaggaagctgctgtgcctcttcatcctggccatcctgctgtgcagcctggccctgggctctgtgacagtgcacagcagcgagcctgaggtgcgcatccctgagaacaaccctgtgaagctgagctgtgcctacagcggcttcagcagcccccgggtggagtggaagtttgaccagggcgacaccacccggctggtgtgctacaacaacaagatcaccgtgccccccagcaagcccaccgtgaacatccccagcagcgccaccatcggcaacagagctgtgctgacctgcagcgagcaggacggcagccccccatctgagtacacctggttcaaggatggcatcgtgatgcccaccaaccccaagagcacccgggccttcagcaacagcagctatgtgctgaaccccaccactggagagctggtgtttgaccccctgagcgccagtgacaccggggagtacagctgtgaggccagaaatggctacggcacccccatgaccagcaatgctgtgaggatggaggccgtggagagaaatgtgggcgtcatcgtggccgctgtgctggtgaccctcatcctgctgggcatcctggtgtttggcatctggtttgcctacagccggggccactttgacaggaccaagaagggcaccagcagcaagaaggtgatctacagccagcccagcgcccggtctgagggggagttcaagcagaccagcagcttcctggtgtag

SEQ ID NO: 192932 - DNA, 900 bp, Artificial Sequence
  derived and/or modified sequence
atgggcaccaaggcccaggtggagcggaagctgctgtgcctgttcatcctcgctatccttctctgcagtttagccctggggtccgtcaccgtgcattcgtccgaacctgaggtgaggattcctgaaaacaatcccgtgaagctaagctgtgcctattctgggttcagctcccccagagtcgaatggaaattcgatcaaggggatacaacccgcctggtttgctacaacaataaaattacagcttcatacgaggaccgggtcaccttcctgcccaccggcattacattcaagagtgtcactcgagaggatacaggcacttacacttgcatggtctctgaggagggggggaacagttatggggaggtcaaagtgaaactcattgtcctagtgccaccaagtaaacccacagtgaacatcccttcatccgcaacaatcggaaaccgggccgttctgacctgttcagagcaggatggatcccctccatcagagtacacctggttcaaagatggtatagtgatgcctacaaaccctaaatccaccagagctttttcaaactcctcttacgtgctcaaccccaccaccggcgaattggtcttcgaccctctgagcgcgtcggacaccggagagtattcctgcgaagcccggaatggatatggcacaccaatgacaagcaacgcggtgagaatggaggccgtggagcgaaatgtcggtgtgatagtggcagcggttttggtgacccttatcctgctcggcatcctggtctttggcatttggtttgcttactctaggggccactttgaccggactaagaagggcacatcatcaaagaaagttatctacagccagcccagtgcacggagtgagggcgagttcaaacagacctcctccttcctcgtctag

SEQ ID NO: 192933 - DNA, 900 bp, Artificial Sequence
  derived and/or modified sequence
atgggcaccaaggcccaggtggagcggaagctgctgtgcctgttcattctggccatactgttatgcagccttgccttaggttcagtgacagtgcacagctccgaacctgaggtgcgtatcccagaaaacaatcctgtgaaactgtcttgtgcctacagcggattctcatctcctcgagttgaatggaaattcgatcagggcgacaccactcggttggtttgctataataacaaaataaccgcttcctacgaggatcgagtcacatttttgcccacaggcatcactttcaaaagcgtgacccgagaggataccgggacatacacctgcatggtttcagaagaaggtggtaatagctatggagaggtgaaggtgaagctaattgttctcgtacccccatctaaacctactgtgaacatcccctcaagcgctaccataggaaatcgggctgtactcacttgcagcgagcaggatggttccccccctagcgaatacacctggtttaaggacggcatcgtgatgcccactaacccaaaatctacacgtgctttctcaaattcatcttacgtgctgaaccctacgaccggggagcttgtatttgacccgctgagcgcctcagatacgggggagtattcttgtgaggcaagaaatggctacggaactccaatgacttctaacgccgtgagaatggaagcggttgagcgcaacgtcggcgtgatagtagccgctgtgttagttacactgatccttctgggcattctggtctttgggatttggttcgcatatagcagaggccacttcgaccggaccaaaaaggggactagtagcaagaaagtcatatactctcagccttcggcgaggtcagaaggggaattcaagcagacatctagctttttagtttag

SEQ ID NO: 192934 - DNA, 900 bp, Artificial Sequence
  derived and/or modified sequence
atgggcaccaaggcccaggtggagcggaagctgctgtgcctgttcattcttgctatactattgtgtagcctcgccctcggcagtgttacagtacactcaagcgagcccgaagttcgcattccagagaacaacccagtaaagctatcatgtgcttatagtgggttttcgtctccccgtgtagagtggaagtttgatcaaggtgacactactcggctggtgtgttacaataacaagattaccgcctcttacgaagatcgtgtgacgttccttcctacaggtattacattcaagagcgttacaagagaagacactggaacttacacctgcatggtctctgaagaaggcggcaattcatacggtgaagtgaaggtcaagctcattgtgttggtgccaccctcaaaaccgacagtgaatatcccttcctccgcgacaattggcaatcgggctgttctcacgtgttcagaacaagacgggtcccctccatccgaatacacttggttcaaggatggcatcgtgatgcctacaaaccctaagagtacacgcgcattctctaactcaagttacgtgcttaaccccactactggggagctggtgtttgatcctcttagcgcctcagatactggggagtattcgtgcgaggcaaggaacggctacggaacaccgatgacctccaatgcggttcgcatggaggccgtagaacgcaacgttggggttatagtcgccgccgttcttgttacacttatcctgttaggcattcttgtgtttggcatctggttcgcatatagcagaggtcattttgataggaccaagaaaggcacctcctccaagaaagttatctacagccagccatccgctaggagtgaaggcgaattcaagcagacaagctctttcctggtttag

SEQ ID NO: 192935 - DNA, 912 bp, Artificial Sequence
  derived and/or modified sequence
atgctgcaggccccccggggccgggcccgggccgccctgcggcggctcgccgtggccacgagaactatggcagggggcagcttggccctgggaagcgtaacagtgcactcaagcgaaccagaggtgcgaatccctgagaacaacccagtgaagctgtcctgtgcttattccggctttagctctcctagagttgagtggaaattcgatcagggggacacaacacgacttgtgtgttacaacaacaaaataacagccagctatgaagaccgggttacattcctgccgacaggaataactttcaagtcagtgactcgagaagacactggcacctacacatgtatggtgagtgaagaggggggcaactcttacggcgaggtcaaagtaaaactcattgtgttagttccaccaagcaagcctacagtgaacatcccatcaagcgctaccattggtaaccgggctgttcttacttgcagcgagcaagacggatctccacctagcgagtacacatggttcaaggacggtatagtgatgcctactaaccctaagagtaccagagcattctctaactccagttacgtgctgaaccctacgaccggcgagcttgtgtttgaccccctctccgcaagtgacaccggcgagtattcgtgcgaggctcgaaacgggtatggcacccccatgaccagcaatgccgtgcgcatggaagccgtggaaaggaatgtgggcgtgatcgtggccgctgtcctggttaccttgatcctgctgggcatcctcgttttcggtatctggtttgcctattcccggggacactttgatcggacaaagaagggcacatccagcaagaaggtgatatattcccaaccgagcgctaggtccgagggggaatttaaacagacgtcttcgtttctcgtctag

SEQ ID NO: 192936 - DNA, 753 bp, Artificial Sequence
  derived and/or modified sequence
atgggcaccaaggcccaggtggagcggaagctgctgtgcctgttcatcctggcgattctgctgtgcagcctggccctgggcagtgtgacggtgcactcttccgagccggaggtgaggatcccagagaataaccctgttaagttgtcatgtgcttattccggcttctcaagcccccgcgtggagtggaagtttgaccagggcgacaccacacgattggtgtgctacaataacaagattactgtacctccaagcaagccaaccgtgaatataccctccagcgcgaccatcgggaaccgcgcagtcctgacctgtagtgagcaggacggatccccccccagcgagtacacatggtttaaagatggcatagtaatgccgaccaatccaaagtccacccgggctttttccaatagctcttatgtgctgaatcccacaacgggagagcttgtttttgaccctctcagcgcctctgataccggtgagtatagttgtgaagctcgtaatgggtacggcacacccatgacttcaaacgctgtgcggatggaggctgtagagagaaatgtcggcgtgatcgtggctgccgtcctagtgaccctcatactgctgggaattcttgtatttggcatctggttcgcatacagcaggggacacttcgataggacaaagaaaggcacgtcctccaaaaaggtgatctactcacagcctagcgctcggagtgaaggtgagttcaaacaaacgagctcatttcttgtctag

SEQ ID NO: 192937 - DNA, 900 bp, Artificial Sequence
  derived and/or modified sequence
atgggcaccaaggcacaggtggaaaggaaacttctgtgtctctttattttagccattctgctgtgctccctagctcttggctccgtgactgtccattcctcagagcctgaggtccggatcccagaaaacaaccctgtgaagctgtcttgcgcatattccggattctcatcgcctcgcgttgaatggaagttcgatcagggggacacgacacggctggtatgttacaataacaagatcactgcctcatatgaagaccgcgtgactttcctgcctactggtattacctttaagtctgtcaccagagaagacaccggaacttatacgtgcatggtttctgaggaaggaggaaactcctacggggaagtaaaggtcaagcttatcgtattggtgcccccaagcaagcccactgtcaatatcccatctagcgctacaattgggaatcgggctgtgctgacctgctctgaacaggacggcagcccccctagcgagtacacatggttcaaggatggtatcgttatgcctactaacccaaagagtactcgggcattctctaattccagttatgtgcttaatccgaccactggggagctggtcttcgaccccctgtccgcgagcgataccggtgagtactcgtgcgaagccaggaacggttatggcacacccatgacttcgaatgccgttcgcatggaagctgttgagcggaacgtgggggtgatcgtggcggctgtactggtaaccctgatactcttgggaatacttgtgttcggcatctggtttgcttactcccggggtcacttcgaccgcactaaaaagggtacctcttctaagaaggtcatctactcgcagcctagtgccagaagcgagggcgaatttaagcaaacaagcagctttctcgtatag

SEQ ID NO: 192938 - DNA, 900 bp, Artificial Sequence
  derived and/or modified sequence
atggggaccaaagcccaggttgagagaaagctgctctgccttttcatcctggccattcttctgtgctccctggcgctgggatcagtgacagtccatagttctgaaccagaggtgcgcatccctgagaataaccccgttaaactctcttgcgcctattcgggcttttcttccccacgggtggagtggaagttcgatcagggtgatacaactagacttgtatgctataacaataagatcaccgcttcttacgaagatcgcgtaacatttctacctactgggatcacattcaaatccgttacaagggaggatactggcacttatacatgtatggtgtccgaggaaggcggtaactcctacggtgaggtaaaggttaagctgattgtgctcgtaccaccatctaagccaactgtgaatatccctagcagcgccactatcgggaatagggctgtactcacctgctcagagcaggatggctcaccaccttctgagtacacatggtttaaagatggtatcgtgatgccaacaaatcctaaaagcacacgcgctttctctaattcctcctatgtgttaaaccccactactggtgaattggtgttcgatccgctgagtgcatctgacacaggggaatatagttgcgaagccaggaatggttatgggacccccatgacatccaacgccgtaagaatggaggctgttgagcgcaatgtgggagtcatcgtggcggctgttcttgtgacactgatcctgctcggtatactggtcttcgggatttggttcgcgtattcacgagggcacttcgataggactaaaaaggggacttcttcgaagaaagtgatatattcccagccttccgcaagatcagagggagaatttaaacaaactagttcatttttagtgtag

SEQ ID NO: 192939 - DNA, 900 bp, Artificial Sequence
  derived and/or modified sequence
atggggactaaagcccaagtagagcgtaagcttttgtgtctgttcatactggctatattgctgtgttcactagcgcttggatctgtgacagtccactctagtgaacctgaagtccgcattccagagaacaaccccgttaagctgagctgtgcttactccggattttcctcacccagagtcgagtggaaattcgaccagggcgatacaaccagactggtttgctacaacaataaaattaccgcctcctatgaagacagggtgacattcttgcccaccggaatcaccttcaagtccgtaactcgggaggacacgggtacgtacacttgcatggtcagcgaggagggtggaaattcttacggagaggtcaaagtcaagctgatcgtgttagtccctccttcaaagcctacagtaaacatccctagtagcgcaactatcggaaacagagcggtcttgacctgttcagagcaggatggctccccgccttccgagtacacatggtttaaggacggaatagtcatgcccaccaaccccaaatctaccagggcctttagcaattctagctatgtcctgaatcctactacaggtgaactagtcttcgatcctctctctgccagcgacacgggggaatacagttgcgaggctaggaacggctacggtacgcctatgacctccaatgccgtgcggatggaagccgtagagcgtaacgtgggagtgatcgtggcggcagttctggttacgctgatacttctgggcattctggtatttggcatctggtttgcttattcccgcggacattttgacagaacgaaaaaaggaacatccagcaaaaaggtaatctattcccagccgtcagcaagaagtgagggggagttcaagcagacaagcagctttctggtctag

SEQ ID NO: 192940 - DNA, 912 bp, Artificial Sequence
  derived and/or modified sequence
atgctgcaggcccctcgagggcgagctcgcgctgctctgaggagactagccgtggcaaccaggactatggcaggtggctcattggccctgggcagtgtgacggtgcattctagtgaaccagaggtcagaatcccagaaaacaatccagtgaaactgtcatgcgcttacagcgggtttagctctccgagggtggagtggaaattcgatcagggagacactacaaggttagtctgttacaacaataagattaccgcaagttacgaagatcgtgtgacttttctcccaacggggataactttcaaaagcgtcaccagggaggataccggcacctatacctgtatggttagtgaggaggggggaaatagctacggcgaggtaaaagtgaaattaattgttctagtacccccttcgaagcccacagtcaacatccccagctctgctaccattggcaatcgggcagttttgacttgtagcgagcaggatggatccccccctagtgagtacacatggttcaaagacggaatcgtgatgcctacgaaccccaagtccactcgggctttctcaaacagctcctatgtactgaatcccactaccggtgaacttgtgtttgaccccttatccgcttccgataccggggagtacagttgtgaagctcgaaatggctacggaactccaatgacctctaacgccgtgcgcatggaggcggtggaaagaaatgtcggtgtaatagtagcagctgtgctggtcaccctcattctgcttggaatccttgttttcggcatttggtttgcttacagtcgtggtcacttcgaccggactaagaaagggacttcttctaaaaaagttatatattcccagccatccgcacgatcagagggggagtttaaacagacctcatccttcctggtctag

SEQ ID NO: 192941 - DNA, 753 bp, Artificial Sequence
  derived and/or modified sequence
atggggaccaaggcgcaagtggaaagaaagctgctgtgcctgttcattctcgccatactgctatgttccctggccctgggctcagtgacagtccatagcagtgagcccgaggtgcgaattcccgaaaataatcccgtgaagctgtcctgtgcctactctggcttttcttctccgagagttgagtggaagttcgaccaaggcgatacaacgaggttagtgtgctacaacaacaagattaccgtccccccatcaaagccgacagtgaacattccctcctccgctacaataggtaaccgggctgtgcttacctgcagcgaacaggacggaagtcccccttcggaatacacctggtttaaggatggtatcgtcatgccaaccaacccaaagtctacgcgagccttttctaactcctcatacgtgctcaatccaacgacgggagaacttgtcttcgatccactgagcgcctctgacacaggagaatatagctgtgaggctcgtaatggttacggtactccaatgacaagtaatgcggtcaggatggaagctgtggagcgcaacgtgggagtcatcgtggccgctgttttggtaacgctgattctcctgggcatcctcgtttttggcatttggttcgcttatagccggggacactttgaccgtacaaagaagggtacctcttctaaaaaagtgatctattcacagccttccgccagatcagagggcgagttcaagcaaacctccagtttcctcgtgtag

SEQ ID NO: 192942 - protein, 346 aa, Artificial Sequence
  derived and/or modified sequence
MARPQRTPARSPDSIVEVKSKFDAEFRRFALPRASVSGFQEFSRLLRAVHQIPGLDVLLGYTDAHGDLLPLTNDDSLHRALASGPPPLRLLVQKRAEADSSGLAFASNSLQRRKKGLLLRPVAPLRTRPPLLISLPQDFRQVSSVIDVDLLPETHRRVRLHKHGSDRPLGFYIRDGMSVRVAPQGLERVPGIFISRLVRGGLAESTGLLAVSDEILEVNGIEVAGKTLDQVTDMMVANSHNLIVTVKPANQRNNVVRGASGRLTGPPSAGPGPAEPDSDDDSSDLVIENRQPPSSNGLSQGPPCWDLHPGCRHPGTRSSLPSLDDQEQASSGWGSRIRGDGSGFSL

SEQ ID NO: 192943 - DNA, 1248 bp, Artificial Sequence
  derived and/or modified sequence
cgcgggcgggccggccgggctgtgcacctgcgcctcggcgggccgcctggggcaccgtccccggcccgcccggccccgccatggcccggccgcagaggactccggcgcgcagtcccgatagcatcgtcgaggtgaagagcaaatttgacgccgagttccgacgcttcgcgctgcctcgcgcttcggtgagcggcttccaggagttctcgcggttgctgcgggcggtgcaccagatcccgggcctggacgtgctacttggctatacggatgctcatggcgacctgctgcccctcaccaacgacgacagcctgcaccgggccctggccagcgggcccccgccactgcgcctactggtgcagaagcgggcagaagctgactccagcggcctggcttttgcctccaactctctgcagcggcgcaagaaagggctcttgctgcggccagtggcacccctgcgcacccggccacccttgctaatcagcctgccccaagatttccgccaggtttcctcagtcatagacgtggacctactgcctgagacccaccgacgggtgcggctgcacaagcatggttcagaccgccccctgggcttctacatccgagatggcatgagcgtgcgtgtggctccccagggcctggagcgggttccaggaatcttcatctcccgcctggtacgtgggggtctggctgagagtacagggctgctggcggtcagtgatgagatcctcgaggtcaatggcattgaagtagccgggaagaccttggaccaagtgacggacatgatggttgccaacagccataacctcattgtcactgtcaagcccgccaaccagcgcaataacgtggtgcgaggggcatctgggcgtttgacaggtcctccctctgcagggcctgggcctgctgagcctgatagtgacgatgacagcagtgacctggtcattgagaaccgccagcctcccagttccaatgggctgtctcaggggcccccgtgctgggacctgcaccctggctgccgacatcctggtacccgcagctctctgccctccctggatgaccaggagcaggccagttctggctgggggagtcgcattcgaggagatggtagtggcttcagcctctgacagtcaggatgaagccccatgccactccacactgctgggacatggcagggacttcacagtgggggtttttagctggctcacagggctccctcagcctggggaacattaaaggttttctacaaataca

SEQ ID NO: 192944 - DNA, 1041 bp, Artificial Sequence
  derived and/or modified sequence
atggccagaccccagagaacccccgccagaagccccgacagcatcgtggaggtgaagagcaagttcgacgccgagttcagaagattcgccctgcccagagccagcgtgagcggcttccaggagttcagcagactgctgagagccgtgcaccagatccccggcctggacgtgctgctgggctacaccgacgcccacggcgacctgctgcccctgaccaacgacgacagcctgcacagagccctggccagcggccccccccccctgagactgctggtgcagaagagagccgaggccgacagcagcggcctggccttcgccagcaacagcctgcagagaagaaagaagggcctgctgctgagacccgtggcccccctgagaaccagaccccccctgctgatcagcctgccccaggacttcagacaggtgagcagcgtgatcgacgtggacctgctgcccgagacccacagaagagtgagactgcacaagcacggcagcgacagacccctgggcttctacatcagagacggcatgagcgtgagagtggccccccagggcctggagagagtgcccggcatcttcatcagcagactggtgagaggcggcctggccgagagcaccggcctgctggccgtgagcgacgagatcctggaggtgaacggcatcgaggtggccggcaagaccctggaccaggtgaccgacatgatggtggccaacagccacaacctgatcgtgaccgtgaagcccgccaaccagagaaacaacgtggtgagaggcgccagcggcagactgaccggcccccccagcgccggccccggccccgccgagcccgacagcgacgacgacagcagcgacctggtgatcgagaacagacagccccccagcagcaacggcctgagccagggccccccctgctgggacctgcaccccggctgcagacaccccggcaccagaagcagcctgcccagcctggacgaccaggagcaggccagcagcggctggggcagcagaatcagaggcgacggcagcggcttcagcctgtag

SEQ ID NO: 192945 - DNA, 1041 bp, Artificial Sequence
  derived and/or modified sequence
atggcaagaccacaaagaacgccagctcgcagtcctgattcaatagtggaggtgaagagcaagttcgacgccgagttcaggcggttcgccttaccccgagcttctgtgtccggctttcaggagttctcaagactgctgagggctgttcaccagattccgggtctggatgtgctactcggctacacagacgcccatggagatcttctgccactcaccaacgacgactcactgcatcgcgctctggcctccggccctcctcccttacggttgctcgtgcagaagcgagccgaagccgactccagcggcctcgcctttgcctctaatagcctgcagcggcgaaaaaaagggctgttgttaaggccagtggctccactgcgcaccaggcctcctctgctaattagtctgcctcaggacttccgacaagtgagctccgtgatcgacgtcgacctcctgcctgagactcaccgcagggtgcggctacacaagcacgggtcggaccgccccctggggttctacatcagggacggaatgtccgtgagagtcgctcctcagggcctcgaaagggttccaggaatttttatcagtcggttggtgagagggggactggcagagtccacaggactgctagcagtgtccgacgagatactcgaggtcaatggcatagaggtagcaggaaaaacactagaccaggtgacagatatgatggtagccaactcccacaatctgattgttactgttaaacccgcgaaccaacgcaataatgtggtgcgcggcgcttctggcaggttgaccggtcctcctagtgccggtcccgggccagccgagccagatagcgacgacgatagctccgatctcgtcatcgaaaaccgacagccaccctcctctaatggactgtcacagggccccccttgttgggatctgcacccaggctgtcgtcacccaggaactcgcagttctttaccctctctggatgatcaggaacaggcctcttcagggtggggaagtagaatccgaggcgacggcagtggattcagcctatag

SEQ ID NO: 192946 - DNA, 1041 bp, Artificial Sequence
  derived and/or modified sequence
atggcccggccccagaggaccccagcccggagcccagacagcatcgtggaggtgaagagcaagtttgatgctgagttcagaagatttgccctgccccgggcctctgtgtctggcttccaggagttcagccggctgctgcgggctgtgcaccagatccctggcctggatgtgctgctgggctacacagatgcccatggagacctgctgcccctgaccaatgatgacagcctgcaccgggccctggccagcggccccccacccctgcggctgctggtgcagaagagagctgaggccgacagcagcggcctggcctttgccagcaacagcctgcagaggaggaagaagggcctgctgctgcggcctgtggcccccctgcggaccaggcctcccctgctgatcagcctgccccaggacttccggcaggtgtcctctgtgattgatgtggacctgctgcctgagacccaccggcgggtgcggctgcacaagcacggcagtgaccggcccctgggcttctacatcagagatggcatgtctgtgcgggtggccccccagggcctggagcgggtgcccggcatcttcatcagccggctggtgcggggcggcctggccgagagcacaggcctgctggccgtgtctgatgagatcctggaggtgaatggaattgaggtggccggcaagaccctggaccaggtgacagacatgatggtggccaacagccacaacctgattgtgacagtgaagccagccaaccagaggaacaacgtggtgcggggggccagcggccgcctgaccggcccccccagcgctggccctggccctgctgagccagacagtgatgatgacagcagtgacctggtgattgagaaccggcagccccccagcagcaatggcctgagccagggccccccctgctgggacctgcaccctggctgccgccaccctggcaccaggagcagcctgcccagcctggatgaccaggagcaggccagcagcggctggggcagccgcatcagaggagatggcagcggcttcagcctgtag

SEQ ID NO: 192947 - DNA, 1041 bp, Artificial Sequence
  derived and/or modified sequence
atggcccggccccagcggacccccgcccggagccccgacagcatcgtggaggtgaagagcaagttcgatgccgagttccgaaggttcgcccttcctcgggcatcagtgtcagggttccaagaattttctcgcctgttacgggcagtacaccagatcccaggtcttgacgtactcctgggctacaccgacgcgcacggggacctcctgccacttacgaacgatgacagtttgcatcgagccctggcgtctgggccaccccctctgagactattggtgcagaagcgcgccgaggcagattcatccggtctggctttcgccagcaactccctgcagcgccgcaagaagggactactgctgaggccagtggcccctctacgcactcgacctccactgctaattagtcttccccaggactttaggcaagtctctagtgtgatcgatgtggacctgctcccagagactcatcgtcgcgtgcgtctgcacaagcatggctcggatcggccattgggcttttatattcgtgatggcatgtctgtaagagtggcaccgcaggggctggagcgtgtgcccggcatcttcatctccaggctggtccgaggcggattggccgagtcaacagggctgctggctgtgagcgacgagatattggaagtcaacggtatagaggtggccgggaagacactggaccaggtgactgacatgatggttgctaactcccacaacctaatcgtcaccgttaaaccagctaaccagaggaataacgtcgtacgcggcgcttcaggtcgcctgacagggccgccttcagcagggcccggccccgccgagccggattctgacgacgattcctcagatctggtgatcgagaaccgccagccaccatcctccaatgggctgtcccaaggccccccttgctgggacctgcaccccgggtgtaggcaccctggcacccgcagttccctgcctagcctcgatgaccaagaacaagcttcctctggctggggctcgcggatcaggggagatggatccgggttttctctttag

SEQ ID NO: 192948 - DNA, 1041 bp, Artificial Sequence
  derived and/or modified sequence
atggccaggcctcagcgcacacctgcaaggtcaccagacagcatagtagaggtcaaatcaaagtttgatgcagagtttcgtagatttgccctccctagagctagcgtctctgggtttcaggagttttccaggcttttaagggccgtccaccagatacctggactagatgtgctcctgggctatactgatgcccacggcgacctgcttccactaactaatgacgactcactgcaccgggcattagcaagtggcccacccccactcaggttgttggtccagaagagagcagaggcggatagtagcggactcgccttcgcttccaattcactgcagcgtagaaagaagggtctcttgctccgaccagtggcgccactgagaacgagacctcctctgctgattagtctgccccaagacttccgccaggtgtcatccgtgattgacgtggacctacttcctgaaacccatcgacgagtgcgccttcataaacacggtagtgatcgcccattgggattctatatccgggatggaatgtcagtcagagtcgcaccccagggcctggagagagtgccaggaattttcattagccggctcgttagagggggtctggccgagtcgactggtctgctagcagtgtcggacgagatcctggaggtcaacggaatcgaggtcgccggtaagactcttgaccaggtcacagatatgatggtggccaatagtcacaatcttattgtgacagtcaaaccagccaaccagcgcaataacgtggtgagaggcgcatcagggaggctcaccgggcctcctagtgctggacctggacccgcagaacccgactccgatgacgatagttctgatctggttatcgagaaccgacagcccccatcgagcaatgggctgagccagggcccaccttgctgggacctgcaccccggatgtaggcacccgggaaccaggagttccctgccttccctggatgatcaagagcaagcttcctcgggttggggaagccggattaggggtgacggaagcggcttttctctgtag

SEQ ID NO: 192949 - protein, 436 aa, Artificial Sequence
  derived and/or modified sequence
MLKVSAVLCVCAAAWCSQSLAAAAAVAAAGGRSDGGNFLDDKQWLTTISQYDKEVGQWNKFRDEVEDDYFRTWSPGKPFDQALDPAKDPCLKMKCSRHKVCIAQDSQTAVCISHRRLTHRMKEAGVDHRQWRGPILSTCKQCPVVYPSPVCGSDGHTYSFQCKLEYQACVLGKQISVKCEGHCPCPSDKPTSTSRNVKRACSDLEFREVANRLRDWFKALHESGSQNKKTKTLLRPERSRFDTSILPICKDSLGWMFNRLDTNYDLLLDQSELRSIYLDKNEQCTKAFFNSCDTYKDSLISNNEWCYCFQRQQDPPCQTELSNIQKRQGVKKLLGQYIPLCDEDGYYKPTQCHGSVGQCWCVDRYGNEVMGSRINGVADCAIDFEISGDFASGDFHEWTDDEDDEDDIMNDEDEIEDDDEDEGDDDDGGDDHDVYI

SEQ ID NO: 192950 - protein, 115 aa, Artificial Sequence
  derived and/or modified sequence
MLKVSAVLCVCAAAWCSQSLAAAAAVAAAGGRSDGGNFLDDKQWLTTISQYDKEVGQWNKFRDEVEDDYFRTWSPGKPFDQALDPAKDPCLKMKCSRHKVCIAQDSQTAVCISHR

SEQ ID NO: 192951 - DNA, 1311 bp, Artificial Sequence
  derived and/or modified sequence
atgctgaaggtgagcgccgtgctgtgcgtgtgcgccgccgcctggtgcagccagagcctggccgccgccgccgccgtggccgccgccggcggcagaagcgacggcggcaacttcctggacgacaagcagtggctgaccaccatcagccagtacgacaaggaggtgggccagtggaacaagttcagagacgaggtggaggacgactacttcagaacctggagccccggcaagcccttcgaccaggccctggaccccgccaaggacccctgcctgaagatgaagtgcagcagacacaaggtgtgcatcgcccaggacagccagaccgccgtgtgcatcagccacagaagactgacccacagaatgaaggaggccggcgtggaccacagacagtggagaggccccatcctgagcacctgcaagcagtgccccgtggtgtaccccagccccgtgtgcggcagcgacggccacacctacagcttccagtgcaagctggagtaccaggcctgcgtgctgggcaagcagatcagcgtgaagtgcgagggccactgcccctgccccagcgacaagcccaccagcaccagcagaaacgtgaagagagcctgcagcgacctggagttcagagaggtggccaacagactgagagactggttcaaggccctgcacgagagcggcagccagaacaagaagaccaagaccctgctgagacccgagagaagcagattcgacaccagcatcctgcccatctgcaaggacagcctgggctggatgttcaacagactggacaccaactacgacctgctgctggaccagagcgagctgagaagcatctacctggacaagaacgagcagtgcaccaaggccttcttcaacagctgcgacacctacaaggacagcctgatcagcaacaacgagtggtgctactgcttccagagacagcaggaccccccctgccagaccgagctgagcaacatccagaagagacagggcgtgaagaagctgctgggccagtacatccccctgtgcgacgaggacggctactacaagcccacccagtgccacggcagcgtgggccagtgctggtgcgtggacagatacggcaacgaggtgatgggcagcagaatcaacggcgtggccgactgcgccatcgacttcgagatcagcggcgacttcgccagcggcgacttccacgagtggaccgacgacgaggacgacgaggacgacatcatgaacgacgaggacgagatcgaggacgacgacgaggacgagggcgacgacgacgacggcggcgacgaccacgacgtgtacatctag

SEQ ID NO: 192952 - DNA, 348 bp, Artificial Sequence
  derived and/or modified sequence
atgctgaaggtgagcgccgtgctgtgcgtgtgcgccgccgcctggtgcagccagagcctggccgccgccgccgccgtggccgccgccggcggcagaagcgacggcggcaacttcctggacgacaagcagtggctgaccaccatcagccagtacgacaaggaggtgggccagtggaacaagttcagagacgaggtggaggacgactacttcagaacctggagccccggcaagcccttcgaccaggccctggaccccgccaaggacccctgcctgaagatgaagtgcagcagacacaaggtgtgcatcgcccaggacagccagaccgccgtgtgcatcagccacagatag

SEQ ID NO: 192953 - DNA, 1311 bp, Artificial Sequence
  derived and/or modified sequence
atgctcaaggtgtcagcagtgctgtgtgtttgtgcagccgcatggtgttctcagtccctggccgcggccgctgctgttgcagccgccggtgggagaagtgatggtggaaatttcctagatgacaagcagtggctgacgacaatttcccaatacgacaaagaggtgggtcagtggaataagtttcgcgatgaggttgaggatgactatttcaggacttggtctccgggcaagccctttgaccaggctctggatcctgcaaaggacccgtgcctaaagatgaaatgtagccggcacaaggtctgtattgcgcaagattctcaaacagcggtctgtatctcgcatagaagactgacacatcggatgaaggaggcaggagtggatcacaggcagtggagagggccaattctgagtacttgtaagcagtgcccggttgtttacccctcccccgtgtgtggctctgacgggcacacctattcttttcaatgtaaactggaatatcaggcctgtgtgctggggaagcagatctctgtcaagtgcgaagggcactgcccttgcccgagcgacaaaccgacttctaccagtagaaacgtgaaacgggcctgttcggacctcgaatttagagaagttgctaatcgattgagagactggtttaaagccctacacgagtctggaagccagaacaagaagaccaagaccttactgagaccagaaagatcaagattcgacacgagcattcttcctatttgcaaggactccctgggatggatgtttaatcgtcttgacacaaattacgaccttctgctggaccagtccgagctgcgtagcatctacctcgacaaaaacgagcagtgcacaaaggctttctttaattcctgtgatacctataaggactccctcatatcaaacaatgagtggtgctactgctttcagaggcagcaggaccctccctgccaaaccgagctttccaatatccagaagcgccagggtgtcaagaaactcctgggccaatatatccccttatgcgatgaagacggatactacaagcccacgcagtgccacggctctgtcggacagtgttggtgcgtggaccgttacggaaacgaggtgatgggcagccggatcaacggtgtggccgattgtgccatagatttcgagatctccggggactttgcttctggcgactttcatgaatggacagatgatgaggacgatgaggacgatattatgaatgatgaggatgagatcgaggatgatgacgaggatgagggcgacgatgacgacgggggtgacgaccacgatgtctacatctag

SEQ ID NO: 192954 - DNA, 1311 bp, Artificial Sequence
  derived and/or modified sequence
atgctaaaagtgtccgcagtcttgtgcgtgtgcgccgctgcatggtgttcccagagtctcgctgctgccgctgccgtggcagctgccggcggaaggagcgacggaggcaattttctagatgataaacaatggctcaccaccatctcccagtacgataaagaagtggggcagtggaacaagtttcgagatgaggtggaggacgattatttcagaacatggtcacctggtaaacctttcgaccaggcacttgacccggcaaaagacccttgtctgaagatgaaatgttctaggcacaaagtatgcattgcgcaggattcccagaccgccgtgtgtatctcacaccgccggttgactcaccgaatgaaagaagcaggagtggaccaccggcagtggagaggacccatactaagcacctgtaagcagtgtccagtcgtctaccctagccccgtgtgcggcagtgacggtcacacctatagttttcaatgtaagctggagtatcaggcctgtgtcctgggtaagcagattagtgttaaatgtgaaggacattgtccttgcccttcagataaaccaactagcacatctcgaaatgtcaaaagggcatgcagcgatctggaattccgcgaggtggccaaccgcctccgagattggtttaaggcactgcacgaatcgggaagccagaataagaagacaaaaacacttctgagaccagagcgatcacggttcgacaccagcatacttcccatctgcaaggactctctgggctggatgttcaacaggctggatacgaactacgatctgctccttgaccagtcagagctgcgcagcatctacttggataagaatgagcaatgtaccaaggctttctttaacagctgtgatacatataaagacagcctcatttcgaacaacgagtggtgctactgtttccagaggcaacaagatcctccctgccaaacagagttgtctaatatccagaagagacagggggtaaaaaagctcctcggccaatatatccccctgtgcgatgaagacgggtactataaaccaactcagtgccacggctcagttggtcagtgttggtgcgttgaccgatatgggaacgaagtcatgggttcaaggattaatggggtggctgactgtgcaatagatttcgagatctccggagacttcgcctctggcgatttccatgaatggaccgacgacgaagatgacgaagacgatataatgaacgacgaagacgagatagaagacgacgacgaggacgagggggatgatgacgatgggggggacgaccacgatgtctacatctag

SEQ ID NO: 192955 - DNA, 348 bp, Artificial Sequence
  derived and/or modified sequence
atgctgaaggtcagcgcggttttatgcgtctgcgcggctgcatggtgcagccagagcctcgccgcagccgctgctgtagccgcagccggagggcgcagtgatggcggaaactttctggatgataagcaatggctcacgactatctcacagtacgacaaagaagtcggccaatggaacaagttcagagacgaggtcgaagacgattatttccgaacctggagtcccggaaagccctttgatcaagctctcgatcccgccaaggatccatgtctcaagatgaagtgttcaaggcataaagtatgtattgcacaggattcccaaacggcggtatgcatctctcatagatag

SEQ ID NO: 192956 - DNA, 1311 bp, Artificial Sequence
  derived and/or modified sequence
atgctgaaagtgtccgcggtcttgtgtgtgtgtgctgcagcgtggtgttcacaatcactggctgccgctgccgccgtggctgcagccggcggacgctccgacggcggaaactttctggacgacaaacagtggcttaccactataagccagtacgacaaggaagtaggccagtggaataaattcagagacgaggtcgaggacgattatttccgaacatggagccctgggaagccttttgatcaggccctggacccagctaaagacccttgcctgaagatgaagtgctctcgtcacaaagtctgcatcgcacaagattcgcagactgccgtgtgtatcagtcaccgccgcctgactcatagaatgaaagaagcgggcgtggaccaccgccagtggcgggggcccatactgtctacctgtaaacagtgccctgtggtatacccgtcccctgtgtgtgggagcgatgggcacacatattccttccagtgcaagcttgaatatcaggcatgcgtccttggaaagcagattagtgttaaatgcgagggtcactgcccgtgcccttctgataagcccacctctaccagtagaaacgtgaagagggcttgttctgatttagaatttcgggaagtcgccaataggctcagggactggtttaaagctctgcacgagtcaggctcccagaataaaaagaccaagacactgcttcgccccgaacggtctcggttcgacacatctatcttacctatctgtaaggattccctggggtggatgtttaacaggcttgataccaattatgatctgctgctggaccaaagtgagctgaggtcgatttatttggataaaaatgagcagtgtacaaaggcgttttttaattcctgcgacacttacaaggattctcttatctccaataatgagtggtgttactgttttcagcggcagcaggacccgccgtgccagacagagctctcaaacatacagaaaagacagggagtcaagaagctgttaggccagtatattccactgtgtgacgaagacgggtactataagcctacacagtgccacggctccgttgggcagtgttggtgtgttgatcgctacgggaatgaggtgatgggctctcgaattaacggtgtagccgactgtgctatagactttgaaatttcaggagattttgcttccggtgatttccacgagtggacagacgacgaggatgacgaagacgatatcatgaacgatgaggatgagattgaggacgacgacgaggacgagggtgacgatgacgacggaggcgacgaccatgacgtgtacatctag

SEQ ID NO: 192957 - DNA, 1311 bp, Artificial Sequence
  derived and/or modified sequence
atgctgaaggtctcagcagttctatgcgtctgtgcggcagcctggtgctcccagtccctggcggctgcggctgctgtggctgctgctggcggcagatctgatggaggcaactttctggatgacaaacagtggctcacaaccatttcacagtatgacaaggaagttggccagtggaataagtttagagacgaggtagaggatgactactttcgaacgtggtcacccggcaaacccttcgatcaggccctagatcctgcaaaggatccttgtctgaaaatgaagtgcagtaggcacaaggtctgcatagcacaggattcccagactgccgtctgcatcagtcacaggagattgacgcatcgaatgaaggaggcgggcgtggaccatcgccagtggcgggggccaatactgtcaacctgcaaacaatgccccgtggtctacccaagccctgtctgtggaagcgacggccacacctattcatttcagtgtaaattagagtaccaggcgtgcgtacttggcaagcagattagtgtcaaatgtgagggacactgtccatgtccttcggataaacctacctcgacttctagaaacgtcaaacgggcatgtagcgaccttgagtttcgtgaggttgctaatagactgcgtgattggtttaaagccctgcatgaatccggcagtcagaacaaaaagacaaagactctacttcggcctgagcggagccgcttcgatacttccattcttccaatttgcaaggactccctaggttggatgttcaacagactggacaccaactatgacctgctgctggatcagtctgagctgagatccatctatttagacaaaaatgaacaatgcaccaaagcattcttcaattcgtgcgatacatacaaggactctctcatcagcaataacgagtggtgttactgtttccagagacagcaggatccaccttgtcagaccgaactgtctaatattcaaaaaagacagggtgtgaagaagcttctgggacagtacatcccactatgcgacgaggacggctattacaaaccaactcaatgccacggatctgttggacagtgctggtgtgtggaccggtatggcaacgaggtaatgggaagccggatcaacggagtcgctgactgtgcgatcgatttcgagatctccggggacttcgcctcaggcgattttcacgagtggaccgacgatgaggatgatgaagatgatatcatgaacgatgaagatgagattgaggacgacgatgaggacgaaggggatgatgacgatgggggagacgaccatgatgtttatatctag

SEQ ID NO: 192958 - DNA, 348 bp, Artificial Sequence
  derived and/or modified sequence
atgcttaaagtaagcgcagtcctgtgcgtgtgcgcggccgcctggtgcagtcagagcttggccgcggccgctgctgtagctgcagcaggagggagatccgacggcgggaattttctggatgataaacaatggctgactacgatcagccagtacgacaaggaggtaggccagtggaataagttccgtgatgaggtggaggacgactacttccgaacgtggtcccctggtaagccgttcgatcaggccctggatccagccaaggatccttgcctaaagatgaaatgttccaggcataaggtgtgtattgcccaggatagtcaaactgcagtgtgtatctctcatcggtag

SEQ ID NO: 192959 - DNA, 1311 bp, Artificial Sequence
  derived and/or modified sequence
atgctgaaggtgtctgctgtgctgtgtgtgtgtgccgccgcctggtgcagccagagcctggccgctgctgctgctgtggccgctgctgggggccgcagtgatggcggcaacttcctggatgacaagcagtggctgaccaccatcagccagtatgacaaggaggtgggccagtggaacaagttcagagatgaggtggaggatgactacttccgcacctggagccctgggaagccctttgaccaggccctggaccctgccaaggacccctgcctgaagatgaagtgcagccgccacaaggtgtgcatcgcccaggacagccagacagctgtgtgcatcagccaccggcggctgacccacaggatgaaggaggccggcgtggaccaccggcagtggaggggccccatcctgagcacctgcaagcagtgccctgtggtgtaccccagccctgtgtgtggcagtgatggccacacctacagcttccagtgcaagctggagtaccaggcctgtgtgctgggcaagcagatctctgtgaagtgtgagggccactgcccctgccccagcgacaagcccaccagcaccagcagaaatgtgaagagggcctgcagcgacctggagttccgggaggtggccaaccggctgcgggactggttcaaggccctgcatgaaagtggcagccagaacaagaagaccaagaccctgctgcggcctgagaggagcagatttgacaccagcatcctgcccatctgcaaggacagcctgggctggatgttcaaccggctggacaccaactatgacctgctgctggaccagagcgagctgcggagcatctacctggacaagaatgagcagtgcaccaaggccttcttcaacagctgtgacacctacaaggacagcctcatcagcaacaatgagtggtgctactgcttccagaggcagcaggaccccccctgccagacagagctgagcaacatccagaagaggcagggcgtgaagaagctgctgggccagtacatccccctgtgtgatgaagatggctactacaagcccacccagtgccacggctctgtgggccagtgctggtgtgtggacagatatggaaatgaggtgatgggcagccgcatcaatggagtggccgactgtgccatcgactttgagatcagcggggactttgccagcggggacttccacgagtggacagatgatgaagatgatgaagatgacatcatgaatgatgaagatgaaattgaagatgatgatgaagatgaaggagatgatgatgatggaggagatgaccatgatgtgtacatctag

SEQ ID NO: 192960 - DNA, 348 bp, Artificial Sequence
  derived and/or modified sequence
atgctgaaggtgtctgctgtgctgtgtgtgtgtgccgccgcctggtgcagccagagcctggccgctgctgctgctgtggccgctgctgggggccgcagtgatggcggcaacttcctggatgacaagcagtggctgaccaccatcagccagtatgacaaggaggtgggccagtggaacaagttcagagatgaggtggaggatgactacttccgcacctggagccctgggaagccctttgaccaggccctggaccctgccaaggacccctgcctgaagatgaagtgcagccgccacaaggtgtgcatcgcccaggacagccagacagctgtgtgcatcagccacaggtag

SEQ ID NO: 192961 - DNA, 1311 bp, Artificial Sequence
  derived and/or modified sequence
atgctgaaggtgagcgccgtgctgtgcgtgtgcgccgccgcctggtgctcccagagcctcgccgctgctgccgctgtggctgccgccggaggcaggagcgacgggggcaattttttagatgacaagcagtggctgacaaccatcagccagtacgacaaagaagtgggccaatggaataagtttagggacgaggtggaggatgactacttccgtacatggtcccccggtaagccatttgatcaggctctggatcccgccaaggatccttgtctgaaaatgaagtgctcaagacataaggtatgcatcgcccaggactcacagaccgctgtgtgcatctcacaccgcagacttacacatcggatgaaagaggccggagtggaccatagacagtggagggggcctatattatcaacatgcaaacagtgccccgttgtgtacccctcccccgtctgcggttccgatggccatacttactctttccagtgcaagctggagtatcaggcctgtgtgctgggcaagcagatctctgtcaagtgcgaaggccattgtccttgcccatcagataaaccgacctcgacgagccgaaacgtaaagcgcgcctgtagtgacctggagtttcgagaggtcgcaaatagactgagagactggttcaaagcgttgcatgagagtggtagccaaaacaaaaagacaaaaactctcctgagacccgaacgcagcagatttgatacttctatccttccaatatgcaaagattctctgggctggatgtttaacaggttggataccaactacgacctgctgctggaccagtctgaattgcgcagtatctacttggataaaaatgaacagtgcacaaaagcttttttcaattcttgtgatacttacaaagacagcctgatcagtaacaacgagtggtgctactgttttcagaggcagcaggaccccccatgtcagaccgagctatcgaatattcaaaaacggcagggcgtcaagaagctgctgggccagtacattccactgtgtgatgaagatggatattacaagcccactcagtgtcacggttctgtcggccagtgttggtgcgtagaccgatacggaaacgaggtgatggggagtcggatcaatggggtggcagattgtgcaatcgactttgaaatctccggcgatttcgcttccggagatttccacgagtggactgacgatgaggacgacgaagatgatatcatgaacgacgaggatgaaatagaggacgatgacgaggatgagggggacgacgatgatggcggcgacgatcatgacgtgtacatctag

SEQ ID NO: 192962 - DNA, 1311 bp, Artificial Sequence
  derived and/or modified sequence
atgctgaaggtgagcgccgtgctgtgcgtgtgcgccgccgcctggtgttcccagtccctcgcagcagcagcagctgtcgcggccgctggtggtcgaagtgacggggggaatttcctcgatgacaaacagtggctgactaccatctctcagtacgataaggaggtgggccagtggaacaaattcagggacgaggtggaggatgactatttccggacctggtccccaggcaagcctttcgatcaagctctcgacccagccaaagacccttgcctgaagatgaagtgctctcggcacaaggtgtgcattgcccaagacagccaaactgccgtgtgcatatcccatcgcagactgacacataggatgaaagaggccggggtcgaccaccggcagtggcgcggaccgatattgagtacctgcaagcagtgccccgtcgtgtatccaagccccgtgtgtggcagtgatgggcacacatactccttccagtgtaagcttgagtatcaagcctgtgtactggggaaacaaatttcagtcaaatgtgagggacactgcccatgccccagcgacaagcccacatccacctcgagaaatgtcaaaagggcatgcagcgacctcgagtttcgcgaggttgctaacaggttaagagactggtttaaagctctgcacgaaagtggttcacagaataaaaagaccaaaacacttcttcgcccagaaaggagccgcttcgacaccagtatactgccaatctgtaaagattcactgggatggatgttcaatcgcctggatacaaactacgatctgctgttagaccagagtgaactaagatcaatctatctcgacaaaaatgaacagtgtactaaggcgttcttcaacagctgtgatacttataaggattctcttatatccaataatgagtggtgttactgctttcagcggcaacaggatccaccatgccagacagaactgagcaacatccaaaagagacagggcgtaaagaaactccttgggcagtatatcccgctttgcgatgaagatggttactacaaacccacacagtgccacgggtccgtaggtcaatgttggtgcgttgaccggtacggcaacgaggttatgggtagccggataaacggagtggcagactgcgcaattgattttgaaattagtggagattttgcgagtggcgactttcacgaatggacagatgatgaagatgatgaggatgacatcatgaacgatgaagatgaaatcgaggatgatgatgaggacgagggcgacgacgacgatggcggggacgaccatgacgtctatatctag

SEQ ID NO: 192963 - DNA, 348 bp, Artificial Sequence
  derived and/or modified sequence
atgctgaaggtgagcgccgtgctgtgcgtgtgcgccgccgcctggtgtagccaatctctggcagccgccgcagccgtagcggcagccggcgggagaagtgatggggggaacttccttgatgataaacagtggctgacaacgatctctcagtacgataaggaggtgggacagtggaacaagtttcgagatgaggtcgaggacgactactttcggacttggtccccagggaagccgtttgatcaagccctcgaccccgcaaaggatccatgcctgaaaatgaaatgcagccgccacaaggtctgcatcgcccaggacagccagaccgcagtgtgcatctctcaccgttag

SEQ ID NO: 192964 - DNA, 1311 bp, Artificial Sequence
  derived and/or modified sequence
atgctgaaggtgagcgccgtgctgtgcgtgtgcgccgccgcctggtgctcacaatctctggctgccgccgcagctgtcgcagccgccggaggccggtctgatggcggaaattttcttgacgacaagcagtggctgacaactatcagtcagtacgacaaggaggttggacaatggaataagttcagagatgaggtggaagacgactactttcgaacctggagtccagggaagcccttcgaccaggcgcttgatcctgcaaaagacccctgcctcaaaatgaagtgctctcgccataaggtttgcattgctcaggatagtcagaccgcagtatgcatttcacaccgccgcctgacccataggatgaaggaagcaggcgtggaccaccggcaatggcgcgggcccattctatcaacctgtaagcagtgtcccgtggtctacccaagtccggtatgtggatcagatggacacacctattcgttccagtgtaaactcgaataccaggcttgtgtcttggggaagcaaatttccgtgaagtgcgaaggacactgtccttgccccagcgacaaacctacctctacaagccgaaatgtgaagagggcctgttccgacttggagtttcgggaggtggctaataggttaagggactggtttaaagcactgcacgaatccgggagtcagaacaagaagaccaagacgctcctacgcccagagcgcagccgcttcgataccagcatactgccgatttgcaaagatagcctgggctggatgtttaaccgcctcgacactaattacgacctcctactggatcagagtgaactgaggtccatctatctggacaagaatgaacagtgcaccaaggctttttttaacagctgtgacacttacaaggattcactgatcagtaacaacgagtggtgctactgttttcagaggcaacaggatcccccgtgccagactgaattgtctaacattcaaaagcggcagggcgtgaaaaagcttctgggccagtacatcccactatgtgatgaagatggatattacaagcccacacaatgccatggatccgtcggccagtgttggtgcgtggaccggtacggcaatgaggtcatgggatcacgcattaatggggtggccgactgtgccatagacttcgaaatctcaggggacttcgcctctggagatttccacgagtggactgacgacgaagacgacgaagacgatatcatgaatgacgaggacgagattgaggacgacgacgaggatgaaggagatgatgacgatggtggggatgaccatgacgtgtatatttag

SEQ ID NO: 192965 - DNA, 1311 bp, Artificial Sequence
  derived and/or modified sequence
atgctgaaggtgagcgccgtgctgtgcgtgtgcgccgccgcctggtgcagccagtctctggctgctgccgcggcggtggcagccgccggtggaagaagtgacggaggaaatttcttagacgataagcagtggctcacaacaatttcccagtacgacaaggaggtggggcagtggaataagttcagagacgaagtggaagatgattatttccgcacttggtctcccggaaagcccttcgatcaggccttggacccagcgaaagatccgtgcctgaagatgaaatgctcccgacacaaggtttgcattgcccaggacagtcaaactgcagtgtgcatttcccatagaagactgactcacaggatgaaagaggctggggtggaccacaggcagtggcggggcccgattttgtcaacatgcaagcaatgccctgtggtgtaccccagtcccgtgtgtggcagcgacggacacacatattcgtttcagtgtaagctggagtatcaagcctgcgtgctggggaaacagattagtgtcaagtgcgaaggccattgtccctgtccaagcgataagcccacaagcacatctagaaacgtcaagagagcctgctcagatcttgagttcagagaagttgcaaaccgacttcgtgattggttcaaagcacttcatgagtcaggaagccaaaacaaaaagaccaaaactttgttacggcccgagcgtagcagattcgatacctcgattttgcctatctgcaaggattcactgggctggatgttcaatcgattggataccaattatgacctgcttctggatcagagcgaactgcgatcaatatacctggacaaaaatgaacagtgcactaaggcattctttaatagctgtgacacgtataaggacagtctgatttcaaataacgagtggtgctactgtttccagagacagcaggaccccccttgccagacggaattgtcaaatattcagaagaggcaaggcgtcaaaaagctcctcggccaatacatcccactctgcgacgaggacgggtactacaagccaacacagtgccatgggtccgtggggcagtgctggtgcgttgacagatatggaaatgaagtaatgggaagtcggatcaacggagtcgctgactgtgccatcgattttgagatcagcggagattttgccagcggcgattttcacgaatggaccgacgatgaagatgatgaagacgacattatgaacgatgaagacgagattgaggacgacgatgaagacgaaggtgatgatgatgatggaggcgatgaccatgatgtctacatttag

SEQ ID NO: 192966 - DNA, 348 bp, Artificial Sequence
  derived and/or modified sequence
atgctgaaggtgagcgccgtgctgtgcgtgtgcgccgccgcctggtgctctcagtccctcgctgccgccgcggcagtggcagctgctggcggacggagcgatggcggaaactttcttgacgataaacagtggctgaccactatcagtcaatatgataaggaggtgggtcagtggaataaattcagagacgaggtcgaagatgattatttcaggacctggtccccaggaaaacctttcgatcaagctctcgacccggccaaggacccttgcttgaagatgaagtgttccagacacaaggtgtgtattgcccaagacagccagactgccgtgtgtataagtcacaggtag

SEQ ID NO: 192967 - DNA, 1311 bp, Artificial Sequence
  derived and/or modified sequence
atgctcaaggtttctgcagtgttatgtgtgtgtgccgctgcctggtgctcacagagtctggcagcagctgccgctgtcgcagctgcgggagggaggtcagatggtgggaatttcttggatgataagcagtggttaaccaccatcagccagtatgataaagaggtaggtcagtggaataaattcagggatgaagttgaggacgactacttccggacctggtctcccggtaagcctttcgatcaggccctagacccagccaaagatccctgtctgaagatgaaatgttccagacataaagtgtgcatcgcccaagactcccagaccgctgtgtgcattagccaccggaggctgacacacaggatgaaagaggcaggcgttgaccacagacagtggcgcggtccaattctcagtacctgcaaacaatgtcctgtggtatatcccagccccgtgtgtgggtctgatggccacacgtacagcttccagtgtaagctagagtatcaggcctgtgtacttggtaagcagataagcgtgaagtgcgagggccactgcccctgcccgtccgataaaccaacaagcacaagccgcaatgtgaagcgtgcctgcagcgacctggagttccgcgaggtcgctaacagactgcgcgattggtttaaagccttgcatgagtccggttcccagaacaaaaaaaccaagaccctcttgcgtccagagagaagtcggtttgacacatcgatactaccaatttgcaaagacagcttgggttggatgtttaacagacttgataccaactatgaccttctactggaccaaagtgaactccggtcaatctacctggataagaatgagcagtgcacaaaggccttctttaatagctgcgacacctacaaagacagtctgattagtaacaacgagtggtgttattgctttcaaaggcagcaggaccctccttgtcagacagagctttcgaacattcagaagcggcagggcgtcaagaaattgttaggacaatacattcccctctgcgacgaagatggctactacaagcctactcagtgccatggttcagtgggtcagtgttggtgcgtggacaggtacggaaacgaggtcatgggtagtaggattaacggagtcgccgactgcgccatcgatttcgaaattagcggagactttgcaagtggtgattttcatgaatggaccgacgacgaagacgacgaagatgatataatgaacgacgaagacgagattgaagatgatgatgaggatgaaggggatgacgacgatggaggcgacgaccacgatgtgtacatttag

SEQ ID NO: 192968 - DNA, 1311 bp, Artificial Sequence
  derived and/or modified sequence
atgctgaaagttagcgctgtcctgtgcgtgtgcgccgcagcctggtgttcacagtcgctggccgcagctgcggcagttgccgcagctggcggacgaagtgatgggggtaatttccttgatgataaacaatggctgaccacaatttcacagtatgacaaagaggttgggcaatggaacaaatttagggacgaagtagaggacgattacttccgcacttggtctccaggaaaaccttttgatcaagctctcgatcctgctaaagacccctgtcttaagatgaaatgcagccgtcacaaggtttgcatcgcacaagactctcagaccgcagtgtgcatatcccaccggcgtcttacacatcgcatgaaggaggccggtgtggaccaccgtcagtggagaggccctatcctgtcaacatgcaagcagtgcccagtcgtatatccgagtccagtgtgcggttcagatggccacacttacagcttccagtgcaaattggagtatcaggcgtgtgttctggggaagcagataagtgtcaaatgtgagggacactgcccatgcccttctgataagcctacttctacttcccggaacgttaagcgtgcctgtagtgatctagagttccgggaggttgccaatcgcttgcgggactggtttaaggccctgcacgagtcagggagccagaacaagaaaactaaaactctgttgaggccagaaagaagtcgcttcgataccagtattctcccaatctgtaaagacagtttagggtggatgtttaatcgcctcgacaccaactatgatctgctgctcgaccagtcagaactgcgttctatctatctagacaagaacgaacagtgtaccaaggccttcttcaacagttgcgacacgtacaaagattctctgataagcaataacgaatggtgttactgcttccaacggcagcaggaccctccatgtcagacagagttgtccaacattcagaaacgacagggcgtgaagaagctgctggggcagtatatccccctctgcgacgaagatggctactacaagccaactcagtgccacgggtctgtgggtcaatgctggtgtgtggaccggtatgggaatgaggtgatgggaagtaggatcaatggggttgctgattgtgcgattgattttgagatttcaggagacttcgcatcaggtgactttcatgagtggacagacgatgaggatgacgaagacgatattatgaacgatgaggatgagatagaggacgacgatgaggacgagggtgacgatgacgacggaggagacgaccatgatgtgtacatctag

SEQ ID NO: 192969 - DNA, 348 bp, Artificial Sequence
  derived and/or modified sequence
atgctgaaagtgtctgctgtgttgtgcgtctgtgcagccgcttggtgctctcagtctttggcagccgcagcagcagtcgctgccgctgggggtagatccgatggcggtaattttctcgacgataagcagtggctgaccacaatctcccagtacgacaaagaagtcggtcagtggaataaattcagagacgaggtcgaagatgactacttcagaacatggtctcctggcaaaccatttgatcaggcactagatccagccaaggacccctgtctcaagatgaaatgctcacgacacaaggtgtgtattgcccaggacagccaaaccgctgtctgcatctctcatcgctag

SEQ ID NO: 192970 - DNA, 1311 bp, Artificial Sequence
  derived and/or modified sequence
atgttgaaggtgtcagccgttctctgcgtttgcgcagctgcttggtgttctcagagtctggcagccgcagctgccgtcgcggctgccggagggagatccgatggaggtaatttcctcgacgacaaacagtggcttactaccatttcgcaatacgacaaggaggttggtcaatggaataaatttcgtgatgaagtggaagatgactattttaggacatggtctcctgggaagccgttcgaccaggcgctcgacccggcaaaggacccctgcctcaaaatgaaatgcagtcgacataaggtgtgtatcgcacaggatagccagactgccgtatgtatttcccatagaagattgacccaccgcatgaaggaggcaggcgtcgatcaccgtcaatggcgtggcccaatcttatccacttgcaaacaatgcccagtcgtgtatccctctcccgtgtgtggttctgatggtcatacttactccttccagtgcaagcttgaatatcaggcctgtgtcctgggtaagcagatcagtgtaaaatgtgagggtcactgtccatgcccttctgataaacctacaagtacaagccgcaatgtcaagcgcgcttgcagtgatcttgaatttcgggaagtcgcaaacagactacgcgattggttcaaagcccttcacgagtccggatcccagaataagaaaaccaagacactgctcaggcctgagcgcagccgcttcgacaccagcatactgcctatttgcaaagactcacttggttggatgttcaaccgacttgatacgaattacgacttactactagaccaaagcgaactgcgtagtatatatctggacaagaatgaacagtgcaccaaggctttcttcaacagctgtgacacgtacaaagatagcctgatatctaataacgagtggtgctactgctttcagcggcagcaggacccaccctgccaaacagaactcagcaacattcaaaagaggcagggggtcaagaagctgctgggtcaatacatacccctgtgtgacgaggatgggtattacaagcctacccaatgtcacgggtccgtgggtcagtgctggtgcgtggatagatacggtaatgaggttatgggcagccggataaacggcgtcgccgactgtgcaatcgacttcgaaataagtggagactttgctagtggcgattttcatgagtggacagacgacgaggacgacgaggatgatattatgaacgacgaggatgagattgaagacgacgacgaggatgagggcgacgacgacgatggcggtgacgatcacgatgtgtatatctag

SEQ ID NO: 192971 - DNA, 1311 bp, Artificial Sequence
  derived and/or modified sequence
atgctcaaggtgtctgctgtgctgtgcgtgtgcgccgctgcctggtgcagccagagtttggctgccgctgctgcagttgcggcagctggaggaaggtccgacggtggcaatttcctggacgacaagcagtggctgactaccatatcacagtacgacaaagaagtcggccagtggaacaaatttcgcgatgaagtggaggatgactactttcgtacttggagccctgggaagccatttgatcaagctctggacccggctaaggacccctgcttgaagatgaagtgcagcaggcacaaggtctgcattgcgcaagactcacagacagctgtgtgcatcagccatcgcagactgactcaccggatgaaggaggccggagttgaccacaggcagtggcgcggacctatactatccacctgcaagcaatgcccagttgtctatccttctccagtgtgtggcagtgatggccatacttactccttccagtgtaagctggagtaccaagcctgcgtactgggaaagcagatctcagtgaagtgcgagggccactgtccatgcccttctgacaagcccacctctaccagtagaaacgtaaagagggcttgcagcgatttggagttccgagaggtggccaatagattacgtgattggttcaaagccctgcacgaatccggaagtcaaaacaaaaagaccaagacattgctgcggccagagcggtctcggttcgatacatcaatccttcctatatgtaaagactcccttggctggatgtttaatagactcgatacgaactatgacctgctcctggatcagtccgaactccgtagtatatatctggataagaatgaacaatgcaccaaagccttcttcaatagttgcgatacctacaaggattctctaatttcaaacaacgaatggtgctactgcttccagcgccagcaggaccccccatgccagaccgagctgagtaacatacagaaacgccagggcgtcaaaaagctactgggtcaatacattcctctgtgcgacgaagacggctactacaaacccacccaatgtcatggatccgttggccaatgttggtgcgtcgaccggtacggtaacgaggtgatggggtccagaattaatggcgttgctgattgtgccatcgattttgagatttctggcgacttcgcatccggtgactttcacgagtggactgacgatgaggatgacgaagatgatatcatgaacgatgaagatgaaattgaggatgatgatgaggatgagggcgatgacgatgacggcggagacgatcacgacgtctatatctag

SEQ ID NO: 192972 - DNA, 348 bp, Artificial Sequence
  derived and/or modified sequence
atgctgaaggtcagcgccgtgttatgcgtgtgtgctgccgcttggtgttcccagtctctggccgctgccgcagctgtagcggctgctgggggacgatccgatggaggtaactttctggatgacaagcagtggctgactacaatcagccagtacgacaaagaagtgggacaatggaacaagttcagagacgaggtggaagatgactatttccgcacttggtctcccggaaagccgtttgatcaggccttggatcctgcaaaagatccctgcctgaagatgaaatgctctcgccacaaggtgtgcatcgcacaggactctcagaccgccgtttgtatatctcatagatag

SEQ ID NO: 192973 - DNA, 1311 bp, Artificial Sequence
  derived and/or modified sequence
atgctgaaggtatcagccgtgctctgcgtctgtgccgcagcatggtgttctcagtctctggctgccgcagccgctgtggcagctgctgggggcagatctgatggcggaaacttcttggacgataagcaatggcttacgacgatatcccagtacgacaaggaggttggccagtggaacaagttccgggatgaggtagaggacgactacttcaggacatggtcaccaggtaaaccttttgaccaggccctcgaccccgctaaagacccctgcctgaaaatgaaatgctctcggcacaaagtatgtatagcccaggattctcagacggccgtttgcatctcacaccgccggctgacccatcgtatgaaagaggcaggagttgaccaccgacaatggcggggccccatcctgagcacatgtaagcagtgcccagtggtgtaccccagcccagtttgcggctccgatggtcatacatactcctttcagtgcaaactcgagtaccaagcgtgtgtgttaggcaagcagatcagtgttaagtgcgagggacactgcccctgtccctccgacaagcctacaagtacttcacgcaacgttaagcgagcctgctccgatttagagtttagagaagtagctaaccggctgagagattggtttaaggccctgcatgaaagcgggtcacagaacaagaaaaccaaaaccctgctcagacctgaacgttccagatttgatacctcaattttacccatttgcaaagactcattgggatggatgttcaaccgcctggatactaactatgatttgctacttgaccaatccgaactgaggtccatctatctcgataaaaatgagcaatgcactaaggctttctttaacagctgcgacacttataaagactctctgatttccaacaatgaatggtgctattgcttccagaggcagcaggatcccccttgccaaactgaactatcaaatatccagaagagacaaggcgtaaagaaattactcgggcagtacatacccctctgtgatgaagacggctattataaacctacacaatgtcatgggtctgttggacagtgctggtgcgtagatagatatggcaatgaagttatgggtagtcgcatcaatggagtggccgactgtgccatcgatttcgagattagcggcgatttcgcgtcgggagacttccacgagtggacagatgacgaggatgacgaggatgatatcatgaatgacgaggacgagatagaggacgacgacgaggatgagggtgatgacgatgacggaggcgatgaccacgacgtgtatatatag

SEQ ID NO: 192974 - DNA, 1311 bp, Artificial Sequence
  derived and/or modified sequence
atgctcaaggtcagcgccgtgctgtgcgtatgtgcggccgcctggtgcagtcaatccctagctgctgcggccgctgtggcagccgccggagggcggagcgacggggggaattttctggacgataagcagtggctcacaacgatcagccagtacgataaagaagtaggacagtggaataagtttcgtgatgaagtcgaagatgattacttccgaacctggagcccgggaaaaccttttgaccaggcattagacccagccaaggacccttgcttgaagatgaaatgtagtagacataaagtatgcatcgctcaagattctcagaccgccgtgtgcatttctcaccggcgcctgacacataggatgaaggaggcaggcgtagatcataggcagtggcgtggacctattttgagcacctgtaagcaatgtcctgttgtgtacccttccccagtctgtggctctgacggtcatacatatagttttcagtgcaaactcgaataccaggcatgcgttctgggtaagcagatttccgtgaagtgtgagggccactgcccgtgcccaagtgacaagcccacctcaactagtaggaacgtgaagagggcctgctccgatctggagtttagagaggtcgcaaatcgcttaagggactggtttaaagcactccacgagtccggctcgcagaataagaagacaaagacgctgctcagaccagagaggagccgattcgacactagcatccttccaatctgtaaagactccctggggtggatgttcaaccgactcgacactaattacgacctccttctcgatcaatccgaattgaggagcatatacctcgataaaaatgaacagtgcacaaaagcattcttcaattcttgtgacacatataaggatagtctcatttcgaataacgaatggtgctactgttttcagcgacagcaggacccgccttgtcagaccgagctcagtaatattcagaagcgccagggggtcaagaaactgttgggacagtatatcccattatgcgacgaggacggctattacaaacctactcagtgtcatgggtcagtggggcagtgctggtgcgttgaccggtatggcaacgaggtgatgggcagtaggatcaatggggtggcagattgcgcaattgattttgagattagtggtgactttgcaagcggcgacttccacgaatggactgacgacgaagatgacgaggatgatattatgaacgatgaagacgagatagaagacgatgacgaggacgaaggagacgatgacgatggcggtgacgatcacgatgtttatatatag

SEQ ID NO: 192975 - DNA, 348 bp, Artificial Sequence
  derived and/or modified sequence
atgttaaaagtgtctgctgtgctctgtgtctgcgccgccgcctggtgcagtcagagcttagcagccgcagcagcagttgccgccgccggaggacggtcggatggagggaatttccttgacgataagcagtggctgactaccatctcacagtatgataaagaagtaggccagtggaacaagtttcgggacgaggtggaagacgactactttaggacatggtctccaggaaaaccctttgatcaggcactcgaccctgctaaggacccctgcctaaaaatgaaatgttcccgccataaggtgtgtatagcccaggactctcagacagcagtgtgcatatcccataggtag

SEQ ID NO: 192976 - DNA, 1311 bp, Artificial Sequence
  derived and/or modified sequence
atgctgaaagttagcgccgtgttatgtgtgtgcgctgccgcctggtgttcacaatccctcgccgccgccgcagctgtggcagccgccggaggcagaagtgatggggggaatttcctggacgacaagcagtggctgacaaccatttcacagtatgacaaagaagttggtcagtggaataaatttagagatgaggttgaggacgactattttcgtacctggtcaccagggaagccattcgatcaagctctcgatccagcaaaagacccttgcctgaagatgaaatgtagcaggcacaaagtgtgcattgctcaggattcacagactgccgtatgcatatcacatagacgtttgacccaccgcatgaaggaggccggcgttgatcacaggcagtggcggggtccaatactgtccacttgtaagcagtgcccggtggtgtacccctctccagtgtgcggatccgatggccacacttatagcttccaatgcaaactcgagtatcaggcgtgtgtactggggaaacaaatcagcgtgaaatgcgaggggcactgcccctgtccctccgataagccgacatccacaagtcggaatgtcaaaagggcctgtagtgatcttgaattccgcgaagtggcaaaccgccttagagattggtttaaagcacttcatgagagtgggagccagaacaagaagaccaagaccctgcttagacccgaacggtctcgattcgatacttcaattctgcctatctgtaaggactccctgggttggatgtttaatcggctagacacaaattacgacctcctgcttgatcagtcggaactcagatctatttacttggataaaaacgagcagtgtaccaaggcatttttcaactcatgcgatacgtacaaggattctctgatatcgaataacgaatggtgttattgcttccagcgccagcaggatcctccatgtcaaactgagctgtcaaatattcagaaaaggcagggagtaaagaaactgttaggacagtacatccccctgtgtgatgaggatggttattataagccgacgcagtgccacgggtccgtcggccagtgctggtgtgtggaccgttatggcaacgaagtgatgggaagcagaatcaacggagtggctgattgcgctattgacttcgaaatctctggagactttgcaagcggagactttcatgagtggaccgacgacgaagatgacgaggacgacattatgaacgacgaagacgaaatcgaagacgatgacgaggatgaaggagatgatgatgatgggggtgatgatcacgacgtctatatctag

SEQ ID NO: 192977 - DNA, 1311 bp, Artificial Sequence
  derived and/or modified sequence
atgctgaaggtatccgccgttttatgtgtttgtgctgccgcctggtgcagccagagccttgcagccgccgccgcagtcgcagctgctggcggaaggtcagatggaggcaattttcttgatgataaacagtggttgactactattagccagtatgataaggaagtgggccaatggaataagtttagagatgaagtagaagatgattattttcggacctggagtcctggcaagcccttcgaccaagcgctcgaccccgcgaaagacccatgtctgaaaatgaagtgctctcgacataaagtgtgcatcgcgcaggactcccaaaccgctgtgtgcatttcgcacaggagactgacccatcgaatgaaggaagcaggagtggaccatcgacagtggcgcggccccatactctccacttgtaagcagtgccccgtcgtgtacccttcaccagtatgtggttctgacggtcacacctatagttttcaatgtaagcttgaatatcaagcgtgcgtgcttggtaagcaaatttccgtgaagtgcgagggtcactgtccatgcccttcagacaaaccgacctcgacctcacggaatgttaaacgggcatgttctgacttagaatttcgcgaagttgcgaatcgcttacgtgattggttcaaagccctccatgaatcaggctctcagaacaagaagactaagactctgttgcggcccgaacggagccggttcgacacaagtattctgcctatctgcaaagacagcctgggatggatgttcaacaggcttgatactaattacgacctgctgctggaccagtccgaattacggagcatatacctcgacaagaatgagcagtgtaccaaggcttttttcaactcctgcgacacatacaaagactctctgatctccaataacgagtggtgctattgctttcagcggcagcaagaccctccttgccaaacagaactgtccaatatccaaaagaggcagggtgttaagaagctgctcggacagtatatcccgctatgtgacgaggacggctattataaacctacccagtgtcatgggagcgtcggacaatgctggtgtgttgaccgatatggaaacgaggtaatggggtcccggattaacggtgtcgcggattgcgctattgacttcgagatctccggcgattttgcgagcggcgacttccatgagtggaccgacgacgaagatgacgaggacgatataatgaatgacgaggacgagatcgaggatgatgatgaagacgagggagacgatgacgacggaggcgacgaccatgatgtgtatatttag

SEQ ID NO: 192978 - DNA, 348 bp, Artificial Sequence
  derived and/or modified sequence
atgctgaaggtgagtgcagtgctttgtgtgtgtgcagcggcatggtgctctcagtccttggctgccgctgccgctgtagccgccgcaggtggacggtcagatggaggcaacttcctggatgataagcagtggctaacaactatctctcagtatgataaggaagtcggccaatggaataagtttcgagacgaagttgaagacgattattttaggacctggagccctggaaagccgtttgaccaagctctggaccccgccaaagacccatgcctaaagatgaaatgttctaggcataaagtgtgcattgctcaagattcccaaaccgccgtgtgcattagtcatagatag

SEQ ID NO: 192979 - DNA, 1311 bp, Artificial Sequence
  derived and/or modified sequence
atgctgaaggtgtccgctgtcctgtgtgtgtgcgctgccgcttggtgctcacagtcattagcagccgcggcggcagtcgcagcagccggcggaagaagtgacggagggaactttctggacgataagcagtggcttacaacaattagccagtacgataaagaagttggccagtggaataagtttagagatgaagtagaggatgattacttcagaacctggagccccggaaagccattcgaccaggcccttgatcctgctaaagatccatgcttgaaaatgaaatgctctagacacaaggtttgcatagctcaggattctcagactgccgtctgtattagccaccgaagactgacccataggatgaaggaggcaggagtcgaccaccggcagtggagaggcccaattctttcaacatgcaaacagtgccccgttgtgtatccctcgccagtgtgcggaagcgatggacacacttattcatttcagtgtaagcttgagtaccaggcctgtgttctggggaaacagatcagcgtgaaatgtgaaggccattgcccttgtccctcggacaagccaactagtaccagcagaaatgttaaacgtgcctgctccgatttagagtttagagaagtagctaaccggctgagagattggtttaaggccctgcatgaaagcgggtcacagaacaagaaaaccaaaaccctgctcagacctgaacgttccagatttgatacctcaattttacccatttgcaaagactcattgggatggatgttcaaccgcctggatactaactatgatttgctacttgaccaatccgaactgaggtccatctatctcgataaaaatgagcaatgcactaaggctttctttaacagctgcgacacttataaagactctctgatttccaacaatgaatggtgctattgcttccagaggcagcaggatcccccttgccaaactgaactatcaaatatccagaagagacaaggcgtaaagaaattactcgggcagtacatacccctctgtgatgaagacggctattataaacctacacaatgtcatgggtctgttggacagtgctggtgcgtagatagatatggcaatgaagttatgggtagtcgcatcaatggagtggccgactgtgccatcgatttcgagattagcggcgatttcgcgtcgggagacttccacgagtggacagatgatgaagatgacgaggacgatattatgaacgatgaggatgaaatagaagatgacgacgaagatgaaggggatgacgacgacggtggcgatgaccatgatgtgtatatatag

SEQ ID NO: 192980 - DNA, 1311 bp, Artificial Sequence
  derived and/or modified sequence
atgctcaaggtcagcgccgtgctgtgcgtatgtgcggccgcctggtgcagtcaatccctagctgctgcggccgctgtggcagccgccggagggcggagcgacggggggaattttctggacgataagcagtggctcacaacgatcagccagtacgataaagaagtaggacagtggaataagtttcgtgatgaagtcgaagatgattacttccgaacctggagcccgggaaaaccttttgaccaggcattagacccagccaaggacccttgcttgaagatgaaatgtagtagacataaagtatgcattgcccaggattcccagaccgccgtgtgcattagtcatcgacgcttgacacatagaatgaaggaagcaggagttgatcaccgccaatggcgcggacctattctctcaacctgtaaacagtgcccagtcgtctacccttcccccgtgtgcggatcggacggacacacctattccttccaatgtaaattggagtatcaagcttgcgtacttggaaagcaaatcagcgtcaagtgtgagggccactgcccctgtccttcagataaacccaccagcaccagtagaaacgttaaacgggcctgcagcgacctggagtttcgcgaagtcgcaaatcgccttcgagattggtttaaagcattgcacgagtccggcagccaaaataaaaagacaaagacactgttgcgacccgaacgcagcaggttcgacacgtcaatactcccgatatgcaaagatagccttggatggatgttcaacagattagatacaaattatgacctccttttagaccaatctgagcttcggagcatatatttggacaaaaatgaacaatgtacaaaagctttctttaactcatgtgacacttataaagattccctgatcagcaacaatgaatggtgttactgttttcagcggcagcaagacccaccatgtcagacagagctgagcaacattcaaaaaagacagggtgtcaagaaactgctgggccaatacatccctctctgcgatgaagatggatattacaaacccactcagtgtcatggatctgtaggccagtgctggtgcgtggacaggtatggaaatgaagtgatgggtagcaggatcaacggcgtggctgattgcgccattgatttcgagatatcgggcgactttgccagtggcgattttcatgaatggaccgacgacgaggatgatgaggacgacataatgaacgatgaagatgaaattgaagatgacgacgaggatgagggagatgatgatgacggcggagatgatcatgatgtgtacatatag

SEQ ID NO: 192981 - DNA, 348 bp, Artificial Sequence
  derived and/or modified sequence
atgttaaaggtatccgcagtgttgtgtgtctgtgcagcagcgtggtgctcccagtccctagccgctgctgctgctgtcgccgcagccggcgggcgcagtgatggggggaacttcctggacgacaaacagtggctaaccacaatcagccaatatgacaaggaagtcggtcagtggaataaatttagagacgaggttgaagacgactattttcgaacatggagcccaggcaaaccattcgatcaggcattggaccccgcaaaagatccttgtttgaaaatgaagtgttcaaggcacaaggtgtgcatcgcccaagattcccagaccgcagtgtgtatttcccacaggtag

SEQ ID NO: 192982 - DNA, 1311 bp, Artificial Sequence
  derived and/or modified sequence
atgctgaaagttagcgccgtgttatgtgtgtgcgctgccgcctggtgttcacaatccctcgccgccgccgcagctgtggcagccgccggaggcagaagtgatggggggaatttcctggacgacaagcagtggctgacaaccatttcacagtatgacaaagaagttggtcagtggaataaatttagagatgaggttgaggacgactattttcgtacctggtcaccagggaagccattcgatcaagctctcgatccagcaaaagacccttgcctgaagatgaaatgtagcaggcacaaagtgtgtatcgctcaagattctcagactgcagtttgcatctcccatagaagactgacccatcggatgaaggaggctggcgttgatcaccgacaatggcgaggccccattttgtccacatgcaagcagtgccccgttgtgtacccaagcccagtgtgtggttcagacggccacacttattccttccagtgcaaattggaatatcaagcctgcgttctcggaaagcagatttctgtcaagtgcgaaggacattgcccctgtcccagcgacaaacccacgtccacctctcgtaatgttaaacgggcatgtagtgatcttgaattccgcgaagtggcaaaccgccttagagattggtttaaagcacttcatgagagtgggagccagaacaagaagaccaagaccctgcttagacccgaacggtctcgattcgatacttcaattctgcctatctgtaaggactccctgggttggatgtttaatcggctagacacaaattacgacctcctgcttgatcagtcggaactcagatctatttacttggataaaaacgagcagtgtaccaaggcatttttcaactcatgcgatacgtacaaggattctctgataagcaataacgagtggtgctattgctttcaacgacagcaggaccctccctgccagacagagctgtccaatatccaaaaaagacagggcgtcaagaaactcctgggccagtatatccctctgtgcgacgaggacggatactataaacctactcagtgccacggctctgtgggccagtgttggtgtgtagatcggtacgggaacgaagtgatgggaagccgaattaatggagtggccgattgcgcaattgatttcgaaatttcaggggactttgcaagtggggacttccatgaatggacggatgacgaggacgacgaagacgatataatgaacgacgaggacgagatagaagatgacgacgaggatgagggtgacgacgatgacgggggagatgatcatgatgtatatatctag

SEQ ID NO: 192983 - DNA, 1311 bp, Artificial Sequence
  derived and/or modified sequence
atgctgaaggtatccgccgttttatgtgtttgtgctgccgcctggtgcagccagagccttgcagccgccgccgcagtcgcagctgctggcggaaggtcagatggaggcaattttcttgatgataaacagtggttgactactattagccagtatgataaggaagtgggccaatggaataagtttagagatgaagtagaagatgattattttcggacctggagtcctggcaagcccttcgaccaagcgctcgaccccgcgaaagacccatgtctgaaaatgaagtgctctcgacataaagtgtgcatagctcaggattcccaaactgccgtgtgcatctctcacaggcgccttactcatcgaatgaaggaagccggcgtcgatcatagacagtggcgaggacccatcctcagtacttgcaaacaatgccctgttgtatacccaagccccgtctgtggatcagacggccatacttactcctttcagtgcaaactggagtaccaagcgtgcgttcttggaaagcagatctccgttaagtgcgagggtcactgcccctgccccagtgataagcccacatctacatcacgaaacgttaaacgggcttgcagcgacttggagttccgtgaagtggcaaaccggctgagggattggtttaaggcgctccatgaaagcggtagccagaacaagaaaaccaaaacactgctgcgacccgaacggtcccgatttgatacatccatacttcctatttgcaaggattccttaggctggatgttcaataggctggacacaaactatgatctgttgctggaccaatcagaactgagatccatttatctagataagaatgaacaatgtacgaaggccttcttcaacagttgtgacacctacaaagattccctgatcagtaataacgaatggtgttattgttttcagaggcaacaagacccaccgtgtcagacagaattatctaatattcaaaagcggcagggcgtgaaaaaactcctgggacaatacatacctctgtgtgacgaggatggttactataaaccaactcagtgccacggctccgttggccagtgctggtgtgtggatagatacggaaacgaggtgatgggttcaaggattaatggggttgcagattgtgcaatagacttcgaaatttcaggagacttcgcgagtggggatttccatgaatggactgacgacgaagatgacgaggacgatataatgaatgacgaggacgagatcgaggatgatgatgaagacgagggagacgatgacgacggaggcgacgaccatgatgtgtatatttag

SEQ ID NO: 192984 - DNA, 348 bp, Artificial Sequence
  derived and/or modified sequence
atgctgaaagtgtctgccgttctgtgtgtctgcgcagcagcctggtgctcacaatccctggcagcagctgccgctgttgcagccgctggtggtcgctccgacggaggtaatttcctagatgataagcagtggctcacaaccatctcccagtatgacaaagaagtgggccagtggaacaaatttcgcgacgaggtggaagatgactattttagaacttggagtcctggaaagcctttcgatcaagctttagatcccgctaaagacccgtgcttgaagatgaagtgctcacggcataaggtgtgtattgctcaagacagtcaaaccgccgtgtgcatatcccatcgatag

SEQ ID NO: 192985 - DNA, 2986 bp, Artificial Sequence
  derived and/or modified sequence
gggagcgcgccgggcgcagggagctgagtggacggctcgagacggcggcgcgtgcagcagctccagaaagcagcgagttggcagagcagggctgcatttccagcaggagctgcgagcacagtgctggctcacaacaagatgctcaaggtgtcagccgtactgtgtgtgtgtgcagccgcttggtgcagtcagtctctcgcagctgccgcggcggtggctgcagccggggggcggtcggacggcggtaattttctggatgataaacaatggctcaccacaatctctcagtatgacaaggaagtcggacagtggaacaaattccgagacgaagtagaggatgattatttccgcacttggagtccaggaaaacccttcgatcaggctttagatccagctaaggatccatgcttaaagatgaaatgtagtcgccataaagtatgcattgctcaagattctcagactgcagtctgcattagtcaccggaggcttacacacaggatgaaagaagcaggagtagaccataggcagtggaggggtcccatattatccacctgcaagcagtgcccagtggtctatcccagccctgtttgtggttcagatggtcatacctactcttttcagtgcaaactagaatatcaggcatgtgtcttaggaaaacagatctcagtcaaatgtgaaggacattgcccatgtccttcagataagcccaccagtacaagcagaaatgttaagagagcatgcagtgacctggagttcagggaagtggcaaacagattgcgggactggttcaaggcccttcatgaaagtggaagtcaaaacaagaagacaaaaacattgctgaggcctgagagaagcagattcgataccagcatcttgccaatttgcaaggactcacttggctggatgtttaacagacttgatacaaactatgacctgctattggaccagtcagagctcagaagcatttaccttgataagaatgaacagtgtaccaaggcattcttcaattcttgtgacacatacaaggacagtttaatatctaataatgagtggtgctactgcttccagagacagcaagacccaccttgccagactgagctcagcaatattcagaagcggcaaggggtaaagaagctcctaggacagtatatccccctgtgtgatgaagatggttactacaagccaacacaatgtcatggcagtgttggacagtgctggtgtgttgacagatatggaaatgaagtcatgggatccagaataaatggtgttgcagattgtgctatagattttgagatctccggagattttgctagtggcgattttcatgaatggactgatgatgaggatgatgaagacgatattatgaatgatgaagatgaaattgaagatgatgatgaagatgaaggggatgatgatgatggtggtgatgaccatgatgtatacatttgattgatgacagttgaaatcaataaattctacatttctaatatttacaaaaatgatagcctatttaaaattatcttcttccccaataacaaaatgattctaaacctcacatatattttgtataattatttgaaaaattgcagctaaagttatagaactttatgtttaaataagaatcatttgctttgagtttttatattccttacacaaaaagaaaatacatatgcagtctagtcagacaaaataaagttttgaagtgctactataataagtttttcacgagaacaaactttgtaaatcttccataagcaaaatgacagctagtgcttgggatcgtacatgttaattttctgaaagataattctaagtgaaatttaaaataaataaatttttaatgacctgggtcttaaggatttaggaaaaatatgcatgctttaattgcatttccaaagtagcatcttgctagacctagttgagtcaggataacagagagataccacatggcaagaaaaacaaagtgacaattgtagagtcctcaattgtgtttacattaatagtggtgtttttacctatgaaattattctggatctaataggacattttacaaaatggcaagtatggaaaaccatggattctgaaagttaaaaatttagttgttctccccaatgtgtattttaatttggatggcagtctcatgcagattttttaaaagattctttaataacatgatttgtttgcctttctagatttctttatctttctgaccagcaacttagggagcagaatttaaattaggaagacaaagggaaagattcatttaaaccatatttttacaaagtttgtcatttgccccaaggtcaaattttaaattcttaattttcattttatttcccattttaggtaaaagtttgcatttaatcttagaattatgttatttttgttagtagtgtggaaacttagagaacttattgtatggtgccttgcaaaaatagagatagaaagattttagcatgcataccaatatagtatattacgcaatatataagcacacctaattaacagattaatatcagtaaaggtattgctgctggaatgaagaaaatgggatacgtttgtttctttttttctattgttacataattgccatgtggacttgtttatgattattgtgtagagtagcatttaagatttaactgtagcaaaaattactttaaccgctgtatttaagttagcatgttaattaattgtgtagacattttggcacaccatcacttttaactatatcataccaatggttttgtgcccataataaaaatggaaaaacctgttgaatgttacgtattggtatctttaatttcaacagtgggtaaactggtttcccagtatacaattcattgaaagcaaaattgattaattatttccatttaatttatacacactcaatacaaaatttaatgttgactttacgtaataaagtataatgcattttcttttttactgtttatgtatagtttacaaaataaagaatcttgtaaccaaa

SEQ ID NO: 192986 - DNA, 1749 bp, Artificial Sequence
  derived and/or modified sequence
atttccagcaggagctgcgagcacagtgctggctcacaacaagatgctcaaggtgtcagccgtactgtgtgtgtgtgcagccgcttggtgcagtcagtctctcgcagctgccgcggcggtggctgcagccggggggcggtcggacggcggtaattttctggatgataaacaatggctcaccacaatctctcagtatgacaaggaagtcggacagtggaacaaattccgagactaagaagaaaaacgattatttgacaggacagtagtgatgatcacacaagatcacatccacatgtcttctgggctcagtcaggatgattatttccgcacttggagtccaggaaaacccttcgatcaggctttagatccagctaaggatccatgcttaaagatgaaatgtagtcgccataaagtatgcattgctcaagattctcagactgcagtctgcattagtcaccggaggcttacacacaggatgaaagaagcaggagtagaccataggcagtggaggggtcccatattatccacctgcaagcagtgcccagtggtctatcccagccctgtttgtggttcagatggtcatacctactcttttcagtgcaaactagaatatcaggcatgtgtcttaggaaaacagatctcagtcaaatgtgaaggacattgcccatgtccttcagataagcccaccagtacaagcagaaatgttaagagagcatgcagtgacctggagttcagggaagtggcaaacagattgcgggactggttcaaggcccttcatgaaagtggaagtcaaaacaagaagacaaaaacattgctgaggcctgagagaagcagattcgataccagcatcttgccaatttgcaaggactcacttggctggatgtttaacagacttgatacaaactatgacctgctattggaccagtcagagctcagaagcatttaccttgataagaatgaacagtgtaccaaggcattcttcaattcttgtgacacatacaaggacagtttaatatctaataatgagtggtgctactgcttccagagacagcaagacccaccttgccagactgagctcagcaatattcagaagcggcaaggggtaaagaagctcctaggacagtatatccccctgtgtgatgaagatggttactacaagccaacacaatgtcatggcagtgttggacagtgctggtgtgttgacagatatggaaatgaagtcatgggatccagaataaatggtgttgcagattgtgctatagattttgagatctccggagattttgctagtggcgattttcatgaatggactgatgatgaggatgatgaagacgatattatgaatgatgaagatgaaattgaagatgatgatgaagatgaaggggatgatgatgatggtggtgatgaccatgatgtatacatttgattgatgacagttgaaatcaataaattctacatttctaatatttacaaaaatgatagcctatttaaaattatcttcttccccaataacaaaatgattctaaacctcacatatattttgtataattatttgaaaaattgcagctaaagttatagaactttatgtttaaataagaatcatttgctttgagtttttatattccttacacaaaaagaaaatacatatgcagtctagtcagacaaaataaagttttgaagtgctactataataagtttttcacgagaacaaactttgtaaatcttccataagcaaaatgacagctagtg

SEQ ID NO: 192987 - DNA, 2180 bp, Artificial Sequence
  derived and/or modified sequence
cgcgccgggcgcagggagctgagtggacggctcgagacggcggcgcgtgcagcagctccagaaagcagcgagttggcagagcagggctgcatttccagcaggagctgcgagcacagtgctggctcacaacaagatgctcaaggtgtcagccgtactgtgtgtgtgtgcagccgcttggtgcagtcagtctctcgcagctgccgcggcggtggctgcagccggggggcggtcggacggcggtaattttctggatgataaacaatggctcaccacaatctctcagtatgacaaggaagtcggacagtggaacaaattccgagacgaagtagaggatgattatttccgcacttggagtccaggaaaacccttcgatcaggctttagatccagctaaggatccatgcttaaagatgaaatgtagtcgccataaagtatgcattgctcaagattctcagactgcagtctgcattagtcaccggaggcttacacacaggatgaaagaagcaggagtagaccataggcagtggaggggtcccatattatccacctgcaagcagtgcccagtggtctatcccagccctgtttgtggttcagatggtcatacctactcttttcagtgcaaactagaatatcaggcatgtgtcttaggaaaacagatctcagtcaaatgtgaaggacattgcccatgtccttcagataagcccaccagtacaagcagaaatgttaagagagcatgcagtgacctggagttcagggaagtggcaaacagattgcgggactggttcaaggcccttcatgaaagtggaagtcaaaacaagaagacaaaaacattgctgaggcctgagagaagcagattcgataccagcatcttgccaatttgcaaggactcacttggctggatgtttaacagacttgatacaaactatgacctgctattggaccagtcagagctcagaagcatttaccttgataagaatgaacagtgtaccaaggcattcttcaattcttgtgacacatacaaggacagtttaatatctaataatgagtggtgctactgcttccagagacagcaagacccaccttgccagactgagctcagcaatattcagaagcggcaaggggtaaagaagctcctaggacagtatatccccctgtgtgatgaagatggttactacaagccaacacaatgtcatggcagtgttggacagtgctggtgtgttgacagatatggaaatgaagtcatgggatccagaataaatggtgttgcagattgtgctatagattttgagatctccggagattttgctagtggcgattttcatgaatggactgatgatgaggatgatgaagacgatattatgaatgatgaagatgaaattgaagatgatgatgaagatgaaggggatgatgatgatggtggtgatgaccatgatgtatacatttgattgatgacagttgaaatcaataaattctacatttctaatatttacaaaaatgatagcctatttaaaattatcttcttccccaataacaaaatgattctaaacctcacatatattttgtataattatttgaaaaattgcagctaaagttatagaactttatgtttaaataagaatcatttgctttgagtttttatattccttacacaaaaagaaaatacatatgcagtctagtcagacaaaataaagttttgaagtgctactataataagtttttcacgagaacaaactttgtaaatcttccataagcaaaatgacagctagtgcttgggatcgtacatgttaattttctgaaagataattctaagtgaaatttaaaataaataaatttttaatgacctgggtcttaaggatttaggaaaaatatgcatgctttaattgcatttccaaagtagcatcttgctagacctagttgagtcaggataacagagagataccacatggcaagaaaaacaaagtgacaattgtagagtcctcaattgtgtttacattaatagtggtgtttttacctatgaaattattctggatctaataggacattttacaaaatggcaagtatggaaaaccatggattctgaaagttaaaaatttagttgttctccccaatgtgtattttaatttggatggcagtctcatgcagattttttaaaagattctttaataacatgatttgtttgcc

SEQ ID NO: 192988 - DNA, 505 bp, Artificial Sequence
  derived and/or modified sequence
gtaaagcctgcggggaggggacacgcttgcctctgcttgtctcctcctccctctaccctcgtcgttgctaatgcatgttttccagggtcgctcctggcttcgtaccccttatttgacactgacatgcccccccaccccccgttgtgtctcctctcccagatgctcaaggtgtcagccgtactgtgtgtgtgtgcagccgcttggtgcagtcagtctctcgcagctgccgcggcggtggctgcagccggggggcggtcggacggcggtaattttctggatgataaacaatggctcaccacaatctctcagtatgacaaggaagtcggacagtggaacaaattccgagacgaagtagaggatgattatttccgcacttggagtccaggaaaacccttcgatcaggctttagatccagctaaggatccatgcttaaagatgaaatgtagtcgccataaagtatgcattgctcaagattctcagactgcagtctgcattagtcaccgga

SEQ ID NO: 192989 - DNA, 2947 bp, Artificial Sequence
  derived and/or modified sequence
acaaagcagataaggattcctaggctaggagctacctcgtcctctggctccagccaagcgtcctatccggagccaactgtagctgggatccagcgagaggaagatgctcaaggtgtcagccgtactgtgtgtgtgtgcagccgcttggtgcagtcagtctctcgcagctgccgcggcggtggctgcagccggggggcggtcggacggcggtaattttctggatgataaacaatggctcaccacaatctctcagtatgacaaggaagtcggacagtggaacaaattccgagacgaagtagaggatgattatttccgcacttggagtccaggaaaacccttcgatcaggctttagatccagctaaggatccatgcttaaagatgaaatgtagtcgccataaagtatgcattgctcaagattctcagactgcagtctgcattagtcaccggaggcttacacacaggatgaaagaagcaggagtagaccataggcagtggaggggtcccatattatccacctgcaagcagtgcccagtggtctatcccagccctgtttgtggttcagatggtcatacctactcttttcagtgcaaactagaatatcaggcatgtgtcttaggaaaacagatctcagtcaaatgtgaaggacattgcccatgtccttcagataagcccaccagtacaagcagaaatgttaagagagcatgcagtgacctggagttcagggaagtggcaaacagattgcgggactggttcaaggcccttcatgaaagtggaagtcaaaacaagaagacaaaaacattgctgaggcctgagagaagcagattcgataccagcatcttgccaatttgcaaggactcacttggctggatgtttaacagacttgatacaaactatgacctgctattggaccagtcagagctcagaagcatttaccttgataagaatgaacagtgtaccaaggcattcttcaattcttgtgacacatacaaggacagtttaatatctaataatgagtggtgctactgcttccagagacagcaagacccaccttgccagactgagctcagcaatattcagaagcggcaaggggtaaagaagctcctaggacagtatatccccctgtgtgatgaagatggttactacaagccaacacaatgtcatggcagtgttggacagtgctggtgtgttgacagatatggaaatgaagtcatgggatccagaataaatggtgttgcagattgtgctatagattttgagatctccggagattttgctagtggcgattttcatgaatggactgatgatgaggatgatgaagacgatattatgaatgatgaagatgaaattgaagatgatgatgaagatgaaggggatgatgatgatggtggtgatgaccatgatgtatacatttgattgatgacagttgaaatcaataaattctacatttctaatatttacaaaaatgatagcctatttaaaattatcttcttccccaataacaaaatgattctaaacctcacatatattttgtataattatttgaaaaattgcagctaaagttatagaactttatgtttaaataagaatcatttgctttgagtttttatattccttacacaaaaagaaaatacatatgcagtctagtcagacaaaataaagttttgaagtgctactataataagtttttcacgagaacaaactttgtaaatcttccataagcaaaatgacagctagtgcttgggatcgtacatgttaattttctgaaagataattctaagtgaaatttaaaataaataaatttttaatgacctgggtcttaaggatttaggaaaaatatgcatgctttaattgcatttccaaagtagcatcttgctagacctagttgagtcaggataacagagagataccacatggcaagaaaaacaaagtgacaattgtagagtcctcaattgtgtttacattaatagtggtgtttttacctatgaaattattctggatctaataggacattttacaaaatggcaagtatggaaaaccatggattctgaaagttaaaaatttagttgttctccccaatgtgtattttaatttggatggcagtctcatgcagattttttaaaagattctttaataacatgatttgtttgcctttctagatttctttatctttctgaccagcaacttagggagcagaatttaaattaggaagacaaagggaaagattcatttaaaccatatttttacaaagtttgtcatttgccccaaggtcaaattttaaattcttaattttcattttatttcccattttaggtaaaagtttgcatttaatcttagaattatgttatttttgttagtagtgtggaaacttagagaacttattgtatggtgccttgcaaaaatagagatagaaagattttagcatgcataccaatatagtatattacgcaatatataagcacacctaattaacagattaatatcagtaaaggtattgctgctggaatgaagaaaatgggatacgtttgtttctttttttctattgttacataattgccatgtggacttgtttatgattattgtgtagagtagcatttaagatttaactgtagcaaaaattactttaaccgctgtatttaagttagcatgttaattaattgtgtagacattttggcacaccatcacttttaactatatcataccaatggttttgtgcccataataaaaatggaaaaacctgttgaatgttacgtattggtatctttaatttcaacagtgggtaaactggtttcccagtatacaattcattgaaagcaaaattgattaattatttccatttaatttatacacactcaatacaaaatttaatgttgactttacgtaataaagtataatgcattttcttttttactgtttatgtatagtttacaaaataaagaatcttgtaac

SEQ ID NO: 192990 - DNA, 2908 bp, Artificial Sequence
  derived and/or modified sequence
tcctctggctccagccaagcgtcctatccggagccaactgtagctgggatccagcgagaggaagatgctcaaggtgtcagccgtactgtgtgtgtgtgcagccgcttggtgcagtcagtctctcgcagctgccgcggcggtggctgcagccggggggcggtcggacggcggtaattttctggatgataaacaatggctcaccacaatctctcagtatgacaaggaagtcggacagtggaacaaattccgagacgaagtagaggatgattatttccgcacttggagtccaggaaaacccttcgatcaggctttagatccagctaaggatccatgcttaaagatgaaatgtagtcgccataaagtatgcattgctcaagattctcagactgcagtctgcattagtcaccggaggcttacacacaggatgaaagaagcaggagtagaccataggcagtggaggggtcccatattatccacctgcaagcagtgcccagtggtctatcccagccctgtttgtggttcagatggtcatacctactcttttcagtgcaaactagaatatcaggcatgtgtcttaggaaaacagatctcagtcaaatgtgaaggacattgcccatgtccttcagataagcccaccagtacaagcagaaatgttaagagagcatgcagtgacctggagttcagggaagtggcaaacagattgcgggactggttcaaggcccttcatgaaagtggaagtcaaaacaagaagacaaaaacattgctgaggcctgagagaagcagattcgataccagcatcttgccaatttgcaaggactcacttggctggatgtttaacagacttgatacaaactatgacctgctattggaccagtcagagctcagaagcatttaccttgataagaatgaacagtgtaccaaggcattcttcaattcttgtgacacatacaaggacagtttaatatctaataatgagtggtgctactgcttccagagacagcaagacccaccttgccagactgagctcagcaatattcagaagcggcaaggggtaaagaagctcctaggacagtatatccccctgtgtgatgaagatggttactacaagccaacacaatgtcatggcagtgttggacagtgctggtgtgttgacagatatggaaatgaagtcatgggatccagaataaatggtgttgcagattgtgctatagattttgagatctccggagattttgctagtggcgattttcatgaatggactgatgatgaggatgatgaagacgatattatgaatgatgaagatgaaattgaagatgatgatgaagatgaaggggatgatgatgatggtggtgatgaccatgatgtatacatttgattgatgacagttgaaatcaataaattctacatttctaatatttacaaaaatgatagcctatttaaaattatcttcttccccaataacaaaatgattctaaacctcacatatattttgtataattatttgaaaaattgcagctaaagttatagaactttatgtttaaataagaatcatttgctttgagtttttatattccttacacaaaaagaaaatacatatgcagtctagtcagacaaaataaagttttgaagtgctactataataagtttttcacgagaacaaactttgtaaatcttccataagcaaaatgacagctagtgcttgggatcgtacatgttaattttctgaaagataattctaagtgaaatttaaaataaataaatttttaatgacctgggtcttaaggatttaggaaaaatatgcatgctttaattgcatttccaaagtagcatcttgctagacctagttgagtcaggataacagagagataccacatggcaagaaaaacaaagtgacaattgtagagtcctcaattgtgtttacattaatagtggtgtttttacctatgaaattattctggatctaataggacattttacaaaatggcaagtatggaaaaccatggattctgaaagttaaaaatttagttgttctccccaatgtgtattttaatttggatggcagtctcatgcagattttttaaaagattctttaataacatgatttgtttgcctttctagatttctttatctttctgaccagcaacttagggagcagaatttaaattaggaagacaaagggaaagattcatttaaaccatatttttacaaagtttgtcatttgccccaaggtcaaattttaaattcttaattttcattttatttcccattttaggtaaaagtttgcatttaatcttagaattatgttatttttgttagtagtgtggaaacttagagaacttattgtatggtgccttgcaaaaatagagatagaaagattttagcatgcataccaatatagtatattacgcaatatataagcacacctaattaacagattaatatcagtaaaggtattgctgctggaatgaagaaaatgggatacgtttgtttctttttttctattgttacataattgccatgtggacttgtttatgattattgtgtagagtagcatttaagatttaactgtagcaaaaattactttaaccgctgtatttaagttagcatgttaattaattgtgtagacattttggcacaccatcacttttaactatatcataccaatggttttgtgcccataataaaaatggaaaaacctgttgaatgttacgtattggtatctttaatttcaacagtgggtaaactggtttcccagtatacaattcattgaaagcaaaattgattaattatttccatttaatttatacacactcaatacaaaatttaatgttgactttacgtaataaagtataatgcattttcttttttactgtttatgtatagtttacaaaataaagaatcttgtaac

SEQ ID NO: 192991 - protein, 152 aa, Artificial Sequence
  derived and/or modified sequence
MDNVQPKIKHRPFCFSVKGHVKMLRLALTVTSMTFFIIAQAPEPYIVITGFEVTVILFFILLYVLRLDRLMKWLFWPLLDIINSLVTTVFMLIVSVLALIPETTTLTVGGGVFALVTAVCCLADGALIYRKLLFNPSGPYQKKPVHEKKEVL

SEQ ID NO: 192992 - protein, 136 aa, Artificial Sequence [sequence omitted]

SEQ ID NO: 192993 - DNA, 459 bp, Artificial Sequence
  derived and/or modified sequence
atggacaacgtgcagcctaaaataaagcaccgaccattttgtttctccgtgaagggccatgtcaaaatgctgaggctcgccctgaccgtcacaagcatgacgttctttatcattgcccaagctcccgagccctacattgtgatcaccggatttgaagtgaccgtgattttgtttttcatattactctacgtgctcaggctggatcgtttaatgaaatggttgttttggccccttcttgacatcattaactcacttgtaactacagtgtttatgttgattgtgtcagtgctagctcttattcccgagaccaccacattaaccgttggtggcggtgtgtttgctctcgtgacggccgtgtgctgcctggcagacggtgctctgatttatcgtaagctgctgttcaacccatctgggccttatcagaagaaacccgtccacgagaagaaagaggttctttag

SEQ ID NO: 192994 - DNA, 411 bp, Artificial Sequence
  derived and/or modified sequence
atggacaatgttcagccaaagattaagcaccgccctttttgtttctcagtcaagggtcacgtcaagatgctgcgcctggcactgacggtgacttctatgacgtttttcataatcgctcaagccccagaaccctacattgtaataaccggtttcgaggtcactgtgattttgttctttatcctgctgtacgtcctgaggctggaccggcttatgaagtggctgttctggccgttgctggatattattaactccctcgttacaaccgtgttcatgctaatcgtatccgtgctcgcactgattcccgaaacaacaaccttgaccgttggaggaggagtctttgccctggttacagccgtatgttgtctggcagacggcgcactgatctacaggaaattactcttcttgcgctag

SEQ ID NO: 192995 - DNA, 459 bp, Artificial Sequence
  derived and/or modified sequence
atggacaatgtgcagcccaaaattaagcatagacctttttgttttagtgtaaaaggacatgtgaagatgctgcggctggcactgacagtaacaagtatgacttttttcattatagcccaagcccctgaaccttatatcgtgattaccggctttgaagtcaccgtgatcttgttttttattctactgtatgtgctgagactcgaccggcttatgaaatggctgttctggccacttctggacattattaattcccttgtcacaacagtgtttatgctgatcgtgagtgtgctcgcccttattcctgaaacaactacccttacggttggcggcggcgtgttcgcccttgtaacagcagtctgttgtttggctgatggggcccttatttatcggaaattactttttaatccaagcggaccttaccagaagaaaccggttcacgagaagaaagaagttctctag

SEQ ID NO: 192996 - DNA, 411 bp, Artificial Sequence
  derived and/or modified sequence
atggacaatgtgcaaccgaagatcaaacaccgaccattttgtttttccgtcaagggccatgtgaaaatgttgagacttgccctgaccgtgacatcaatgacgttctttatcatagcgcaggcgcctgaaccctatatcgtgattaccggttttgaggtgactgtaatcctcttcttcatcttattatacgttctgaggctggatcgcctgatgaaatggctcttttggcccttactggacattataaactcactggtgactactgttttcatgctcatcgtgtcagtcctcgccctgattcctgaaactacgacactcacagtgggcgggggcgtcttcgcactggtaactgctgtttgttgtttggcagatggagctcttatctacaggaagttgctattcctcagatag

SEQ ID NO: 192997 - DNA, 459 bp, Artificial Sequence
  derived and/or modified sequence
atggataacgttcaacccaagattaaacaccgcccattttgtttttcagttaagggtcacgtgaagatgctccgtctcgcccttactgtgacatccatgactttcttcataatcgcgcaggctccagagccatacatcgtcataaccggcttcgaagtcaccgtgatcttattctttattctgctgtacgtcctcagattggaccgcctgatgaagtggctgttctggcccctcctcgatatcattaactccctcgtcaccacagtattcatgcttatcgtgtccgtccttgccctcattcctgaaacaactacccttacggttggcggcggcgtgttcgcccttgtaacagcagtctgttgtttggctgatggggcccttatttatcggaaattactttttaatccaagcggaccttaccagaagaaaccggttcacgagaagaaagaagttctctag

SEQ ID NO: 192998 - DNA, 411 bp, Artificial Sequence
  derived and/or modified sequence
atggataatgtacaacccaagataaaacaccggcctttctgtttttctgttaaaggccacgtaaaaatgttacgcctcgccctcacggtcacgtccatgactttcttcataattgcccaggccccagaaccctatatagtcattaccggcttcgaagtgaccgtgattctatttttcatccttctctacgttctcaggctcgaccgactgatgaaatggctgttctggcccctgctggacatcattaattcccttgtgacaaccgtcttcatgttaatcgtctccgtgctggccctgatccctgaaaccaccactcttaccgtaggagggggtgtgttcgccctggtaaccgcagtgtgttgtctggccgacggagctctgatatataggaaattgctttttctccgttag

SEQ ID NO: 192999 - DNA, 669 bp, Artificial Sequence
  derived and/or modified sequence
gcgcaagagagcgggaagccgagctgggcgagaagtaggggagggcggtgctccgccgcggtggcggttgctatcgcttcgcagaacctactcaggcagccagctgagaagagttgagggaaagtgctgctgctgggtctgcagacgcgatggataacgtgcagccgaaaataaaacatcgccccttctgcttcagtgtgaaaggccacgtgaagatgctgcggctggcactaactgtgacatctatgaccttttttatcatcgcacaagcccctgaaccatatattgttatcactggatttgaagtcaccgttatcttatttttcatacttttatatgtactcagacttgatcgattaatgaagtggttattttggcctttgcttgatattatcaactcactggtaacaacagtattcatgctcatcgtatctgtgttggcactgataccagaaaccacaacattgacagttggtggaggggtgtttgcacttgtgacagcagtatgctgtcttgccgacggggcccttatttaccggaagcttctgttcaatcccagcggtccttaccagaaaaagcctgtgcatgaaaaaaaagaagttttgtaattttatattactttttagtttgatactaagtattaaacatatttctgtattcttccacata

SEQ ID NO: 193000 - DNA, 459 bp, Artificial Sequence
  derived and/or modified sequence
atggacaacgtgcagcccaagatcaagcacagacccttctgcttcagcgtgaagggccacgtgaagatgctgagactggccctgaccgtgaccagcatgaccttcttcatcatcgcccaggcccccgagccctacatcgtgatcaccggcttcgaggtgaccgtgatcctgttcttcatcctgctgtacgtgctgagactggacagactgatgaagtggctgttctggcccctgctggacatcatcaacagcctggtgaccaccgtgttcatgctgatcgtgagcgtgctggccctgatccccgagaccaccaccctgaccgtgggcggcggcgtgttcgccctggtgaccgccgtgtgctgcctggccgacggcgccctgatctacagaaagctgctgttcaaccccagcggcccctaccagaagaagcccgtgcacgagaagaaggaggtgctgtag

SEQ ID NO: 193001 - DNA, 411 bp, Artificial Sequence
  derived and/or modified sequence
atggacaacgtgcagcccaagatcaagcacagacccttctgcttcagcgtgaagggccacgtgaagatgctgagactggccctgaccgtgaccagcatgaccttcttcatcatcgcccaggcccccgagccctacatcgtgatcaccggcttcgaggtgaccgtgatcctgttcttcatcctgctgtacgtgctgagactggacagactgatgaagtggctgttctggcccctgctggacatcatcaacagcctggtgaccaccgtgttcatgctgatcgtgagcgtgctggccctgatccccgagaccaccaccctgaccgtgggcggcggcgtgttcgccctggtgaccgccgtgtgctgcctggccgacggcgccctgatctacagaaagctgctgttcctgagatag

SEQ ID NO: 193002 - DNA, 459 bp, Artificial Sequence
  derived and/or modified sequence
atggataatgtacagcccaagatcaagcatagaccattttgcttttccgtcaagggacacgtgaaaatgttgcgcctggcgctgactgtaacaagcatgacattctttatcatcgcccaagcaccggagccttacatcgtcatcactggattcgaggtgaccgttattttgttcttcatactcctctatgtcctgcgcttagatcggctgatgaaatggcttttttggcctctcttggacatcatcaacagcttagtcactacggttttcatgttaatcgtgtcggtcctcgcacttattcccgaaaccactacacttacggttggcggaggagtgtttgctctcgtgactgccgtttgctgcctggcagatggcgccctgatttataggaaattgctctttaacccctctgggccctaccagaagaaaccggtacatgagaagaaagaggtgttgtag

SEQ ID NO: 193003 - DNA, 411 bp, Artificial Sequence
  derived and/or modified sequence
atggacaacgtgcagcccaagataaagcacagacctttctgcttcagcgtgaagggtcacgtcaaaatgctgaggctggccttgaccgtgacatcaatgaccttctttatcatcgcccaggcccctgagccctacatagtcatcaccgggtttgaagttaccgtgatcctgtttttcatcctcctatatgtactaagactcgatcggctcatgaagtggctgttttggccgttgttggacatcatcaattcgttagtcactacggtgtttatgctcatcgttagtgttctggcactcattccagagaccaccaccctcaccgtcgggggcggagtctttgcgctagttactgctgtgtgctgtctggcagatggcgcactgatctaccggaagcttctcttccttagatag

SEQ ID NO: 193004 - DNA, 1189 bp, Artificial Sequence
  derived and/or modified sequence
agagagcgggaagccgagctgggcgagaagtaggggagggcggtgctccgccgcggtggcggttgctatcgcttcgcagaacctactcaggcagccagctgagaagagttgagggaaagtgctgctgctgggtctgcagacgcgatggataacgtgcagccgaaaataaaacatcgccccttctgcttcagtgtgaaaggccacgtgaagatgctgcggctggcactaactgtgacatctatgaccttttttatcatcgcacaagcccctgaaccatatattgttatcactggatttgaagtcaccgttatcttatttttcatacttttatatgtactcagacttgatcgattaatgaagtggttattttggcctttgcttgatattatcaactcactggtaacaacagtattcatgctcatcgtatctgtgttggcactgataccagaaaccacaacattgacagttggtggaggggtgtttgcacttgtgacagcagtatgctgtcttgccgacggggcccttatttaccggaagcttctgttcttgcgttagtttgctgagaataatggtttccagcttcatccatgtccccgcaaaggacatgaactcatccttttttatggctgcatagtattccatggtgtatatgtgccacattttctttatccagtctatcattgatggacatttgggttggttcagtttcctctcacaaaggaaattagggaagcaatgaagataataggaatttataagttaggaaacaaaaataatagaatcagtcaatacaagagctgtcgtttgaaagtcctattaaattgataagccattggccaaccaagaaaaaaagggggaagaaaagacatatatttaaaattagaaaccagaaggggaaaataatcacaaacatcagcaaaactgaaaggatctacaggagtaccttgcaaaatagatgtgaataattggatgaaatggttgattttccagaataatgtaaatcaccaaaactgatcccagaatagggaaaaatctaaacagggcaatataaacatagaagaaaatgagaattttagcaaatgagtatctttcaaaaatgtatcaggcccagacctttttacaagttaactctttcaagccttcatgggatataattctgacactactctaactttgtcaaagaatagag

SEQ ID NO: 193005 - DNA, 459 bp, Artificial Sequence
  derived and/or modified sequence
atggacaacgtgcagcccaagatcaagcaccggcccttctgcttctctgtgaagggccacgtgaagatgctgcggctggccctgactgtgacctccatgaccttcttcatcatcgcccaggcccctgagccctacatcgtcatcactggatttgaggtgaccgtcatcctcttcttcatcctgctgtatgtgctgcggctggaccggctgatgaagtggctgttctggcccctgctggacatcatcaacagcctggtgaccaccgtcttcatgctgattgtgtctgtgctggccctgatccctgagaccaccaccctgactgtgggcggcggcgtgtttgccctggtgacagctgtgtgctgcctggctgatggagccctgatctacaggaagctgctcttcaaccccagcggcccctaccagaagaagcctgtgcatgagaagaaggaggtgctgtag

SEQ ID NO: 193006 - DNA, 411 bp, Artificial Sequence
  derived and/or modified sequence
atggacaacgtgcagcccaagatcaagcaccggcccttctgcttctctgtgaagggccacgtgaagatgctgcggctggccctgactgtgacctccatgaccttcttcatcatcgcccaggcccctgagccctacatcgtcatcactggatttgaggtgaccgtcatcctcttcttcatcctgctgtatgtgctgcggctggaccggctgatgaagtggctgttctggcccctgctggacatcatcaacagcctggtgaccaccgtcttcatgctgattgtgtctgtgctggccctgatccctgagaccaccaccctgactgtgggcggcggcgtgtttgccctggtgacagctgtgtgctgcctggctgatggagccctgatctacaggaagctgctcttcctgaggtag

SEQ ID NO: 193007 - DNA, 459 bp, Artificial Sequence
  derived and/or modified sequence
atggacaacgtgcagcccaagatcaagcaccggcccttctgcttctccgtgaaggggcacgttaagatgcttagattggcccttacagtaacaagcatgacctttttcattattgcacaggctccggaaccttacatcgtcataacgggcttcgaggtgacagttatcctgttcttcattctgctgtatgtcctgcggctggatcggctcatgaaatggctgttttggccactactcgacatcattaactcactggttactactgttttcatgctgatagtcagtgtactggccctgattccagagacgacaaccttgacagttggggggggggtattcgccttggtgacagccgtctgttgcctggcagacggtgcattaatctatcggaaactcctgttcaacccgtcaggtccataccagaagaagcccgttcatgaaaaaaaggaagtgctctag

SEQ ID NO: 193008 - DNA, 411 bp, Artificial Sequence
  derived and/or modified sequence
atggacaacgtgcagcccaagatcaagcaccggcccttctgcttctccgttaaaggacacgtgaaaatgcttcgccttgcactcaccgtgacaagcatgacttttttcataattgctcaggctcccgaaccttacatagttatcactgggtttgaggtaaccgtgatactcttttttatcttgctgtatgttctgcggctggatcgccttatgaaatggctgttctggccactgttagatattatcaacagcctggttactacggttttcatgctcattgtaagcgttttggcactgatacctgaaacaactacgctgacagttggaggcggcgtgttcgcgctcgtcaccgccgtgtgctgcctggctgatggggccctaatttaccgcaagctcctctttctgagatag

SEQ ID NO: 193009 - RNA, 459 nt, Artificial Sequence
  derived and/or modified sequence
auggacaaugugcagcccaaaauuaagcauagaccuuuuuguuuuaguguaaaaggacaugugaagaugcugcggcuggcacugacaguaacaaguaugacuuuuuucauuauagcccaagccccugaaccuuauaucgugauuaccggcuuugaagucaccgugaucuuguuuuuuauucuacuguaugugcugagacucgaccggcuuaugaaauggcuguucuggccacuucuggacauuauuaauucccuugucacaacaguguuuaugcugaucgugagugugcucgcccuuauuccugaaacaacuacccuuacgguuggcggcggcguguucgcccuuguaacagcagucuguuguuuggcugauggggcccuuauuuaucggaaauuacuuuuuaauccaagcggaccuuaccagaagaaaccgguucacgagaagaaagaaguucucuag

SEQ ID NO: 193010 - RNA, 411 nt, Artificial Sequence
  derived and/or modified sequence
auggacaaugugcaaccgaagaucaaacaccgaccauuuuguuuuuccgucaagggccaugugaaaauguugagacuugcccugaccgugacaucaaugacguucuuuaucauagcgcaggcgccugaacccuauaucgugauuaccgguuuugaggugacuguaauccucuucuucaucuuauuauacguucugaggcuggaucgccugaugaaauggcucuuuuggcccuuacuggacauuauaaacucacuggugacuacuguuuucaugcucaucgugucaguccucgcccugauuccugaaacuacgacacucacagugggcgggggcgucuucgcacugguaacugcuguuuguuguuuggcagauggagcucuuaucuacaggaaguugcuauuccucagauag

SEQ ID NO: 193011 - RNA, 459 nt, Artificial Sequence
  derived and/or modified sequence
auggauaacguucaacccaagauuaaacaccgcccauuuuguuuuucaguuaagggucacgugaagaugcuccgucucgcccuuacugugacauccaugacuuucuucauaaucgcgcaggcuccagagccauacaucgucauaaccggcuucgaagucaccgugaucuuauucuuuauucugcuguacguccucagauuggaccgccugaugaaguggcuguucuggccccuccucgauaucauuaacucccucgucaccacaguauucaugcuuaucguguccguccuugcccucauuccugaaacaacuacccuuacgguuggcggcggcguguucgcccuuguaacagcagucuguuguuuggcugauggggcccuuauuuaucggaaauuacuuuuuaauccaagcggaccuuaccagaagaaaccgguucacgagaagaaagaaguucucuag

SEQ ID NO: 193012 - RNA, 411 nt, Artificial Sequence
  derived and/or modified sequence
auggauaauguacaacccaagauaaaacaccggccuuucuguuuuucuguuaaaggccacguaaaaauguuacgccucgcccucacggucacguccaugacuuucuucauaauugcccaggccccagaacccuauauagucauuaccggcuucgaagugaccgugauucuauuuuucauccuucucuacguucucaggcucgaccgacugaugaaauggcuguucuggccccugcuggacaucauuaauucccuugugacaaccgucuucauguuaaucgucuccgugcuggcccugaucccugaaaccaccacucuuaccguaggaggggguguguucgcccugguaaccgcaguguguugucuggccgacggagcucugauauauaggaaauugcuuuuucuccguuag

SEQ ID NO: 193013 - protein, 933 aa, Artificial Sequence
  derived and/or modified sequence
MAASRLDFGEVETFLDRHPELFEDYLMRKGKQEMVEKWLQRHSQGQGALGPRPSLAGTSSLAHSTCRGGSSVGGGTGPNGSAHSQPLPGGGDCGGVPLSPSWAGGSRGDGNLQRRASQKELRKSFARSKAIHVNRTYDEQVTSRAQEPLSSVRRRALLRKASSLPPTTAHILSALLESRVNLPRYPPTAIDYKCHLKKHNERQFFLELVKDISNDLDLTSLSYKILIFVCLMVDADRCSLFLVEGAAAGKKTLVSKFFDVHAGTPLLPCSSTENSNEVQVPWGKGIIGYVGEHGETVNIPDAYQDRRFNDEIDKLTGYKTKSLLCMPIRSSDGEIIGVAQAINKIPEGAPFTEDDEKVMQMYLPFCGIAISNAQLFAASRKEYERSRALLEVVNDLFEEQTDLEKIVKKIMHRAQTLLKCERCSVLLLEDIESPVVKFTKSFELMSPKCSADAENSFKESMEKSSYSDWLINNSIAELVASTGLPVNISDAYQDPRFDAEADQISGFHIRSVLCVPIWNSNHQIIGVAQVLNRLDGKPFDDADQRLFEAFVIFCGLGINNTIMYDQVKKSWAKQSVALDVLSYHATCSKAEVDKFKAANIPLVSELAIDDIHFDDFSLDVDAMITAALRMFMELGMVQKFKIDYETLCRWLLTVRKNYRMVLYHNWRHAFNVCQLMFAMLTTAGFQDILTEVEILAVIVGCLCHDLDHRGTNNAFQAKSGSALAQLYGTSATLEHHHFNHAVMILQSEGHNIFANLSSKEYSDLMQLLKQSILATDLTLYFERRTEFFELVSKGEYDWNIKNHRDIFRSMLMTACDLGAVTKPWEISRQVAELVTSEFFEQGDRERLELKLTPSAIFDRNRKDELPRLQLEWIDSICMPLYQALVKVNVKLKPMLDSVATNRSKWEELHQKRLLASTASSSPASVMVAKEDRN

SEQ ID NO: 193014 - DNA, 2802 bp, Artificial Sequence
  derived and/or modified sequence
atggccgcctcacgcctggactttggcgaggtggagacctttctcgaccgccacccagagcttttcgaggattacctcatgaggaagggcaagcaggaaatggttgaaaaatggctgcagcggcatagccaggggcagggagcgcttgggcctcgcccgtcattagcaggcacttcgtctcttgcccactccacatgcaggggaggctcttcagtcgggggggggacgggcccaaacggcagcgctcactcacagccgttacctggcgggggcgactgtggaggcgtgccactctccccatcatgggccggcggtagtcgcggagatggaaatctccagcgtagagcctctcagaaggagcttcgcaagtcattcgcacgatctaaagcaattcacgtgaaccgaacctatgatgagcaggtgacaagcagggcccaggaaccactttctagcgtcagacgtcgggcgctactccgcaaggcctcgagtctcccgccaacgacggcgcacatcctctccgcccttttagagagtcgcgttaacttgcccagataccctcctacggcgatagattacaaatgccacctgaagaagcacaacgaaaggcagttcttccttgagctagtgaaagatatcagcaacgacctggacctcacgtccttatcttataagatccttattttcgtgtgcctaatggtcgacgccgaccggtgttccctctttctggttgaaggcgccgctgctgggaagaagactctcgtgagtaagttctttgatgtccatgccggtacccctcttctcccttgcagcagtaccgaaaatagcaatgaggtccaggttccctggggcaaaggaattatcggatacgtcggagagcacggagagacagtaaacatccccgacgcgtaccaggatcgtcgcttcaacgacgagattgacaagctgactggatacaaaacaaaaagcctgctatgcatgccaatccggtcatcagacggagagattatcggtgtggcacaggcaattaataaaattcccgagggagcacctttcaccgaggatgacgaaaaggtaatgcagatgtatctgccattttgtggaatcgccatctccaatgctcagctgtttgcagcgtcaaggaaggaatacgaacgctcccgggccctcctagaggttgttaatgacctgtttgaggagcagacagacctggagaagattgtaaagaagatcatgcacagggctcagacacttctcaaatgtgaaagatgttcagtcctcctgctggaagacatcgaaagccctgtcgtgaaattcaccaagagctttgaactgatgagccccaagtgttcagccgatgcggaaaactcattcaaggagtcaatggaaaaatcctcatactcagactggctgatcaacaatagtatcgctgaactggtggcctctaccggtttgcccgttaatatctcagatgcctaccaggaccctagattcgatgctgaggccgatcaaatctcagggtttcatatcagaagtgtgctgtgtgtgcccatctggaattcaaaccaccaaattatcggcgtggcgcaggttcttaatcgtttggatgggaaaccttttgatgacgcggatcagcggttgtttgaggctttcgtcattttctgcggtttagggatcaataacactatcatgtacgaccaggtcaagaaaagttgggctaagcagagtgtagccctggatgtcttgagttatcacgccacctgctccaaggcggaggtcgacaagttcaaggcagcgaacatcccattggtaagtgagctcgcaattgacgacattcacttcgacgatttttccctcgacgtagatgcaatgattactgctgctctgaggatgtttatggaattgggtatggtacagaagtttaaaattgattatgaaaccctgtgcagatggctgctgacagtccggaaaaactaccgcatggtcctataccacaattggaggcacgcattcaatgtgtgtcagttgatgtttgccatgcttacaaccgccgggttccaagatattcttaccgaagttgaaattctcgcggtgattgtgggttgtctttgccatgatttagaccacaggggtactaataatgccttccaggctaaaagtgggtctgctctagctcagctctacgggacctcagccaccctggagcaccatcactttaaccatgctgtgatgattctgcagtcagaagggcataacattttcgcaaacctgagttctaaggaatactcggacctgatgcagcttctcaagcagtctatcctcgctacagatctgaccttatacttcgagcgccggacagagttctttgagctcgtttcgaaaggtgaatacgactggaatataaaaaatcaccgggatatcttcagatcgatgctcatgacagcctgtgaccttggtgcagttactaaaccatgggagattagccgacaggttgccgagctcgttactagcgagttctttgagcagggcgaccgggaacggcttgaactgaaactcaccccttccgccatatttgatcggaacagaaaggacgagcttcccaggctgcaactggagtggattgacagcatttgcatgcctctgtatcaggcactcgtgaaagtcaacgtaaagctgaaacccatgttggatagtgtggccacaaaccgtagcaagtgggaagaactgcaccaaaagcggctcctggcttccaccgcaagttcaagcccagcctctgtgatggtggccaaagaagatcgaaattag

SEQ ID NO: 193015 - DNA, 2802 bp, Artificial Sequence
  derived and/or modified sequence
atggccgccagccggctggactttggagaggtggagaccttcctggacagacaccctgagctgtttgaggactacctgatgaggaagggcaagcaggagatggtggagaagtggctgcagaggcacagccagggccagggcgccctgggcccccggcccagcctggccggcaccagcagcctggcccacagcacctgccggggcggcagctctgtgggcggcggcaccggccccaatggaagtgcccacagccagcccctgcccggcggcggggactgtggcggcgtgcccctgagccccagctgggccggcggcagcagaggagatggcaacctgcagaggcgggccagccagaaggagctgaggaagagctttgcccggagcaaggccatccacgtgaacagaacctatgatgagcaggtgaccagccgggcccaggagcccctgagctctgtgagaagaagagccctgctgaggaaggccagcagcctgccccccaccacagcccacatcctgagcgccctgctggagagccgggtgaacctgccccgctacccacccacagccatcgactacaagtgccacctgaagaagcacaatgaaaggcagttcttcctggagctggtgaaggacatcagcaatgacctggacctgaccagcctgagctacaagatcctgatctttgtgtgcctgatggtggatgctgaccgctgcagcctcttcctggtggagggcgctgctgctgggaagaagaccctggtgtccaagttctttgatgtgcacgccggcacccccctgctgccctgcagcagcacagagaacagcaatgaggtgcaggtgccctggggcaagggcatcatcggctacgtgggggagcacggggagaccgtgaacatcccagatgcctaccaggaccggcgcttcaatgatgaaattgacaagctgaccggctacaagaccaagagcctgctgtgcatgcccatccgcagcagtgatggagagatcatcggcgtggcccaggccatcaacaagatccctgagggcgcccccttcacagaagatgatgagaaggtgatgcagatgtacctgcccttctgtggcatcgccatcagcaatgcccagctgtttgctgccagcaggaaggagtatgaaagaagccgggccctgctggaggtggtgaatgacctgtttgaggagcagacagacctggagaagatcgtgaagaagatcatgcaccgggcccagaccctgctgaagtgtgagcgctgcagcgtgctgctgctggaggacatcgagagccctgtggtgaagttcaccaagagctttgagctgatgagccccaagtgcagcgcagatgctgagaacagcttcaaggagagcatggagaagagcagctacagcgactggctgatcaacaacagcattgctgagctggtggccagcacaggcctgcctgtgaacatcagtgatgcctaccaggaccccaggtttgatgctgaggccgaccagatcagcggcttccacatccgctctgtgctgtgtgtgcccatctggaacagcaaccaccagatcattggagtggcccaggtgctgaaccggctggatggcaagccctttgatgatgctgaccagaggctgtttgaggccttcgtcatcttctgtggcctgggcatcaacaacaccatcatgtatgaccaggtgaagaagtcctgggccaagcagagcgtggccctggatgtgctgagctaccacgccacctgcagcaaggccgaggtggacaagttcaaggccgccaacatccccctggtgtctgagctggccattgatgacatccactttgatgacttcagcctggatgtggatgccatgatcacagctgccctgaggatgttcatggagctgggcatggtgcagaagttcaagattgattatgagaccctgtgccgctggctgctgactgtgaggaagaactacaggatggtgctgtaccacaactggaggcatgccttcaacgtgtgccagctgatgtttgccatgctgaccacagctggcttccaggacatcctgacagaggtggagatcctggccgtcatcgtgggctgcctgtgccacgacctggaccaccggggcaccaacaatgccttccaggccaagagcggcagcgccctggcccagctgtatggcaccagcgccaccctggagcaccaccacttcaaccacgctgtgatgatcctgcagagcgagggccacaacatctttgccaacctgagcagcaaggagtacagcgacctgatgcagctgctgaagcagagcatcctggccacagacctgaccctgtactttgaaagaagaacagagttctttgagctggtgtccaaaggagaatatgactggaacatcaagaaccaccgggacatcttccgctccatgctgatgacagcctgtgacctgggcgctgtgaccaagccctgggagatcagccggcaggtggccgagctggtgaccagcgagttctttgagcagggcgaccgggagcggctggagctgaagctgacccccagcgccatctttgacaggaacaggaaggatgagctgccccggctgcagctggagtggattgacagcatctgcatgcccctgtaccaggccctggtgaaggtgaatgtgaagctgaagcccatgctggacagcgtggccaccaacagaagcaagtgggaggagctgcaccagaagaggctgctggccagcacagccagcagcagccctgcctctgtgatggtggccaaggaggacaggaactag

SEQ ID NO: 193016 - DNA, 2802 bp, Artificial Sequence
  derived and/or modified sequence
atggccgccagccggctggacttcggcgaggtggagaccttcctggatcggcaccctgaactgtttgaagattatctcatgagaaagggcaagcaggaaatggtcgaaaagtggctccagcggcattcacaaggtcagggggcgctggggcccaggccaagccttgccggaacatcttccctcgcccactcaacttgccgaggaggcagctcagtagggggtggaaccgggcctaatgggtcagctcattcacagccacttcccggtgggggggattgtggcggtgtccccctaagcccctcatgggccggcggaagccgcggggacggtaacttacaaaggcgcgcctctcagaaagagctgaggaagtctttcgccagaagcaaggcgatccatgtcaatagaacatacgatgagcaagtcacatccagagcccaggaacctttaagttcagtgaggcggagagccctgctgcgtaaagcctcttcgctgccccctaccactgcacatatactttccgcactcctcgagtctcgggtcaacctgcctcggtatccacctacagcaatagattacaagtgccaccttaaaaagcataacgaacggcagttctttttggagttagttaaagacatatcgaacgatttggatcttacatcgctctcctacaagattctgatattcgtgtgtctgatggtcgacgctgaccggtgttccctgtttttagtggaaggtgctgcagctggcaagaagacactggtatctaaatttttcgatgtccacgccggaacccccttgctgccctgttcctctacagaaaactcaaatgaggtccaggtcccttggggaaagggcatcatcggctacgtaggagagcacggagaaacagtgaatatacccgacgcctatcaggatcggcgcttcaacgacgaaatcgataagctgacaggctataaaactaaatcactcctgtgcatgcccattagaagcagtgatggcgagataataggagtcgcacaagccattaacaagatcccagagggcgcaccttttactgaggacgatgagaaagttatgcagatgtacttacctttttgcggcattgccatctctaacgctcagctgtttgcagccagccgcaaagaatatgagcgttccagggctcttctcgaagtggtaaacgacctgttcgaagagcaaaccgacctcgagaaaatcgtgaaaaaaatcatgcatcgcgcccagaccttgctcaagtgcgagagatgcagcgtcttactgttggaagacatagaaagtccggtggtgaagtttacgaaatcctttgagctgatgagtccgaaatgttctgcggatgccgagaacagcttcaaagaaagcatggagaagagttcctacagcgattggttgataaataacagcatagctgagctggtggcctctacgggcctgccggtaaatatctccgacgcatatcaggacccacgattcgacgctgaggctgaccagatttccggttttcacatacgaagtgtgctgtgtgtaccgatatggaattcgaaccaccagattataggagtggcccaggtcctgaaccgactcgatggcaaacctttcgacgatgccgatcagcgcttgttcgaagcattcgtgatattttgtgggctcggcataaacaacaccataatgtatgatcaagtgaaaaagtcttgggctaagcagtctgtggcgctggacgtgctgtcataccatgctacatgttcaaaggccgaggtagacaagttcaaagccgcgaacatccccctggtatcagaactagcaatcgacgatatccactttgacgatttcagcctggatgtggatgccatgattaccgctgcactgagaatgttcatggagctgggcatggtgcagaagttcaagattgactacgagactctgtgccgctggcttcttaccgtgcggaaaaattacagaatggtgctgtaccacaattggcgacacgcattcaatgtctgccagcttatgtttgccatgctaacaacagcgggattccaagatatcctgacagaagtagagattctggccgtgatagtgggatgcctctgccacgacctggaccacagaggaaccaataacgccttccaggctaagagcgggtctgcattagcccagctgtatggcacgtcagccacactcgagcaccaccactttaatcacgccgttatgatactacagagtgagggccacaatatcttcgcgaatttgtctagcaaggaatattccgatctcatgcagctgctgaaacaatccatccttgccaccgacctaacactgtatttcgagcggcgaacagaatttttcgagttggtgtccaaaggcgagtacgactggaatatcaagaatcatcgggatatcttccggtcaatgttaatgaccgcttgtgacctgggggctgtaaccaaaccgtgggaaatatcgcgccaggtagccgagctggtgacaagcgagtttttcgaacagggtgaccgcgaaagactggaacttaagcttactccttcagccatttttgataggaatcgcaaagatgaactgccccgcctccaactcgaatggatagattccatctgtatgcctttataccaggcccttgtgaaggtgaacgttaagcttaaaccaatgctggactccgttgcgaccaaccgttccaaatgggaggagctgcaccagaagcggctgttagcgtccactgcgtcctccagccctgcatccgtgatggtcgcaaaagaagatcgtaattag

SEQ ID NO: 193017 - DNA, 4458 bp, Artificial Sequence
  derived and/or modified sequence
gcagcggcggcagccagaacaggagcagcgatagctcgggtttccggaacaggagccggggcagcggcggcagctcagtgctgggcacctgtgcggagcaggagtagcaggaccacggggtggggtcggcgccagccactctgagccagagaaggaaggggcatctcccagattccactgctgggaataatctccaggggaggtggcgctgaactgggaatactggtgggggtgaacatgtgcaggaacagctagaggcctcggggcaggaaaacatttggttcacgtgtaaacaggcaaggaaagctgtctgggaccatggcagcctcccgcctggactttggggaggtggaaactttcctggacaggcacccagagttgtttgaagattacttgatgcggaaggggaagcaggagatggttgaaaagtggctgcagaggcacagtcagggtcagggggctttaggtccaaggccctctttggctggtaccagcagcttggctcacagcacctgcagaggtggcagcagcgttggtggtggcactggaccaaatggctctgcccacagccagccccttcccggtggcggggactgtggtggggttcccttgagtcccagctgggccggtggcagcaggggcgatgggaacctgcagcggagagcttctcagaaagagctaaggaagagttttgcccgctccaaggccatccacgtgaacaggacctacgatgaacaggtgacctcccgggctcaggaacccctgagtagtgtacgacggagggcacttctccggaaggcaagctccctgccccccaccacagcccatattctcagtgcgctgctggaatcgagagtgaatctgcctcggtatccccctacagccatcgactacaagtgccatctgaaaaagcataatgagcgtcagttctttctggaattggtcaaagatatctccaatgaccttgacctcaccagcctgagctacaagattctcatctttgtctgccttatggtggatgctgaccgctgctctcttttcctggtggaaggggcagctgctggcaagaagaccttggtctccaaattctttgatgtgcatgcaggaacacctctgctgccttgcagcagcacagagaactcaaatgaggtgcaggtcccctggggcaaaggtatcattggctatgtcggggagcatggagaaacggtcaacattcctgatgcctaccaggatcgacgattcaatgatgaaatcgacaagctaactggatacaagacaaaatcattattgtgcatgcctatccgaagcagtgatggtgagattattggtgtggcccaagcgataaataagattcctgaaggagctccatttactgaagatgatgaaaaagttatgcagatgtatcttccattttgtggaatcgccatatctaacgctcagctctttgctgcctcaaggaaagaatatgaaagaagcagagctttgctagaggtggttaatgacctctttgaagaacagactgacctggagaaaattgtcaagaaaataatgcatcgggcccaaactctgctgaaatgtgaacgctgttctgttttactcctagaggacatcgaatcaccagtggtgaaatttaccaaatcctttgaattgatgtccccaaagtgcagtgctgatgctgagaacagtttcaaagaaagcatggagaaatcatcatactccgactggctaataaataacagcattgctgagctggttgcttcaacaggccttccagtgaacatcagtgatgcctaccaggatccgcgctttgatgcagaggcagaccagatatctggttttcacataagatctgttctttgtgtccctatttggaatagcaaccaccaaataattggagtggctcaagtgttaaacagacttgatgggaaaccttttgatgatgcagatcaacgactttttgaggcttttgtcatcttttgtggacttggcatcaacaacacaattatgtatgatcaagtgaagaagtcctgggccaagcagtctgtggctcttgatgtgctatcataccatgcaacatgttcaaaagctgaagttgacaagtttaaggcagccaacatccctctggtgtcagaacttgccatcgatgacattcattttgatgacttttctctcgacgttgatgccatgatcacagctgctctccggatgttcatggagctggggatggtacagaaatttaaaattgactatgagacactgtgtaggtggcttttgacagtgaggaaaaactatcggatggttctataccacaactggagacatgccttcaacgtgtgtcagctgatgttcgcgatgttaaccactgctgggtttcaagacattctgaccgaggtggaaattttagcggtgattgtgggatgcctgtgtcatgacctcgaccacaggggaaccaacaatgccttccaagctaagagtggctctgccctggcccaactctatggaacctctgctaccttggagcatcaccatttcaaccacgccgtgatgatccttcaaagtgagggtcacaatatctttgctaacctgtcctccaaggaatatagtgaccttatgcagcttttgaagcagtcaatattggcaacagacctcacgctgtactttgagaggagaactgaattctttgaacttgtcagtaaaggagaatacgattggaacatcaaaaaccatcgtgatatatttcgatcaatgttaatgacagcctgtgaccttggagccgtgaccaaaccgtgggagatctccagacaggtggcagaacttgtaaccagtgagttcttcgaacaaggagatcgggagagattagagctcaaactcactccttcagcaatttttgatcggaaccggaaggatgaactgcctcggttgcaactggagtggattgatagcatctgcatgcctttgtatcaggcactggtgaaggtcaacgtgaaactgaagccgatgctagattcagtagctacaaacagaagtaagtgggaagagctacaccaaaaacgactgctggcctcaactgcctcatcctcccctgccagtgttatggtagccaaggaagacaggaactaaacctccaggtcagctgcagctgcaaaatgactacagcctgaagggccattttcagtccagcaatgtcatccttttgttcttttagctcagaaagacctaacatctcaaggatgcactgggaagcatgcctgggctttcaccttgaagcatggtcagcagcagagagagcaacgggaaggacaaagaaagaggtggggcagggagcacaccccaggaccctcacttttccctaatgaacacgcatgggctgaaatgaaggctctgggtaggggactgttttggatccaaggacctgtggacagtcggcctacttactctgagctgagggaacactgaacagtaaaagcgtcattagcgctgcttcgttttgtatagggcttttctgtttgttacaagccaaacactgcctgtctttgcttcctgtccctgaatgcctttttgtgccagactgtcccaagaatcctaatttgtattccatagaggtattttatttttaatcctagagcttcttattgatggatcctttagaattgcctacctaaaaggtaaactatactatccttataaatactgatcaatcccagttctccccctaaaaatgaatacatagtaggactatagcaaatgtgtttgatgggtaattctagactgggactatggtacccttttccagagttttaaaattcaaccttcattacagacaaagttttctcccagaaggaatggattgatagattttgattaaagtaagggtggaaggaaatctgtagctggatttaccacaagtgacatctagaaactatagttcacaggacagagcagagccatggagactaagcattgactaccttgagttctcctagtgaggagttctggtataaaatttaagattactaccagtaaccaacttaaagcaaactataggggtccctaattttggatttttccttaagtgtaagaaacaatgcttcaaatgttaagaaataacagtctgggcaaagaacgcatattctataggaagccaggtttacaataggtaagaataaactgtattaagtagatgtaatgactagaaagctgctttgctccctatattgagaaattgtggacatggtatgtgttatccaaagaacattgggctagaagatagatttctatccttagctttggcattattgactggattgacttgaacaagtcacttaacttctacaagcttgtttccttatttgtcaaattagattacactaggaaacgattctcgaacatgttttaaccttacaactctttgttcaaataaatctttcaatgaatccccaacatataaaacgtcaaaaa

SEQ ID NO: 193018 - DNA, 2802 bp, Artificial Sequence
  derived and/or modified sequence
atggccgcaagccggctggattttggcgaagtggagactttcctggaccgccatcccgaattattcgaggattatctgatgcggaaagggaagcaagagatggtcgagaaatggctgcagcgacacagtcaagggcagggagctcttggacctagaccaagcctggctggaacatcttccctagcccactcaacatgccgtggcggatcatccgtgggaggaggaaccggtccaaacgggtccgctcacagtcagccactccctggagggggagattgcgggggagttcctctatcgccttcttgggcaggaggtagtcggggagacggaaatctacaacgcagggcgtcacagaaagagcttcgaaaatccttcgccaggagtaaagctatacatgtcaaccgcacatacgatgaacaggtgacctctagggcccaggagccgctttcatcagtgagaaggcgcgcactcctccggaaagcttccagcctgcctcccacaaccgctcatatacttagtgccctgttggaatcccgcgtaaacctgcctcggtatcctccgactgccattgactacaagtgccacctcaagaagcacaacgagagacaattttttcttgagttagtgaaggacatctctaatgatctggacctgacttccctgtcttacaagattcttatcttcgtgtgtctaatggtcgacgctgaccggtgttctctgtttctggttgaaggggctgcagctgggaaaaaaacgctcgtaagtaagttctttgacgttcatgcgggtaccccattgcttccgtgttcctccaccgaaaacagcaatgaagtgcaagttccctggggtaaaggcatcattgggtacgtaggcgaacacggagagacagttaacattcctgatgcctaccaagatagacgtttcaacgatgagatcgacaaactgacagggtacaaaacgaaatctctgttgtgtatgcccattcggtcctcagacggagagattattggggtcgcgcaggccatcaataagatcccggagggagcacctttcacggaggacgatgagaaggtgatgcagatgtatttacccttttgcggcattgctatttccaacgctcagttattcgctgcttcacgtaaggagtatgaaagatctagagccctcttggaagtggtcaatgatctgttcgaagagcagaccgacctcgagaaaattgttaaaaagatcatgcaccgagcacagacacttcttaagtgtgaacgatgttctgtgttgctgctcgaagatatagagagcccagtcgtgaaattcacgaagtcctttgaactgatgtcacccaaatgtagcgctgacgcagaaaacagctttaaggagagcatggaaaaatccagctattccgactggctcattaacaattcaattgccgagcttgtcgccagcacgggtctacccgtgaacatttctgatgcatatcaagacccccgtttcgatgcagaggccgaccagatttcaggttttcacatccgcagcgttctgtgcgttccaatctggaactcaaatcatcagattattggtgtagcacaagttttgaatcgtctggatggaaaacctttcgacgacgcagaccaacggctcttcgaagcttttgtcatcttctgcggtttaggtatcaataacaccataatgtacgaccaagtgaaaaagtcttgggcaaagcaatcagtagccctggatgtgctcagctaccatgccacctgctcgaaggctgaggtcgacaaattcaaagctgccaacattccactggtctctgaacttgctatcgacgacatacactttgacgatttttccctggatgtggatgcaatgataacagcagcactccggatgtttatggagctgggcatggttcagaaattcaaaatcgactacgagacattgtgcaggtggctgctgacagtccgaaagaactaccggatggtcttataccataactggaggcacgcctttaatgtttgtcagttgatgtttgcaatgttgacaaccgctgggttccaggacatcctgaccgaagtggagattctcgcagtgattgtcgggtgtctgtgccacgacctggaccaccggggaacgaacaacgcattccaggccaagagtggatcagccttggcccagttgtatggcacaagcgcgaccctggagcaccatcatttcaaccatgccgtaatgatcctgcagagtgaaggacacaacatttttgcaaatctgagctccaaagagtattctgacctgatgcagctcctgaagcagagcatcctcgcaacggacttgacactctactttgaaagacgaacggaattctttgagcttgtctcgaagggcgaatacgactggaatatcaagaaccatagggacatttttcgctcaatgctgatgaccgcttgtgatctcggagccgttactaagccttgggagatctcccgtcaagtggctgagttggtcacctctgagttttttgaacaaggagacagagagagactggagctgaaacttacgccttccgccatctttgatagaaaccgtaaggacgaactgccacgcctccagctggaatggatcgactccatctgtatgcctctgtaccaggcactcgtgaaggtaaacgtgaaattgaaacctatgctggactccgtggccaccaacaggagcaagtgggaggagttacaccaaaagcggctcctcgccagtacagccagttcatcgcctgcaagcgtgatggtcgccaaggaggatcggaactag

SEQ ID NO: 193019 - DNA, 2802 bp, Artificial Sequence
  derived and/or modified sequence
atggccgccagcagactggacttcggcgaggtggagaccttcctggacagacaccccgagctgttcgaggactacctgatgagaaagggcaagcaggagatggtggagaagtggctgcagagacacagccagggccagggcgccctgggccccagacccagcctggccggcaccagcagcctggcccacagcacctgcagaggcggcagcagcgtgggcggcggcaccggccccaacggcagcgcccacagccagcccctgcccggcggcggcgactgcggcggcgtgcccctgagccccagctgggccggcggcagcagaggcgacggcaacctgcagagaagagccagccagaaggagctgagaaagagcttcgccagaagcaaggccatccacgtgaacagaacctacgacgagcaggtgaccagcagagcccaggagcccctgagcagcgtgagaagaagagccctgctgagaaaggccagcagcctgccccccaccaccgcccacatcctgagcgccctgctggagagcagagtgaacctgcccagatacccccccaccgccatcgactacaagtgccacctgaagaagcacaacgagagacagttcttcctggagctggtgaaggacatcagcaacgacctggacctgaccagcctgagctacaagatcctgatcttcgtgtgcctgatggtggacgccgacagatgcagcctgttcctggtggagggcgccgccgccggcaagaagaccctggtgagcaagttcttcgacgtgcacgccggcacccccctgctgccctgcagcagcaccgagaacagcaacgaggtgcaggtgccctggggcaagggcatcatcggctacgtgggcgagcacggcgagaccgtgaacatccccgacgcctaccaggacagaagattcaacgacgagatcgacaagctgaccggctacaagaccaagagcctgctgtgcatgcccatcagaagcagcgacggcgagatcatcggcgtggcccaggccatcaacaagatccccgagggcgcccccttcaccgaggacgacgagaaggtgatgcagatgtacctgcccttctgcggcatcgccatcagcaacgcccagctgttcgccgccagcagaaaggagtacgagagaagcagagccctgctggaggtggtgaacgacctgttcgaggagcagaccgacctggagaagatcgtgaagaagatcatgcacagagcccagaccctgctgaagtgcgagagatgcagcgtgctgctgctggaggacatcgagagccccgtggtgaagttcaccaagagcttcgagctgatgagccccaagtgcagcgccgacgccgagaacagcttcaaggagagcatggagaagagcagctacagcgactggctgatcaacaacagcatcgccgagctggtggccagcaccggcctgcccgtgaacatcagcgacgcctaccaggaccccagattcgacgccgaggccgaccagatcagcggcttccacatcagaagcgtgctgtgcgtgcccatctggaacagcaaccaccagatcatcggcgtggcccaggtgctgaacagactggacggcaagcccttcgacgacgccgaccagagactgttcgaggccttcgtgatcttctgcggcctgggcatcaacaacaccatcatgtacgaccaggtgaagaagagctgggccaagcagagcgtggccctggacgtgctgagctaccacgccacctgcagcaaggccgaggtggacaagttcaaggccgccaacatccccctggtgagcgagctggccatcgacgacatccacttcgacgacttcagcctggacgtggacgccatgatcaccgccgccctgagaatgttcatggagctgggcatggtgcagaagttcaagatcgactacgagaccctgtgcagatggctgctgaccgtgagaaagaactacagaatggtgctgtaccacaactggagacacgccttcaacgtgtgccagctgatgttcgccatgctgaccaccgccggcttccaggacatcctgaccgaggtggagatcctggccgtgatcgtgggctgcctgtgccacgacctggaccacagaggcaccaacaacgccttccaggccaagagcggcagcgccctggcccagctgtacggcaccagcgccaccctggagcaccaccacttcaaccacgccgtgatgatcctgcagagcgagggccacaacatcttcgccaacctgagcagcaaggagtacagcgacctgatgcagctgctgaagcagagcatcctggccaccgacctgaccctgtacttcgagagaagaaccgagttcttcgagctggtgagcaagggcgagtacgactggaacatcaagaaccacagagacatcttcagaagcatgctgatgaccgcctgcgacctgggcgccgtgaccaagccctgggagatcagcagacaggtggccgagctggtgaccagcgagttcttcgagcagggcgacagagagagactggagctgaagctgacccccagcgccatcttcgacagaaacagaaaggacgagctgcccagactgcagctggagtggatcgacagcatctgcatgcccctgtaccaggccctggtgaaggtgaacgtgaagctgaagcccatgctggacagcgtggccaccaacagaagcaagtgggaggagctgcaccagaagagactgctggccagcaccgccagcagcagccccgccagcgtgatggtggccaaggaggacagaaactag

SEQ ID NO: 193020 - protein, 501 aa, Artificial Sequence
  derived and/or modified sequence
MNRESFAAGERLVSPAYVRQGCEARRSHEHLIRLLLEKGKCPENGWDESTLELFLHELAIMDSNNFLGNCGVGEREGRVASALVARRHYRFIHGIGRSGDISAVQPKAAGSSLLNKITNSLVLDIIKLAGVHTVANCFVVPMATGMSLTLCFLTLRHKRPKAKYIIWPRIDQKSCFKSMITAGFEPVVIENVLEGDELRTDLKAVEAKVQELGPDCILCIHSTTSCFAPRVPDRLEELAVICANYDIPHIVNNAYGVQSSKCMHLIQQGARVGRIDAFVQSLDKNFMVPVGGAIIAGFNDSFIQEISKMYPGRASASPSLDVLITLLSLGSNGYKKLLKERKEMFSYLSNQIKKLSEAYNERLLHTPHNPISLAMTLKTLDEHRDKAVTQLGSMLFTRQVSGARVVPLGSMQTVSGYTFRGFMSHTNNYPCAYLNAASAIGMKMQDVDLFIKRLDRCLKAVRKERSKESDDNYDKTEDVDIEEMALKLDNVLLDTYQDASS

SEQ ID NO: 193021 - DNA, 1506 bp, Artificial Sequence
  derived and/or modified sequence
atgaacagggagtcgtttgccgctggtgagagactggtgtcccccgcttacgttcggcaagggtgcgaagcccgcagatcccacgagcacttgattcggctgttgctggagaaaggcaagtgcccagagaatggctgggacgaaagcactttggagctgtttctccacgagcttgccattatggattctaacaattttttaggaaactgcggcgtgggcgagcgagaagggagggttgcgtccgctttggtggcgcgtcgacattaccgatttatccacggcattggtcggagcggggacattagcgccgttcagcccaaagcggctggcagtagtctgctgaataaaataacaaacagcctggtgctggatatcatcaaattagctggagtccatacagtagctaactgcttcgtggttcccatggccaccgggatgtcactcaccttatgtttcctgaccctgagacacaagcgacccaaggctaagtacatcatttggccaagaatcgaccagaagagttgctttaagtcaatgatcacggcgggcttcgagcccgtagtgattgagaatgtcctcgagggcgatgagctccggaccgatttgaaggctgtggaggccaaagtccaggaactcggccctgactgcatcctctgtattcacagcacaacttcttgttttgcaccccgagtgcctgatcggctcgaggagctggctgtgatatgcgcaaattacgatatcccccatatcgtcaataatgcatacggagtccaatctagtaaatgcatgcaccttatccagcagggcgcccgagtgggaaggatagacgcctttgtacagtcattagacaagaatttcatggtgcccgttgggggagcaatcatcgccggctttaacgactcctttatccaggagatcagtaagatgtatcccgggcgggcttctgcttcaccttccctagatgtgcttatcactttactgagcctgggctccaacggatataagaaactcctaaaagaaaggaaggaaatgttctcctacctgagcaatcagattaagaagctctctgaggcatacaacgaacgccttctgcacaccccacataaccctatttcacttgccatgactctgaagaccctggacgagcacagagataaagccgtgacgcagctgggctccatgctttttactcggcaggtttccggtgcccgggtggtgccactgggctcaatgcaaacggtaagtggctacacatttagggggtttatgagtcataccaacaactacccatgcgcatacctgaacgcagcttccgctatcggaatgaagatgcaggacgtggatctgttcataaagcgactggaccgttgtctcaaagctgtgagaaaggagcgatctaaagagagcgacgataattatgataagacagaagatgttgacatagaggaaatggccctcaagttggacaacgtcctgctcgacacatatcaagatgcgtcctcctag

SEQ ID NO: 193022 - DNA, 1506 bp, Artificial Sequence
  derived and/or modified sequence
atgaaccgggagagctttgctgctggggagcggctggtgtccccagcctacgtgcggcagggctgtgaggcccggcgcagccatgagcacctgatccggctgctgctggagaagggcaagtgcccagaaaatggctgggatgagagcaccctggagctgttcctgcacgagctggccatcatggacagcaacaacttcctgggcaactgtggggtgggggagcgggagggccgggtggccagcgccctggtggcccggcggcactaccgcttcatccatggaattggccgcagcggggacatctctgctgtgcagcccaaggctgctggcagcagcctgctgaacaagatcaccaacagcctggtgctggacatcatcaagctggccggcgtgcacacagtggccaactgctttgtggtgcccatggccaccggcatgagcctgaccctgtgcttcctgaccctgcggcacaagaggcccaaggccaagtacatcatctggcccagaattgaccagaagagctgcttcaagtccatgatcacagctggctttgagcctgtggtgattgaaaatgtgctggagggagatgagctgaggacagacctgaaggctgtggaggccaaggtgcaggagctgggccctgactgcatcctgtgcatccacagcaccaccagctgctttgccccccgggtgcctgaccggctggaggagctggccgtcatctgtgccaactatgacatcccccacatcgtgaacaatgcctatggagtgcagagcagcaagtgcatgcacctgatccagcagggcgcccgggtgggcagaattgatgcctttgtgcagagcctggacaagaacttcatggtgcctgtgggcggggccatcatcgccggcttcaatgacagcttcatccaggagatcagcaagatgtacccaggccgggccagcgccagccccagcctggatgtgctgatcaccctgctgagcctgggcagcaatggctacaagaagctgctgaaggagaggaaggagatgttctcctacctgagcaaccagatcaagaagctgtctgaggcctacaatgaaaggctgctgcacaccccccacaaccccatcagcctggccatgaccctgaagaccctggatgagcaccgggacaaggctgtgacccagctgggctccatgctgttcacccggcaggtgtctggggcccgggtggtgcccctgggctccatgcagacagtgtctggctacaccttccggggcttcatgagccacaccaacaactacccctgtgcctacctgaatgctgccagcgccatcggcatgaagatgcaggatgtggacctcttcatcaagaggctggaccgctgcctgaaggctgtgaggaaggagaggagcaaggagagtgatgacaactatgacaagacagaagatgtggacatcgaggagatggccctgaagctggacaacgtgctgctggacacctaccaggatgccagcagctag

SEQ ID NO: 193023 - DNA, 1506 bp, Artificial Sequence
  derived and/or modified sequence
atgaaccgggagagcttcgccgccggcgagcggctggtgagccccgcatacgtgagacaggggtgcgaagcgcgtcggtctcatgaacatctgatcagactgttactggaaaagggaaagtgtccagagaacgggtgggatgagtcgacactggagctctttcttcacgaacttgccatcatggatagtaacaactttctgggcaattgcggcgtaggagagagagagggacgtgttgctagtgctctcgtggctcgcaggcactatcggtttattcatggcataggaaggtcaggtgatattagcgcagttcagcctaaggccgctggcagctcactgctcaataaaataacaaatagcttagtcctggacatcataaaactcgccggtgttcacacagtcgctaattgctttgtggtcccgatggcaacagggatgtccctaactctctgtttcctaacattgcgacacaagcggcccaaggccaagtatatcatatggccgcgaatcgaccagaagagctgctttaagagcatgattactgccggattcgagcccgttgtcattgagaatgttctggagggcgacgagctgaggaccgatctgaaagcagtggaggctaaggttcaagagcttggtcccgattgcatcctgtgcatccactcgacaacatcctgctttgcacccagggtcccagaccgtttggaggaactggccgtgatttgcgctaattacgacatcccacacatagttaataatgcttacggggtgcagtccagcaagtgtatgcatctgatacagcagggcgccagggtgggccggatagacgcctttgttcaatcgctagataaaaattttatggtcccagtgggcggcgccataatcgcggggttcaacgattcttttattcaagagatatctaagatgtatcccggacgggcttctgcatccccttccctcgatgtacttatcacacttctttccctgggcagcaatgggtacaagaaactcctgaaggaacgaaaagagatgttttcctatctgagcaatcagatcaaaaaactgtctgaggcctacaatgagagactgcttcacactcctcacaaccctatctccctcgctatgactttgaagactttggacgagcacagagataaagctgtgacccagttaggatctatgctgtttacccgccaggttagcggcgcacgcgttgtcccgctgggctcaatgcagactgtgtccggctatacatttagggggttcatgagccacacaaacaattatccctgcgcctacctgaatgctgcatctgccatcggaatgaagatgcaggacgttgacctcttcataaagcgcctcgatcgatgtttaaaggcagtgcggaaggaacggagcaaagaaagcgacgataattatgacaagactgaggatgtggacatagaggagatggccctaaaactggacaacgtcctcctggatacctaccaggacgcatcaagttag

SEQ ID NO: 193024 - DNA, 1506 bp, Artificial Sequence
  derived and/or modified sequence
atgaaccgcgagtcatttgccgcaggcgaacgactggtaagccctgcctatgtgagacaggggtgcgaggctaggcgcagtcacgagcaccttattcggttgctccttgagaagggaaagtgccctgagaatgggtgggacgaaagtacgttggagctgtttctgcacgagctggccataatggacagcaacaattttctgggcaactgcggcgtgggcgaacgcgagggcagggtcgcttctgcactggttgcccgtcgacactaccgttttatacatggcatagggagatctggtgatattagtgccgttcagcccaaggccgcagggtcaagtttgttgaataagatcactaatagcctggtcctcgacatcatcaaactcgccggagttcataccgtggcaaactgcttcgtggtccctatggcaacaggaatgtctttaactctttgcttcttaaccctgagacacaagcgccctaaagccaaatatataatttggcccagaatcgaccagaagtcttgtttcaagagtatgattacagccggttttgagccagtggtcatagagaatgtcttggaaggtgatgagctcaggaccgatctgaaggccgtcgaggccaaagttcaagaacttggccctgattgtatactgtgcattcactctactactagctgcttcgcaccacgggttcccgatcgcctcgaggaactggcagtgatttgtgcaaactacgatattcctcacatcgtcaacaatgcctatggcgtgcaatccagcaagtgtatgcacttaattcagcagggagcccgagtaggcaggattgatgcttttgtccagtctctggataaaaattttatggtgcctgtgggcggagctatcatagccggattcaatgacagtttcatacaggagatcagcaagatgtatcctggcagagcttctgcctcccccagtctggacgtcctaatcacactgttgtccttaggcagcaacggttataagaagttgcttaaggagaggaaggagatgttctcctacctctcgaatcagattaagaaactctctgaggcctataacgagaggctactgcatacaccacataatccaattagtctggctatgacccttaaaactctggacgagcatcgcgacaaggctgtgactcaactcggcagcatgttattcacccgccaagtttccggggcacgggtcgtgcctctaggctctatgcagacagtgagcggttacaccttccgcggtttcatgtctcataccaacaattatccctgtgcgtacctgaatgctgcatctgctataggcatgaagatgcaggatgtggacctttttatcaagcgcctggatcgctgtctcaaagcggtgcgcaaggaacggagcaaagaatctgacgataattatgacaaaacagaggacgttgacattgaagagatggcacttaaattagataatgtactgcttgacacatatcaggatgcatccagttag

SEQ ID NO: 193025 - DNA, 5496 bp, Artificial Sequence
  derived and/or modified sequence
attctggttccgtcgtgtgtctggcgtgtggagctagtgctcccgcttattcgccactgtcgccaccgctgtcatgaaccgcgagagcttcgcggcgggagagcggctggtgtcgccggcttacgtgcggcagggctgtgaggcccgccgctcgcatgagcacctcatacggctgcttctggagaagggcaagtgtccagagaatggctgggatgaaagtacacttgaactctttttacatgaacttgcaatcatggacagcaacaatttcttaggcaattgtggtgtgggagaaagggaagggagagtggcatccgcactggttgctcgtcgtcattacaggttcattcatggcattggacgatccggtgatatttctgctgtgcaaccaaaagctgcaggctctagccttttgaacaaaattaccaattctttggtcctggacattataaagctggctggtgtccatacagtagccaactgctttgtagttcctatggcaactggtatgagtctaactctgtgtttcttaacattacgacacaaaagaccaaaggcaaagtatattatatggccacgaatagaccagaagtcctgctttaaatccatgatcactgcaggttttgagcctgtggtgatagaaaatgttttggaaggtgacgagctgcgtacagacctgaaagcagtggaggctaaagtccaggaacttgggcctgattgcattctgtgtattcattctactacatcctgttttgctccaagggtgcctgatagattagaagaactggctgtgatttgtgctaattatgacattccacatatagttaataatgcttatggagtgcagtcttcaaagtgtatgcatctcattcagcagggggctcgagttggtagaatagatgcttttgttcagagcttggacaaaaattttatggttccagtaggtggtgctataattgctggctttaatgattcattcattcaggaaatcagcaagatgtatccaggaagagcttcagcttcaccttctttagatgtccttattactttattgtcacttggatcaaatggctataagaagctactaaaagaaagaaaggaaatgttttcatatttgtccaaccaaataaagaagttgtcagaagcctacaatgaaagactgttgcatacacctcacaatcccatatctttagctatgacacttaaaacactagatgaacaccgtgacaaagctgtcactcagcttggctcgatgctttttaccagacaggtttctggagccagggttgtgcctcttgggtccatgcaaactgtgagtggctatactttcagaggctttatgtcacatacaaataattacccttgtgcttacctcaatgctgcatcagccatcggaatgaagatgcaggatgtggacctgttcataaagagacttgacaggtgtttaaaggcagtaagaaaagaacgaagtaaagagagtgatgacaattatgacaaaactgaagatgtggatattgaagaaatggctttaaaactagataatgtacttcttgacacataccaggatgcttcttcatgacatgcgaagggtttcttcttgatcatttgaaagaaatgataaggctgtagtacaagcaagcagtttaaagataagacttgagatttttgaattgagaatttcatgggaatattcagtcaaggagcagactttggtctgaactagccattgatgattgttaagtttcccattcttagactgcatcaatccttgtgatccttaacaggttataatatacaattagcatttttctaattgttagaatatctgtcaattaagcatcatgactcagataatttttactagtgtaatgacagtaaaattacttcaattctctttgaaatgtagagtgcttcctcctaaccattctttaccgtttctgatcacacagaattgagaaagatctcttaggccactagttactagttgtttgttgagatgtgtaagtcacagtgtgcctgtaaaatgggcattccccaaggaagcagagtcaaggtataaactttcgttttgactcaaaagcagtgggtctcaactggggatgattcgcttatctgaacagcatctgcagacatttttggttgtcacaactggtgggatgctgttaacatctagaggatagaggccagggtgctactcaacatcctacaatgcatgggacaactcccacaacaaagaattatccagcccaaaatgtcattagtgctgaggttgagaaatactcctctaaagtagataaactccttgagtaaagagaagtttaccatagcaactttcagtagtacttcaaagaagatagctgtataaatgtcatcaaactatactatatagagaatcttaagtgataaccagggtcacggattccaaacatgtcattataaattgttttatatggtgctcactggtgcatttttccttttggataagggaaaacattattccacttactgtttttgctttaagcagcctgcatatattggttagtttgttcagatgttgtgcacagacatcatcaaaattagctaacatgggtatttttgaacatatttttgccaggaagatgaaaatcacatagtatgataaacaggtgtattcccctctacttgcccatgtgctcatttttctgagtctgaaattccagacttactggctttaacaataatttttgttgttaatttaagaaatagacttacttaagactattttaagaaatagagatgtcatagcctgaagatttactgaagcttctgaacatgccaccatgccaaagctatgtttctcaaacccagctctgtggatcatgttcctaaaagatgctcatggggagaaaatgtttacagacaaataattttgggagctgcctttgcaaacctgcctgttggcatattgaaggctctaagaattccttcactaaataacccagttttaatatatccttatccaaagagaaactcatttttttaaagtgaaatatttgttaacagcccattgaacatacttttaaaaacactatggtagagaatgctgtgttgccttctgggctgcatttttcttattgatttggaattgtaacctatgtatgagaaagggattttctggtattttggtgacgttgtacattgtcccagactgtttgtaaacatgaggtcagacatgtgtaaggtagacgcctatggccactggcttgaccaccttggaagtcaatgactattttgagatgaagtatttaactatgaatatcatgaaggttatttaaaaatgtatttattttatctttggggttcaaacattaaaaaaatttacataggtgtagtaactcatttcaagggaataaatgctggattaaaaagtgtaaatttttcatgagaatttgggactaaattgctgaaccaataaagctgaagagttgcaacctctagagtcaaaaaagggattgaaatgttgttgcaaatgtaaatgctggcagtgcagcttgctatacatgtaagccaaaattgttttatagaacaagtgatctatattgttgtgatcatcatttagcttaagaaaggccagagctgggagagtagcaaatgttttctcatctgcagtgtatcagcagttcttgggcttcagctgctgaatagataataattctaattgaacataaattacatgaactcacatgtgaatgatagatatgttacaatatttcattcctgatgcagaaaatcagctgtggtttttattattaaccctttctttttcagtggttttggaattctagctctattcctcctggcttaaaatttgagggcatagaattcacaagagtttttgaagagttctgtctattcaggctttcctttgtccccaccctagtgtcattttcactcactcccatttctacacataagtattaaaaaggatgtatttattataattcgctagtactgattggtaagcctcataattggcctttgttatctttgtactgtgacgaaggcagtggatgatacattaccaatcattgccgaagataacctcttctatctttttgacccaactacccttattaaaactatcaggtaaaatattggagttaggtttttaaagtcattgggctgtggcagtgtgcttagaaaagaaaatggtggaacatagaatattcttttggtcactacacaatgtgttacttatacatggcagggaagggaattttaaatcaaactcgcagtttggttcttaggtcctctgctgatgaattctcgctctatcagggaatgatatgtgacgccagccttaggaacctggtgttcaactgtaaatctttctatttagctttttgtattagttgaatgaagttatagaatatgaattattgaatacagttctgttcagccaataggcacttgatatacagaatggtaaatttaaatataaattaaatttttctaatattatgatcagcacttcactgtggttctgtgtctttaaccacctcataataagaactgttattgaggactgggctacagaatgtgcttagactacatctatggcttccatagattttagtaaaatttaaacagataatttgtgtttactgctgatgttactttaatattgaattagtagttcatcctgagagttatatttcacagaggaaaataaccaacagctgaaaacaacaataataaagctctggtgagtctgactcatactcggagaaagtttttggaatacatacacatttggtgcatataagagttgggtttccttttcccactttctgagatgtactaacctctgccagacccttaaatgattttgttatgttttgcatttttgaggccaaccttattttgtaactgaaaaaagtccagttttgcatacacagaaatttggtcattttagaagtctcacaacctgaataatttgataataattgaatatgctattaacagctttttaagaaaaggttctattagtcagttttttccttgtctgtcatattatgttggttaatgtctcttatggccaatcttagtaaacagacctaacactcactgcatccttttgtgccttactttttactttccttttgcccttttggtatgtgcgcatgtaagatggtaagtttaaggctaatgaatatatgtttgtaatttcctactcactactctgcagttaaagctaaggccttaggcaaaatctagaaatgtttatattgttttgttttttatcaagtggtgtcaacttgagaaatacaaagaaaggctatgcttaactgtataaccgtgggggattttagccatgagaatatgaagctgatgtcagcctgctaacctgttttaccaaaaggaaaagatgtttccaaaaatgttttcggtgtagactgtttaaagatgaaaataaattatataatttattatatgaaataaatttttgataagtca

SEQ ID NO: 193026 - DNA, 1506 bp, Artificial Sequence
  derived and/or modified sequence
atgaacagagagagcttcgccgccggcgagagactggtgagccccgcctacgtgagacagggctgcgaggccagaagaagccacgagcacctgatcagactgctgctggagaagggcaagtgccccgagaacggctgggacgagagcaccctggagctgttcctgcacgagctggccatcatggacagcaacaacttcctgggcaactgcggcgtgggcgagagagagggcagagtggccagcgccctggtggccagaagacactacagattcatccacggcatcggcagaagcggcgacatcagcgccgtgcagcccaaggccgccggcagcagcctgctgaacaagatcaccaacagcctggtgctggacatcatcaagctggccggcgtgcacaccgtggccaactgcttcgtggtgcccatggccaccggcatgagcctgaccctgtgcttcctgaccctgagacacaagagacccaaggccaagtacatcatctggcccagaatcgaccagaagagctgcttcaagagcatgatcaccgccggcttcgagcccgtggtgatcgagaacgtgctggagggcgacgagctgagaaccgacctgaaggccgtggaggccaaggtgcaggagctgggccccgactgcatcctgtgcatccacagcaccaccagctgcttcgcccccagagtgcccgacagactggaggagctggccgtgatctgcgccaactacgacatcccccacatcgtgaacaacgcctacggcgtgcagagcagcaagtgcatgcacctgatccagcagggcgccagagtgggcagaatcgacgccttcgtgcagagcctggacaagaacttcatggtgcccgtgggcggcgccatcatcgccggcttcaacgacagcttcatccaggagatcagcaagatgtaccccggcagagccagcgccagccccagcctggacgtgctgatcaccctgctgagcctgggcagcaacggctacaagaagctgctgaaggagagaaaggagatgttcagctacctgagcaaccagatcaagaagctgagcgaggcctacaacgagagactgctgcacaccccccacaaccccatcagcctggccatgaccctgaagaccctggacgagcacagagacaaggccgtgacccagctgggcagcatgctgttcaccagacaggtgagcggcgccagagtggtgcccctgggcagcatgcagaccgtgagcggctacaccttcagaggcttcatgagccacaccaacaactacccctgcgcctacctgaacgccgccagcgccatcggcatgaagatgcaggacgtggacctgttcatcaagagactggacagatgcctgaaggccgtgagaaaggagagaagcaaggagagcgacgacaactacgacaagaccgaggacgtggacatcgaggagatggccctgaagctggacaacgtgctgctggacacctaccaggacgccagcagctag

SEQ ID NO: 193027 - protein, 342 aa, Artificial Sequence
  derived and/or modified sequence
MTCPRNVTPNSYAEPLAAPGGGERYSRSAGMYMQSGSDFNCGVMRGCGLAPSLSKRDEGSSPSLALNTYPSYLSQLDSWGDPKAAYRLEQPVGRPLSSCSYPPSVKEENVCCMYSAEKRAKSGPEAALYSHPLPESCLGEHEVPVPSYYRASPSYSALDKTPHCSGANDFEAPFEQRASLNPRAEHLESPQLGGKVSFPETPKSDSQTPSPNEIKTEQSLAGPKGSPSESEKERAKAADSSPDTSDNEAKEEIKAENTTGNWLTAKSGRKKRCPYTKHQTLELEKEFLFNMYLTRERRLEISKTINLTDRQVKIWFQNRRMKLKKMNRENRIRELTSNFNFT

SEQ ID NO: 193028 - DNA, 2017 bp, Artificial Sequence
  derived and/or modified sequence
cctcccctccaaccgcgccccccctcccggatggggaaaaaaaaagatgtcagctcctccgctgtagtattgctccttaaaaacccctctctctgaaaatgacatgccctcgcaatgtaactccgaactcgtacgcggagcccttggctgcgcccggcggaggagagcgctatagccggagcgcaggcatgtatatgcagtctgggagtgacttcaattgcggggtgatgaggggctgcgggctcgcgccctcgctctccaagagggacgagggcagcagccccagcctcgccctcaacacctatccgtcctacctctcgcagctggactcctggggcgaccccaaagccgcctatcgcctggaacaacctgttggcaggccgctgtcctcctgctcctacccacctagtgtcaaggaggagaatgtctgctgcatgtacagcgcagagaagcgggcgaaaagtggccccgaggcagctctctactcccaccccttgccggagtcctgccttggggagcacgaggtacccgtgcccagctactaccgcgccagcccgagctactccgcgctggacaagacgccccactgttctggggccaacgacttcgaagcccctttcgagcagcgggccagtctcaacccgcgcgccgaacatctggaatcgcctcagctggggggcaaagtgagtttccctgagacccccaagtccgacagccagacccccagccccaatgaaatcaagacggagcagagcctggcgggccctaaagggagcccctcggagagcgaaaaggagagggccaaagctgccgactccagcccagacacctcggataacgaagcgaaagaggagataaaggcagaaaacaccacaggaaattggctgacagcaaagagcggaaggaagaagaggtgcccctatactaaacaccagacgctggaattggagaaagaatttctgttcaatatgtatttgacgcgagagcgccgcctggagattagcaagaccattaaccttacagacagacaagtcaaaatctggtttcaaaatcgcagaatgaaactcaagaaaatgaaccgagagaatcggatccgggaactgacctccaattttaatttcacctgagagcgcggcctctcctcctcccttcccgctccttcctctccccgcccctcctccctttgtgcctggtgatatatttttttttcctccctgagtataaatgcaatgcgactgcaaaaaaggcaaagacctcagactctccttccaagggacctgtggttcgtgctgcgaagatgcttccacttaaagcatgagaaatggggtgccgggatgtggggtgtggtgtgtgccctcatagatgggggtgggagtgtggctggtgtgtgtgtcaagccctcactcacccacgcactcacacacagcattctgttctccatgcaaagttaagatcgaatccatccgcttgtaggggaaaaaaaggaaaaaaattaaccagagagggtctgtaatctcgcagagcacaggcagaatcgttccttccttgctgcatttcctccttagactaatagacgttttggaaagttcggctagtgttcgtgtgtttgtcgtagcacccagagcctccaccaaaccctctccatgtctttacctcccagtcgctctaagaatctgcttgaagtctcgtatttgtactgctttctgcttttctcccacccctcctagcacccccacatcccccatctagtaacatctcagaaatttcatccagaggaacaaaaaaattaaaaatagaacatagcaaagcaaagacagaatgcccccccccccaaatattgtcctgtccctgtctgggagttgtgttatttaaagatattctgtatgttgtatcttttgcatgtagcttccttaatggagaaaaaaaaacctaataaatttccagaatcataatcctcaaaaaaaaaaaaaaaaaaaaaaaaaaaaaaaaaaaaaaaaaaaaaaaaaaaaaaaaaaaa

SEQ ID NO: 193029 - DNA, 1029 bp, Artificial Sequence
  derived and/or modified sequence
atgacctgtccccgtaatgttacccccaacagttacgccgaaccactggccgcccccggcggcggtgaacgttatagccgcagcgccgggatgtacatgcagtcggggtcagactttaactgtggcgttatgcgcggctgcggtctcgccccatccttgagtaaacgggatgagggatctagtccctctctcgctctcaacacctaccccagctatctgtcccagctggactcctggggggatccgaaggccgcatataggctggaacaaccggtagggcgccctttgtctagttgctcatatccccccagtgtaaaggaggaaaatgtgtgttgcatgtacagtgccgagaagcgcgctaagtccggccccgaggccgctctgtactcccacccactccctgaaagctgcctgggcgaacacgaggttccagtaccctcttattatcgggcttcaccttcatatagtgctctcgacaagacacctcattgctctggcgcgaacgatttcgaagccccatttgaacagcgtgcctccttgaatcctcgggcggagcacttggaatccccccaactcgggggcaaggttagtttccccgaaactcccaagagcgacagccagaccccttccccaaatgaaataaaaaccgagcaatctctggccgggcccaagggcagcccatccgagagcgaaaaagagagagctaaggccgccgattccagtcccgacacaagcgacaatgaagctaaggaagaaatcaaagcagaaaacactacagggaactggctgacagccaaaagcgggagaaagaaacgttgcccatataccaaacaccaaaccctggagctagagaaggaattcctgtttaacatgtatttgacacgggagcgcaggctggagatctctaagacaatcaacctgacagacagacaggttaagatctggttccagaatcgacgcatgaagttgaagaagatgaaccgggaaaacagaatcagagaactgacttcaaacttcaactttacatag

SEQ ID NO: 193030 - DNA, 1936 bp, Artificial Sequence
  derived and/or modified sequence
tcccggatggggaaaaaaaaagatgtcagctcctccgctgtagtattgctccttaaaaacccctctctctgaaaatgacatgccctcgcaatgtaactccgaactcgtacgcggagcccttggctgcgcccggcggaggagagcgctatagccggagcgcaggcatgtatatgcagtctgggagtgacttcaattgcggggtgatgaggggctgcgggctcgcgccctcgctctccaagagggacgagggcagcagccccagcctcgccctcaacacctatccgtcctacctctcgcagctggactcctggggcgaccccaaagccgcctatcgcctggaacaacctgttggcaggccgctgtcctcctgctcctacccacctagtgtcaaggaggagaatgtctgctgcatgtacagcgcagagaagcgggcgaaaagtggccccgaggcagctctctactcccaccccttgccggagtcctgccttggggagcacgaggtacccgtgcccagctactaccgcgccagcccgagctactccgcgctggacaagacgccccactgttctggggccaacgacttcgaagcccctttcgagcagcgggccagtctcaacccgcgcgccgaacatctggaatcgcctcagctggggggcaaagtgagtttccctgagacccccaagtccgacagccagacccccagccccaatgaaatcaagacggagcagagcctggcgggccctaaagggagcccctcggagagcgaaaaggagagggccaaagctgccgactccagcccagacacctcggataacgaagcgaaagaggagataaaggcagaaaacaccacaggaaattggctgacagcaaagagcggaaggaagaagaggtgcccctatactaaacaccagacgctggaattggagaaagaatttctgttcaatatgtatttgacgcgagagcgccgcctggagattagcaagaccattaaccttacagacagacaagtcaaaatctggtttcaaaatcgcagaatgaaactcaagaaaatgaaccgagagaatcggatccgggaactgacctccaattttaatttcacctgagagcgcggcctctcctcctcccttcccgctccttcctctccccgcccctcctccctttgtgcctggtgatatatttttttttcctccctgagtataaatgcaatgcgactgcaaaaaaggcaaagacctcagactctccttccaagggacctgtggttcgtgctgcgaagatgcttccacttaaagcatgagaaatggggtgccgggatgtggggtgtggtgtgtgccctcatagatgggggtgggagtgtggctggtgtgtgtgtcaagccctcactcacccacgcactcacacacagcattctgttctccatgcaaagttaagatcgaatccatccgcttgtaggggaaaaaaaggaaaaaaattaaccagagagggtctgtaatctcgcagagcacaggcagaatcgttccttccttgctgcatttcctccttagactaatagacgttttggaaagttcggctagtgttcgtgtgtttgtcgtagcacccagagcctccaccaaaccctctccatgtctttacctcccagtcgctctaagaatctgcttgaagtctcgtatttgtactgctttctgcttttctcccacccctcctagcacccccacatcccccatctagtaacatctcagaaatttcatccagaggaacaaaaaaattaaaaatagaacatagcaaagcaaagacagaatgcccccccccccaaatattgtcctgtccctgtctgggagttgtgttatttaaagatattctgtatgttgtatcttttgcatgtagcttccttaatggagaaaaaaaaacctaataaatttccagaatcataatcctcaaa

SEQ ID NO: 193031 - DNA, 1029 bp, Artificial Sequence
  derived and/or modified sequence
atgacctgccccagaaatgtgacccccaacagctatgcagagcccctggccgcccctgggggcggggagcgctacagccgctctgctggcatgtacatgcagagcggcagtgacttcaactgtggggtgatgaggggctgcggcctggcccccagcctgagcaagagagatgagggcagcagccccagcctggccctgaacacctaccccagctacctgagccagctggacagctggggagaccccaaggccgcctaccgcctggagcagcctgtgggccggcccctgagcagctgcagctacccacccagcgtgaaggaggagaatgtgtgctgcatgtacagcgctgagaagagggccaagagcggccctgaggccgccctgtacagccaccccctgcctgagagctgcctgggggagcacgaggtgcctgtgcccagctactaccgggccagccccagctacagcgccctggacaagaccccccactgcagcggggccaatgactttgaggccccctttgagcagagggccagcctgaaccccagggctgagcacctggagagcccccagctgggcggcaaggtgtccttccctgagacccccaagagtgacagccagacccccagccccaatgagatcaagacagagcagagcctggccggccccaagggcagccccagcgagagcgagaaggagcgggccaaggctgctgacagcagcccagacaccagtgacaatgaggccaaggaggagatcaaggccgagaacaccactggaaactggctgacagccaagagcggcaggaagaagcgctgcccctacaccaagcaccagaccctggagctggagaaggagttcctgttcaacatgtacctgacccgggagcggcggctggagatcagcaagaccatcaacctgacagaccggcaggtgaagatctggttccagaacagaaggatgaagctgaagaagatgaacagagaaaatcgcatccgggagctgaccagcaacttcaacttcacctag

SEQ ID NO: 193032 - DNA, 1029 bp, Artificial Sequence
  derived and/or modified sequence
atgacctgcccccggaacgtgacccccaacagctacgccgagcccctcgctgcacctgggggcggggaacgttattcccggtccgcaggcatgtatatgcagtctggttccgattttaactgcggcgtgatgaggggctgtgggctcgctccctctctgtctaaaagggacgaagggagcagtcccagcctcgctttgaatacatatccatcctatctgagccagctggacagttggggcgatccaaaggcggcatatcggctcgagcaacctgtgggcagacccctctccagttgttcgtaccctccaagcgtgaaggaggagaatgtgtgctgcatgtattctgcagagaagagagcaaaatccggtccagaggccgcgctgtactctcatcctctgccggaaagttgtctgggggaacacgaggtgccggtgcccagttattatagagcgtccccttcctacagtgctctcgacaaaacaccacactgctcgggcgcgaacgactttgaggcccctttcgaacagcgagcttccttgaacccccgtgccgaacacttggaaagcccacagctcggaggaaaggttagcttcccagagacaccaaaatcagactcacaaaccccatcccccaacgaaatcaagacagaacaaagcctggccggcccgaaagggtccccatctgaatccgagaaagagagagcaaaggccgcggatagcagccctgatacatctgataacgaggctaaggaggaaatcaaggcagaaaacaccacagggaactggctgactgctaaaagcggacgaaaaaagagatgtccttacacaaagcatcagaccctggaactggagaaggagttcctctttaacatgtacctcacaagagagcggagactcgaaatttccaagaccatcaacctgactgatcggcaggtcaagatatggttccagaatagaagaatgaagctgaaaaagatgaacagggagaatcgaatcagggagctcacctcaaatttcaacttcacatag

SEQ ID NO: 193033 - DNA, 1029 bp, Artificial Sequence
  derived and/or modified sequence
atgacctgtccacgcaacgttacacccaactcctatgccgagccactggctgcacctggcggtggcgagcgctattctcggagtgcaggcatgtacatgcagtcaggatcagatttcaactgcggtgttatgcgcggatgcggtctcgctccatctctctcgaagagggatgaaggaagctcccccagcctggccctgaacacttatcctagttacctctcccaattagatagctggggagacccaaaagccgcttaccgtctggagcagccagttggccgacccctgtcctcttgtagctatcccccttctgtgaaggaggaaaatgtctgctgtatgtatagcgctgaaaaacgtgccaagtcagggccagaagccgctctgtactcacaccctctcccagagtcatgtttgggcgagcatgaagtgccagtaccatcctactaccgcgctagcccaagttacagtgccctggacaagaccccacactgcagcggagctaacgattttgaagcccctttcgaacaaagggcgagtctgaaccctagagctgaacacctcgagtcgccacagctggggggaaaggtgtccttcccagagacccccaagtccgacagccagacaccgtcccctaacgagattaaaacagagcagagcctggctgggccaaaaggatcccctagcgagtccgagaaagaacgggctaaagccgcagacagctcaccagacacttcagataatgaagccaaggaggagattaaagcggagaacacaaccggcaattggcttacagctaagagtgggcgaaagaagaggtgcccatataccaaacaccagaccctggagcttgagaaggagttcttgttcaatatgtacttgacgcgggaaagaagacttgagatttctaagacgattaatctgaccgatagacaagtcaaaatctggttccagaatcggaggatgaagctcaaaaaaatgaatcgcgagaacagaattagagaactgactagcaactttaattttacatag

SEQ ID NO: 193034 - DNA, 1029 bp, Artificial Sequence
  derived and/or modified sequence
atgacctgccccagaaacgtgacccccaacagctacgccgagcccctggccgcccccggcggcggcgagagatacagcagaagcgccggcatgtacatgcagagcggcagcgacttcaactgcggcgtgatgagaggctgcggcctggcccccagcctgagcaagagagacgagggcagcagccccagcctggccctgaacacctaccccagctacctgagccagctggacagctggggcgaccccaaggccgcctacagactggagcagcccgtgggcagacccctgagcagctgcagctacccccccagcgtgaaggaggagaacgtgtgctgcatgtacagcgccgagaagagagccaagagcggccccgaggccgccctgtacagccaccccctgcccgagagctgcctgggcgagcacgaggtgcccgtgcccagctactacagagccagccccagctacagcgccctggacaagaccccccactgcagcggcgccaacgacttcgaggcccccttcgagcagagagccagcctgaaccccagagccgagcacctggagagcccccagctgggcggcaaggtgagcttccccgagacccccaagagcgacagccagacccccagccccaacgagatcaagaccgagcagagcctggccggccccaagggcagccccagcgagagcgagaaggagagagccaaggccgccgacagcagccccgacaccagcgacaacgaggccaaggaggagatcaaggccgagaacaccaccggcaactggctgaccgccaagagcggcagaaagaagagatgcccctacaccaagcaccagaccctggagctggagaaggagttcctgttcaacatgtacctgaccagagagagaagactggagatcagcaagaccatcaacctgaccgacagacaggtgaagatctggttccagaacagaagaatgaagctgaagaagatgaacagagagaacagaatcagagagctgaccagcaacttcaacttcacctag

SEQ ID NO: 193035 - protein, 330 aa, Artificial Sequence
  derived and/or modified sequence
MTTSLLLHPRWPESLMYVYEDSAAESGIGGGGGGGGGGTGGAGGGCSGASPGKAPSMDGLGSSCPASHCRDLLPHPVLGRPPAPLGAPQGAVYTDIPAPEAARQCAPPPAPPTSSSATLGYGYPFGGSYYGCRLSHNVNLQQKPCAYHPGDKYPEPSGALPGDDLSSRAKEFAFYPSFASSYQAMPGYLDVSVVPGISGHPEPRHDALIPVEGYQHWALSNGWDSQVYCSKEQSQSAHLWKSPFPDVVPLQPEVSSYRRGRKKRVPYTKVQLKELEKEYAASKFITKEKRRRISATTNLSERQVTIWFQNRRVKEKKVVSKSKAPHLHST

SEQ ID NO: 193036 - DNA, 2435 bp, Artificial Sequence
  derived and/or modified sequence
aggggtggagagaaaagaggggagggatggggggaggggaaacaggagcgaggtgtctccctagctcgctgcctctggcaagtggagtttttaaaaagctccagcagatcatgtcatgacgacttcgctgctcctgcatccacgctggccggagagccttatgtacgtctatgaggacagcgcggcggagagcggcatcggcggcggcggcggaggaggaggcggcggcacgggcggagcggggggtggctgcagcggagcgagccccggcaaagccccgagcatggatggtctgggcagcagctgcccggccagccactgccgcgacctgcttccgcaccccgtgctgggccgcccgccggctcccctgggcgcccctcagggcgccgtctatacggacatcccggccccggaggcggcgcgccagtgtgccccgccgcccgcaccccccacctcgtccagcgccaccctgggctacggctaccccttcgggggcagctactacggctgccgcctgtcgcacaacgtgaacctgcagcagaagccttgcgcctaccacccgggcgataaatacccggagccgtcgggcgccctgcccggtgacgacctgtcctctagggccaaggagttcgccttctaccccagcttcgccagctcctaccaggcgatgcccggctacctggacgtgtcggtggtgcccgggatcagcgggcacccggagccgcgtcacgacgccctcatccccgtcgaaggctaccagcactgggctctctccaatggctgggacagtcaggtgtactgctccaaggagcagtcgcagtccgcccacctctggaagtctcccttcccagacgtggttcccctgcagcccgaggtgagcagctaccggcgcgggcgcaagaaacgcgtgccctacactaaggtgcagctgaaggagctagagaaggaatacgcggctagcaagttcatcaccaaagagaagcgccggcgcatctccgccaccacgaacctctctgagcgccaggtaaccatctggttccagaaccggcgggtcaaagagaagaaggtggtcagcaaatcgaaagcgcctcatctccactccacctgaccacccacccgctgcttgccccatctatttatgtctccgctttgtaccataaccgaacccacggaaagacgctgcgcgggtgcagaagagtatttaatgttaaggaaagagaagaaccgcgccgcccggaggcagagaggctccatggccgtgctgctgggccatccccaactccctatcccatccccagcctccacccccatccagatgggactcacgtggcttcaacagctttggaaatgggtcccgagtgggccgtgcgaggaaggctgtcgacctctactcctccttgcgctcaccttgccagaaagtctggtggcagcgcagagcccaatcattccaaccaaagcagggttggggaatcccgaatggccccaattcttgcctcatcctatgaccaggcttttagaggaccttccctaagggcgcagcttcggagcaggatctgtccagctcatactttccttcgctgtccctcccgcactccttaggcaagatttcccagtaaagattttctgtgcgtattttaaaagtcgtgttaatactcatgataattattagggacctggcagcgtgattggagtatggatgtttccgtaaaagctggaattccgtaaaagcattgacgcagcccctacactccatcccaaccaagaaactgcatttcctggggccaggtgggagctgcctttgccccactgcctcccctgttctgctctctcagtcaacatgtggaaatccaaggaggacaaagactccagccacgctgctaaatagggctcctctctcctctctctctctctaggtggtaaggttggggattagtccaggtacagaagcagaacttttttctaaggataaacatctcttccaaggggatggagagtgggtccctcaacaaagtccctgtccagtcacctttccatcagggcactagcccaggaatgactcctcacactttcacctttactgatttccagaggaaagctagaggatctagttcaagaggcaagaagatctggccctcaattagctagatgtagatgctgcctaacagttccctcctcaaaggccaccttggtgctgtgggggccccttgcctcttcccttcccactggtgcattacaaaacagtgttcttttgaaatgttcatcaggaataggcttttttaaaaaatgttgtgtatctgtatatagtattgtgatgtctgaatgacaatgtactgaatgcaaaaaggaaaaaaacccacaaacatgtttttaaaataaaatatctttttttgccttgaaaaaaaaaaaaaaaaaaaaaaaaaaaaaaaaaaaaaaaa

SEQ ID NO: 193037 - DNA, 993 bp, Artificial Sequence
  derived and/or modified sequence
atgacaactagtcttttgctgcacccacgctggcccgaatcccttatgtatgtatacgaagatagtgctgcggagagcgggatcgggggaggtgggggggggggaggcgggggaaccggaggtgccggagggggctgttctggggctagcccaggaaaagcgccatcgatggacggcctggggtcgtcctgtccagcctctcattgtcgggacctccttccccacccagtcctcgggagacccccggcaccactcggggccccccagggcgctgtttatacagatattcctgcacccgaagccgcacggcaatgcgcccctccacctgcacctcctacttcctcttcagccaccctcggatacgggtacccgttcggaggttcctattatgggtgcagactgtcgcataacgtgaatctgcagcagaagccatgcgcttaccaccccggcgataaatatcctgaaccctccggcgcattgcctggagatgatctgtcaagccgcgctaaggaattcgccttctacccttctttcgcatcatcctatcaggctatgccaggctatctggatgtgagtgtggtccccggcatttccggccatcccgagcccagacacgacgccctgattcccgtggaaggttaccaacattgggccctgtccaacggatgggattcacaggtatattgttccaaagaacagagtcagagcgcccatctttggaagagtcctttcccagacgtcgtgcctctccaaccagaggtttcatcctatcgcaggggtcgcaaaaaacgcgtaccatacacgaaggtccagctgaaggaactcgagaaagagtatgctgcttcgaagtttattactaaggaaaagaggaggagaatatcagcaactactaacctaagtgagcgacaggtgaccatttggttccagaacagacgggtcaaggaaaagaaggttgtaagtaagagcaaagcgccacacctacattctacttag

SEQ ID NO: 193038 - DNA, 2437 bp, Artificial Sequence
  derived and/or modified sequence
agggaatgtagggagggaggtggaagcactaggaggaggggaggggtggagagaaaagaggggagggatggggggaggggaaacaggagcgaggtgtctccctagctcgctgcctctggcaagtggagtttttaaaaagctccagcagatcatgtcatgacgacttcgctgctcctgcatccacgctggccggagagccttatgtacgtctatgaggacagcgcggcggagagcggcatcggcggcggcggcggaggaggaggcggcggcacgggcggagcggggggtggctgcagcggagcgagccccggcaaagccccgagcatggatggtctgggcagcagctgcccggccagccactgccgcgacctgcttccgcaccccgtgctgggccgcccgccggctcccctgggcgcccctcagggcgccgtctatacggacatcccggccccggaggcggcgcgccagtgtgccccgccgcccgcaccccccacctcgtccagcgccaccctgggctacggctaccccttcgggggcagctactacggctgccgcctgtcgcacaacgtgaacctgcagcagaagccttgcgcctaccacccgggcgataaatacccggagccgtcgggcgccctgcccggtgacgacctgtcctctagggccaaggagttcgccttctaccccagcttcgccagctcctaccaggcgatgcccggctacctggacgtgtcggtggtgcccgggatcagcgggcacccggagccgcgtcacgacgccctcatccccgtcgaaggctaccagcactgggctctctccaatggctgggacagtcaggtgtactgctccaaggagcagtcgcagtccgcccacctctggaagtctcccttcccagacgtggttcccctgcagcccgaggtgagcagctaccggcgcgggcgcaagaaacgcgtgccctacactaaggtgcagctgaaggagctagagaaggaatacgcggctagcaagttcatcaccaaagagaagcgccggcgcatctccgccaccacgaacctctctgagcgccaggtaaccatctggttccagaaccggcgggtcaaagagaagaaggtggtcagcaaatcgaaagcgcctcatctccactccacctgaccacccacccgctgcttgccccatctatttatgtctccgctttgtaccataaccgaacccacggaaagacgctgcgcgggtgcagaagagtatttaatgttaaggaaagagaagaaccgcgccgcccggaggcagagaggctccatggccgtgctgctgggccatccccaactccctatcccatccccagcctccacccccatccagatgggactcacgtggcttcaacagctttggaaatgggtcccgagtgggccgtgcgaggaaggctgtcgacctctactcctccttgcgctcaccttgccagaaagtctggtggcagcgcagagcccaatcattccaaccaaagcagggttggggaatcccgaatggccccaattcttgcctcatcctatgaccaggcttttagaggaccttccctaagggcgcagcttcggagcaggatctgtccagctcatactttccttcgctgtccctcccgcactccttaggcaagatttcccagtaaagattttctgtgcgtattttaaaagtcgtgttaatactcatgataattattagggacctggcagcgtgattggagtatggatgtttccgtaaaagctggaattccgtaaaagcattgacgcagcccctacactccatcccaaccaagaaactgcatttcctggggccaggtgggagctgcctttgccccactgcctcccctgttctgctctctcagtcaacatgtggaaatccaaggaggacaaagactccagccacgctgctaaatagggctcctctctcctctctctctctctaggtggtaaggttggggattagtccaggtacagaagcagaacttttttctaaggataaacatctcttccaaggggatggagagtgggtccctcaacaaagtccctgtccagtcacctttccatcagggcactagcccaggaatgactcctcacactttcacctttactgatttccagaggaaagctagaggatctagttcaagaggcaagaagatctggccctcaattagctagatgtagatgctgcctaacagttccctcctcaaaggccaccttggtgctgtgggggccccttgcctcttcccttcccactggtgcattacaaaacagtgttcttttgaaatgttcatcaggaataggcttttttaaaaaatgttgtgtatctgtatatagtattgtgatgtctgaatgacaatgtactgaatgcaaaaaggaaaaaaacccacaaacatgtttttaaaataaaatatctttttttgccttga

SEQ ID NO: 193039 - DNA, 993 bp, Artificial Sequence
  derived and/or modified sequence
atgaccaccagcctgctgctgcacccccgctggccagagagcctgatgtatgtgtatgaggacagcgctgctgagagcggcatcggcggcggcggcggcggcggcggcggcggcactggaggagctgggggcggctgcagcggggccagccctgggaaggcccccagcatggatggcctgggcagcagctgcccagccagccactgccgggacctgctgccccaccctgtgctgggccggcccccagcccccctgggcgccccccagggcgctgtgtacacagacatcccagcccctgaggccgcccggcagtgtgcccctcctccagccccacccaccagcagcagcgccaccctgggctacggctacccctttggaggcagctactacggctgccgcctgagccacaacgtgaacctgcagcagaagccctgtgcctaccaccctggggacaagtacccagagcccagcggggccctgcctggagatgacctgagcagccgggccaaggagtttgccttctaccccagctttgccagcagctaccaggccatgcctggctacctggatgtgtctgtggtgcccggcatcagcggccaccctgagcccaggcatgatgccctgatccctgtggagggctaccagcactgggccctgagcaatggctgggacagccaggtgtactgcagcaaggagcagagccagagcgcccacctgtggaagagccccttcccagatgtggtgcccctgcagcctgaggtgagcagctaccgccggggcaggaagaagagggtgccctacaccaaggtgcagctgaaggagctggagaaggagtatgctgccagcaagttcatcaccaaggagaagagaagacgcatcagcgccaccaccaacctgtctgagcggcaggtgaccatctggttccagaacagaagagtgaaggagaagaaggtggtgtccaagagcaaggccccccacctgcacagcacctag

SEQ ID NO: 193040 - DNA, 993 bp, Artificial Sequence
  derived and/or modified sequence
atgaccaccagcctgctgctgcacccccggtggcccgagagcctgatgtacgtatatgaagattccgccgccgagagcggcattggcggtggaggtgggggcggcggaggcggtacaggtggggcgggaggtggctgcagcggcgccagtccaggcaaagcaccgtcgatggacggactggggtcctcttgcccagctagccactgtagggacctgctcccccatcccgtgcttggtcgacccccagcgccattgggagcccctcagggagccgtctacactgacattcccgcccccgaggctgccagacaatgcgctcctccacccgcccctccaaccagtagcagtgcgacactcggctacgggtacccatttggaggttcctactatggatgtcgcttaagccataatgtcaacctacagcagaaaccgtgcgcctatcatcctggagacaaatatcctgaaccttcaggggcactgcccggcgatgatctgtccagccgcgctaaggagttcgccttctatccgtccttcgcttcatcataccaggccatgcccggttatttagacgtcagtgtcgtgcccggcattagcggacaccccgagccccgccatgacgcactgatcccagtggaggggtaccagcactgggccctatcgaacggatgggactctcaagtgtattgctcaaaggaacaaagtcagtcggcacacctgtggaaaagccccttccccgatgttgtgccactccagcctgaggtgtcctcctataggcgaggccgcaagaaaagggtgccctatacaaaagtgcagctcaaggagctcgaaaaagaatacgccgcctcaaaattcattacaaaggaaaagaggcgacgcatctcggcaacaaccaatctgtcagagcgtcaggttactatctggttccagaacaggagagtgaaagaaaaaaaagtcgtgagtaagagcaaagctcctcacctgcattccacgtag

SEQ ID NO: 193041 - DNA, 993 bp, Artificial Sequence
  derived and/or modified sequence
atgacaaccagtctgctactacacccacgctggcccgagagtctgatgtacgtgtacgaagattctgcagctgagtccgggatcgggggtggcggagggggaggaggcggaggcaccggcggagcgggaggcggatgcagtggtgcatcaccgggaaaagctccatcgatggacgggttggggtcatcatgtcctgcctcccactgcagggatttactcccgcatccagtgttggggcgacccccagcccctcttggcgctccacagggcgctgtctatacggacatcccagccccagaagctgcgcgacagtgtgccccaccccctgctcctcccacctcctccagtgccacgctgggttacgggtacccttttggcggatcctactacgggtgccggcttagccataatgtgaacttgcagcagaaaccctgcgcctaccaccctggggacaaatatccggagccttccggtgccctcccgggagatgacctctcttccagagccaaggaattcgccttttacccatcatttgcctcttcgtatcaagcgatgccgggatatctagacgtaagcgtggtgccgggaattagcggacaccctgaaccaagacacgacgcccttatccccgtcgaaggctatcagcactgggcactgagcaatggttgggactctcaagtttactgctctaaggagcagtcccagagcgctcatctgtggaagtccccctttcctgacgtggtgcccctccaacctgaggtgtcgtcgtacaggagggggagaaagaagcgggtaccctacaccaaagtgcagctgaaagaactggagaaagaatatgcagccagcaagtttattacaaaagaaaagcggagacgtatatccgctactacaaatctgtctgaacgccaagtcacgatatggttccagaacagaagagttaaggaaaaaaaggtggtcagtaaaagtaaggccccacacctacatagtacatag

SEQ ID NO: 193042 - DNA, 993 bp, Artificial Sequence
  derived and/or modified sequence
atgaccaccagcctgctgctgcaccccagatggcccgagagcctgatgtacgtgtacgaggacagcgccgccgagagcggcatcggcggcggcggcggcggcggcggcggcggcaccggcggcgccggcggcggctgcagcggcgccagccccggcaaggcccccagcatggacggcctgggcagcagctgccccgccagccactgcagagacctgctgccccaccccgtgctgggcagaccccccgcccccctgggcgccccccagggcgccgtgtacaccgacatccccgcccccgaggccgccagacagtgcgcccccccccccgccccccccaccagcagcagcgccaccctgggctacggctaccccttcggcggcagctactacggctgcagactgagccacaacgtgaacctgcagcagaagccctgcgcctaccaccccggcgacaagtaccccgagcccagcggcgccctgcccggcgacgacctgagcagcagagccaaggagttcgccttctaccccagcttcgccagcagctaccaggccatgcccggctacctggacgtgagcgtggtgcccggcatcagcggccaccccgagcccagacacgacgccctgatccccgtggagggctaccagcactgggccctgagcaacggctgggacagccaggtgtactgcagcaaggagcagagccagagcgcccacctgtggaagagccccttccccgacgtggtgcccctgcagcccgaggtgagcagctacagaagaggcagaaagaagagagtgccctacaccaaggtgcagctgaaggagctggagaaggagtacgccgccagcaagttcatcaccaaggagaagagaagaagaatcagcgccaccaccaacctgagcgagagacaggtgaccatctggttccagaacagaagagtgaaggagaagaaggtggtgagcaagagcaaggccccccacctgcacagcacctag

SEQ ID NO: 193043 - protein, 294 aa, Artificial Sequence
  derived and/or modified sequence
MAMSSGGSGGGVPEQEDSVLFRRGTGQSDDSDIWDDTALIKAYDKAVASFKHALKNGDICETSGKPKTTPKRKPAKKNKSQKKNTAASLQQWKVGDKCSAIWSEDGCIYPATIASIDFKRETCVVVYTGYGNREEQNLSDLLSPICEVANNIEQNAQENENESQVSTDESENSRSPGNKSDNIKPKSAPWNSFLPPPPPMPGPRLGPGKPGLKFNGPPPPPPPPPPHLLSCWLPPFPSGPPIIPPPPPICPDSLDDADALGSMLISWYMSGYHTGYYMGFRQNQKEGRCSHSLN

SEQ ID NO: 193044 - DNA, 885 bp, Artificial Sequence
  derived and/or modified sequence
atggccatgagcagcggcggcagcggcggcggcgtgcccgagcaggaggacagcgtgctgttcagaagaggcaccggccagagcgacgacagcgacatctgggacgacaccgccctgatcaaggcctacgacaaggccgtggccagcttcaagcacgccctgaagaacggcgacatctgcgagaccagcggcaagcccaagaccacccccaagagaaagcccgccaagaagaacaagagccagaagaagaacaccgccgccagcctgcagcagtggaaggtgggcgacaagtgcagcgccatctggagcgaggacggctgcatctaccccgccaccatcgccagcatcgacttcaagagagagacctgcgtggtggtgtacaccggctacggcaacagagaggagcagaacctgagcgacctgctgagccccatctgcgaggtggccaacaacatcgagcagaacgcccaggagaacgagaacgagagccaggtgagcaccgacgagagcgagaacagcagaagccccggcaacaagagcgacaacatcaagcccaagagcgccccctggaacagcttcctgcccccccccccccccatgcccggccccagactgggccccggcaagcccggcctgaagttcaacggccccccccccccccccccccccccccccccccacctgctgagctgctggctgccccccttccccagcggcccccccatcatccccccccccccccccatctgccccgacagcctggacgacgccgacgccctgggcagcatgctgatcagctggtacatgagcggctaccacaccggctactacatgggcttcagacagaaccagaaggagggcagatgcagccacagcctgaactag

SEQ ID NO: 193045 - DNA, 885 bp, Artificial Sequence
  derived and/or modified sequence
atggctatgagttcaggagggagtggcggtggagtacctgagcaggaggactcggtgctgtttcggcggggcaccggtcagtcggacgattccgacatctgggacgatacagctctgataaaggcatacgataaagccgtggcttccttcaagcatgctctgaagaacggagacatttgtgagactagtggtaaacctaaaacaactcctaagcggaagcccgccaagaaaaataagtcacaaaagaagaataccgcagcctctctacagcaatggaaggtaggggataagtgttctgccatatggtcggaggatgggtgtatttaccccgcaaccattgcaagcatcgacttcaaaagggagacatgtgttgtggtgtatactgggtacggcaatagggaagagcagaacctgagcgacttgctatcgccaatctgtgaggttgcaaacaatattgagcagaatgcccaggaaaacgagaatgagagccaagtgagcaccgacgagtctgaaaacagtagatccccaggcaacaagtccgataacatcaaacctaagtcagcgccgtggaattcttttctgcctcctcctcctcccatgcccggcccccgattgggtcccggcaaacccggtctgaaatttaatgggcccccacccccccctcccccaccacccccgcatctgctatcttgctggttgcccccattcccgtcagggcctccgattattcctccccctccccctatctgccctgactccctggacgatgcagacgcattaggaagcatgttgatttcatggtacatgagcggctatcataccggctactacatgggattcagacagaaccagaaggagggtcggtgttcccattccctgaactag

SEQ ID NO: 193046 - DNA, 885 bp, Artificial Sequence
  derived and/or modified sequence
atggccatgtcttccggaggatccggaggtggcgtacccgagcaggaggactccgttctcttccgcagggggacgggacagagtgatgactcggatatatgggatgacaccgcactgattaaggcttacgacaaagcggtcgcatcatttaaacacgccctgaaaaacggcgacatatgtgaaacatcagggaagccgaaaacgacacctaaaagaaagccggccaaaaagaataaatctcagaagaagaacactgctgcatccctgcaacagtggaaggtgggcgataagtgttccgcaatctggagcgaggacggttgcatctacccggcgacgatcgccagtatcgattttaaacgtgagacctgcgtggtcgtgtacactggctacggcaatagagaagaacaaaatctgtccgacttactttcacccatatgtgaggtggctaacaatattgaacagaacgctcaggagaacgaaaacgaatcacaggtttctactgatgaatcagaaaactcccggtcccccggcaacaagagtgataacattaagccgaaaagtgctccatggaactcctttctgcctccaccaccccctatgcctgggccccggctcggcccagggaagcctggactaaagttcaacgggcctccccctcctcctcctccccctccaccacatctcttatcctgctggctcccaccattcccgagtggaccgcctataatccctcctccacctcctatctgtccagattcacttgacgacgccgacgctttggggagtatgttaataagttggtacatgtctggctatcatacaggctattacatgggtttccggcagaaccagaaagagggtcgatgtagccacagcctgaattag

SEQ ID NO: 193047 - DNA, 885 bp, Artificial Sequence
  derived and/or modified sequence
atggccatgagcagcggcggcagcggcggcggcgtgcctgagcaggaggacagcgtgctcttccggcggggcaccggccagagtgatgacagcgacatctgggatgacacagccctgatcaaggcctatgacaaggctgtggccagcttcaagcacgccctgaagaatggagacatctgtgagaccagcggcaagcccaagaccacccccaagaggaagccagccaagaagaacaagagccagaagaagaacacagctgccagcctgcagcagtggaaggtgggggacaagtgcagcgccatctggagcgaagatggctgcatctacccagccaccatcgccagcattgacttcaagcgggagacctgtgtggtggtgtacacaggctacggcaaccgggaggagcagaacctgagtgacctgctgagccccatctgtgaggtggccaacaacatcgagcagaatgcccaggagaatgaaaatgaaagccaggtgtccacagatgaaagtgagaacagccgcagccctggcaacaagagtgacaacatcaagcccaagagcgccccctggaacagcttcctgcccccacctccacccatgcctggcccccggctgggccctgggaagccaggcctgaagttcaatggacctcctcctcctcctcctcctcctccaccccacctgctgagctgctggctgccccccttccccagcggcccccccatcatccccccacctccacccatctgcccagacagcctggatgatgctgatgccctgggctccatgctgatctcctggtacatgagcggctaccacacaggctactacatgggcttccggcagaaccagaaggagggccgctgcagccacagcctgaactag

SEQ ID NO: 193048 - DNA, 885 bp, Artificial Sequence
  derived and/or modified sequence
atggccatgagcagcggcggcagcggcggcggcgtgcccgagcaggaagactcggtgctgttccgccgagggacgggccagagcgatgactcagacatatgggatgatacggcactcatcaaagcatacgataaggccgtggcatcctttaaacatgctctgaagaacggcgacatctgtgagacatcaggcaaaccgaagacgaccccaaaacgtaaacctgctaagaaaaataagtcccaaaaaaagaacactgctgcgtccctgcaacagtggaaggttggtgataagtgctctgctatatggtcagaagatggttgtatttaccccgccaccatcgcctccattgacttcaagcgcgagacttgcgtcgtcgtctacaccggatatggaaacagggaggagcagaacttgtccgatctcctgtcaccaatatgtgaggtcgccaacaacatcgagcagaatgctcaagaaaacgaaaatgagtctcaagtctccaccgacgaaagcgaaaactcgaggtcccccggtaataagagcgataacattaaaccgaagagtgcaccctggaattctttcctccccccccctccccctatgcccggtccccgcctggggccgggcaaaccaggattgaaatttaatggtccgccaccccctcctccaccaccacccccccatctgctcagctgttggttacccccattcccaagcggtcctccgataatacctcccccacccccgatctgcccagattctctagacgatgccgatgctctgggcagtatgctgatttcttggtacatgtccggataccacacgggctactatatggggtttaggcagaaccagaaggagggacggtgttctcacagcttgaactag

SEQ ID NO: 193049 - DNA, 885 bp, Artificial Sequence
  derived and/or modified sequence
atggccatgagcagcggcggcagcggcggcggcgtgcccgagcaggaggatagcgtcctgtttcgtcgcggcaccgggcagagcgatgattctgatatctgggacgacactgctctgatcaaagcttacgataaggccgtggcgtcgtttaagcatgctctcaaaaatggggacatttgcgagacatctggaaagcccaaaacaaccccgaagaggaagccagctaagaagaataagagtcaaaagaaaaataccgcagcttcgctgcagcagtggaaagtgggagataagtgttctgccatttggtctgaagatggctgtatctacccagccacaattgctagcatagactttaaaagggagacctgcgtcgtggtttatacaggatatggaaaccgggaggagcagaacctgtcagaccttttatcaccgatctgcgaggttgctaataatatcgagcagaatgcccaggagaacgaaaatgagagccaggtttccaccgatgagtccgaaaattcacgttcaccaggcaacaaatcagacaatataaagcccaaaagcgcaccttggaactctttccttcctcctccgccccctatgccagggccccgcctcggccccggcaagcctggtctgaagttcaatgggccaccccctccccctccacctcctccacctcacctcctcagttgttggctccccccctttccctctggtcctccaattattcctcctcctcctccaatctgtccggatagcctggacgacgctgacgccctgggctccatgctgattagctggtatatgtcgggctatcacacaggctactatatgggattccgccaaaaccagaaagagggcagatgttcgcatagtctgaactag

SEQ ID NO: 193050 - DNA, 885 bp, Artificial Sequence
  derived and/or modified sequence
atggcgatgtccagtgggggatctgggggaggggtccctgagcaggaggattcagtgctgttccgacgcggaacaggccaatctgatgactccgacatctgggacgataccgctctgatcaaggcctacgataaggcagtcgcttctttcaaacacgctctaaaaaacggcgatatttgcgagacatccggcaagcccaaaacaacaccaaagcgcaagcccgctaaaaagaacaaatcccagaaaaagaatacagctgcatctctccaacagtggaaagtgggcgacaagtgctccgcgatctggagtgaggacgggtgcatctaccctgcaaccattgccagtatcgattttaagcgagaaacatgcgtggtggtctatacaggatacgggaatagggaggagcagaacctgagtgacctgttgtcaccaatttgcgaggtggctaataacatagagcagaatgcacaggaaaacgaaaacgaatctcaggtgtctacggatgaaagcgagaactctcgttcgcccggaaacaagtcagataatatcaaacccaagagtgccccatggaatagttttctgcccccaccaccacctatgcccggtcctagactaggcccaggaaagcctggactgaagttcaatgggccacccccacctccacctccccctcctccccacctactgtcttgttggctacctcctttcccctccggcccacccataatcccgccaccgcctccaatttgtcccgatagcctggatgatgctgatgccctaggatctatgctcatctcctggtatatgtctggctaccatactggttattatatgggattcaggcagaaccagaaggagggacgctgcagtcactccttgaactag

SEQ ID NO: 193051 - DNA, 885 bp, Artificial Sequence
  derived and/or modified sequence
atggcaatgagcagcggtggctccggtggtggtgtccctgaacaagaggacagcgttctatttcggcgaggcaccggtcagagcgacgacagtgacatctgggatgacaccgccctgattaaagcctacgataaggctgtggcaagctttaagcacgcactgaagaatggagacatttgtgagacatctggtaagccaaaaacaacgcccaaacgtaagccagctaaaaagaataagtcacaaaagaaaaacaccgcagcaagtcttcaacaatggaaggtaggcgacaagtgctccgctatctggtccgaagatggctgtatctaccctgcaacaatcgccagtattgattttaagcgggagacgtgcgttgtcgtgtatactggctatggcaacagagaggaacagaacttatctgacctgctcagccctatttgtgaggtggctaataacattgagcaaaacgctcaggagaacgagaatgaatcacaggtctccaccgacgagagcgagaactccaggtctccgggtaacaagtccgacaatatcaagccgaagagcgcgccttggaactccttccttcccccaccaccacccatgcctggaccacggttgggcccaggaaagcccggtcttaaattcaatggccctcccccaccaccacccccacctccccctcacctcttgtcttgctggctgccgccatttccttcggggcctccaatcatacctccaccccctcctatttgccccgactcgctagacgatgccgatgctttaggttctatgctaatctcatggtacatgtcggggtatcacaccggttactacatgggtttccgacagaatcagaaagagggcaggtgctcccatagtctgaactag

SEQ ID NO: 193052 - DNA, 1536 bp, Artificial Sequence
  derived and/or modified sequence
agaagccccgggcggcggaagtcgtcactcttaagaagggacggggccccacgctgcgcacccgcgggtttgctatggcgatgagcagcggcggcagtggtggcggcgtcccggagcaggaggattccgtgctgttccggcgcggcacaggccagagcgatgattctgacatttgggatgatacagcactgataaaagcatatgataaagctgtggcttcatttaagcatgctctaaagaatggtgacatttgtgaaacttcgggtaaaccaaaaaccacacctaaaagaaaacctgctaagaagaataaaagccaaaagaagaatactgcagcttccttacaacagtggaaagttggggacaaatgttctgccatttggtcagaagacggttgcatttacccagctaccattgcttcaattgattttaagagagaaacctgtgttgtggtttacactggatatggaaatagagaggagcaaaatctgtccgatctactttccccaatctgtgaagtagctaataatatagaacaaaatgctcaagagaatgaaaatgaaagccaagtttcaacagatgaaagtgagaactccaggtctcctggaaataaatcagataacatcaagcccaaatctgctccatggaactcttttctccctccaccaccccccatgccagggccaagactgggaccaggaaagccaggtctaaaattcaatggcccaccaccgccaccgccaccaccaccaccccacttactatcatgctggctgcctccatttccttctggaccaccaataattcccccaccacctcccatatgtccagattctcttgatgatgctgatgctttgggaagtatgttaatttcatggtacatgagtggctatcatactggctattatatgggtttcagacaaaatcaaaaagaaggaaggtgctcacattccttaaattaaggagaaatgctggcatagagcagcactaaatgacaccactaaagaaacgatcagacagatctggaatgtgaagcgttatagaagataactggcctcatttcttcaaaatatcaagtgttgggaaagaaaaaaggaagtggaatgggtaactcttcttgattaaaagttatgtaataaccaaatgcaatgtgaaatattttactggactctattttgaaaaaccatctgtaaaagactggggtgggggtgggaggccagcacggtggtgaggcagttgagaaaatttgaatgtggattagattttgaatgatattggataattattggtaattttatgagctgtgagaagggtgttgtagtttataaaagactgtcttaatttgcatacttaagcatttaggaatgaagtgttagagtgtcttaaaatgtttcaaatggtttaacaaaatgtatgtgaggcgtatgtggcaaaatgttacagaatctaactggtggacatggctgttcattgtactgtttttttctatcttctatatgtttaaaagtatataataaaaatatttaatttttttttaaa

SEQ ID NO: 193053 - DNA, 1536 bp, Artificial Sequence
  derived and/or modified sequence
agaagccccgggcggcggaagtcgtcactcttaagaagggacggggccccacgctgcgcacccgcgggtttgctatggcgatgagcagcggcggcagtggtggcggcgtcccggagcaggaggattccgtgctgttccggcgcggcacaggccagagcgatgattctgacatttgggatgatacagcactgataaaagcatatgataaagctgtggcttcatttaagcatgctctaaagaatggtgacatttgtgaaacttcgggtaaaccaaaaaccacacctaaaagaaaacctgctaagaagaataaaagccaaaagaagaatactgcagcttccttacaacagtggaaagttggggacaaatgttctgccatttggtcagaagacggttgcatttacccagctaccattgcttcaattgattttaagagagaaacctgtgttgtggtttacactggatatggaaatagagaggagcaaaatctgtccgatctactttccccaatctgtgaagtagctaataatatagaacaaaatgctcaagagaatgaaaatgaaagccaagtttcaacagatgaaagtgagaactccaggtctcctggaaataaatcagataacatcaagcccaaatctgctccatggaactcttttctccctccaccaccccccatgccagggccaagactgggaccaggaaagccaggtctaaaattcaatggcccaccaccgccaccgccaccaccaccaccccacttactatcatgctggctgcctccatttccttctggaccaccaataattcccccaccacctcccatatgtccagattctcttgatgatgctgatgctttgggaagtatgttaatttcatggtacatgagtggctatcatactggctattatatgggttttagacaaaatcaaaaagaaggaaggtgctcacattccttaaattaaggagaaatgctggcatagagcagcactaaatgacaccactaaagaaacgatcagacagatctggaatgtgaagcgttatagaagataactggcctcatttcttcaaaatatcaagtgttgggaaagaaaaaaggaagtggaatgggtaactcttcttgattaaaagttatgtaataaccaaatgcaatgtgaaatattttactggactctattttgaaaaaccatctgtaaaagactgaggtgggggtgggaggccagcacggtggtgaggcagttgagaaaatttgaatgtggattagattttgaatgatattggataattattggtaattttatgagctgtgagaagggtgttgtagtttataaaagactgtcttaatttgcatacttaagcatttaggaatgaagtgttagagtgtcttaaaatgtttcaaatggtttaacaaaatgtatgtgaggcgtatgtggcaaaatgttacagaatctaactggtggacatggctgttcattgtactgtttttttctatcttctatatgtttaaaagtatataataaaaatatttaatttttttttaaa

SEQ ID NO: 193054 - DNA, 882 bp, Artificial Sequence
  derived and/or modified sequence
atggccatgagcagcggcggcagcggcggcggcgtgcccgagcaggaggacagcgtgctgttccgccgcggcaccggccagagcgacgacagcgacatctgggacgacaccgccctgatcaaggcctacgacaaggccgtggccagcttcaagcacgccctgaagaacggcgacatctgcgagaccagcggcaagcccaagaccacccccaagcgcaagcccgccaagaagaacaagagccagaagaagaacaccgccgccagcctgcagcagtggaaggtgggcgacaagtgcagcgccatctggagcgaggacggctgcatctaccccgccaccatcgccagcatcgacttcaagcgcgagacctgcgtggtggtgtacaccggctacggcaaccgcgaggagcagaacctgagcgacctgctgagccccatctgcgaggtggccaacaacatcgagcagaacgcccaggagaacgagaacgagagccaggtgagcaccgacgagagcgagaacagccgcagccccggcaacaagagcgacaacatcaagcccaagagcgccccctggaacagcttcctgcccccccccccccccatgcccggcccccgcctgggccccggcaagcccggcctgaagttcaacggccccccccccccccccccccccccccccccccacctgctgagctgctggctgccccccttccccagcggcccccccatcatccccccccccccccccatctgccccgacagcctggacgacgccgacgccctgggcagcatgctgatcagctggtacatgagcggctaccacaccggctactacatgggcttccgccagaaccagaaggagggccgctgcagccacagcctgaac

SEQ ID NO: 193055 - protein, 77 aa, Artificial Sequence
  derived and/or modified sequence
MNLRLCVQALLLLWLSLTAVCGGSLMPLPDGNGLEDGNVRHLVQPRGSRNGPGPWQGGRRKFRRQRPRLSHKGPMPF

SEQ ID NO: 193056 - DNA, 234 bp, Artificial Sequence
  derived and/or modified sequence
atgaacctcaggctgtgcgtccaggctctcctgctgctctggctgagtctgacagccgtgtgcggcgggagtcttatgccgcttccggacggcaatggcctggaggacggaaacgtgaggcacttagtacagcctcgtggctcccgcaatggaccgggcccatggcagggcggcaggaggaaatttcgacgtcagagaccccggctatctcataaaggtccaatgccattttag

SEQ ID NO: 193057 - DNA, 234 bp, Artificial Sequence
  derived and/or modified sequence
atgaacctgcggctgtgtgtgcaggccctgctgctgctgtggctgagcctgacagctgtgtgtggcggcagcctgatgcccctgcctgatggaaatggcctggaggatggaaatgtgcgccacctggtgcagccccggggcagcagaaatggacctggcccctggcagggcggccgcaggaagttccggcggcagaggccccggctgagccacaagggccccatgcccttctag

SEQ ID NO: 193058 - DNA, 234 bp, Artificial Sequence
  derived and/or modified sequence
atgaacctgcggctgtgcgtgcaggccctgctgctgctgtggctgtctctgacggctgtctgtggcgggagtctgatgcctcttccggacgggaatggattggaagatggcaatgtgcgacacctagttcaaccgcgcgggagccgaaatggccccggcccatggcaaggcggccggcggaagtttaggaggcagaggcctcgattgtcgcataaagggcccatgcctttctag

SEQ ID NO: 193059 - DNA, 234 bp, Artificial Sequence
  derived and/or modified sequence
atgaatcttaggctgtgcgtgcaagctctgttacttctctggttgtcccttacagcagtctgcggcggttccctcatgcccctgcctgacggaaatggactggaggatggcaacgtgcggcatttggtgcagcccagggggtccaggaatggcccaggcccatggcagggcggacgcaggaaatttaggcggcaacgtccacggctatcccacaagggacccatgcccttctag

SEQ ID NO: 193060 - DNA, 3220 bp, Artificial Sequence
  derived and/or modified sequence
gagcattctctctggcagccggggtcacgggcagttgcagccgcggccgagcagccagccgctaagaaagagctcgccgctgccgctcccggagccgccgaggccagcttcgcggcgctgccccgcggcgggagaggaggctgcagaagagcggaggcggccagcgggagcggcggggctcagcgcgcacactcagcggccggggagcctcccgagctctgcgcccgcacgcgccagccgcggctcgcgcctttcttggcctccgggcgcccgacctctcctcccccgcgccggctcgccggggccgcggcggcccaaggagcagcatgaatctgcggctctgcgtgcaggcgctcctgctgctctggctctccttgaccgcggtgtgtggagggtccctgatgccgcttcccgatgggaatgggctggaagacggcaatgtccgccacctggtgcagcccagagggtcaaggaatgggccagggccctggcagggaggtcggaggaaattccgccgccagcggccccgcctctcccataagggacccatgcctttctgaagcaggactgaaggggcccccaagtgcccacccccggcggttatgtctcctccatagattggtctgcttctctggaggcctcacgtccattcagctctcacctcgcacctgctgtagccaccagtgggcccagctcttctcacctgcctgcttcccccagtggcgtgctcctggctgtagtttggatgattcccgttctctcacaagaatccgtccagtccatcttcctggcccctccctggactgactttggagacctagccccagaaagcctcccttcttctccaggtcccctccgccctagtccctgcctgtctcatctaacgccccaaaccttcatttgggccttccttcctcatgtctgccctgagcgcggggtggaagtgctcccttctgtgggctccagcagatcccttgttttcctgtcagttggacccctcacctggcctccagggaagaatgcagagaaaagcaaggagagactctagttaagaggtgctggctgcggggatccagacagggcacattgggggcatggaagtgccagggtggttttcaggagctctggtgaagtgggtggagcatcagcgtttgctcagttaagggagaggtagagaggggcccgtgaagtcctttgtcacttctcttgccttagtgtgcctcccaatactcccttcttcctgcccccacaccccatccccagctagcccaagctccaggtcaggaggggagggtgctgggcctgacatggctatataccctcccaggagtaaaagccaagcaagaggttgtttttgccaagaatcacagaatgttagagctgacaggacccttgaaggtcacttagccttcttaggcaaacgcctgcaaaacagaagcctggagaggggagtgacctgctcagagtcattgcagagccgggatggggaccaggtctcccatctcctactttatgacgccctcttccctcttgatgatgtcttttcaaagcaaatgaagtgccttttcccgaggctggggctgggggtggctgggaggggaagggaagggagaggcaagctggctgtgaactgtcctgttgtggggctggagctgctcccacctccctgacctacccctgctgcaccattcccccagctgggctggaaggttccataactggccagctgcccccataactggcagcattcccagacccagggtactctaataggggcggctcaggcactgagactaccgctcaaccccagggtggttttcaggagtccgaggtagccttcaatcactggactccatggccttcccttcgtgttgaccggaccttccttccagggcttttcctttgggggaggcggagaggggagaagaaggaagggaagggcagaaggaaggagggaagaaaagaaagcaaaggaacagaaggaaggaaagaaagatgggaggaagtgcagcaggaatagcaccctctccccgggaggccctagcttccgtgaggggccatcaccagccattccttggagggggctttctccccttttgcttgagcagggttcccaggagggagaaagagaagacaagagcctgatgcccaactttgtgtgtgtggggacgggggagtcagggccccccaagtcccacaatagccccaatgtttgcctatccacctcccccaagcccctttacctatgctgctgctaacgctgctgctgctgctgctgctgcttaaaggctcatgcttggagtggggactggtcggtgcccagaaagtctcttctgccactgacgcccccatcagggattgggccttctttcccccttcctttctgtgtctcctgcctcatcggcctgccatgacctgcagccaagcccagccccgtggggaaggggagaaagtgggggatggctaagaaagctgggagatagggaacagaagagggtagtgggtgggctaggggggctgccttatttaaagtggttgtttatgattcttatactaatttatacaaagatattaaggccctgttcattaagaaattgttcccttcccctgtgttcaatgtttgtaaagattgttctgtgtaaatatgtctttataataaacagttaaaagctgacagttcgcccttactcttggaggtcatgttcaggaggggcattcctttcccctgggggtcatgggtgtccccatgcccacatattgcacgtgcagggaggtaagtgcctgcatcccaaatcggttctaggtcaactggcctcaaactgatttgccatgagctcacaaaatgaatccctatgcttaatgaccaggtcacataaaatccagcccacttacaggttttctggcatctgtttgggtgtcctaatttttttggcagtgtcatttgaagaatttttttaaagcagtttatttaagaacatactgattaaatgcaggatcgctactaaaaattgttttgtatccttggtgggtgtcttctgctattttatctacttttgaacactttcaggactttttagccagtttgcctttcttgaaaaatgttatgttttcagcaataaatacatttgataatgactttgtttgtatcattttatgtttcacaaagtagagttgcttgatgaatgagatagcctgaaaaataaaatgcaaagagttcaat

SEQ ID NO: 193061 - DNA, 387 bp, Artificial Sequence
  derived and/or modified sequence
atgggctggaagacggcaatgtccgccacctggtgcagcccagagggtcaaggaatgggccagggccctggcagggaggtcggaggaaattccgccgccagcggccccgcctctcccataagggacccatgcctttctgaagcaggactgaaggggcccccaagtgcccacccccggcggttatgtctcctccatagattggtctgcttctctggaggcctcacgtccattcagctctcacctcgcacctgctgtagccaccagtgggcccagctcttctcacctgcctgcttcccccagtggcgtgctcctggctgtagtttggatgattcccgttctctcacaagaatccgtccagtccatcttcctggcccctccctggactga

SEQ ID NO: 193062 - DNA, 2655 bp, Artificial Sequence
  derived and/or modified sequence
cggggtcacgggcagttgcagccgcggccgagcagccagccgctaagaaagagctcgccgctgccgctcccggagccgccgaggccagcttcgcggcgctgccccgcggcgggagaggaggctgcagaagagcggaggcggccagcgggagcggcggggctcagcgcgcacactcagcggccggggagcctcccgagctctgcgcccgcacgcgccagccgcggctcgcgcctttcttggcctccgggcgcccgacctctcctcccccgcgccggctcgccggggccgcggcggcccaaggagcagcatgaatctgcggctctgcgtgcaggcgctcctgctgctctggctctccttgaccgcggtgtgtggagggtccctgatgccgcttcccgatgggaatgggctggaagacggcaatgtccgccacctggtgcagcccagagggtcaaggaatgggccagggccctggcagggaggtcggaggaaattccgccgccagcggccccgcctctcccataagggacccatgcctttctgaagcaggactgaaggggcccccaagtgcccacccccggcggttatgtctcctccatagattggtctgcttctctggaggcctcacgtccattcagctctcacctcgcacctgctgtagccaccagtgggcccagctcttctcacctgcctgcttcccccagtggcgtgctcctggctgtagtttggatgattcccgttctctcacaagaatccgtccagtccatcttcctggcccctccctggactgactttggagacctagccccagaaagcctcccttcttctccaggtcccctccgccctagtccctgcctgtctcatctaacgccccaaaccttcatttgggccttccttcctcatgtctgccctgagcgcggggtggaagtgctcccttctgtgggctccagcagatcccttgttttcctgtcagttggacccctcacctggcctccagggaagaatgcagagaaaagcaaggagagactctagttaagaggtgctggctgcggggatccagacagggcacattgggggcatggaagtgccagggtggttttcaggagctctggtgaagtgggtggagcatcagcgtttgctcagttaagggagaggtagagaggggcccgtgaagtcctttgtcacttctcttgccttagtgtgcctcccaatactcccttcttcctgcccccacaccccatccccagctagcccaagctccaggtcaggaggggagggtgctgggcctgacatggctatataccctcccaggagtaaaagccaagcaagaggttgtttttgccaagaatcacagaatgttagagctgacaggacccttgaaggtcacttagccttcttaggcaaacgcctgcaaaacagaagcctggagaggggagtgacctgctcagagtcattgcagagccgggatggggaccaggtctcccatctcctactttatgacgccctcttccctcttgatgatgtcttttcaaagcaaatgaagtgccttttcccgaggctggggctgggggtggctgggaggggaagggaagggagaggcaagctggctgtgaactgtcctgttgtggggctggagctgctcccacctccctgacctacccctgctgcaccattcccccagctgggctggaaggttccataactggccagctgcccccataactggcagcattcccagacccagggtactctaataggggcggctcaggcactgagactaccgctcaaccccagggtggttttcaggagtccgaggtagccttcaatcactggactccatggccttcccttcgtgttgaccggaccttccttccagggcttttcctttgggggaggcggagaggggagaagaaggaagggaagggcagaaggaaggagggaagaaaagaaagcaaaggaacagaaggaaggaaagaaagatgggaggaagtgcagcaggaatagcaccctctccccgggaggccctagcttccgtgaggggccatcaccagccattccttggagggggctttctccccttttgcttgagcagggttcccaggagggagaaagagaagacaagagcctgatgcccaactttgtgtgtgtggggacgggggagtcagggccccccaagtcccacaatagccccaatgtttgcctatccacctcccccaagcccctttacctatgctgctgctaacgctgctgctgctgctgctgctgcttaaaggctcatgcttggagtggggactggtcggtgcccagaaagtctcttctgccactgacgcccccatcagggattgggccttctttcccccttcctttctgtgtctcctgcctcatcggcctgccatgacctgcagccaagcccagccccgtggggaaggggagaaagtgggggatggctaagaaagctgggagatagggaacagaagagggtagtgggtgggctaggggggctgccttatttaaagtggttgtttatgattcttatactaatttatacaaagatattaaggccctgttcattaagaaattgttcccttcccctgtgttcaatgtttgtaaagattgttctgtgtaaatatgtctttataataaacagttaaaagctga

SEQ ID NO: 193063 - DNA, 234 bp, Artificial Sequence
  derived and/or modified sequence
atgaacctgagactgtgcgtgcaggccctgctgctgctgtggctgagcctgaccgccgtgtgcggcggcagcctgatgcccctgcccgacggcaacggcctggaggacggcaacgtgagacacctggtgcagcccagaggcagcagaaacggccccggcccctggcagggcggcagaagaaagttcagaagacagagacccagactgagccacaagggccccatgcccttctag

SEQ ID NO: 193064 - protein, 372 aa, Artificial Sequence
  derived and/or modified sequence
MSKAFGLLRQICQSILAESSQSPADLEEKKEEDSNMKREQPRERPRAWDYPHGLVGLHNIGQTCCLNSLIQVFVMNVDFTRILKRITVPRGADEQRRSVPFQMLLLLEKMQDSRQKAVRPLELAYCLQKCNVPLFVQHDAAQLYLKLWNLIKDQITDVHLVERLQALYTIRVKDSLICVDCAMESSRNSSMLTLPLSLFDVDSKPLKTLEDALHCFFQPRELSSKSKCFCENCGKKTRGKQVLKLTHLPQTLTIHLMRFSIRNSQTRKICHSLYFPQSLDFSQILPMKRESCDAEEQSGGQYELFAVIAHVGMADSGHYCVYIRNAVDGKWFCFNDSNICLVSWEDIQCTYGNPNYHWQETAYLLVYMKMEC

SEQ ID NO: 193065 - protein, 243 aa, Artificial Sequence
  derived and/or modified sequence
TIRVKDSLICVDCAMESSRNSSMLTLPLSLFDVDSKPLKTLEDALHCFFQPRELSSKSKCFCENCGKKTRGKQVLKLTHLPQTLTIHLMRFSIRNSQTRKICHSLYFPQSLDFSQILPMKRESCDAEEQSGGQYELFAVIAHVGMADSGHYCVYIRNAVDGKWFCFNDSNICLVSWEDIQCTYGNPNYHWPPFLCHACILIEDGEYLRLFRPANIRQFTSREETWVECWCVLTLQCKQLQQVW

SEQ ID NO: 193066 - DNA, 1119 bp, Artificial Sequence
  derived and/or modified sequence
atgtccaaggcttttggattgttgcgacagatctgccaatctattctcgcagagtctagtcaatcacctgcggacctggaagaaaagaaggaagaagactccaatatgaaaagagaacaaccccgtgaacgaccgagagcttgggactaccctcatggtctggtaggattacataacataggtcagacttgctgtttgaatagcctgatccaagtatttgtaatgaacgtagactttacaaggatcttgaagcggatcacagtgccccgaggcgcggatgaacagcgtaggagtgtgccgtttcagatgttgttgctgctggaaaaaatgcaggacagccgccagaaggccgtccggccactcgagctggcttactgtttgcagaagtgtaacgtccccctatttgtgcaacatgatgccgctcagctgtacctcaaactgtggaatctgattaaggaccagataacagacgtgcacctggtcgagcgtttacaggcgctgtacaccattcgggtgaaagactccttgatttgtgtcgattgtgctatggagagctcaaggaacagttcaatgctaaccctgcctctcagtctgttcgatgtggatagcaaacccctgaaaacactggaggacgccctccattgcttttttcagcctagagagttgtcctcaaagtccaagtgcttttgcgaaaactgcggaaagaaaacccgagggaagcaagtgctcaaactcacccatctgcctcagacactgaccattcacctgatgagatttagtattaggaacagtcagacaagaaaaatatgccacagcctgtatttcccacagtccctcgatttctcacagattctcccaatgaaacgagagtcctgtgatgctgaagagcagtctggcgggcagtacgagctctttgcggtcatcgcccatgtgggaatggccgatagcgggcactactgcgtgtacattcgaaacgcagtggacggtaaatggttttgctttaatgattctaacatatgcctggtgtcttgggaggatattcagtgtacttacgggaaccccaattaccactggcaggagaccgcatatctgctcgtgtatatgaagatggagtgttag

SEQ ID NO: 193067 - DNA, 1119 bp, Artificial Sequence
  derived and/or modified sequence
atgagcaaggccttcggcctgctgcggcagatctgccagagcatcctggccgagagcagccagagccctgctgacctggaggagaagaaggaggaggacagcaacatgaagcgggagcagccccgggagcggccccgggcctgggactacccccacggcctggtgggcctgcacaacatcggccagacctgctgcctgaacagcctcatccaggtgtttgtgatgaatgtggacttcacccgcatcctgaagaggatcaccgtgcccagaggagcagatgagcagaggagatctgtgcccttccagatgctgctgctgctggagaagatgcaggacagccggcagaaggctgtgcggcccctggagctggcctactgcctgcagaagtgcaatgtgcccctgtttgtgcagcatgatgctgcccagctgtacctgaagctgtggaacctgatcaaggaccagatcacagatgtgcacctggtggagcggctgcaggccctgtacaccatccgggtgaaggacagcctcatctgtgtggactgtgccatggagagcagcaggaacagctccatgctgaccctgcccctgagcctgtttgatgtggacagcaagcccctgaagaccctggaggatgccctgcactgcttcttccagccccgggagctgagcagcaagagcaagtgcttctgtgagaactgtgggaagaagacccggggcaagcaggtgctgaagctgacccacctgccccagaccctgaccatccacctgatgaggttcagcatccggaacagccagaccaggaagatctgccacagcctgtacttcccccagagcctggacttcagccagatcctgcccatgaagcgggagagctgtgatgctgaggagcagagcggcggccagtatgagctgtttgctgtgattgcccacgtgggcatggctgacagcggccactactgtgtgtacatcagaaatgctgtggatggcaagtggttctgcttcaatgacagcaacatctgcctggtgtcctgggaggacatccagtgcacctacggcaaccccaactaccactggcaggagacagcctacctgctggtgtacatgaagatggagtgctag

SEQ ID NO: 193068 - DNA, 1119 bp, Artificial Sequence
  derived and/or modified sequence
atgagcaaggccttcggcctgctgcggcagatctgccagagcatcctggccgagagttctcagagtccagccgacttggaagagaagaaggaagaggattctaatatgaaacgcgagcagcccagagagcggcctcgggcctgggactatccccatggcctagtaggtctgcacaatattggccagacctgctgcttaaacagccttatccaagtctttgtaatgaatgtggatttcacacgcatattgaagaggatcaccgtcccacggggcgcggacgagcagaggaggtcagttcctttccaaatgctgctgctgctcgagaaaatgcaggacagccgccagaaggcggttcggcccctggagctcgcttattgcctgcaaaagtgtaatgtacccctattcgtgcagcatgatgccgcccagctctacctgaagctgtggaacctcatcaaagaccaaattactgatgttcacttagtggagcgcctccaggccctttacacaattcgggtgaaggacagcctgatatgtgtcgattgtgcaatggagtcatctcggaattcctccatgctgaccctgccactgtctctgtttgatgtggactctaagcccttaaagactctggaggatgcgttgcactgcttctttcagccgcgggagttatcaagtaaatctaagtgcttctgcgagaactgtggtaagaaaacccgcggcaagcaggtcctgaagcttacgcacctcccccagaccctaacaatacatctgatgcgattctctatcagaaactcacaaacacgaaagatttgccatagcctctattttccacagtccctggacttctcacaaatcctgcccatgaaaagagagagctgcgatgccgaggagcagtctgggggacaatacgagctgtttgcagtcatagcacacgtgggtatggcggacagcggacactactgcgtttacatccgcaacgctgtggacggaaaatggttctgtttcaatgatagcaacatctgtcttgtatcttgggaagatattcaatgcacctatggaaatcctaactaccattggcaggaaactgcgtatctcctggtgtacatgaagatggagtgctag

SEQ ID NO: 193069 - DNA, 1119 bp, Artificial Sequence
  derived and/or modified sequence
atgtccaaagcttttggactcttacgtcagatctgccaatctatcctcgccgagtccagccagtcccccgcagacctcgaagaaaaaaaggaagaggattccaacatgaagagggagcaacccagggagaggcccagagcttgggactatccgcacggccttgtgggcctgcataacattggtcagacctgttgcctgaattctctcatccaagtcttcgtaatgaacgtggatttcacccgcatcttgaagcgcatcacagttccacggggtgctgatgagcagcgacgatccgttccattccagatgctgttgctgttagaaaagatgcaggactccaggcagaaagccgtgcgaccacttgagctggcctactgtttacagaaatgtaacgtgccactgttcgtacagcacgatgccgctcagctgtatctgaaactgtggaatcttattaaagatcagatcactgatgtgcacttggttgagaggcttcaggctctgtataccatccgagtaaaggactccttgatctgtgtggactgcgcaatggaaagtagtcgcaattcctccatgcttaccttaccactgtccttgtttgacgtcgattcaaagccacttaagactctcgaagatgctctccattgcttttttcaacctcgcgagttatcatccaaatctaaatgtttttgcgaaaactgtggcaagaaaactcgcggaaaacaagtcctcaaactgacacatctaccacagaccctcacaatccatttaatgcgcttttccatccgaaattcccagacgcgtaaaatttgtcatagtctgtactttccacaatctctggacttttctcagattctccctatgaagagagaaagttgcgatgctgaggagcaatcagggggacagtatgagctattcgcagtcattgcccatgtagggatggccgacagcggacactactgcgtttatatacggaatgcagtagatgggaaatggttttgtttcaatgactctaacatttgtctggtctcttgggaagacattcaatgcacttacggaaaccccaactaccattggcaggagactgcgtacctgctagtatacatgaaaatggagtgttag

SEQ ID NO: 193070 - DNA, 2129 bp, Artificial Sequence
  derived and/or modified sequence
gacagaatgagactccgtctcaaaaaaaaaaaaaaaaaaaaaaagcgagggctggaagtctggagcaggtgcgcggctgcaacggcagccgcgggaagctcgggccggcagggtttccccgcacgctggcgcccagctcccggcgcggaggccgctgtaagtttcgctttccattcagtggaaaacgaaagctgggcggggtgccacgagcgcggggccagaccaaggcgggcccggagcggaacttcggtcccagctcggtccccggctcagtcccgacgtggaactcagcagcggaggctggacgcttgcatggcgcttgagagattccatcgtgcctggctcacataagcgcttcctggaagtgaagtcgtgctgtcctgaacgcgggccaggcagctgcggcctgggggttttggagtgatcacgaatgagcaaggcgtttgggctcctgaggcaaatctgtcagtccatcctggctgagtcctcgcagtccccggcagatcttgaagaaaagaaggaagaagacagcaacatgaagagagagcagcccagagagcgtcccagggcctgggactaccctcatggcctggttggtttacacaacattggacagacctgctgccttaactccttgattcaggtgttcgtaatgaatgtggacttcaccaggatattgaagaggatcacggtgcccaggggagctgacgagcagaggagaagcgtccctttccagatgcttctgctgctggagaagatgcaggacagccggcagaaagcagtgcggcccctggagctggcctactgcctgcagaagtgcaacgtgcccttgtttgtccaacatgatgctgcccaactgtacctcaaactctggaacctgattaaggaccagatcactgatgtgcacttggtggagagactgcaggccctgtatacgatccgggtgaaggactccttgatttgcgttgactgtgccatggagagtagcagaaacagcagcatgctcaccctcccactttctctttttgatgtggactcaaagcccctgaagacactggaggacgccctgcactgcttcttccagcccagggagttatcaagcaaaagcaagtgcttctgtgagaactgtgggaagaagacccgtgggaaacaggtcttgaagctgacccatttgccccagaccctgacaatccacctcatgcgattctccatcaggaattcacagacgagaaagatctgccactccctgtacttcccccagagcttggatttcagccagatccttccaatgaagcgagagtcttgtgatgctgaggagcagtctggagggcagtatgagctttttgctgtgattgcgcacgtgggaatggcagactccggtcattactgtgtctacatccggaatgctgtggatggaaaatggttctgcttcaatgactccaatatttgcttggtgtcctgggaagacatccagtgtacctacggaaatcctaactaccactggcaggaaactgcatatcttctggtttacatgaagatggagtgctaatggaaatgcccaaaaccttcagagattgacacgctgtcattttccatttccgttcctggatctacggagtcttctaagagattttgcaatgaggagaagcattgttttcaaactatataactgagccttatttataattagggatattatcaaaatatgtaaccatgaggcccctcaggtcctgatcagtcagaatggatgctttcaccagcagacccggccatgtggctgctcggtcctgggtgctcgctgctgtgcaagacattagccctttagttatgagcctgtgggaacttcaggggttcccagtggggagagcagtggcagtgggaggcatctgggggccaaaggtcagtggcagggggtatttcagtattatacaactgctgtgaccagacttgtatactggctgaatatcagtgctgtttgtaatttttcactttgagaaccaacattaattccatatgaatcaagtgttttgtaactgctattcatttattcagcaaatatttattgatcatctcttctccataagatagtgtgataaacacagtcatgaataaagttattttccacaaaa

SEQ ID NO: 193071 - DNA, 1119 bp, Artificial Sequence
  derived and/or modified sequence
atgagcaaggccttcggcctgctgagacagatctgccagagcatcctggccgagagcagccagagccccgccgacctggaggagaagaaggaggaggacagcaacatgaagagagagcagcccagagagagacccagagcctgggactacccccacggcctggtgggcctgcacaacatcggccagacctgctgcctgaacagcctgatccaggtgttcgtgatgaacgtggacttcaccagaatcctgaagagaatcaccgtgcccagaggcgccgacgagcagagaagaagcgtgcccttccagatgctgctgctgctggagaagatgcaggacagcagacagaaggccgtgagacccctggagctggcctactgcctgcagaagtgcaacgtgcccctgttcgtgcagcacgacgccgcccagctgtacctgaagctgtggaacctgatcaaggaccagatcaccgacgtgcacctggtggagagactgcaggccctgtacaccatcagagtgaaggacagcctgatctgcgtggactgcgccatggagagcagcagaaacagcagcatgctgaccctgcccctgagcctgttcgacgtggacagcaagcccctgaagaccctggaggacgccctgcactgcttcttccagcccagagagctgagcagcaagagcaagtgcttctgcgagaactgcggcaagaagaccagaggcaagcaggtgctgaagctgacccacctgccccagaccctgaccatccacctgatgagattcagcatcagaaacagccagaccagaaagatctgccacagcctgtacttcccccagagcctggacttcagccagatcctgcccatgaagagagagagctgcgacgccgaggagcagagcggcggccagtacgagctgttcgccgtgatcgcccacgtgggcatggccgacagcggccactactgcgtgtacatcagaaacgccgtggacggcaagtggttctgcttcaacgacagcaacatctgcctggtgagctgggaggacatccagtgcacctacggcaaccccaactaccactggcaggagaccgcctacctgctggtgtacatgaagatggagtgctag

SEQ ID NO: 193072 - protein, 587 aa, Artificial Sequence
  derived and/or modified sequence
MEGESVKLSSQTLIQAGDDEKNQRTITVNPAHMGKAFKVMNELRSKQLLCDVMIVAEDVEIEAHRVVLAACSPYFCAMFTGDMSESKAKKIEIKDVDGQTLSKLIDYIYTAEIEVTEENVQVLLPAASLLQLMDVRQNCCDFLQSQLHPTNCLGIRAFADVHTCTDLLQQANAYAEQHFPEVMLGEEFLSLSLDQVCSLISSDKLTVSSEEKVFEAVISWINYEKETRLEHMAKLMEHVRLPLLPRDYLVQTVEEEALIKNNNTCKDFLIEAMKYHLLPLDQRLLIKNPRTKPRTPVSLPKVMIVVGGQAPKAIRSVECYDFEEDRWDQIAELPSRRCRAGVVFMAGHVYAVGGFNGSLRVRTVDVYDGVKDQWTSIASMQERRSTLGAAVLNDLLYAVGGFDGSTGLASVEAYSYKTNEWFFVAPMNTRRSSVGVGVVEGKLYAVGGYDGASRQCLSTVEQYNPATNEWIYVADMSTRRSGAGVGVLSGQLYATGGHDGPLVRKSVEVYDPGTNTWKQVADMNMCRRNAGVCAVNGLLYVVGGDDGSCNLASVEYYNPVTDKWTLLPTNMSTGRSYAGVAVIHKSL

SEQ ID NO: 193073 - protein, 301 aa, Artificial Sequence
  derived and/or modified sequence
MEGESVKLSSQTLIQAGDDEKNQRTITVNPAHMGKAFKVMNELRSKQLLCDVMIVAEDVEIEAHRVVLAACSPYFCAMFTGDMSESKAKKIEIKDVDGQTLSKLIDYIYTAEIEVTEENVQVLLPAASLLQLMDVRQNCCDFLQSQLHPTNCLGIRAFADVHTCTDLLQQANAYAEQHFPEVMLGEEFLSLSLDQVCSLISSDKLTVSSEEKVFEAVISWINYEKETRLEHMAKLMEHVRLPLLPRDYLVQTVEEEALIKNNNTCKDFLIEAMKYHLLPLDQRLLIKNPRTKPRTPVSLPK

SEQ ID NO: 193074 - protein, 505 aa, Artificial Sequence
  derived and/or modified sequence
MSESKAKKIEIKDVDGQTLSKLIDYIYTAEIEVTEENVQVLLPAASLLQLMDVRQNCCDFLQSQLHPTNCLGIRAFADVHTCTDLLQQANAYAEQHFPEVMLGEEFLSLSLDQVCSLISSDKLTVSSEEKVFEAVISWINYEKETRLEHMAKLMEHVRLPLLPRDYLVQTVEEEALIKNNNTCKDFLIEAMKYHLLPLDQRLLIKNPRTKPRTPVSLPKVMIVVGGQAPKAIRSVECYDFEEDRWDQIAELPSRRCRAGVVFMAGHVYAVGGFNGSLRVRTVDVYDGVKDQWTSIASMQERRSTLGAAVLNDLLYAVGGFDGSTGLASVEAYSYKTNEWFFVAPMNTRRSSVGVGVVEGKLYAVGGYDGASRQCLSTVEQYNPATNEWIYVADMSTRRSGAGVGVLSGQLYATGGHDGPLVRKSVEVYDPGTNTWKQVADMNMCRRNAGVCAVNGLLYVVGGDDGSCNLASVEYYNPVTDKWTLLPTNMSTGRSYAGVAVIHKSL

SEQ ID NO: 193075 - protein, 200 aa, Artificial Sequence
  derived and/or modified sequence
MSRCCSRQPACCSSWMFGRTAVTSCSLSCIPPIAWASVHLQMYTPALTFCSRPMPTQHFPEVMLGEEFLSLSLDQVCSLISSDKLTVSSEEKVFEAVISWINYEKETRLEHMAKLMEHVRLPLLPRDYLVQTVEEEALIKNNNTCKDFLIEAMKYHLLPLDQRLLIKNPRTKPRTPVSLPKGLECLADSCTPQVGMMGLW

SEQ ID NO: 193076 - protein, 555 aa, Artificial Sequence
  derived and/or modified sequence
MGKAFKVMNELRSKQLLCDVMIVAEDVEIEAHRVVLAACSPYFCAMFTGDMSESKAKKIEIKDVDGQTLSKLIDYIYTAEIEVTEENVQVLLPAASLLQLMDVRQNCCDFLQSQLHPTNCLGIRAFADVHTCTDLLQQANAYAEQHFPEVMLGEEFLSLSLDQVCSLISSDKLTVSSEEKVFEAVISWINYEKETRLEHMAKLMEHVRLPLLPRDYLVQTVEEEALIKNNNTCKDFLIEAMKYHLLPLDQRLLIKNPRTKPRTPVSLPKVMIVVGGQAPKAIRSVECYDFEEDRWDQIAELPSRRCRAGVVFMAGHVYAVGGFNGSLRVRTVDVYDGVKDQWTSIASMQERRSTLGAAVLNDLLYAVGGFDGSTGLASVEAYSYKTNEWFFVAPMNTRRSSVGVGVVEGKLYAVGGYDGASRQCLSTVEQYNPATNEWIYVADMSTRRSGAGVGVLSGQLYATGGHDGPLVRKSVEVYDPGTNTWKQVADMNMCRRNAGVCAVNGLLYVVGGDDGSCNLASVEYYNPVTDKWTLLPTNMSTGRSYAGVAVIHKSL

SEQ ID NO: 193077 - DNA, 6806 bp, Artificial Sequence
  derived and/or modified sequence
gattctttgcagcctagacagaggaggcaggagccccaggggcgggctaatcgcctgggctggggatgcctgggcagatgcagaggaagctggaaaggtggcagtgcacctgggtcgctggagctgccgccgttcctaggagaccaaggagcagcaagcctgcgggggagggggagcaagtgggttgctgcttttagcagctgaaagggctgcagggagctctgggtaagacattttctgttgctgctgcttttgcggtagaagctgctgcgagtaagtcagaggaaggaggattgagaagggaggaggcttcacttgcagccatgctgaatcactgttgctgatcagatttcccactggtctgctgggagaatcaagaacagaactaggatccccgagtgcatacacagttcagcagctaccaccctggctgggcctcacacaatggagggtgaaagtgtcaagctgagctcccagactctgatacaggctggggatgatgagaagaaccagaggacgatcactgtcaaccctgcccacatggggaaagcattcaaggttatgaatgaactgcggagtaaacagctgttgtgtgacgtgatgattgtggcagaagatgtcgagatagaagcccaccgtgtggtcctggcagcctgcagcccctacttctgtgcgatgttcacaggtgacatgtctgagagtaaagccaaaaagatagaaatcaaggacgtggatgggcagacgctgagtaagctgattgactacatctatactgctgaaatcgaggtgactgaagagaatgtccaggtgctgctcccggcagccagcttgctgcagctcatggatgttcggcagaactgctgtgacttcctgcagtctcagttgcatcccaccaattgcctgggcatccgtgcatttgcagatgtacacacctgcactgaccttctgcagcaggccaatgcctacgcagagcagcactttccagaggtgatgctaggagaagaatttcttagcctgagtctggaccaggtgtgcagcttgatatccagcgacaagctgaccgtttcttcagaagagaaggtgtttgaagctgtgatctcatggatcaattatgagaaagaaacccgtttagagcacatggcaaagctgatggaacatgtccgacttcctctcttacctagggactacctagtccaaacggttgaagaagaagctttgataaagaataacaacacctgtaaagacttcctcattgaggccatgaaataccatctcctccctctggatcagagactattgattaagaacccaaggaccaagcccaggactccagtcagccttcccaaggtcatgattgtggttggcggccaggcacccaaggcaatccgcagtgtggagtgctatgatttcgaggaggaccggtgggatcagattgctgagcttccttccagaagatgcagagcaggtgtggtgttcatggctggccacgtgtatgccgtgggagggtttaatggctcactgcgggtgcggacagtggatgtgtatgacggcgtgaaggaccagtggacgtccattgccagcatgcaggagcgccggagcacactgggcgcagcggtgctcaatgacttgctctacgcagtgggaggctttgatggcagtactggcctagcatcggtggaagcctacagctacaagaccaacgagtggttctttgtggccccgatgaacacgcggcggagcagtgtgggtgtgggcgttgtggaggggaagctatatgctgttgggggttatgatggagcttcccgccagtgtctgagcactgtggagcagtacaacccagcgaccaatgaatggatatacgtggcggacatgagcacccgccgcagtggcgcaggggttggagtgcttagcggacagctgtacgccacaggtgggcatgatgggcctttggtgaggaagagcgttgaggtttacgatcctggaacaaatacctggaagcaagtggcagacatgaacatgtgccggcgcaacgcaggggtctgtgcagtaaatgggctcctgtatgtggttggaggggatgatggatcctgcaacttggcttcggtggagtactacaatcctgtcactgacaaatggacgctgcttccaacgaacatgagcacggggcggagctatgcaggtgttgccgtgattcacaagtccttgtgacccaaactcctactgccaggaggtggaggaaggagcaggtgctgcctgtgactctgaacagcaggaccttggtgactggattcaacttgcttgggagggtctgtgctgctgtgagaaccgctctcctctgacttggcagactggtgttgttcatcgcagtgtggacaccattacccacccccgttcccctgaggtgctctggcctatgccctgagcaaggggggtcttgacatccccaggcagcacctttgggctttgttttggtgtttctacagggacaatacagaccctggagtgtgtgtgtgtgtgtgtgtgtgtgtagaccatggtgtttctctatgtttctctaagttggggggtgagcgtgtgtgacagtctactggatttctttactactgatcctttcgctgtgttaaaaatcaagtcacagagacctctcttctggatttgtcccatggggaccctgagactactaaagctgctttcttctgaaggtccagttggacagtctgggaatgtccagaaataaccagtgagaggggcagttctctggccacacccacttatgtactttaactactgtgactttgtctgcagaagagctggaaaattctcgaagctgcaccgtgtcctctgtgtgctagaataagggacaaatgggttccctgtgcttctcagctcactgtttttccttgagttctcctacaggaagcagatgagaactgcccagtcttcaggtttaggccattggtctttgatgtcatagattccaggcctgggaggtgttatgtctcttcagctgggaaaactagctcttcagagaagcctcgggtaacactgaaaaacaaaacaaaacaaaacaaaaacaggaaaaaaacaaaaaaccaaagtggtaaggattcagttcctgcctataatggtctcagagagggtcctacttttaggttttcccaggacaggacagtccccatttatacttattatcccagtttaattattcacagcaccccattttactcagaagtgttctggtctggaggataaataagaggtcaccctcctccagacccaaagatagatttgtgcctgtgttggatggggtcgtgtgtgattcagatggacattggatggcttcaaaggaatataccactagagctggcccttggcactttgtgacagtggtcaagtctgtctaatgtccttgtcttctttttcttgtgctttccccctattccagggtgtgcaccctctccccaacccccaagaaccccactactgctttccctgtgaggtaggagatatcagtgggccttggatttgaggcttcctaagatgtgcttgcattttaaaaagggagcttggtgagagctttgctaattcacaggtaaaaattattaacaatagaacttcaagcatcttgaggagcgggcatttgagggggcatggagtaatttgtatttaaaaaaccttaaagttgtgctgttcctaaactagcaaattgctcatgctgaaatttctggcataagcaggggaagtcttgtgtctggagaatagtctcataccttgcagtctgggacaccctccctactttgagaatccacctacaggaagccaaggaactttataaatcctgatgttggacttctgatacgactgggctacttccaagcaggtgctgcaggagattggcatcccccagcccctgcagttagaaaccccgaagtcttcccagccagtgagccactttgtgtatttactgtatatttattgtgccctaaatgtgcaactctcctaaagacaaaacttctctttctgatgttaagcacatgttacttcaacaagatgcttggagaacaacaaggtacccagaatttttagaagccttcagaagaggctaaaatatccagctttgggggacctggaagaaatgtctccaaaggaagcaaggcatgttttagttgagtgctctggtctcactatgaagtggggatgactgtggcttcataactctacctggctgtgggttggaagctgatggaatgagaaatgtcctttctccttctctgaggaaattttgagacttgtttcggtgtgtctgtgtgatggggatgaggctggggttgggatctgatgtatgccattcacagaagctctcaatttcagatgataggtgaattccctgcccctcccccaccactgagaagctagactttcatgcgggagaggctacttttatgtgtcgtcttccggggaagggtccctccactgaaagctagccagtcatgttttctgtttttggatttttgcaattggtttcacctcatgtctccctccctacaaagcactgcctctactgggcgtgctgccaaggccatgtgcactccatcctcatgtatcctttttcacggggaccagaacactggtacgtcatcaccaaagccaatctgctctagctgcccacagatgccaccaaaacctgctatctcttcatcaccaggtacgattctctttccacagtggacacagcaggctattttctagtttgtgctggtcacgtggtagatgaagcctcttactgccccacttagggtggccacggctgcttgtgaatgcagctttgccagtggcatatctgtcatctgattgcggtggtgaaatggaattgaggcccaaggttagaagcagccgagacgccacttggatactgatttgaacaatgtagaagtcagattctgaattccaaagttatttctcataagtacccaatggcatctctccatctacaaagttgcagtattatgcaaataaaactgacctcattttctgctatgcaataagaatacttaattctagttcccgacaagccagttgcaatatcccctaagatgctttttgagctgtcttactttgatatctgttgtgtaatgtttgtatatttctgagccagatcctttcaaagattgcctttttataaaattgaagctatagcttttaggctaaaattttaacgtagatatttttataagatatttttttcaagagtttgaatcgctttttattgtccatgataatgaaatgttgtgttctttgcatcattcactctcaaacgtagttcatgcctgtagctctcttccttttgtttctcacccttcagaaacatatttttcagtagctccaggtagatgagccttttttttttttttaaaaataccatattcaagggagtctgctgaattttaaaacgcagtcactggtgtttcttgaattgctagggactgatgttatgttcgactcagcacttgcccgtctgtattgattgtgtctttttttttttttttggagtctgctttctgtgggggtgaggccgggctgtctcgtggtggctcccactgacgggcactgagcctggtaccctgtggcatggagaagcctcagggaaaggcctgcccccccagcacatactcccatagtgtcctaggtccagccgaccattccttattctcttctatctccttgttgatctgaagcttccaatagcttgaggcctttgctgctggatgatgccctttttgggagcatcttgtctctaacctttaaaagaggggtcaatcctcatgatccctgtgtgttaagcatatgctttgcaggtgctcacactacacttacaacttgcttcttgagctatgtctctactccaggctctgttttgtgtatttatctgccatttgcatcatggtttttaaaatttattattattattattattgttgggacaggtgccatttaaattgcctccatgctccccatttgcacctagctggatcaagttgggaggctgagcaaactcatattccagttagttggagtttttaaaggctctgtttgcctggagaagcaaggaggttagaatgtaatttttttaagcgtttgcactatttagagtcctaagcccctcatgttcagctgtgctgtgtttctactgaccaagcaggagagccagcagcacttccagcatttgggaatggaagagatttcttctgtagtggataattacagcctcatagcccctgtgcagccttcgtcatgggactcagtgactcatggatatagcatcagccatggcaggaatgcacaggactgtggcatttgcagcatcaaatcaccctagtgccatgtttggttatgagattgtaaattattcgctcccccatcctcccctcccctcattttcagtggcaatagaggacccttgttgtacttcttgtttaatttgcatattatgtgtaaaatgctttcgttgaaagaaaactgaagacactgaatgtgtatgtctgtgtgggtgctctgtccctgtggttgtcatagccagtcagacttgatcactgacaccccgtacaacatattgcataggtaagatcctcgatctggtgttctctgcgtggctgttagggactgtatatcttgtaaaagaacacttgtcacatgcttgatcagttacagcaatagctgaagaaacatttcctcaaatgtattattttaacaggaatcatgttctaatttcccatcctttaattttaataaaagctgaactgtgtgaa

SEQ ID NO: 193078 - DNA, 1764 bp, Artificial Sequence
  derived and/or modified sequence
atggagggcgaatctgtgaaactgagtagccagacactgattcaggcaggcgacgacgaaaaaaaccagcgaaccattaccgtcaacccggcacacatgggtaaagcattcaaggtcatgaatgagcttcggtcaaagcaactgctgtgcgatgtgatgatcgttgctgaggatgtggagatcgaggctcacagagtggtgttggcagcttgttccccctacttctgtgccatgttcacaggcgatatgagtgagagtaaggccaagaagattgaaattaaggacgtcgacggccagacacttagtaaattgatcgattacatctataccgccgagattgaggttacagaggagaacgtacaggtcctcctgcctgcagcgtcattgctgcaactcatggacgtgaggcaaaattgctgcgattttttacaatctcagttgcatcccaccaattgcctcggaattcgcgcttttgcagacgtgcacacctgtaccgacctattacagcaagcaaacgcttacgctgagcaacacttcccagaggtcatgctgggggaagagttcctcagtttgagcctggaccaggtttgcagtctcatttcctccgacaaactgacagttagcagcgaggagaaagtcttcgaagctgtgatttcttggattaattatgaaaaggagacgcggctagaacacatggctaagttaatggaacacgtacgcctgccgctgttgccccgggactatctggtgcagactgtggaggaggaggcccttatcaagaataacaatacgtgtaaggatttcttaattgaggccatgaaatatcatttgctacctctggatcagaggctccttatcaaaaaccctcggaccaaacctcgcacccctgtatctcttcctaaagttatgatcgttgtgggaggtcaggcgcctaaggctatccgtagcgtggaatgctacgattttgaggaagacagatgggaccaaattgcagaattgccttcccgaaggtgtcgagcgggagtcgtatttatggccggacacgtatacgcagtaggcggctttaatggctcattacgcgtgaggactgttgacgtgtatgacggggtgaaggaccagtggacatccattgcatccatgcaagagcgccgcagcaccctcggggcagctgttctcaatgacctgctgtacgccgtaggcggtttcgacggttccacggggctcgcctcagtggaagcctactcttataagaccaacgaatggttttttgtggcgcctatgaacaccagaagaagctcagtgggcgtcggtgtcgtggagggaaaactgtacgcagttgggggttacgacggtgcctcgcggcagtgcctgtccactgtggaacagtacaatccagctactaatgagtggatatacgtggccgacatgtctacacgcagatcaggggctggtgtgggtgtcctctcagggcagctgtatgccaccggggggcacgatggacctctcgtcaggaagtccgtggaagtatacgaccccggcaccaatacttggaagcaggttgctgacatgaacatgtgtcgccgtaacgccggcgtctgtgctgtgaatggcctgttgtacgtggtcgggggagacgatggctcttgtaacttggcctcagttgagtactataatcccgtgaccgacaagtggactctcctgcctaccaatatgagcactggcagaagctacgccggagttgcagtcatccacaagagcctgtag

SEQ ID NO: 193079 - DNA, 906 bp, Artificial Sequence
  derived and/or modified sequence
atggagggagaatcagttaagttatcatcccagacactcattcaggccggagatgatgaaaagaatcagaggaccattaccgtaaaccctgcccacatgggtaaagccttcaaagtaatgaacgaattgaggtcgaagcaactgctgtgcgacgtaatgattgtggccgaggatgtggagatcgaggcccaccgggtggttctagccgcttgctccccctatttttgtgccatgttcaccggggatatgtccgagagcaaggcaaagaagattgagataaaggatgtagacggtcagaccttatctaagctgattgattacatttacactgccgaaattgaagttacggaagaaaacgtgcaggtcctcctgccagcagcttcattgcttcagctgatggacgttaggcagaattgctgcgacttccttcaatctcagctgcacccaactaactgccttggtattcgtgcatttgcagatgtccacacatgtaccgatttgttacaacaagctaacgcatatgccgaacagcacttccctgaagtgatgttaggcgaagagttcctgagtctgagtttagaccaggtgtgctccctgatctcatcggacaagctgaccgtttcttctgaggagaaggtttttgaagccgtgatttcttggatcaactacgagaaagagactaggcttgagcatatggccaagctgatggaacatgtacggttaccactgctgcctcgggactatctcgtgcaaactgtcgaggaggaggcattgataaaaaataataacacctgcaaggacttccttattgaagcaatgaagtaccaccttctgcccctggaccagagactgctgatcaagaacccaagaaccaaaccacgcactccagtctctctacctaaatag

SEQ ID NO: 193080 - DNA, 1665 bp, Artificial Sequence
  derived and/or modified sequence
attctttgcagcctagacagaggaggcaggagccccaggggcgggctaatcgcctgggctggggatgcctgggcagatgcagaggaagctggaaaggtggcagtgcacctgggtcgctggagctgccgccgttcctaggagaccaaggagcagcaagcctgcgggggagggggagcaagtgggttgctgcttttagcagctgaaagggctgcagggagctctgggtaagacattttctgttgctgctgcttttgcggtagaagctgctgcgagtaagtcagaggaaggaggattgagaagggaggaggcttcacttgcagccatgctgaatcactgttgctgatcagatttcccactggtctgctgggagaatcaagaacagaactaggatccccgagtgcatacacagttcagcagctaccaccctggctgggcctcacacaatggagggtgaaagtgtcaagctgagctcccagactctgatacaggctggggatgatgagaagaaccagaggacgatcactgtcaaccctgcccacatggggaaagcattcaaggttatgaatgaactgcggagtaaacagctgttgtgtgacgtgatgattgtggcagaagatgtcgagatagaagcccaccgtgtggtcctggcagcctgcagcccctacttctgtgcgatgttcacaggtgacatgtctgagagtaaagccaaaaagatagaaatcaaggacgtggatgggcagacgctgagtaagctgattgactacatctatactgctgaaatcgaggtgactgaagagaatgtccaggtgctgctcccggcagccagcttgctgcagctcatggatgttcggcagaactgctgtgacttcctgcagtctcagttgcatcccaccaattgcctgggcatccgtgcatttgcagatgtacacacctgcactgaccttctgcagcaggccaatgcctacgcagagcagcactttccagaggtgatgctaggagaagaatttcttagcctgagtctggaccaggtgtgcagcttgatatccagcgacaagctgaccgtttcttcagaagagaaggtgtttgaagctgtgatctcatggatcaattatgagaaagaaacccgtttagagcacatggcaaagctgatggaacatgtccgacttcctctcttacctagggactacctagtccaaacggttgaagaagaagctttgataaagaataacaacacctgtaaagacttcctcattgaggccatgaaataccatctcctccctctggatcagagactattgattaagaacccaaggaccaagcccaggactccagtcagccttcccaagtagagacggggttttaccgtgttagccaggatggtctcaatctcctgacctcgtgatccgcctgcctcagcctcccaaagtgctgggattacagacgtgagccaccgcgcccggccactaattaattttttaattgacaaaagttatatgcatttatcatgtacaacatgaggttttgaaatatagatacattgtggaatggctaaatttagctaattaacatatgtattacatcatatacttatttttttgtggtaagaacacttaaaatccattctcttaactattttcaagaatataatacattgttattaactat

SEQ ID NO: 193081 - DNA, 1559 bp, Artificial Sequence
  derived and/or modified sequence
aaggcccattggctttgcctaaaccttggtaaacagatactaaaaatctccagtaacattgcaaaattttgttctaattatcaggttcagcttcaaaacgtgtaaaatgcattgtgtactgagagtaagaggctgactctcgttagatccatttctatcagtgtgtttaaagccaaaaggaaagtaaaatacacatggctttcttctgacttgagttgtgtgattatggtcttttactcaagcttaaatgtttttatttttttgtcttccgagttcatgttgcccaaatgtcctgaggtggttccaaataccaatcccacacttcttgaccattgtcctgtggacaataacttggaataaatgtgaaactgaagtctgagtgcccatcagagagtgtcccaatccaaccagtctataagaagatctggggtgacatgtctgagagtaaagccaaaaagatagaaatcaaggacgtggatgggcagacgctgagtaagctgattgactacatctatactgctgaaatcgaggtgactgaagagaatgtccaggtgctgctcccggcagccagcttgctgcagctcatggatgttcggcagaactgctgtgacttcctgcagtctcagttgcatcccaccaattgcctgggcatccgtgcatttgcagatgtacacacctgcactgaccttctgcagcaggccaatgcctacgcagcactttccagaggtgatgctaggagaagaatttcttagcctgagtctggaccaggtgtgcagcttgatatccagcgacaagctgaccgtttcttcagaagagaaggtgtttgaagctgtgatctcatggatcaattatgagaaagaaacccgtttagagcacatggcaaagctgatggaacatgtccgacttcctctcttacctagggactacctagtccaaacggttgaagaagaagctttgataaagaataacaacacctgtaaagacttcctcattgaggccatgaaataccatctcctccctctggatcagagactattgattaagaacccaaggaccaagcccaggactccagtcagccttcccaaggggttggagtgcttagcggacagctgtacgccacaggtgggcatgatgggcctttggtgaggaagagcgttgaggtttacgatcctggaacaaatacctggaagcaagtggcagacatgaacatgtgccggcgcaacgcaggggtctgtgcagtaaatgggctcctgtatgtggttggaggggatgatggatcctgcaacttggcttcggtggagtactacaatcctgtcactgacaaatggacgctgcttccaacgaacatgagcacggggcggagctatgcaggtgttgccgtgattcacaagtccttgtgacccaaactcctactgccaggaggtggaggaaggagcaggtgctgcctgtgactctgaacagcaggaccttggtgactggattcaacttgcttgggagggtctgtgctgctgtgagaaccgctctcctctgacttggcagactggtgttgttcatcgcag

SEQ ID NO: 193082 - DNA, 6981 bp, Artificial Sequence
  derived and/or modified sequence
ctcttgtgctctcctctagttttactgaactgccagtactttgaacacactttgtgctttttctcctccaggtctttgtgcatactgtttcctctgcctggaatactcttctttctctttacctgactcgtttctgctcttacttcaagtctcagattctaggaagctttccatcaacctgctatcactgggacgagttggccatcccctgtgcttctgtagctcctatgaaatcataatagttgaaatgtgatgtttaaatgtttacttggcattctcctctactgaactctaagctttgtgagggtagtgatggtggctttgcctattgttttgtttcccttaaatctaaacgcagtgcctggcacatagtagcctccagtaaatgcttgtttaatgaacaaacaaacctgtgaagtgagtgatagagtgcttagtccccttcagttttcaggatggagagatggagaataaggacctcacacaaaatcacacagtacttggtggaagaagctgagctatgacctgccttccttcagaggaatgcactttgctttggaagatatgaagaaattcccagtacattgtctttcctattgggtctgtgtgagaacaggctgatagatgcctctgtgtcaagctgagctcccagactctgatacaggctggggatgatgagaagaaccagaggacgatcactgtcaaccctgcccacatggggaaagcattcaaggttatgaatgaactgcggagtaaacagctgttgtgtgacgtgatgattgtggcagaagatgtcgagatagaagcccaccgtgtggtcctggcagcctgcagcccctacttctgtgcgatgttcacaggtgacatgtctgagagtaaagccaaaaagatagaaatcaaggacgtggatgggcagacgctgagtaagctgattgactacatctatactgctgaaatcgaggtgactgaagagaatgtccaggtgctgctcccggcagccagcttgctgcagctcatggatgttcggcagaactgctgtgacttcctgcagtctcagttgcatcccaccaattgcctgggcatccgtgcatttgcagatgtacacacctgcactgaccttctgcagcaggccaatgcctacgcagagcagcactttccagaggtgatgctaggagaagaatttcttagcctgagtctggaccaggtgtgcagcttgatatccagcgacaagctgaccgtttcttcagaagagaaggtgtttgaagctgtgatctcatggatcaattatgagaaagaaacccgtttagagcacatggcaaagctgatggaacatgtccgacttcctctcttacctagggactacctagtccaaacggttgaagaagaagctttgataaagaataacaacacctgtaaagacttcctcattgaggccatgaaataccatctcctccctctggatcagagactattgattaagaacccaaggaccaagcccaggactccagtcagccttcccaaggtcatgattgtggttggcggccaggcacccaaggcaatccgcagtgtggagtgctatgatttcgaggaggaccggtgggatcagattgctgagcttccttccagaagatgcagagcaggtgtggtgttcatggctggccacgtgtatgccgtgggagggtttaatggctcactgcgggtgcggacagtggatgtgtatgacggcgtgaaggaccagtggacgtccattgccagcatgcaggagcgccggagcacactgggcgcagcggtgctcaatgacttgctctacgcagtgggaggctttgatggcagtactggcctagcatcggtggaagcctacagctacaagaccaacgagtggttctttgtggccccgatgaacacgcggcggagcagtgtgggtgtgggcgttgtggaggggaagctatatgctgttgggggttatgatggagcttcccgccagtgtctgagcactgtggagcagtacaacccagcgaccaatgaatggatatacgtggcggacatgagcacccgccgcagtggcgcaggggttggagtgcttagcggacagctgtacgccacaggtgggcatgatgggcctttggtgaggaagagcgttgaggtttacgatcctggaacaaatacctggaagcaagtggcagacatgaacatgtgccggcgcaacgcaggggtctgtgcagtaaatgggctcctgtatgtggttggaggggatgatggatcctgcaacttggcttcggtggagtactacaatcctgtcactgacaaatggacgctgcttccaacgaacatgagcacggggcggagctatgcaggtgttgccgtgattcacaagtccttgtgacccaaactcctactgccaggaggtggaggaaggagcaggtgctgcctgtgactctgaacagcaggaccttggtgactggattcaacttgcttgggagggtctgtgctgctgtgagaaccgctctcctctgacttggcagactggtgttgttcatcgcagtgtggacaccattacccacccccgttcccctgaggtgctctggcctatgccctgagcaaggggggtcttgacatccccaggcagcacctttgggctttgttttggtgtttctacagggacaatacagaccctggagtgtgtgtgtgtgtgtgtgtgtgtgtagaccatggtgtttctctatgtttctctaagttggggggtgagcgtgtgtgacagtctactggatttctttactactgatcctttcgctgtgttaaaaatcaagtcacagagacctctcttctggatttgtcccatggggaccctgagactactaaagctgctttcttctgaaggtccagttggacagtctgggaatgtccagaaataaccagtgagaggggcagttctctggccacacccacttatgtactttaactactgtgactttgtctgcagaagagctggaaaattctcgaagctgcaccgtgtcctctgtgtgctagaataagggacaaatgggttccctgtgcttctcagctcactgtttttccttgagttctcctacaggaagcagatgagaactgcccagtcttcaggtttaggccattggtctttgatgtcatagattccaggcctgggaggtgttatgtctcttcagctgggaaaactagctcttcagagaagcctcgggtaacactgaaaaacaaaacaaaacaaaacaaaaacaggaaaaaaacaaaaaaccaaagtggtaaggattcagttcctgcctataatggtctcagagagggtcctacttttaggttttcccaggacaggacagtccccatttatacttattatcccagtttaattattcacagcaccccattttactcagaagtgttctggtctggaggataaataagaggtcaccctcctccagacccaaagatagatttgtgcctgtgttggatggggtcgtgtgtgattcagatggacattggatggcttcaaaggaatataccactagagctggcccttggcactttgtgacagtggtcaagtctgtctaatgtccttgtcttctttttcttgtgctttccccctattccagggtgtgcaccctctccccaacccccaagaaccccactactgctttccctgtgaggtaggagatatcagtgggccttggatttgaggcttcctaagatgtgcttgcattttaaaaagggagcttggtgagagctttgctaattcacaggtaaaaattattaacaatagaacttcaagcatcttgaggagcgggcatttgagggggcatggagtaatttgtatttaaaaaaccttaaagttgtgctgttcctaaactagcaaattgctcatgctgaaatttctggcataagcaggggaagtcttgtgtctggagaatagtctcataccttgcagtctgggacaccctccctactttgagaatccacctacaggaagccaaggaactttataaatcctgatgttggacttctgatacgactgggctacttccaagcaggtgctgcaggagattggcatcccccagcccctgcagttagaaaccccgaagtcttcccagccagtgagccactttgtgtatttactgtatatttattgtgccctaaatgtgcaactctcctaaagacaaaacttctctttctgatgttaagcacatgttacttcaacaagatgcttggagaacaacaaggtacccagaatttttagaagccttcagaagaggctaaaatatccagctttgggggacctggaagaaatgtctccaaaggaagcaaggcatgttttagttgagtgctctggtctcactatgaagtggggatgactgtggcttcataactctacctggctgtgggttggaagctgatggaatgagaaatgtcctttctccttctctgaggaaattttgagacttgtttcggtgtgtctgtgtgatggggatgaggctggggttgggatctgatgtatgccattcacagaagctctcaatttcagatgataggtgaattccctgcccctcccccaccactgagaagctagactttcatgcgggagaggctacttttatgtgtcgtcttccggggaagggtccctccactgaaagctagccagtcatgttttctgtttttggatttttgcaattggtttcacctcatgtctccctccctacaaagcactgcctctactgggcgtgctgccaaggccatgtgcactccatcctcatgtatcctttttcacggggaccagaacactggtacgtcatcaccaaagccaatctgctctagctgcccacagatgccaccaaaacctgctatctcttcatcaccaggtacgattctctttccacagtggacacagcaggctattttctagtttgtgctggtcacgtggtagatgaagcctcttactgccccacttagggtggccacggctgcttgtgaatgcagctttgccagtggcatatctgtcatctgattgcggtggtgaaatggaattgaggcccaaggttagaagcagccgagacgccacttggatactgatttgaacaatgtagaagtcagattctgaattccaaagttatttctcataagtacccaatggcatctctccatctacaaagttgcagtattatgcaaataaaactgacctcattttctgctatgcaataagaatacttaattctagttcccgacaagccagttgcaatatcccctaagatgctttttgagctgtcttactttgatatctgttgtgtaatgtttgtatatttctgagccagatcctttcaaagattgcctttttataaaattgaagctatagcttttaggctaaaattttaacgtagatatttttataagatatttttttcaagagtttgaatcgctttttattgtccatgataatgaaatgttgtgttctttgcatcattcactctcaaacgtagttcatgcctgtagctctcttccttttgtttctcacccttcagaaacatatttttcagtagctccaggtagatgagccttttttttttttttaaaaataccatattcaagggagtctgctgaattttaaaacgcagtcactggtgtttcttgaattgctagggactgatgttatgttcgactcagcacttgcccgtctgtattgattgtgtctttttttttttttttggagtctgctttctgtgggggtgaggccgggctgtctcgtggtggctcccactgacgggcactgagcctggtaccctgtggcatggagaagcctcagggaaaggcctgcccccccagcacatactcccatagtgtcctaggtccagccgaccattccttattctcttctatctccttgttgatctgaagcttccaatagcttgaggcctttgctgctggatgatgccctttttgggagcatcttgtctctaacctttaaaagaggggtcaatcctcatgatccctgtgtgttaagcatatgctttgcaggtgctcacactacacttacaacttgcttcttgagctatgtctctactccaggctctgttttgtgtatttatctgccatttgcatcatggtttttaaaatttattattattattattattgttgggacaggtgccatttaaattgcctccatgctccccatttgcacctagctggatcaagttgggaggctgagcaaactcatattccagttagttggagtttttaaaggctctgtttgcctggagaagcaaggaggttagaatgtaatttttttaagcgtttgcactatttagagtcctaagcccctcatgttcagctgtgctgtgtttctactgaccaagcaggagagccagcagcacttccagcatttgggaatggaagagatttcttctgtagtggataattacagcctcatagcccctgtgcagccttcgtcatgggactcagtgactcatggatatagcatcagccatggcaggaatgcacaggactgtggcatttgcagcatcaaatcaccctagtgccatgtttggttatgagattgtaaattattcgctcccccatcctcccctcccctcattttcagtggcaatagaggacccttgttgtacttcttgtttaatttgcatattatgtgtaaaatgctttcgttgaaagaaaactgaagacactgaatgtgtatgtctgtgtgggtgctctgtccctgtggttgtcatagccagtcagacttgatcactgacaccccgtacaacatattgcataggtaagatcctcgatctggtgttctctgcgtggctgttagggactgtatatcttgtaaaagaacacttgtcacatgcttgatcagttacagcaatagctgaagaaacatttcctcaaatgtattattttaacaggaatcatgttctaatttcccatcctttaattttaataaaagctgaactgtgtgaa

SEQ ID NO: 193083 - DNA, 1764 bp, Artificial Sequence
  derived and/or modified sequence
atggagggggagagcgtgaagctgagcagccagaccctcatccaggccggagatgatgagaagaaccagaggaccatcaccgtgaacccagcccacatgggcaaggccttcaaggtgatgaatgagctgcggagcaagcagctgctgtgtgatgtgatgattgtggctgaagatgtggagattgaggcccaccgggtggtgctggccgcctgcagcccctacttctgtgccatgttcaccggggacatgtctgagagcaaggccaagaagattgagatcaaggatgtggatggccagaccctgagcaagctgattgactacatctacacagctgagattgaggtgacagaggagaatgtgcaggtgctgctgcctgctgccagcctgctgcagctgatggatgtgcggcagaactgctgtgacttcctgcagagccagctgcaccccaccaactgcctgggcatccgggcctttgctgatgtgcacacctgcacagacctgctgcagcaggccaatgcctatgcagagcagcacttccctgaggtgatgctgggggaggagttcctgagcctgagcctggaccaggtgtgcagcctcatcagcagtgacaagctgactgtgtcctctgaggagaaggtgtttgaggccgtcatctcctggatcaactatgagaaggagacccggctggagcacatggccaagctgatggagcacgtgcggctgcccctgctgccccgggactacctggtgcagacagtggaggaggaggccctgatcaagaacaacaacacctgcaaggacttcctgattgaggccatgaagtaccacctgctgcccctggaccagaggctgctgatcaagaaccccaggaccaagcccaggacccctgtgtccctgcccaaggtgatgattgtggtgggcggccaggcccccaaggccatccgctctgtggagtgctatgactttgaggaggaccgctgggaccagattgctgagctgcccagccgccgctgccgggccggcgtggtgttcatggccggccacgtgtatgctgtgggcggcttcaacggcagcctgcgggtgaggacagtggatgtgtatgatggagtgaaggaccagtggaccagcatcgcctccatgcaggagaggaggagcaccctgggcgctgctgtgctgaatgacctgctgtatgctgtgggcggctttgatggcagcacaggcctggcctctgtggaggcctacagctacaagaccaatgagtggttctttgtggcccccatgaacacccggcgcagctctgtgggcgtgggcgtggtggagggcaagctgtatgctgtgggcggctatgatggagccagccggcagtgcctgagcacagtggagcagtacaacccagccaccaatgagtggatctacgtggccgacatgagcaccaggagaagtggagctggggtgggcgtgctgagcggccagctgtatgccactggaggccatgatggccccctggtgaggaagtctgtggaggtgtatgaccccggcaccaacacctggaagcaggtggccgacatgaacatgtgcagaagaaatgctggggtgtgtgctgtgaatggcctgctgtatgtggtgggcggagatgatggcagctgcaacctggcctctgtggagtactacaaccctgtgacagacaagtggaccctgctgcccaccaacatgagcacaggccgctcctatgctggggtggccgtcatccacaagagcctgtag

SEQ ID NO: 193084 - DNA, 906 bp, Artificial Sequence
  derived and/or modified sequence
atggagggggagagcgtgaagctgagcagccagaccctcatccaggccggagatgatgagaagaaccagaggaccatcaccgtgaacccagcccacatgggcaaggccttcaaggtgatgaatgagctgcggagcaagcagctgctgtgtgatgtgatgattgtggctgaagatgtggagattgaggcccaccgggtggtgctggccgcctgcagcccctacttctgtgccatgttcaccggggacatgtctgagagcaaggccaagaagattgagatcaaggatgtggatggccagaccctgagcaagctgattgactacatctacacagctgagattgaggtgacagaggagaatgtgcaggtgctgctgcctgctgccagcctgctgcagctgatggatgtgcggcagaactgctgtgacttcctgcagagccagctgcaccccaccaactgcctgggcatccgggcctttgctgatgtgcacacctgcacagacctgctgcagcaggccaatgcctatgcagagcagcacttccctgaggtgatgctgggggaggagttcctgagcctgagcctggaccaggtgtgcagcctcatcagcagtgacaagctgactgtgtcctctgaggagaaggtgtttgaggccgtcatctcctggatcaactatgagaaggagacccggctggagcacatggccaagctgatggagcacgtgcggctgcccctgctgccccgggactacctggtgcagacagtggaggaggaggccctgatcaagaacaacaacacctgcaaggacttcctgattgaggccatgaagtaccacctgctgcccctggaccagaggctgctgatcaagaaccccaggaccaagcccaggacccctgtgtccctgcccaagtag

SEQ ID NO: 193085 - DNA, 1764 bp, Artificial Sequence
  derived and/or modified sequence
atggagggcgagagcgtgaagctgagcagccagaccctgatccaggccggggatgacgaaaagaaccaaagaacgattactgtaaatccggcacacatggggaaagcgttcaaagtgatgaacgaactgcgcagcaagcagctgctttgtgacgtaatgatagtggcggaagacgtggaaatcgaggcacacagggtggtcctcgccgcatgctcgccatacttctgcgccatgttcactggtgatatgtccgagtccaaggccaaaaagatcgaaattaaggatgtcgacgggcagaccctctcaaagttaattgactatatctacacagcagagatcgaagtgaccgaggagaacgtccaggtgttgctccctgcagcttccctgttacagctgatggacgttcgccagaactgctgcgacttcctccaatctcagctgcaccctacaaactgtctaggaataagagcgtttgccgacgtgcatacgtgtactgacctgcttcagcaagctaatgcctacgccgagcagcattttcctgaagtgatgctcggcgaagagttcctaagtttgtcgctcgaccaggtgtgtagcttaatttccagcgacaaacttactgtgtcttctgaggaaaaggtatttgaggctgttatctcatggattaattatgaaaaggaaacaagactcgagcacatggcgaaactgatggagcatgtcagattgccccttttgccgcgagattaccttgtgcagactgtagaggaggaagcccttatcaagaataacaatacctgcaaagacttcctgatcgaggcaatgaagtaccacttgcttccgctggaccagcgcctactgatcaagaatccccggaccaagccaagaacaccggtgagcttgcctaaggtaatgatcgtcgttggagggcaggcacccaaggcaatcagaagcgtagaatgctacgactttgaagaggataggtgggatcagatcgcagaactgccatcaagaaggtgtcgcgctggggtggtgttcatggcgggacatgtctatgcggttggcgggttcaacggctccctgcgcgttcggactgtggatgtgtacgatggagttaaggatcagtggaccagcatcgcttcgatgcaggagcgtaggagcactctcggcgcggctgtgctaaatgacctgctgtatgcagtgggcggctttgatggcagcaccggtctggcctccgtggaagcatacagctataagaccaatgagtggttctttgtcgcccctatgaacacaaggcggtcctctgtcggcgtgggcgtggtggagggtaagctgtacgccgtcggggggtacgacggggcaagtagacagtgtttgagcaccgtagagcagtacaacccggccacaaatgagtggatttacgtggccgatatgtctactcgacggagcggcgccggtgtcggtgtgctgtctggccaactgtacgccacgggcggacacgacgggccgctggtgaggaaatctgtcgaggtttacgatcccgggacaaatacttggaaacaggtagccgatatgaacatgtgcaggcgtaacgctggcgtctgcgccgtgaacgggctgctgtatgttgttggaggagacgatggcagctgcaacctggcctccgtggagtattataaccccgtgactgacaagtggaccttactgcccactaacatgtctactggcaggtcttacgcaggggttgccgtgatccacaaatcactctag

SEQ ID NO: 193086 - DNA, 906 bp, Artificial Sequence
  derived and/or modified sequence
atggagggcgagagcgtgaagctgagcagccagaccctgatccaggcgggagacgatgagaagaaccagaggactatcactgtgaacccagcccacatgggcaaggcctttaaagtgatgaatgagctgcgatccaaacaattgctgtgcgacgtaatgattgtggccgaagacgtggagatcgaggcacaccgagtcgtgctggctgcttgcagcccctatttttgcgcaatgtttacaggtgatatgagcgaatccaaggctaaaaagattgaaataaaggacgtggacggacagacgctctctaaattaatcgattacatttacacagctgagattgaagtaacagaggagaatgtacaagtgctcctgccagccgcctcactgttacagttaatggacgtgaggcaaaactgttgtgattttctgcagtctcagttacaccccaccaattgccttggaatcagagccttcgccgacgtccatacttgcactgacctgctgcagcaggcgaatgcctacgcagaacaacacttccccgaagtgatgctgggtgaggaattcctcagtctgtcgttagatcaggtgtgctctctgatcagttcggataagttaacagtcagcagcgaagaaaaagtttttgaagccgtcatttcatggattaactatgaaaaggagacccggctggaacacatggctaagcttatggagcatgtgcgtctccccctgcttcctcgcgactacctggtgcagaccgtcgaggaggaggcccttatcaagaacaacaacacctgtaaagattttctgatcgaggcaatgaagtaccacctacttccattggaccagagactgttgatcaagaaccctcgaaccaaaccaagaacccctgtgagtctgcccaaatag

SEQ ID NO: 193087 - DNA, 1764 bp, Artificial Sequence
  derived and/or modified sequence
atggaaggcgagtccgtcaaactgtcatctcaaacactaatccaagcaggagacgacgagaagaaccaaagaaccatcactgtcaaccccgcacacatggggaaggcgtttaaggtcatgaacgagctcaggtctaaacagctcctttgcgacgtgatgatagtggccgaggatgttgaaattgaggcccacagagtcgtcctcgccgcatgcagcccttacttctgcgccatgtttactggcgacatgagtgaaagcaaggccaagaaaattgaaattaaggatgttgacggacagacactctccaaactgatcgactatatttacactgctgagatcgaggttactgaggaaaacgtgcaagtgttactaccagcagcctctctgctgcagttgatggacgtgaggcagaactgttgcgactttttgcagtcgcagctgcacccaacaaattgtctaggcatcagagcctttgccgacgtccacacttgcactgatctcctgcagcaggccaacgcttatgctgaacagcacttcccagaggtcatgttgggggaggaattcttgtctttgagcttggatcaggtgtgctccctgatcagttcagacaaactgactgtgagctccgaagaaaaagtgtttgaggcagtaatctcctggatcaactacgaaaaggagacaagacttgagcacatggcaaagctcatggaacatgtgagacttccattgctgcctagggattacttagttcagaccgtcgaagaagaggccctgataaagaacaataatacctgtaaagactttctaatcgaagccatgaagtatcacctgttgcccttagaccaacggctgttgatcaaaaacccacgaaccaaaccccgaactcctgttagtttgcccaaagtcatgatagtggttgggggacaggctcctaaggccatcagatctgtagaatgctatgattttgaagaagaccggtgggatcagatagcggagctccccagcaggcggtgcagggcaggcgtggtttttatggccggacatgtatacgcagtggggggatttaatgggagcttacgggtgaggacagtggatgtatatgacggcgtgaaagaccagtggacctctatcgctagcatgcaggagagacgatccactctgggggctgcagtcctgaatgatctcctgtacgctgtggggggttttgatgggtctacaggtctggccagcgttgaggcctactcttataagaccaatgaatggttttttgttgcccctatgaatacacgcagatccagtgtcggagtgggcgtggtcgaggggaagctgtatgctgtggggggttacgacggcgctagccggcagtgtctgtctactgtggaacaatataatccagccacaaacgaatggatctatgtcgcagacatgtccacacgtaggtcgggcgcaggtgtgggagtgctaagcggacagctctatgcaactgggggacatgatggcccactggtgagaaaatccgtagaagtatatgaccctggtactaatacatggaagcaagtcgctgacatgaatatgtgtcgacgtaacgctggggtttgcgcggtgaacggcctcttgtacgtggttgggggagacgatggttcttgtaatttggcatcagtcgagtactacaatcctgtcacagacaaatggacattgctgcccactaatatgagcacaggtagatcatatgccggagtcgcggttatccacaaatcactctag

SEQ ID NO: 193088 - DNA, 906 bp, Artificial Sequence
  derived and/or modified sequence
atggagggggagagcgtgaagctctcttcccaaacactgattcaagccggtgacgacgagaaaaaccagagaactattacggttaatccagcccacatgggaaaagccttcaaggtcatgaatgaattaagatctaaacagctgctgtgcgacgtcatgattgtcgcagaagacgtggaaattgaagcgcatcgagtggttttggcagcatgtagtccatacttctgcgccatgtttaccggggacatgagtgaatctaaggcaaagaagatcgagatcaaggacgtcgacggacagaccttatcaaagcttattgactacatatacactgccgaaatcgaagtgactgaagagaatgtgcaggtgctgcttcccgcagcgagtctgctccaactcatggacgtgaggcagaattgctgcgactttctgcagagccaactccatccgactaattgtctcggtatccgcgcattcgccgacgtacacacttgcaccgacctacttcagcaggcaaacgcctatgccgaacaacacttccctgaggtcatgctgggtgaggaattcctgagcctgagcctggatcaggtgtgctctttaatctccagcgacaagctcactgtatccagtgaagaaaaagttttcgaggctgtcatctcctggataaattacgagaaggaaacacggctggaacacatggccaagctgatggaacatgtccgcctgccactattaccacgtgactacttggtccagactgtggaagaagaagctctgatcaagaataacaacacttgcaaagattttctaatcgaggctatgaagtaccatctgttgccactcgatcagcggctgcttattaagaacccgaggacaaagccgcgaacaccagtgtcccttccaaagtag

SEQ ID NO: 193089 - DNA, 1764 bp, Artificial Sequence
  derived and/or modified sequence
atggagggcgagagcgtgaagctgagcagccagaccctgatccaggccggcgacgacgagaagaaccagagaaccatcaccgtgaaccccgcccacatgggcaaggccttcaaggtgatgaacgagctgagaagcaagcagctgctgtgcgacgtgatgatcgtggccgaggacgtggagatcgaggcccacagagtggtgctggccgcctgcagcccctacttctgcgccatgttcaccggcgacatgagcgagagcaaggccaagaagatcgagatcaaggacgtggacggccagaccctgagcaagctgatcgactacatctacaccgccgagatcgaggtgaccgaggagaacgtgcaggtgctgctgcccgccgccagcctgctgcagctgatggacgtgagacagaactgctgcgacttcctgcagagccagctgcaccccaccaactgcctgggcatcagagccttcgccgacgtgcacacctgcaccgacctgctgcagcaggccaacgcctacgccgagcagcacttccccgaggtgatgctgggcgaggagttcctgagcctgagcctggaccaggtgtgcagcctgatcagcagcgacaagctgaccgtgagcagcgaggagaaggtgttcgaggccgtgatcagctggatcaactacgagaaggagaccagactggagcacatggccaagctgatggagcacgtgagactgcccctgctgcccagagactacctggtgcagaccgtggaggaggaggccctgatcaagaacaacaacacctgcaaggacttcctgatcgaggccatgaagtaccacctgctgcccctggaccagagactgctgatcaagaaccccagaaccaagcccagaacccccgtgagcctgcccaaggtgatgatcgtggtgggcggccaggcccccaaggccatcagaagcgtggagtgctacgacttcgaggaggacagatgggaccagatcgccgagctgcccagcagaagatgcagagccggcgtggtgttcatggccggccacgtgtacgccgtgggcggcttcaacggcagcctgagagtgagaaccgtggacgtgtacgacggcgtgaaggaccagtggaccagcatcgccagcatgcaggagagaagaagcaccctgggcgccgccgtgctgaacgacctgctgtacgccgtgggcggcttcgacggcagcaccggcctggccagcgtggaggcctacagctacaagaccaacgagtggttcttcgtggcccccatgaacaccagaagaagcagcgtgggcgtgggcgtggtggagggcaagctgtacgccgtgggcggctacgacggcgccagcagacagtgcctgagcaccgtggagcagtacaaccccgccaccaacgagtggatctacgtggccgacatgagcaccagaagaagcggcgccggcgtgggcgtgctgagcggccagctgtacgccaccggcggccacgacggccccctggtgagaaagagcgtggaggtgtacgaccccggcaccaacacctggaagcaggtggccgacatgaacatgtgcagaagaaacgccggcgtgtgcgccgtgaacggcctgctgtacgtggtgggcggcgacgacggcagctgcaacctggccagcgtggagtactacaaccccgtgaccgacaagtggaccctgctgcccaccaacatgagcaccggcagaagctacgccggcgtggccgtgatccacaagagcctgtag

SEQ ID NO: 193090 - DNA, 906 bp, Artificial Sequence
  derived and/or modified sequence
atggagggcgagagcgtgaagctgagcagccagaccctgatccaggccggcgacgacgagaagaaccagagaaccatcaccgtgaaccccgcccacatgggcaaggccttcaaggtgatgaacgagctgagaagcaagcagctgctgtgcgacgtgatgatcgtggccgaggacgtggagatcgaggcccacagagtggtgctggccgcctgcagcccctacttctgcgccatgttcaccggcgacatgagcgagagcaaggccaagaagatcgagatcaaggacgtggacggccagaccctgagcaagctgatcgactacatctacaccgccgagatcgaggtgaccgaggagaacgtgcaggtgctgctgcccgccgccagcctgctgcagctgatggacgtgagacagaactgctgcgacttcctgcagagccagctgcaccccaccaactgcctgggcatcagagccttcgccgacgtgcacacctgcaccgacctgctgcagcaggccaacgcctacgccgagcagcacttccccgaggtgatgctgggcgaggagttcctgagcctgagcctggaccaggtgtgcagcctgatcagcagcgacaagctgaccgtgagcagcgaggagaaggtgttcgaggccgtgatcagctggatcaactacgagaaggagaccagactggagcacatggccaagctgatggagcacgtgagactgcccctgctgcccagagactacctggtgcagaccgtggaggaggaggccctgatcaagaacaacaacacctgcaaggacttcctgatcgaggccatgaagtaccacctgctgcccctggaccagagactgctgatcaagaaccccagaaccaagcccagaacccccgtgagcctgcccaagtag

SEQ ID NO: 193091 - protein, 686 aa, Artificial Sequence
  derived and/or modified sequence
MKPPFLLALVVCSVVSTNLKMVSKRNSVDGCIDWSVDLKTYMALAGEPVRVKCALFYSYIRTNYSTAQSTGLRLMWYKNKGDLEEPIIFSEVRMSKEEDSIWFHSAEAQDSGFYTCVLRNSTYCMKVSMSLTVAENESGLCYNSRIRYLEKSEVTKRKEISCPDMDDFKKSDQEPDVVWYKECKPKMWRSIIIQKGNALLIQEVQEEDGGNYTCELKYEGKLVRRTTELKVTALLTDKPPKPLFPMENQPSVIDVQLGKPLNIPCKAFFGFSGESGPMIYWMKGEKFIEELAGHIREGEIRLLKEHLGEKEVELALIFDSVVEADLANYTCHVENRNGRKHASVLLRKKDLIYKIELAGGLGAIFLLLVLLVVIYKCYNIELMLFYRQHFGADETNDDNKEYDAYLSYTKVDQDTLDCDNPEEEQFALEVLPDVLEKHYGYKLFIPERDLIPSGTYMEDLTRYVEQSRRLIIVLTPDYILRRGWSIFELESRLHNMLVSGEIKVILIECTELKGKVNCQEVESLKRSIKLLSLIKWKGSKSSKLNSKFWKHLVYEMPIKKKEMLPRCHVLDSAEQGLFGELQPIPSIAMTSTSATLVSSQADLPEFHPSDSMQIRHCCRGYKHEIPATTLPVPSLGNHHTYCNLPLTLLNGQLPLNNTLKDTQEFHRNSSLLPLSSKELSFTSDIW

SEQ ID NO: 193092 - protein, 291 aa, Artificial Sequence [sequence omitted]

SEQ ID NO: 193093 - DNA, 2061 bp, Artificial Sequence
  derived and/or modified sequence
atgaagccccccttcctgctggccctggtggtgtgcagcgtggtgagcaccaacctgaagatggtgagcaagagaaacagcgtggacggctgcatcgactggagcgtggacctgaagacctacatggccctggccggcgagcccgtgagagtgaagtgcgccctgttctacagctacatcagaaccaactacagcaccgcccagagcaccggcctgagactgatgtggtacaagaacaagggcgacctggaggagcccatcatcttcagcgaggtgagaatgagcaaggaggaggacagcatctggttccacagcgccgaggcccaggacagcggcttctacacctgcgtgctgagaaacagcacctactgcatgaaggtgagcatgagcctgaccgtggccgagaacgagagcggcctgtgctacaacagcagaatcagatacctggagaagagcgaggtgaccaagagaaaggagatcagctgccccgacatggacgacttcaagaagagcgaccaggagcccgacgtggtgtggtacaaggagtgcaagcccaagatgtggagaagcatcatcatccagaagggcaacgccctgctgatccaggaggtgcaggaggaggacggcggcaactacacctgcgagctgaagtacgagggcaagctggtgagaagaaccaccgagctgaaggtgaccgccctgctgaccgacaagccccccaagcccctgttccccatggagaaccagcccagcgtgatcgacgtgcagctgggcaagcccctgaacatcccctgcaaggccttcttcggcttcagcggcgagagcggccccatgatctactggatgaagggcgagaagttcatcgaggagctggccggccacatcagagagggcgagatcagactgctgaaggagcacctgggcgagaaggaggtggagctggccctgatcttcgacagcgtggtggaggccgacctggccaactacacctgccacgtggagaacagaaacggcagaaagcacgccagcgtgctgctgagaaagaaggacctgatctacaagatcgagctggccggcggcctgggcgccatcttcctgctgctggtgctgctggtggtgatctacaagtgctacaacatcgagctgatgctgttctacagacagcacttcggcgccgacgagaccaacgacgacaacaaggagtacgacgcctacctgagctacaccaaggtggaccaggacaccctggactgcgacaaccccgaggaggagcagttcgccctggaggtgctgcccgacgtgctggagaagcactacggctacaagctgttcatccccgagagagacctgatccccagcggcacctacatggaggacctgaccagatacgtggagcagagcagaagactgatcatcgtgctgacccccgactacatcctgagaagaggctggagcatcttcgagctggagagcagactgcacaacatgctggtgagcggcgagatcaaggtgatcctgatcgagtgcaccgagctgaagggcaaggtgaactgccaggaggtggagagcctgaagagaagcatcaagctgctgagcctgatcaagtggaagggcagcaagagcagcaagctgaacagcaagttctggaagcacctggtgtacgagatgcccatcaagaagaaggagatgctgcccagatgccacgtgctggacagcgccgagcagggcctgttcggcgagctgcagcccatccccagcatcgccatgaccagcaccagcgccaccctggtgagcagccaggccgacctgcccgagttccaccccagcgacagcatgcagatcagacactgctgcagaggctacaagcacgagatccccgccaccaccctgcccgtgcccagcctgggcaaccaccacacctactgcaacctgcccctgaccctgctgaacggccagctgcccctgaacaacaccctgaaggacacccaggagttccacagaaacagcagcctgctgcccctgagcagcaaggagctgagcttcaccagcgacatctggtag

SEQ ID NO: 193094 - DNA, 2061 bp, Artificial Sequence
  derived and/or modified sequence
atgaagccacccttcctgctcgccctggtcgtgtgctcagtggtttcaactaatttaaagatggtcagcaaacgcaatagcgtcgacggatgtatcgactggtccgtggatctgaaaacatacatggcactggctggtgagcctgtccgcgttaagtgtgctctattctactcgtacattaggaccaactacagcaccgcacaatccaccggtctcaggctgatgtggtataaaaacaaaggcgacctggaggagccaatcattttcagcgaagtgagaatgtctaaagaagaggattccatctggttccattccgccgaagcacaagactccggcttttacacttgcgttctgcggaattcgacttactgcatgaaggtctctatgagcctgacagtcgccgaaaatgaaagcggcttatgctacaattccaggatacgatacctggagaagagcgaggttaccaagcggaaggaaattagctgtcccgatatggacgatttcaagaagtcagatcaagagcctgatgtagtctggtataaagaatgcaagcctaagatgtggcggtccatcattattcagaagggaaacgcccttctgatccaggaggtgcaggaggaagatggcggcaattacacctgtgagcttaaatatgagggaaaacttgtccgcaggactactgaactaaaagtgactgccctgttaaccgataaacctcccaaaccactgtttccgatggagaatcagccatcagttattgacgttcagcttggcaagccactcaacatcccatgtaaggccttttttgggttctctggtgagagcggccccatgatctattggatgaaaggcgaaaagttcattgaggagctcgcaggccatatccgggaaggagagatccggctgctgaaggaacatctcggagaaaaagaggtggagcttgccctcatctttgacagtgtagtggaagcggatctggccaactacacctgccacgtggaaaaccgcaacgggcgcaagcacgccagcgttctgctcaggaagaaggacctgatctataagatagaactggctggcggcctgggagcaatcttccttctcctagtgctgctggtggtcatatacaagtgctacaacatagagctgatgctcttttatagacaacattttggagcagatgaaaccaatgatgataataaggaatacgacgcttacctctcgtacacaaaagttgatcaggacactcttgactgcgataacccggaggaggagcagttcgcgttagaggttctgcccgacgtcctagagaagcattacggctacaagctctttattcctgagagagacttaataccaagcgggacttatatggaagacctcacccgatatgtggaacaaagccgacgcctaattatcgtcctgacccctgattacatcctccgtagaggctggagtatctttgagctggaaagtcggcttcataatatgttagtttcaggcgaaattaaagtgattcttattgaatgcactgaactcaaaggaaaggtaaattgtcaggaggtggaatccttgaagagaagcattaaattactgtcactcatcaagtggaaggggtccaagagtagcaaacttaatagcaagttctggaagcacctcgtatacgaaatgcccattaagaagaaagaaatgctgccccggtgccatgtcctggactcagctgaacagggactctttggggaactgcagcctatcccctctatagccatgaccagcacctccgcaacactggtctcaagccaggctgacttacctgagttccacccctccgatagtatgcagatacggcactgttgccgcggatataagcatgagatcccagcgactactctaccagtaccgtccttagggaaccaccacacatactgcaaccttcccctgacgttactcaacgggcagctgcccctgaataatactttaaaagatacacaggagttccatcgcaacagttctctgctgcccctgtcctctaaggagctgtcatttacgagcgatatttggtag

SEQ ID NO: 193095 - DNA, 2061 bp, Artificial Sequence
  derived and/or modified sequence
atgaagccacccttcctgctggccctggtggtgtgcagcgtggtgtccaccaacctgaagatggtgtccaagagaaattctgtggatggctgcatcgactggagcgtggacctgaagacctacatggccctggccggggagcctgtgcgggtgaagtgtgccctcttctacagctacatccgcaccaactacagcacagcccagagcacaggcctgcggctgatgtggtacaagaacaagggggacctggaggagcccatcatcttcagcgaggtgaggatgagcaaggaggaggacagcatctggttccacagcgctgaggcccaggacagcggcttctacacctgtgtgctgaggaacagcacctactgcatgaaggtgtccatgagcctgactgtggctgaaaatgaaagtggcctgtgctacaacagccgcatccgctacctggagaagtctgaggtgaccaagaggaaggagatcagctgcccagacatggatgacttcaagaagagtgaccaggagccagatgtggtgtggtacaaggagtgcaagcccaagatgtggaggagcatcatcatccagaagggaaatgccctgctgatccaggaggtgcaggaggaggatggcggcaactacacctgtgagctgaagtatgagggcaagctggtgcggaggaccacagagctgaaggtgacagccctgctgacagacaagccacccaagcccctcttccccatggagaaccagcccagcgtgattgatgtgcagctgggcaagcccctgaacatcccctgcaaggccttcttcggcttcagcggggagagcggccccatgatctactggatgaagggggagaagttcatcgaggagctggccggccacatccgggagggggagatccggctgctgaaggagcacctgggggagaaggaggtggagctggccctgatctttgacagcgtggtggaggccgacctggccaactacacctgccacgtggagaacagaaatggaaggaagcacgcctctgtgctgctgaggaagaaggacctgatctacaagattgagctggccggcggcctgggcgccatcttcctgctgctggtgctgctggtggtgatctacaagtgctacaacatcgagctgatgctgttctaccggcagcactttggagcagatgagaccaatgatgacaacaaggagtatgatgcctacctgagctacaccaaggtggaccaggacaccctggactgtgacaaccctgaggaggagcagtttgccctggaggtgctgcctgatgtgctggagaagcactacggctacaagctgttcatccctgagcgggacctgatccccagcggcacctacatggaggacctgaccaggtatgtggagcagagccggcggctcatcatcgtgctgaccccagactacatcctgcggcggggctggagcatctttgagctggagagccggctgcacaacatgctggtgtctggagagatcaaggtgatcctgattgagtgcacagagctgaagggcaaggtgaactgccaggaggtggagagcctgaagaggagcatcaagctgctgagcctcatcaagtggaagggcagcaagagcagcaagctgaacagcaagttctggaagcacctggtgtatgagatgcccatcaagaagaaggagatgctgccccgctgccacgtgctggacagcgctgagcagggcctgtttggagagctgcagcccatccccagcatcgccatgaccagcaccagcgccaccctggtgagcagccaggccgacctgcctgagttccaccccagcgacagcatgcagatccgccactgctgccggggctacaagcatgagatcccagccaccaccctgcctgtgcccagcctgggcaaccaccacacctactgcaacctgcccctgaccctgctgaatggccagctgcccctgaacaacaccctgaaggacacccaggagttccacaggaacagcagcctgctgcccctgagcagcaaggagctgtccttcaccagtgacatctggtag

SEQ ID NO: 193096 - DNA, 2985 bp, Artificial Sequence
  derived and/or modified sequence
gtgaggcgagcctggagctcatttccaggcgcccttccctcttcggaactaagggagacttgtgggcttttgcacactggctgtagggttcccgggaaagactggagcagcgaacaggagggagagaggtggacaggcagagtctgcacctgccgcctgcacctccgttagggcgacagggcagctggtgtttcgctcctggagtgtgcctacctcgcaaggggggcgagggccacaggctgaggcgcccgcgtcccggagtgcaccgcttggccgaggcaaggtgttgctggggcaaggctgctccgaagcgaagtcgcgcaaaaggaagagtctgggaggcaggcgacttaggagagtctagtcactgagagacagaggcagcatctgccattctaactacggagctgagtaatttagaaaccctccttaactctccctttccagctctccccaaagtccacagaagctctgctgaactctagaaatcttccctggctggggggaagtttactagtatcctctttggctaagacagggagtggaaaaaacaggcggggctgtactgtccgctgtttggggagacgcggtcttcctcgcgcccccttcagccactccgactgcctgggaagtcccagcccgcgctctccggaacccggctcgccgtctcgccctggacatggaactacgcatctgagacctgctggacgttttgctggccgttttgcaagactcagctgtcaagaaaagtgaaggatgaagccaccatttcttttggcccttgtggtctgttctgtagtcagcacaaatctgaagatggtgtcaaagagaaattctgtggatggctgcattgactggtcagtggatctcaagacatacatggctttggcaggtgaaccagtccgagtgaaatgtgcccttttctacagttatattcgtaccaactatagcacggcccagagcactgggctcaggcttatgtggtacaaaaacaaaggtgatttggaagagcccatcatcttttcagaggtcaggatgagcaaagaggaagattcaatatggtttcactcagctgaggcacaagacagtggattctacacttgtgttttaagaaactcaacatattgcatgaaggtgtcaatgtccttgactgttgcagagaatgaatcaggcctgtgctacaacagcaggatccgctatttagaaaaatctgaagtcactaaaagaaaggagatctcctgtccagacatggatgactttaaaaagtccgatcaggagcctgatgttgtgtggtataaggaatgcaagccaaaaatgtggagaagcataataatacagaaaggaaatgctcttctgatccaagaagttcaagaagaagatggaggaaattacacatgtgaacttaaatatgaaggaaaacttgtaagacgaacaactgaattgaaagttacagctttactcacagacaagcctcccaagccattgttccccatggagaatcagccaagtgttatagatgtccagctgggtaagcctctgaacatcccctgcaaagcattcttcggattcagtggagagtctgggccaatgatctactggatgaaaggagaaaagtttattgaagaactggcaggtcacattagagaaggtgaaataaggcttctcaaagagcatcttggagaaaaagaagttgaattggcactcatctttgactcagttgtggaagctgacctggcgaattatacctgccatgttgaaaaccgaaatggacggaaacatgccagtgttttgctgcgtaaaaaggatttaatctataaaattgagcttgcagggggcctgggagcaatcttcctcctccttgtactgctggtggtcatttacaaatgctacaacattgaattgatgctcttctacaggcagcactttggagctgatgaaactaatgatgacaacaaggaatatgatgcctatctctcttacacaaaagtggaccaagatactttagactgtgacaatcctgaagaagagcagtttgctcttgaagtactgccagatgtcctggaaaaacactatggatataaactcttcatcccagaaagagacctgattccaagtggaacatacatggaagatctcacaagatatgttgaacaaagcagaagacttattatcgtgctaactccagactatattctcagacggggatggagtattttcgaactggaaagcagactccataacatgctagtcagtggagaaatcaaagtgattttgattgagtgtacagaattaaaagggaaagtgaattgccaggaagtggaatcactaaagcgtagcatcaaacttctgtccctgatcaagtggaagggatccaaaagcagcaaattaaattctaagttttggaagcacttagtatatgaaatgcccatcaagaaaaaagaaatgctacctcggtgccatgttctggactccgcagaacaaggactttttggagaactccagcctataccctctattgccatgaccagtacttcagccactctggtgtcatctcaggctgatctccctgaattccacccttcagattcaatgcaaatcaggcactgttgcagaggttataaacatgagataccagccacgaccttgccagtaccttccttaggcaaccaccatacttattgtaacctgcctctgacgctactcaacggacagctaccccttaataacaccctgaaagatacccaggaatttcacaggaacagttctttgctgcctttatcctccaaagagcttagctttaccagtgatatttggtagtgaaaaatctgaattcctctgaacagctagataagcatagagaatttctgttataccaagcataaagtacacctaataacgttgtgttaaaaaagtgtttgaagaaaaaggtacaaaaatggcttttatacttaaatatttttgtttacatttccagaatagtggggg

SEQ ID NO: 193097 - DNA, 2061 bp, Artificial Sequence
  derived and/or modified sequence
atgaagccccccttcctgctggccctggtggtgtgcagcgtggtgtcaaccaacctgaagatggtgtctaaacgtaactccgtggatggctgcatagactggtctgtagaccttaagacatatatggctcttgccggggaaccggttcgggttaaatgtgcactgttttacagttatatccgcacgaattatagcacggcacagagtaccggtctgcggctgatgtggtataaaaataagggggatctagaggaaccaattatcttttcggaagtacgaatgagtaaagaagaggactccatctggttccatagtgctgaagcccaggatagcggattctatacgtgtgtgctccgaaattcaacatattgtatgaaagtttccatgagtctcactgttgcggagaacgaaagcgggctctgttataatagtaggattagatatctcgaaaagagcgaggtgactaagaggaaggagatcagctgccctgatatggatgactttaaaaaaagcgaccaggagcctgacgtggtttggtacaaggaatgtaagcccaaaatgtggagaagtattattatacagaagggaaacgctctgttgatccaggaggtgcaagaagaggacggaggaaattacacatgcgaattaaagtacgagggaaagctagttcgcagaaccacagagctcaaggtgactgcactcttaaccgacaagccgcctaagccactgttcccaatggagaaccagccgtccgtgatcgatgtacaactgggcaaacctcttaacattccttgtaaggcattctttggtttcagcggcgagagcggcccgatgatctactggatgaagggcgaaaagtttattgaagagctggcagggcacatcagagaaggagagattcgtcttcttaaagaacatttaggagagaaagaagttgaacttgcgctgattttcgattcagttgtggaggcggatcttgcgaattacacttgccacgttgagaacagaaatggacgcaaacacgcctcggtcctgttgagaaaaaaagacttgatttacaagatcgagctggccggcggtctcggcgctatcttcctgcttctagtgctgctggtcgtgatttacaagtgttacaacatcgagctcatgttgttctatcgccagcatttcggagcagatgaaactaacgacgacaacaaagaatatgatgcttacttgtcctatactaaagttgatcaagacacactagattgtgataaccccgaagaggagcagtttgctttggaggtgttgcccgacgtgctggagaaacattacggctataaacttttcatcccggagcgcgatttaattccatccggaacctatatggaagacctcacaagatatgtggagcagtcccgccgactcatcattgtactgactcctgattatatccttcgacggggttggagtattttcgaactagaaagcaggttgcacaatatgctggtgtctggcgaaataaaagtgatcttgattgagtgtactgaactaaagggcaaggtgaactgccaggaagttgagtcccttaagagatcgattaagcttctgagcttaatcaagtggaaaggcagtaagagctcaaaactgaactccaagttctggaaacacctggtctacgagatgccaattaagaaaaaagagatgctgcccaggtgccacgtgctggattctgcagagcaggggttgttcggggaactgcaacccattccatctattgcgatgacatctacctcggctacactcgtttcttcacaggctgatttgccagagttccatccatctgattcaatgcagattagacactgttgccgaggatataagcacgaaatacccgccacaacgctcccagtcccatccttagggaaccaccacacttattgcaatctccctctgaccctgctgaatggccaattacctcttaataacactttaaaggatacacaggagttccaccgtaattcaagtttgcttccattatcatccaaagagctgtccttcacttcagacatttggtag

SEQ ID NO: 193098 - DNA, 2061 bp, Artificial Sequence
  derived and/or modified sequence
atgaagccaccttttctgcttgctttggttgtttgctcggtggtgtctactaaccttaagatggtctccaaacggaattccgtggatggctgcatcgactggagtgtggatttaaaaacttacatggcactagctggtgagcccgtgagagtaaaatgtgcccttttctactcctacatcaggactaactatagtacagcccagtccacgggactgcggctaatgtggtataagaataaaggcgacttggaggagccaataattttttctgaggtacgaatgagtaaggaagaggattccatctggttccattccgctgaagcccaggattccggattctacacatgtgtgctacgcaattctacttattgcatgaaggtctccatgagtctcaccgtagccgagaatgagtcaggcctttgttataacagcaggatccgttatttggaaaagagcgaggtgaccaaacggaaggaaatttcttgtcctgatatggacgatttcaagaaaagcgaccaggagccggacgtggtttggtataaagaatgtaaacccaaaatgtggagatctataataatacagaaggggaacgcgctcctgatacaggaggtgcaggaagaagatggtggaaattatacctgcgagctgaaatatgaaggcaaactcgttcgcaggaccacagagcttaaggtcactgctctgctgacagacaagccacccaagcccctgtttcccatggagaatcagcctagtgtgatcgacgtgcaattggggaagcccctaaacatcccttgcaaagccttcttcggtttcagcggtgaatccggaccaatgatttattggatgaagggcgagaaattcattgaggagttggcaggccatatccgtgaaggcgagattcgccttcttaaggaacatctgggcgaaaaggaagtggagctggcactaattttcgattctgtcgtggaagctgacttggctaattacacctgccacgtagagaacaggaacgggcgaaagcacgcatccgtgctccttcggaaaaaagatctcatttataagattgaacttgccggtggcctgggagcaatctttctcttgctggtactgctggtagttatatacaagtgttacaacatcgagcttatgctcttttacagacaacactttggtgcggacgaaacgaacgatgataataaagaatatgatgcatacctaagttacaccaaggtagatcaggataccctcgactgcgataaccccgaagaggaacaattcgcattggaagtcttacctgatgtgctggagaagcactatgggtataagctgtttattcctgagcgcgatctgatacctagtgggacctacatggaggaccttacacgatacgtcgagcagtcacgacgtctcataatcgtgctgacacccgattacatcctgagaagaggatggtccatattcgaactcgaaagcaggctccacaacatgttggtgagtggcgaaatcaaagtaattctgatcgaatgcaccgagttgaagggtaaagtgaattgtcaggaagttgaaagcttgaaacggtccatcaagctgctttccttgataaagtggaaggggagcaaatcctccaagttaaacagcaagttctggaagcatctggtgtatgaaatgccaatcaaaaagaaagaaatgttaccacggtgccacgtcctggattctgcagaacagggactgtttggtgagctacaacctattccctctattgccatgacctctaccagtgctaccctggtgagttctcaggctgatctgccagaattccatccttccgatagcatgcaaataaggcattgctgcaggggctataagcacgagatcccagccacaactctgcctgtgccttcacttgggaaccaccacacttactgtaatctgcctctaactctgctgaacggtcagctacctctcaataatactctcaaggacacccaagagtttcacagaaactcatctctcctgccactctcttctaaggagctgtcctttacaagcgatatttggtag

SEQ ID NO: 193099 - DNA, 2061 bp, Artificial Sequence
  derived and/or modified sequence
atgaaacctcccttcctcttggcactggtcgtctgctcagttgtgtcaactaatctgaaaatggtcagcaagagaaactcagttgacggttgtattgattggtcagtggatctcaagacctacatggctctggctggagagcccgttagggtcaagtgcgccttgttttattcatatatcaggacaaactatagcaccgcccaatcaactggcttgcgcttgatgtggtataagaacaaaggtgatctggaggaacccatcatcttcagtgaagtgcgcatgtctaaggaggaagatagtatttggtttcactccgccgaagcccaagatagcgggttctacacttgcgtgctgaggaacagtacctactgcatgaaggtgtccatgagccttacagtcgctgaaaacgaatcaggcctgtgttataacagtcggatccggtacctggaaaaatccgaagtgaccaagcgcaaagaaatatcatgtccagacatggacgactttaaaaagagcgaccaggagcccgacgttgtttggtacaaggaatgtaagcctaaaatgtggaggtccattataatccagaagggcaatgctctgctcattcaggaggtgcaggaagaggatggcggaaactatacctgtgagttgaaatatgagggcaaactcgtaaggcgaaccactgagctcaaggtcaccgccttgctgactgataaaccccccaaaccgctctttccgatggagaaccagccttcagtgatagatgtgcagctgggaaagcctctgaatattccctgcaaagccttcttcggctttagcggcgagtctggacctatgatttattggatgaaaggggagaaatttatagaggaactcgctggtcacattcgcgagggggagattagactgcttaaggaacacctgggggagaaggaagtggaattagccctgattttcgattctgtggttgaagccgatcttgccaactatacctgtcatgtggaaaatcgaaacggtcgtaagcacgcgtccgtgctgctcagaaagaaggatcttatatataaaatcgaactagccggggggctcggggccatctttttgcttctcgtactgcttgttgtgatttacaaatgttataacattgagctcatgctcttctatcgacaacatttcggtgccgatgagacaaacgacgacaacaaagagtacgacgcttacttgtcttacacaaaagttgatcaagacacactggattgcgacaatcccgaggaagagcagttcgccctggaagtgttacccgacgtacttgaaaagcactacggctataaactgttcataccagagagggacctgatacccagcggaacttatatggaggacctaactagatacgttgaacaaagccggcggctcataattgtcttgactccagattacattcttagacggggatggagtatttttgagctggagagtaggctgcacaacatgcttgtgtcaggagaaataaaagtgattctcatcgagtgtaccgagttaaaaggtaaagtgaactgccaggaagtggagtcactcaagcggagcatcaaactgctcagcctgattaaatggaaagggtcaaaaagttcaaagctgaactccaagttctggaaacaccttgtttacgagatgcccataaaaaagaaggagatgctcccacgctgtcacgtgctggacagcgctgaacagggactctttggtgaactgcaacccatcccatcaatcgcgatgaccagtacctctgccaccctcgtgtcctcacaggctgacttgcctgagttccacccttcagatagtatgcagatccgacactgctgcaggggatataagcacgaaataccagcgacgaccctgcctgtgccatctttagggaatcatcacacgtattgtaaccttcccctcaccctgttgaacggccagctgccgctgaataacaccctgaaagatacacaggagttccaccgtaactccagcctgctgccactgtccagcaaagagttgtctttcacatctgacatatggtag

SEQ ID NO: 193100 - DNA, 2061 bp, Artificial Sequence
  derived and/or modified sequence
atgaagccaccttttctgttagcgttggtcgtgtgtagcgttgtcagcaccaacctgaagatggtatctaagcgaaattctgtggacgggtgtattgactggtctgttgacttaaagacatacatggccctggccggggagcctgtgcgtgtgaagtgtgcgctgttttattcatatattaggaccaactatagtaccgctcagtcaactggcttacggcttatgtggtataaaaataagggcgacctcgaggagccaataatattctccgaggtccgcatgtcaaaagaagaggactcaatctggtttcactctgcagaagcccaggacagtgggttttatacatgcgtgttaagaaactccacctactgtatgaaggtctccatgagtctcacagtggctgagaacgagtcagggttgtgctacaatagcaggatcaggtacctagagaagtctgaggtcacgaagcgcaaggaaatttcctgcccagatatggatgatttcaaaaagtccgatcaagagcctgacgtggtttggtacaaagagtgtaagcctaagatgtggaggtccattatcatccaaaaagggaacgccctcttgatccaggaggtacaagaggaggacggtggaaattacacttgcgaactgaaatatgagggcaaactggtacgtcgaaccaccgagctcaaagtgacagccctgctgactgacaaacccccaaagccgctattcccgatggaaaaccagccttcagtcattgacgtgcagttgggtaaaccattaaacattccctgcaaggcattctttggattttcaggggagtcagggcccatgatttattggatgaagggcgaaaaattcattgaagagctggccggccacattagagagggagagatacgtcttttaaaagaacatctgggggaaaaggaggttgaactggcattaatcttcgattctgtggtcgaagcagacctcgccaattacacgtgccatgtggagaacaggaatggccgcaagcacgcatcagtcttgctgagaaagaaggacctgatttacaagattgaactggctggcgggctgggagcaattttcctgcttctggttttgctagtagttatatataagtgctacaacatcgagttaatgctgttttaccgccagcatttcggcgccgatgagactaacgatgacaacaaggagtacgatgcttatcttagctatacgaaagtggaccaggatacactggattgtgacaacccggaggaagaacaattcgccttagaagtcctgcctgatgtcttagagaaacactacggatataaactgttcatcccagagagagaccttataccaagcgggacctatatggaggacctcaccaggtacgtggagcagagccggaggcttattatagtgctgacaccggactatatcttgcggcggggctggtctatttttgagctcgagagtcgactgcacaatatgctcgtcagcggggagattaaagtaatcctgatcgagtgcactgaactgaagggtaaagtgaactgccaagaggtggaatctctgaaacgctcaatcaaactgttatcactcatcaagtggaaggggtccaaaagctctaaacttaattccaaattctggaaacatctagtgtacgagatgcctatcaagaagaaggaaatgctccctcgctgccatgttctggatagcgccgaacaaggtctatttggggaactgcagcctattccttctattgcgatgacatcgacctctgccaccctggtatctagtcaggctgacctgcctgagtttcacccatccgattcaatgcagatcaggcattgctgcagaggctataaacacgagattcctgcgacaacactgcccgttccaagtctcggaaatcaccacacatactgcaatcttcccctgaccctcctgaatggccagttgcctcttaataatacactgaaagatacgcaggaatttcaccgcaattcctccctcctgccactgtcatccaaggagctatcattcacatcagatatatggtag

SEQ ID NO: 193101 - DNA, 2061 bp, Artificial Sequence
  derived and/or modified sequence
atgaagccaccatttcttttggcccttgtggtctgttctgtagtcagcacaaatctgaagatggtgtcaaagagaaattctgtggatggctgcattgactggtcagtggatctcaagacatacatggctttggcaggtgaaccagtccgagtgaaatgtgcccttttctacagttatattcgtaccaactatagcacggcccagagcactgggctcaggcttatgtggtacaaaaacaaaggtgatttggaagagcccatcatcttttcagaggtcaggatgagcaaagaggaagattcaatatggtttcactcagctgaggcacaagacagtggattctacacttgtgttttaagaaactcaacatattgcatgaaggtgtcaatgtccttgactgttgcagagaatgaatcaggcctgtgctacaacagcaggatccgctatttagaaaaatctgaagtcactaaaagaaaggagatctcctgtccagacatggatgactttaaaaagtccgatcaggagcctgatgttgtgtggtataaggaatgcaagccaaaaatgtggagaagcataataatacagaaaggaaatgctcttctgatccaagaagttcaagaagaagatggaggaaattacacatgtgaacttaaatatgaaggaaaacttgtaagacgaacaactgaattgaaagttacagctttactcacagacaagcctcccaagccattgttccccatggagaatcagccaagtgttatagatgtccagctgggtaagcctctgaacatcccctgcaaagcattcttcggattcagtggagagtctgggccaatgatctactggatgaaaggagaaaagtttattgaagaactggcaggtcacattagagaaggtgaaataaggcttctcaaagagcatcttggagaaaaagaagttgaattggcactcatctttgactcagttgtggaagctgacctggcgaattatacctgccatgttgaaaaccgaaatggacggaaacatgccagtgttttgctgcgtaaaaaggatttaatctataaaattgagcttgcagggggcctgggagcaatcttcctcctccttgtactgctggtggtcatttacaaatgctacaacattgaattgatgctcttctacaggcagcactttggagctgatgaaactaatgatgacaacaaggaatatgatgcctatctctcttacacaaaagtggaccaagatactttagactgtgacaatcctgaagaagagcagtttgctcttgaagtactgccagatgtcctggaaaaacactatggatataaactcttcatcccagaaagagacctgattccaagtggaacatacatggaagatctcacaagatatgttgaacaaagcagaagacttattatcgtgctaactccagactatattctcagacggggatggagtattttcgaactggaaagcagactccataacatgctagtcagtggagaaatcaaagtgattttgattgagtgtacagaattaaaagggaaagtgaattgccaggaagtggaatcactaaagcgtagcatcaaacttctgtccctgatcaagtggaagggatccaaaagcagcaaattaaattctaagttttggaagcacttagtatatgaaatgcccatcaagaaaaaagaaatgctacctcggtgccatgttctggactccgcagaacaaggactttttggagaactccagcctataccctctattgccatgaccagtacttcagccactctggtgtcatctcaggctgatctccctgaattccacccttcagattcaatgcaaatcaggcactgttgcagaggttataaacatgagataccagccacgaccttgccagtaccttccttaggcaaccaccatacttattgtaacctgcctctgacgctactcaacggacagctaccccttaataacaccctgaaagatacccaggaatttcacaggaacagttctttgctgcctttatcctccaaagagcttagctttaccagtgatatttggtag

SEQ ID NO: 193102 - DNA, 2061 bp, Artificial Sequence
  derived and/or modified sequence
atgaagccccccttcctgctggccctggtggtgtgcagcgtggtgtcaacaaatctgaaaatggtctctaaacggaatagcgtggacgggtgtattgactggtcagtcgatctcaagacatacatggctcttgcaggagagccagtgagagtgaagtgcgctctcttttattcctacattcgcactaactactcaaccgcacagtctacaggcctgagactgatgtggtataagaacaaaggcgacttggaggaacccataatcttcagcgaggtccgaatgagcaaggaggaagacagcatctggttccattccgctgaagcgcaggacagtggattttacacttgtgtgcttaggaattctacatattgtatgaaggtgtccatgagccttacggtggctgagaatgaatcaggcctttgctacaattctcgcattcggtatctggagaagtcagaggtcactaagaggaaggaaatttcttgccccgacatggacgactttaagaaaagtgatcaggaaccagatgttgtgtggtataaagaatgcaagcccaagatgtggcgatctatcatcattcaaaagggcaatgcattgttgattcaagaagtgcaggaggaggacggcgggaattacacgtgcgagctgaagtatgaaggtaaactcgttagaaggacaactgagctgaaggtgacagctctgctcactgacaaacctcccaaaccccttttcccaatggagaaccagccctcagtgatcgatgttcagctaggaaagcctctcaacattccttgtaaggcctttttcgggttctccggtgaatcaggccccatgatttactggatgaagggggaaaagtttatcgaggaactggcaggtcatatccgggaaggagagatccgcctactgaaagagcacctcggggaaaaagaagtcgaactggccctgatttttgactctgtcgttgaggctgacttagcaaattacacttgtcacgtggagaacagaaatggccgtaagcatgcctctgtgttgctccgcaagaaagatctgatatacaagattgagctcgccggagggcttggcgccatctttctgttactggttctgctggtagtgatctataagtgttacaatattgagttgatgttgttctataggcagcattttggagccgatgaaacaaatgatgacaacaaagagtatgatgcatacctgagttacactaaagtggaccaggataccctagactgcgataatccagaagaggagcaatttgccttggaggttctccctgacgtcctagagaagcactatggttataagctgtttatccctgaaagggatctgataccttccggaacctacatggaagaccttacccggtacgtggagcagagcaggagactcatcatcgttctcacacctgattatatcctgcggcgaggctggtctatttttgagctggagtctagactacacaatatgctggtgtcaggagagatcaaggtcattctgattgagtgtaccgagttgaaggggaaagtgaattgtcaggaggtcgaaagcctaaagcggtctattaaactgctgagtctcatcaaatggaaagggtctaagtccagcaaactgaattccaagttttggaagcacctagtctatgagatgcccattaagaagaaggagatgttaccgcgctgccacgtgctggattctgccgagcagggtctgttcggggagctgcagcctatccccagcatcgccatgaccagcaccagtgcaacgctcgtctctagtcaggccgacctgcctgagtttcaccccagcgacagtatgcaaatacgccattgctgtagaggatataagcacgaaattcctgctacgacactgcctgtgccatctttgggtaatcaccacacgtattgtaatctacccctgacactgctcaacggccaattgccactgaacaataccctgaaggacacccaggagtttcacagaaattcatctctcctgccactgagttccaaggagttatcgtttactagtgatatctggtag

SEQ ID NO: 193103 - DNA, 2061 bp, Artificial Sequence
  derived and/or modified sequence
atgaagccccccttcctgctggccctggtggtgtgcagcgtggtgtcgactaatttgaagatggtgtctaagcggaactccgtggatggctgtattgactggagtgtagacttgaaaacatacatggccctggccggtgaaccagtccgggtcaagtgcgcattattttattcctacatcaggacaaattatagcacagcacagagtacggggctgagactaatgtggtacaaaaacaaaggagatctggaagagcccattatctttagtgaggtgagaatgtccaaggaggaggacagtatatggtttcactctgctgaggcgcaggacagcggcttctacacatgcgtgcttcggaatagtacatactgtatgaaagtctcaatgagcttgacagtggccgaaaatgagagcggattgtgctacaattctagaattcgatacttggagaagagtgaggttactaagagaaaagagatcagttgtccagatatggacgatttcaagaagagtgaccaagagcccgatgtcgtctggtataaggaatgtaagcccaagatgtggagatcaatcattattcaaaaagggaacgcactgctcatacaagaggttcaggaggaggatgggggcaactacacctgcgagctgaagtatgagggcaagctcgtgcgaaggacgacagagcttaaagtgacagcactcttgaccgataagccccctaagccactcttccctatggagaatcagcccagcgtgatcgacgtgcagcttggtaagcccttgaatattccttgtaaggcattcttcgggttttcgggggagtcaggacctatgatttactggatgaagggggagaaatttatcgaggaactcgccggacacatcagagaaggagagatcaggcttctgaaggagcatttaggagagaaagaggtcgaactagcactgatctttgattccgtcgttgaggcggacttggccaattacacttgccatgtggagaaccgtaacggccgaaagcacgcctccgtgttgctgcgaaaaaaggacctaatttacaagattgaactggcagggggtctgggcgcaattttcctcctgcttgtcctgctggtcgtgatctacaaatgctacaatatagagctgatgctcttttataggcagcattttggcgcggatgaaacaaatgatgataacaaagaatacgatgcctaccttagctacactaaagtggaccaagatacactcgactgtgataaccccgaggaggagcaatttgcgcttgaggtactcccagacgtgctggagaagcattatggttacaagttgttcatccctgaacgagatctgataccctcggggacatacatggaagatctgactaggtatgttgagcaatcccgcagactgatcatcgtgttaacacctgactacatcctacgtaggggttggtcaatttttgagctagagtccagactccataatatgctggttagtggtgaaatcaaagtcattttgatcgagtgcaccgaactgaagggtaaagtcaactgccaagaggtggagtcactgaagaggagcattaagttgctgtccctgattaaatggaaaggctccaaaagctcaaaactgaactcaaagttctggaagcacttagtttacgaaatgcctattaagaagaaggagatgctccctcggtgtcacgtccttgacagtgccgagcagggtctatttggcgagctgcagccaatcccaagcatcgccatgacatcaacatccgcgactctcgtaagcagccaagctgatctccccgagtttcacccctcagacagtatgcagatccggcactgctgtcgtggatacaagcatgaaattcccgccactacactgcctgtaccatcacttggaaaccatcacacctactgcaacttacccctgaccctgttgaacgggcagttacctctgaataacactctcaaggatactcaggagtttcacaggaatagctccttgttgcctcttagctctaaggaactaagcttcacctcagatatctggtag

SEQ ID NO: 193104 - DNA, 2061 bp, Artificial Sequence
  derived and/or modified sequence
atgaaaccccctttccttctggcgctcgtggtctgtagcgtcgtgtcgaccaacctgaaaatggtgagcaaaagaaacagtgtagacgggtgcatcgactggagcgtggatctcaaaacgtatatggctctcgccggagaacccgtcagagtaaagtgcgctcttttttatagctacatccggaccaactacagcacagcccagtctactggtttgagacttatgtggtacaagaacaagggcgacttagaagaacctataattttttccgaagtgcgcatgtctaaagaagaagattccatctggtttcactccgccgaggctcaggattcagggttctacacttgcgtgctaaggaactctacgtattgtatgaaggtgtccatgtcacttacagtagcagagaatgagtctggactctgttataattcaaggattagatatctggagaaaagcgaagttactaaacgtaaggagatttcctgtcccgatatggatgattttaaaaagtcggaccaggaacctgatgtcgtgtggtataaggagtgtaagcccaagatgtggcgttccattatcatccagaagggtaatgccctgcttatccaggaggtgcaggaagaggacggcggtaactacacctgcgagttgaaatatgagggtaagctcgtcagaaggaccacagagttgaaggtcacagccctgctcaccgacaaacccccaaaacccctgtttcccatggaaaatcagccaagtgtgattgacgtgcaacttggtaagcccctgaatatcccttgcaaagctttcttcggtttctccggggaatctggcccaatgatctattggatgaaaggcgaaaaattcattgaagaactggccggtcacattagagagggggagatccggttgttgaaggagcatctgggcgagaaggaggttgagctggctttgatcttcgactccgtcgtcgaagccgacctcgcgaactacacctgtcatgtggagaacaggaacggaagaaaacacgccagcgtgctccttcggaagaaggacctaatctacaagatcgaactggccggagggctgggggcaatctttctgcttctcgtgctgcttgtcgtgatctataagtgctacaacatcgaattaatgctattttataggcagcattttggcgcagacgagaccaacgatgacaacaaagagtatgatgcatatctctcctacacgaaggttgaccaggacacactcgactgcgataatcctgaagaggaacagtttgctctggaggtactgcccgatgtcctggagaaacactacggatacaagcttttcattcccgagcgtgatctgatcccctcagggacttatatggaggatctgactcggtacgtggaacagtcccggaggcttattatagttctcacacccgattacatcctgcgccgaggctggagcatttttgaactggagtctagattacacaatatgctagtaagcggggagattaaagttattctgattgagtgtaccgagctgaaaggcaaagtgaactgccaggaagtagaaagccttaagcgcagtatcaaattgctttcccttattaagtggaagggctcgaaatcctctaaacttaacagtaaattctggaagcacctggtttacgagatgcctatcaagaaaaaagaaatgctccctcggtgtcatgtgctcgatagcgctgagcaggggctctttggcgaactccagccaatcccctctattgccatgacatccacttcggcaaccctggttagttcccaggctgacctgcccgaattccatccaagcgatagcatgcaaatccgccattgctgtcgcggatacaagcacgaaattccggctaccaccttaccggtgccgtctctcggaaaccaccatacttactgcaatctgccacttacactgctaaacggacagctccctttgaataataccctaaaggacactcaggaattccaccgtaactcctcgctcttgcctcttagcagtaaagagctttcctttacctcagacatttggtag

SEQ ID NO: 193105 - DNA, 2061 bp, Artificial Sequence
  derived and/or modified sequence
atgaagcctccttttctgctggctttagtagtctgctctgtagtatccacaaacctgaagatggtgtcaaaacggaactccgtggacgggtgcatagactggagtgtggacctgaagacttatatggcacttgccggagaaccagtgagagttaaatgcgccctgttctattcttacatccggacaaattattctactgcacaatccaccgggctccgcttgatgtggtataaaaacaaaggggatcttgaggagccaataatttttagtgaggtgagaatgtccaaggaagaggactcaatctggttccattccgctgaagcgcaggattccggtttctacacatgtgtgctcagaaattcaacctattgcatgaaggtcagtatgtccctgaccgttgcagagaacgaatctggactgtgctataactctagaatcaggtatcttgaaaagagtgaggtgacaaaacgcaaggagattagctgccctgacatggatgacttcaagaaatctgaccaggaacctgacgtggtgtggtataaagagtgtaagcccaaaatgtggcgaagtattatcatacagaaggggaatgccctgctgatccaagaggtccaagaggaagacggaggaaattacacctgcgagttgaagtatgagggtaagcttgtacgaaggacaacggagctcaaggtgaccgccctgctgaccgacaaacccccaaaacctctcttcccaatggagaatcagccatcagtgatcgatgtccagctgggcaaacctctgaatataccctgcaaggccttcttcgggttcagcggcgaaagtgggccaatgatttactggatgaagggcgagaagtttatcgaagaacttgcaggccacatcagagagggcgaaattcgcctactgaaggagcatctgggcgagaaggaagttgaacttgcacttatctttgatagcgtcgtagaggccgatctcgcaaattacacgtgtcacgtggagaaccggaacggacggaagcacgctagcgtgctgctccgaaagaaggacttaatttataagattgaactggccggtggtctgggcgcaatcttccttttgctcgtcttactcgtggtcatttacaaatgttacaatattgaacttatgctgttttatagacaacacttcggagcagacgaaacaaatgacgacaacaaagagtatgacgcctacctatcttacacaaaggtcgaccaggacactctggattgtgataatccagaggaagaacagttcgccctcgaggtgctgccagacgtcttggagaagcactatggctacaagctcttcatccctgagagggacttaattccaagcgggacgtatatggaagacctgactcgctacgttgaacagagccgaaggctgataattgtactcacgcctgactacatcttgcgcaggggatggagcatcttcgagctagagagcagactccataacatgcttgtgtccggagaaatcaaggtgatccttattgagtgtaccgagctgaagggaaaggtgaactgtcaagaagtggagtccctgaagaggtccattaaactgctgtcacttattaaatggaaagggtctaagtcatcaaagctgaacagcaaattttggaagcatctcgtttacgaaatgcctatcaagaaaaaggaaatgctacctagatgccacgtcttggactccgctgaacaggggttattcggcgagctgcagccgatccctagtatcgctatgacctccactagcgccacgcttgtctcctctcaggctgacctgccagaattccatccttctgatagtatgcagatccggcactgttgcaggggatataaacacgagattccggcaacgacgcttccggtgccaagcttaggaaaccaccacacttactgcaatctcccccttacactcctgaatggccagctgcccctgaacaacactctgaaagacacccaggaatttcacaggaattcctcacttctgccgctgtcatctaaagaactgagctttacttctgacatttggtag

SEQ ID NO: 193106 - protein, 637 aa, Artificial Sequence
  derived and/or modified sequence
MMFWRKLPKALFIGLTLAIAVNLLLVFSSKGTLQNLFTGGLHRELPLHLNKRYGAVIKRLSHLEVELQDLKESMKLALRQQENVNSTLKRAKDEVRPLLKAMETKVNETKKHKTQMKLFPHSQLFRQWGEDLSEAQQKAAQDLFRKFGYNAYLSNQLPLNRTIPDTRDYRCLRKTYPSQLPSLSVILIFVNEALSIIQRAITSIINRTPSRLLKEIILVDDFSSNGELKVHLDEKIKLYNQKYPGLLKIIRHPERKGLAQARNTGWEAATADVVAILDAHIEVNVGWAEPILARIQEDRTVIVSPVFDNIRFDTFKLDKYELAVDGFNWELWCRYDALPQAWIDLHDVTAPVKSPSIMGILAANRHFLGEIGSLDGGMLIYGGENVELSLRVWQCGGKVEILPCSRIAHLERHHKPYALDLTAALKRNALRVAEIWMDEHKHMVYLAWNIPLQNSGIDFGDVSSRMALREKLKCKTFDWYLKNVYPLLKPLHTIVGYGRMKNLLDENVCLDQGPVPGNTPIMYYCHEFSSQNVYYHLTGELYVGQLIAEASASDRCLTDPGKAEKPTLEPCSKAAKNRLHIYWDFKPGGAVINRDTKRCLEMKKDLLGSHVLVLQTCSTQVWEIQHTVRDWGQTNSQ

SEQ ID NO: 193107 - DNA, 1914 bp, Artificial Sequence
  derived and/or modified sequence
atgatgttctggagaaagctgcccaaggccctgttcatcggcctgaccctggccatcgccgtgaacctgctgctggtgttcagcagcaagggcaccctgcagaacctgttcaccggcggcctgcacagagagctgcccctgcacctgaacaagagatacggcgccgtgatcaagagactgagccacctggaggtggagctgcaggacctgaaggagagcatgaagctggccctgagacagcaggagaacgtgaacagcaccctgaagagagccaaggacgaggtgagacccctgctgaaggccatggagaccaaggtgaacgagaccaagaagcacaagacccagatgaagctgttcccccacagccagctgttcagacagtggggcgaggacctgagcgaggcccagcagaaggccgcccaggacctgttcagaaagttcggctacaacgcctacctgagcaaccagctgcccctgaacagaaccatccccgacaccagagactacagatgcctgagaaagacctaccccagccagctgcccagcctgagcgtgatcctgatcttcgtgaacgaggccctgagcatcatccagagagccatcaccagcatcatcaacagaacccccagcagactgctgaaggagatcatcctggtggacgacttcagcagcaacggcgagctgaaggtgcacctggacgagaagatcaagctgtacaaccagaagtaccccggcctgctgaagatcatcagacaccccgagagaaagggcctggcccaggccagaaacaccggctgggaggccgccaccgccgacgtggtggccatcctggacgcccacatcgaggtgaacgtgggctgggccgagcccatcctggccagaatccaggaggacagaaccgtgatcgtgagccccgtgttcgacaacatcagattcgacaccttcaagctggacaagtacgagctggccgtggacggcttcaactgggagctgtggtgcagatacgacgccctgccccaggcctggatcgacctgcacgacgtgaccgcccccgtgaagagccccagcatcatgggcatcctggccgccaacagacacttcctgggcgagatcggcagcctggacggcggcatgctgatctacggcggcgagaacgtggagctgagcctgagagtgtggcagtgcggcggcaaggtggagatcctgccctgcagcagaatcgcccacctggagagacaccacaagccctacgccctggacctgaccgccgccctgaagagaaacgccctgagagtggccgagatctggatggacgagcacaagcacatggtgtacctggcctggaacatccccctgcagaacagcggcatcgacttcggcgacgtgagcagcagaatggccctgagagagaagctgaagtgcaagaccttcgactggtacctgaagaacgtgtaccccctgctgaagcccctgcacaccatcgtgggctacggcagaatgaagaacctgctggacgagaacgtgtgcctggaccagggccccgtgcccggcaacacccccatcatgtactactgccacgagttcagcagccagaacgtgtactaccacctgaccggcgagctgtacgtgggccagctgatcgccgaggccagcgccagcgacagatgcctgaccgaccccggcaaggccgagaagcccaccctggagccctgcagcaaggccgccaagaacagactgcacatctactgggacttcaagcccggcggcgccgtgatcaacagagacaccaagagatgcctggagatgaagaaggacctgctgggcagccacgtgctggtgctgcagacctgcagcacccaggtgtgggagatccagcacaccgtgagagactggggccagaccaacagccagtag

SEQ ID NO: 193108 - DNA, 1914 bp, Artificial Sequence
  derived and/or modified sequence
atgatgttttggaggaaactccctaaagcccttttcattggtttgacactcgcgatcgcagtaaatcttctgctggtgtttagcagtaagggtaccctacaaaatctgttcactggcgggctgcaccgcgagctacctttgcacctgaacaagcgatatggcgcagtgatcaaaagactctctcacctggaggtggagcttcaggatctgaaagaaagcatgaaactcgccctgcggcaacaggaaaacgtaaatagcaccttaaagcgggccaaggacgaggttcgtcctctcctgaaagccatggagacaaaggtcaacgagaccaaaaagcataagactcagatgaaactctttcctcacagtcagctgttccggcagtggggagaggatctgagtgaagcacagcagaaagccgctcaggatctttttcgcaagttcggatacaatgcatacctgtcaaaccagctgccactaaacaggacgatcccagacacaagggattatcggtgcctccgaaagacgtacccaagtcaacttccctcgctctcggtcatcttgatttttgtgaatgaagccttgagcattattcagcgggcaatcacatctataatcaaccgcacaccttcccggctgttaaaggagattatcctggtggacgatttcagtagtaatggggaattgaaggttcacctcgatgagaagatcaagctgtataaccagaaatacccagggctccttaaaatcattcggcaccccgagagaaaaggactggctcaggcacgcaatacagggtgggaggcagcaacagctgacgtggtcgccattctggatgcccacatcgaagtaaatgtgggttgggccgagccaatcctggctagaattcaggaggaccgaaccgtcattgtgtctcccgtttttgataacattcgattcgacaccttcaaactcgacaaatacgagctcgccgtagatggctttaattgggagctgtggtgcaggtacgatgccttgcctcaggcatggattgatctgcacgatgtgaccgcccccgtcaagtcaccaagcatcatgggtatcctggccgccaatagacacttcctgggagaaatcgggtctctggacggtggcatgctgatttacgggggggagaacgtagaactctcgctgcgtgtgtggcaatgtggcggcaaagtggagatcctgccatgctcccgtattgcgcacttggaaagacaccacaagccgtatgcgctggaccttacggccgccctgaaaagaaacgctctccgggtggctgagatctggatggatgaacataagcatatggtttacctcgcttggaatatccctctgcagaattccggcattgacttcggggacgttagctcacggatggccttgagagagaagctcaagtgcaagacttttgactggtacctgaagaacgtctatcctctacttaaaccactgcacacaatcgttgggtacggacgcatgaagaatctcttagacgaaaatgtgtgcctcgatcagggaccggtccctggtaacacccctataatgtactactgtcacgaattttcctcacaaaacgtgtattatcacctgactggagagctgtacgtcggccagctgatcgcggaggcttctgccagcgacagatgcctaactgaccccggaaaggccgagaagcccacactggagccatgttctaaagcggccaaaaaccggctgcacatatactgggacttcaagcccgggggagccgtgattaatcgggacacaaagaggtgtttagagatgaagaaggatctcctgggcagccacgtgctggtcttacagacctgtagtactcaggtttgggagatccagcacacggtgagggattggggccagaccaactctcaatag

SEQ ID NO: 193109 - DNA, 1914 bp, Artificial Sequence
  derived and/or modified sequence
atgatgttctggaggaagctgcccaaggccctcttcatcggcctgaccctggccatcgctgtgaacctgctgctggtgttcagcagcaagggcaccctgcagaacctcttcaccggcggcctgcaccgggagctgcccctgcacctgaacaagagatatggagctgtgatcaagaggctgagccacctggaggtggagctgcaggacctgaaggagagcatgaagctggccctgcggcagcaggagaatgtgaacagcaccctgaagagggccaaggatgaggtgcggcccctgctgaaggccatggagaccaaggtgaatgagaccaagaagcacaagacccagatgaagctgttcccccacagccagctgttccggcagtggggcgaggacctgtctgaggcccagcagaaggccgcccaggacctcttcaggaagtttggctacaatgcctacctgagcaaccagctgcccctgaacagaaccatcccagacacccgggactaccgctgcctgaggaagacctaccccagccagctgcccagcctgagcgtcatcctgatctttgtgaatgaggccctgagcatcatccagagggccatcaccagcatcatcaacagaacacccagccggctgctgaaggagatcatcctggtggatgacttcagcagcaatggagagctgaaggtgcacctggatgagaagatcaagctgtacaaccagaagtacccaggcctgctgaagatcatccgccaccctgagaggaagggcctggcccaggccaggaacacaggctgggaggccgccacagcagatgtggtggccatcctggatgcccacatcgaggtgaatgtgggctgggccgagcccatcctggcccgcatccaggaggacagaactgtcatcgtgtcccctgtgtttgacaacatccgctttgacaccttcaagctggacaagtatgagctggccgtggatggcttcaactgggagctgtggtgccgctatgatgccctgccccaggcctggattgacctgcatgatgtgacagcccctgtgaagagccccagcatcatgggcatcctggccgccaacagacacttcctgggggagatcggcagcctggatggcggcatgctgatctatggaggagaaaatgtggagctgagcctgcgggtgtggcagtgtggcggcaaggtggagatcctgccctgcagcagaattgcccacctggagcggcaccacaagccctatgccctggacctgacagctgccctgaagagaaatgccctgcgggtggccgagatctggatggatgagcacaagcacatggtgtacctggcctggaacatccccctgcagaacagcggcatcgactttggagatgtgagcagcaggatggccctgcgggagaagctgaagtgcaagacctttgactggtacctgaagaatgtgtaccccctgctgaagcccctgcacaccatcgtgggctacggccgcatgaagaacctgctggatgaaaatgtgtgcctggaccagggccctgtgcccggcaacacccccatcatgtactactgccacgagttcagcagccagaatgtgtactaccacctgaccggggagctgtatgtgggccagctgattgctgaggccagcgccagtgaccgctgcctgacagaccccgggaaggccgagaagcccaccctggagccctgcagcaaggccgccaagaaccggctgcacatctactgggacttcaagccaggaggagctgtgatcaacagagacaccaagcgctgcctggagatgaagaaggacctgctgggcagccacgtgctggtgctgcagacctgcagcacccaggtgtgggagatccagcacacagtgcgggactggggccagaccaacagccagtag

SEQ ID NO: 193110 - DNA, 1914 bp, Artificial Sequence
  derived and/or modified sequence
atgatgttctggcggaagctgcccaaggccctgttcatcggcctgacactggccatagcagtgaacttacttttggttttctcctccaaagggactctccagaacttatttaccggaggtctacatcgggaattaccccttcaccttaataagcgatacggggccgtcattaaaaggttatcacatctagaggttgagctccaagacctgaaggagagtatgaaactcgcccttagacagcaggaaaatgtaaactctacgttgaaaagggccaaagatgaagttcgcccccttttaaaagcaatggaaaccaaggtgaacgagaccaagaagcacaaaactcaaatgaagctgtttcctcactcacaactgttccgtcaatggggagaagatctctccgaggctcagcagaaggcggcacaagacctgtttcgcaaattcggctacaacgcttacctgtctaatcagctgcctctcaatcgcaccatccccgatactcgggactacagatgtctcaggaagacatacccctctcagctgccgagccttagcgttatccttatctttgtgaatgaagcgctatcgattattcaacgagccattacctcgataataaaccgtaccccttcccggttactcaaggaaattatccttgtggacgatttttcttccaacggggaactcaaagtccatctagatgaaaagattaagctgtacaaccaaaaataccccggtttactcaagatcattcgccatcctgagcgaaaggggctggctcaagcgagaaacactggttgggaggctgcgacagccgatgtggtcgctattctcgacgcgcatattgaagttaatgttggctgggcagaacccatcctggcacggattcaggaagaccgcaccgtcattgtgtctcccgtttttgataatattaggtttgacactttcaagctagataagtacgagctggcggttgatgggtttaattgggaactttggtgtaggtacgatgccctgcctcaggcttggattgatcttcacgacgtgacagcacccgtcaagtctcctagcataatgggaatccttgctgctaatagacatttccttggagagattggctcattggacggtgggatgttaatctacgggggggagaacgtagagttaagcctgcgggtgtggcaatgcggggggaaagtggaaatcctcccgtgctcacgtatagcccacctggaacgacaccataagccgtacgccttggacctcacggcggcactgaaaagaaacgctcttagggtggctgaaatctggatggatgaacacaagcacatggtgtatcttgcctggaacatacccctgcaaaattcaggtatcgatttcggtgacgtttcttcacgaatggcactccgcgagaaactcaagtgcaagacattcgactggtacttaaaaaatgtctacccattgttgaagccacttcacaccattgtgggctatggccgaatgaagaatttattggacgaaaacgtctgtttggatcagggacctgtgccagggaacacccctatcatgtactactgtcatgagttttcatctcagaatgtctattatcatctaaccggcgagctctacgttggtcagctgattgcggaggcaagtgctagcgatcgatgtctcaccgaccccggcaaggccgagaagccgaccctggagccatgctctaaagccgctaaaaaccgactccacatctattgggacttcaagcctggcggggcggtgataaaccgggacaccaaacggtgcctcgagatgaaaaaggaccttctgggtagccacgtcctcgttcttcagacctgcagcactcaggtatgggagattcaacatacagtacgggattggggtcaaactaactcccagtag

SEQ ID NO: 193111 - DNA, 1914 bp, Artificial Sequence
  derived and/or modified sequence
atgatgttctggcggaagttgccaaaggcactgtttattgggctgaccttagcgattgcggtgaatctgctgttggtcttcagttccaaaggcaccctgcagaatctgttcactggcggtctgcaccgggagctacccctgcatcttaacaaaaggtacggcgcagttattaagcgcctaagccaccttgaggtcgaactgcaggatctaaaggagagtatgaaacttgctttaaggcagcaggaaaatgtgaactccacactgaagagagcaaaggatgaggtgcgccctttgttgaaagccatggagaccaaagtgaacgagacaaagaaacacaagacacagatgaagctgtttccgcattcccagctgttcagacagtggggagaggacctgtctgaagcccagcagaaggcagcccaggatttattccggaaatttggctataacgcctacctgtctaaccagttacccttgaaccgtaccattcccgatacccgagattaccggtgtctgcgaaagacatatccgtcacagctgccctccttatctgtcatactcatcttcgttaatgaggcactgtccatcatacaaagggcaattacctcaatcattaaccgcacacccagccggctgttgaaggaaatcatcctcgtggacgacttttccagtaatggggagctgaaagtgcatctggacgaaaaaattaagctctacaatcagaaatatcctgggctgctgaaaatcatccggcaccctgagagaaagggacttgcacaggccaggaataccggctgggaagccgctacagcagacgtggtagctattctagatgctcacattgaggtgaatgtgggctgggcagagcctatcctcgcccgaattcaggaagaccggactgtgattgttagtcccgtgtttgataacatcagattcgatactttcaagctcgacaagtacgagctcgccgtggatggcttcaactgggagctgtggtgtcgctatgatgctcttcctcaagcttggattgatctgcatgacgttacagcaccagtgaagtcaccctctatcatggggattctggccgctaacagacactttctaggggaaattggctccctggacggaggcatgctcatttacggaggggagaacgtggagttgtccctgcgggtgtggcagtgtgggggaaaggttgagatcctcccttgctcccgtatcgcccatctcgagcgccatcataaaccctatgcattagacctgacggccgctttgaagaggaatgctctgagggtcgctgaaatctggatggacgagcataagcacatggtttacttggcctggaatatccccctccagaactctggcatagatttcggcgatgttagtagccggatggctctgcgggagaaacttaaatgcaaaacctttgattggtatctgaaaaacgtctatcccctcctgaagcccttgcacacgatcgtgggctatgggaggatgaagaacctgttggatgagaatgtgtgcctggaccagggcccagtgccagggaacacccccattatgtactactgccatgaattcagtagtcagaacgtgtactaccacctgacgggtgagctgtatgttggccagcttatagcagaggcctctgcgagtgatcgctgcctgacagacccgggaaaggctgagaaacccaccttagaaccatgttccaaggccgctaaaaacaggctgcacatatactgggatttcaagcctgggggagctgtgatcaatcgagatactaagcggtgtctcgagatgaagaaagacctactgggctctcacgttctcgtactccagacttgcagtactcaggtgtgggagattcagcacactgtccgggattggggacagacaaattcccagtag

SEQ ID NO: 193112 - DNA, 2380 bp, Artificial Sequence
  derived and/or modified sequence
gggagtgggtttcaggaggagccaagatgtttgattatactcctctgcttcaagggagtgttatctccctgagcaacctgtggaaagccgctgagcaacctgtggaaagccgctgagcggttatcctctcggggcataaagacaaagaaggcaataaggagactttgctcctcagaggccacccgtggcttcccatgggtgtctcacacaggggagaccaactcaactggcacctagaactctctttcccacaaaagctaggctggttctgattcttaacctgctccagcagtgacacactcagtcccacagggagtggacgacccccaggaagaagatgatgttttggaggaaactccccaaagccctcttcattgggctgactctggccattgctgtcaatctccttctggtattttctagcaaggggactttacaaaacctgtttacgggtggtctccacagggagcttcctttacatctgaataaacgctacggggcagtgataaagagactctcccacttggaggtggaattgcaggatctgaaagaaagtatgaaattagctctgaggcaacaagaaaatgtgaacagcacactgaagagggcgaaagatgaagtacgccctcttctaaaggcaatggaaaccaaggtgaatgagacaaagaagcacaaaacccaaatgaaactcttcccacactcacagcttttcaggcaatggggcgaggatctttctgaggcccagcagaaggcggcccaggacctcttccggaagtttggttacaacgcgtacctcagcaaccagctgcctctcaatcgcaccatccccgacacgcgagactacagatgtcttcggaagacatatccttcccaactcccatccctcagtgtcattctcatattcgtgaatgaagctctgtccattatacaacgggccatcaccagtatcatcaaccggacgccctctcgattgttgaaggaaatcatcttggtggatgatttcagctcaaatggagaactaaaggtacacttggatgagaagattaagctttacaaccagaagtatccaggactactgaaaataatacggcatcctgaaaggaaaggtcttgctcaagcccgcaacactggctgggaagctgccacagcagacgtggtcgccatcttggatgctcacattgaagtcaatgttgggtgggcagagccaatcttggctcggattcaggaggaccgcactgtgattgtgtctcctgtgtttgacaacattcgttttgacaccttcaaactggataagtatgaactggcagttgatgggtttaactgggaactctggtgccgctacgatgcactgccacaagcctggattgatctgcatgatgtcactgccccagtgaagagtccttcaatcatgggcatcctggctgctaacaggcacttcctgggagagatcgggtctctggatggtggaatgctcatctatggaggagagaacgtggagcttagcctgagggtgtggcagtgtggagggaaggtcgagattttgccctgttcccggattgcccacctagagagacaccacaagccctacgccttggatctcaccgctgccttgaagcgcaatgctctgcgagtggccgaaatctggatggatgagcacaaacacatggtctacttggcctggaacatacctctccagaactctggaatagattttggagacgtttcttccagaatggcactccgggaaaaactgaaatgtaaaacttttgactggtacctgaaaaatgtttatccactcttgaagccactccacaccatcgtgggctatggaagaatgaaaaacctattggatgaaaatgtctgcttggatcagggacccgttccaggcaacacccccatcatgtattactgccatgaattcagctcacagaatgtctactatcacctaactggggagctctatgtgggacaactgattgcagaggccagtgctagtgatcgctgcctgacagaccctggcaaggcggagaagcccaccttagaaccatgctccaaggcagctaagaatagactgcatatatattgggattttaaaccgggaggagctgtcataaacagagataccaagcggtgtctggagatgaagaaggatcttttgggtagccacgtgcttgtgctccagacctgtagcacgcaagtgtgggaaatccagcacactgtcagagactggggtcagaccaacagccagtgatcctcagatggtgctggatctgggtcatcaattcttgcaagtggaatggcttctactcctaacactcccagcttctttctcaatgagaaagaaagcatgtgtatgtctgtttatggcgacttcaggtgg

SEQ ID NO: 193113 - protein, 505 aa, Artificial Sequence
  derived and/or modified sequence
MEQTEKSKVYAENGLLEKIKLCLSKKPLPSPTERKKFDHDFAISTSFHGIHNIVQNRSKIRRVLWLVVVLGSVSLVTWQIYIRLLNYFTWPTTTSIEVQYVEKMEFPAVTFCNLNRFQTDAVAKFGVIFFLWHIVSKVLHLQEITANSTGSREATDFAASHQNFSIVEFIRNKGFYLNNSTLLDCEFFGKPCSPKDFAHVFTEYGNCFTFNHGETLQAKRKVSVSGRGLSLLFNVNQEAFTDNPALGFVDAGIIFVIHSPKKVPQFDGLGLLSPVGMHARVTIRQVKTVHQEYPWGECNPNIKLQNFSSYSTSGCLKECKAQHIKKQCGCVPFLLPGYGIECDLQKYFSCVSPVLDHIEFKDLCTVGTHNSSCPVSCEEIEYPATISYSSFPSQKALKYLSKKLNQSRKYIRENLVKIEINYSDLNYKITQQQKAVSVSELLADLGGQLGLFCGASLITIIEIIEYLFTNFYWICIFFLLKISEMTQWTPPPQNHLGNKNRIEEC

SEQ ID NO: 193114 - DNA, 1518 bp, Artificial Sequence
  derived and/or modified sequence
atggagcagaccgagaagagcaaggtgtacgccgagaacggcctgctggagaagatcaagctgtgcctgagcaagaagcccctgcccagccccaccgagagaaagaagttcgaccacgacttcgccatcagcaccagcttccacggcatccacaacatcgtgcagaacagaagcaagatcagaagagtgctgtggctggtggtggtgctgggcagcgtgagcctggtgacctggcagatctacatcagactgctgaactacttcacctggcccaccaccaccagcatcgaggtgcagtacgtggagaagatggagttccccgccgtgaccttctgcaacctgaacagattccagaccgacgccgtggccaagttcggcgtgatcttcttcctgtggcacatcgtgagcaaggtgctgcacctgcaggagatcaccgccaacagcaccggcagcagagaggccaccgacttcgccgccagccaccagaacttcagcatcgtggagttcatcagaaacaagggcttctacctgaacaacagcaccctgctggactgcgagttcttcggcaagccctgcagccccaaggacttcgcccacgtgttcaccgagtacggcaactgcttcaccttcaaccacggcgagaccctgcaggccaagagaaaggtgagcgtgagcggcagaggcctgagcctgctgttcaacgtgaaccaggaggccttcaccgacaaccccgccctgggcttcgtggacgccggcatcatcttcgtgatccacagccccaagaaggtgccccagttcgacggcctgggcctgctgagccccgtgggcatgcacgccagagtgaccatcagacaggtgaagaccgtgcaccaggagtacccctggggcgagtgcaaccccaacatcaagctgcagaacttcagcagctacagcaccagcggctgcctgaaggagtgcaaggcccagcacatcaagaagcagtgcggctgcgtgcccttcctgctgcccggctacggcatcgagtgcgacctgcagaagtacttcagctgcgtgagccccgtgctggaccacatcgagttcaaggacctgtgcaccgtgggcacccacaacagcagctgccccgtgagctgcgaggagatcgagtaccccgccaccatcagctacagcagcttccccagccagaaggccctgaagtacctgagcaagaagctgaaccagagcagaaagtacatcagagagaacctggtgaagatcgagatcaactacagcgacctgaactacaagatcacccagcagcagaaggccgtgagcgtgagcgagctgctggccgacctgggcggccagctgggcctgttctgcggcgccagcctgatcaccatcatcgagatcatcgagtacctgttcaccaacttctactggatctgcatcttcttcctgctgaagatcagcgagatgacccagtggaccccccccccccagaaccacctgggcaacaagaacagaatcgaggagtgctag

SEQ ID NO: 193115 - DNA, 1518 bp, Artificial Sequence
  derived and/or modified sequence
atggaacagacggaaaagtccaaggtctatgcagaaaacggcctgctagaaaaaatcaagctctgcctcagcaagaagccgctgccgtcccccacagagcggaagaaatttgaccatgacttcgcaatcagcacaagctttcatggtatacataacatcgtccagaaccggtcaaagattaggagagtcttatggctggtggtggtgctgggtagcgtgtcactagttacttggcaaatatacatccggctgctgaactacttcacctggccgaccaccacctcaatagaggtccagtacgtggaaaagatggaatttcctgcggtgacattctgtaacctcaataggttccagacggacgctgtggctaagttcggcgtgattttctttctgtggcacatcgtctctaaggtgcttcacttgcaggaaattacagctaactctactgggagtcgagaagctaccgacttcgccgcctctcatcagaattttagcatcgtagagttcatcaggaacaagggcttttatttgaacaactctaccctactcgattgtgaattttttggcaagccgtgtagccccaaagactttgcccatgttttcactgagtatgggaactgcttcacgtttaatcacggcgagacactccaggcaaagaggaaggtctctgtctcgggtagaggactctctctcttgtttaacgtaaaccaagaagccttcactgataatccagccttaggctttgtagacgccggaatcatctttgtcattcacagcccaaagaaggtccctcagttcgatgggttagggttgttgtctcctgtgggtatgcacgccagggtgacgattcggcaggtcaagactgtccaccaggagtatccatggggcgaatgtaaccccaatattaaacttcagaacttcagttcgtactcaactagtggatgtttgaaagaatgtaaggctcagcacatcaagaagcaatgtggttgcgttcccttcttgctgcctgggtatgggatcgagtgcgacctccagaagtacttttcttgtgtgtcgcctgtgctagaccatatcgagttcaaggacctgtgcacagtaggcacccacaacagttcatgtcctgtcagctgtgaagaaattgagtacccagcaacaataagctactccagctttccttcccaaaaagcattaaaatatttaagtaagaagctgaatcagtctagaaagtacattcgggagaacctcgtcaagatcgaaatcaactacagcgatttaaattacaagatcacacagcaacagaaggcagtaagcgtctccgaactgttggcggatctcggcgggcagctaggcctcttctgtggggcctcactgatcacaattattgagataatagaatatctattcactaacttctattggatttgcatatttttcttgctgaagatatccgaaatgacgcagtggacacccccaccacagaaccacttggggaacaagaatcggattgaggaatgctag

SEQ ID NO: 193116 - DNA, 1518 bp, Artificial Sequence
  derived and/or modified sequence
atggagcagacagagaagagcaaggtgtatgcagaaaatggcctgctggagaagatcaagctgtgcctgagcaagaagcccctgcccagccccacagagaggaagaagtttgaccatgactttgccatcagcaccagcttccacggcatccacaacatcgtgcagaacagaagcaagatcagaagagtgctgtggctggtggtggtgctgggctctgtgtccctggtgacctggcagatctacatccggctgctgaactacttcacctggcccaccaccaccagcattgaggtgcagtatgtggagaagatggagttccctgctgtgaccttctgcaacctgaaccgcttccagacagatgctgtggccaagtttggagtcatcttcttcctgtggcacatcgtgtccaaggtgctgcacctgcaggagatcacagccaacagcacaggcagccgggaggccacagactttgctgccagccaccagaacttcagcatcgtggagttcatcagaaataaaggcttctacctgaacaacagcaccctgctggactgtgagttcttcggcaagccctgcagccccaaggactttgcccacgtgttcacagaatatggcaactgcttcaccttcaaccacggggagaccctgcaggccaagaggaaggtgtctgtgtctggccggggcctgagcctgctcttcaacgtgaaccaggaggccttcacagacaacccagccctgggctttgtggatgctggcatcatctttgtgatccacagccccaagaaggtgccccagtttgatggcctgggcctgctgagccctgtgggcatgcacgcccgggtgaccatccggcaggtgaagacagtgcaccaggagtacccctggggcgagtgcaaccccaacatcaagctgcagaacttcagcagctacagcaccagcggctgcctgaaggagtgcaaggcccagcacatcaagaagcagtgtggctgtgtgcccttcctgctgcccggctacggcattgaatgtgacctgcagaagtacttcagctgtgtgtcccctgtgctggaccacatcgagttcaaggacctgtgcaccgtgggcacccacaacagcagctgccctgtgtcctgtgaggagattgagtacccagccaccatctcctacagcagcttccccagccagaaggccctgaagtacctgagcaagaagctgaaccagagcaggaagtacatccgggagaacctggtgaagattgagatcaactacagcgacctgaactacaagatcacccagcagcagaaggctgtgtctgtgtctgagctgctggccgacctgggcggccagctgggcctcttctgtggggccagcctcatcaccatcatcgagatcatcgagtacctgttcaccaacttctactggatctgcatcttcttcctgctgaagatcagcgagatgacccagtggaccccaccaccccagaaccacctgggcaacaagaaccgcatcgaggagtgctag

SEQ ID NO: 193117 - DNA, 1692 bp, Artificial Sequence
  derived and/or modified sequence
atgaaaattgggttaccctgaggactcttgcttaactgaaatcacaaatggagcagacagaaaaatcaaaagtatatgctgagaacggactcttagaaaagataaagctttgcctttcaaagaaaccactgccatctcccactgagcgaaagaagtttgaccatgactttgccatctccacttcctttcatgggatacacaatattgttcagaaccggagcaaaattcgcagggtgctctggttggtggtggttctgggctcagtctcacttgtgacatggcagatctacattcgcttgctcaactacttcacatggccaaccacaacgtccattgaggttcaatatgtggaaaagatggagttcccagctgtgacattttgtaatttgaacaggttccaaacagatgctgtagccaaatttggtgttatttttttcttatggcacattgtatccaaagtcctccatcttcaagaaattactgccaattccactggctctagagaggctactgattttgctgcaagtcaccaaaacttcagcattgtggaatttatcaggaacaaaggtttttatctcaacaatagcactttgttggactgtgagttttttggaaagccatgtagcccaaaggattttgcacatgtcttcactgaatatggaaattgttttacttttaatcatggtgaaactctccaagcaaagagaaaagtgagtgtctctggaagaggtttgagcttactcttcaatgtgaatcaggaggcattcactgataacccagcccttggtttcgttgatgctgggatcatctttgttatccattcaccaaagaaggtgccacagtttgatgggttaggcttgttgtcacctgtgggaatgcacgcaagggtaaccatccgccaagtgaagacagttcatcaagaatacccttggggagaatgcaatcctaacatcaagctgcagaattttagcagctacagcacttctggttgcttgaaggaatgcaaagcccagcacataaaaaagcaatgtggatgtgtgccttttcttcttcctggatatgggatagaatgtgacctacaaaagtacttcagctgtgtttctcctgtacttgaccacattgaatttaaggatttatgtacagtaggaacacataactctagctgccccgtttcttgtgaagaaatagaatacccggccactatttcttattcctcttttccaagtcaaaaagctttgaaatatctttccaagaagttgaatcaaagccggaaatacatcagggagaatcttgtaaaaattgaaattaactatagtgacctaaactataagataacccagcagcaaaaggcggtgagtgtgtctgagttacttgcagatcttggtggtcagctgggtctattttgtggggccagtctgatcacgatcatagaaattattgaatatctattcaccaatttctactggatatgcattttctttttgctgaagatatctgaaatgacccagtggactcctccacctcagaatcatctgggaaataaaaataggatagaggagtgttaatggtcacttagaataaaatagtttccttttcatgataccttcagatttatcttgactaattcattgttacgtcacttttctatagttttgagagttcgataaaagccattaaagatatgtatctctt

SEQ ID NO: 193118 - DNA, 1518 bp, Artificial Sequence
  derived and/or modified sequence
atggagcagaccgagaagagcaaggtgtacgccgagaacggcctgctcgagaaaattaaactgtgcttgtccaaaaagcccctgccctcccccacagagcgaaaaaagttcgatcatgattttgccatctctacatcatttcatggcattcataatatcgtacagaatagatccaaaatccggagagttctgtggctcgtagtggtcctcggctccgtgtcactagtaacatggcagatctatatccggttgctgaactacttcacttggccgacaacaaccagcattgaagtgcagtatgtggaaaaaatggagttccctgcggtgacattctgtaacctgaataggttccagacagacgccgttgccaagttcggcgtgatattcttcctatggcatattgttagcaaagtgctgcacctgcaagaaatcactgccaattctacagggtcaagggaagcgacggacttcgccgcttcccaccagaatttcagcatcgttgagtttatccggaacaaaggcttttacctaaacaatagcactctgttggactgtgagttttttgggaaaccatgttctcccaaggactttgcacacgtgttcaccgagtatggcaactgcttcacctttaaccacggcgagaccctccaggcaaaacgaaaggtcagcgtgtctggcaggggcctatctctcctgttcaacgtgaaccaggaagcgtttacggataacccagccctgggcttcgtcgatgcagggattatcttcgtgattcactccccgaaaaaagtcccacagttcgacggtcttggcctgctctctccggtgggaatgcacgctagggtgaccattcgccaggtcaaaacggttcatcaggagtacccttggggggaatgcaaccccaacatcaagctgcagaacttttcgtcttacagcacctctggctgtctgaaggagtgcaaagctcagcatataaaaaagcaatgcggctgtgttccctttctactaccggggtacggaatcgaatgcgacctgcagaagtacttttcatgcgtgagccctgtgcttgatcatatcgaattcaaggatctgtgtacagttgggacgcataatagcagctgtcctgtctcctgcgaggaaatcgaataccctgcaacaatcagttacagctcatttccttctcagaaagctctgaagtaccttagcaagaagctaaatcagagtcgtaagtacatcagggaaaacctcgtcaagatagaaattaactattccgatttgaattataagattactcagcagcagaaggccgtatctgtgtctgagttactggccgaccttggtggccagcttggcctcttctgcggagccagcctcatcaccatcatcgaaattatcgagtatctgtttacaaatttttactggatctgcatttttttcctcctgaagatctccgagatgacgcagtggacgccacccccacagaatcaccttgggaataaaaaccggatcgaggagtgctag

SEQ ID NO: 193119 - DNA, 1518 bp, Artificial Sequence
  derived and/or modified sequence
atggagcagaccgagaaaagcaaggtgtacgctgaaaacgggctactggaaaaaattaaactgtgtctgagtaaaaagccgcttccatctcctactgaaaggaagaaatttgaccacgattttgcaatttccaccagcttccatggcatccacaacatcgttcagaatcgctctaagatcagaagagttctgtggctggtggtggtcttggggagtgtaagcttggttacttggcagatttacattcgactgctaaactatttcacatggccgactacaacctcaattgaagtgcagtacgtggagaagatggagtttcctgccgttacattctgcaatctgaaccggttccagaccgatgcggtggccaagttcggtgtcatcttcttcctgtggcatatcgttagtaaggtgttacatttgcaggaaataaccgctaactctaccgggtctagagaagcaactgattttgcagcctctcatcaaaacttcagcatcgtcgaattcattaggaacaaagggttttatctgaataactcgactctgctcgactgtgaatttttcgggaaaccatgctccccaaaagattttgctcacgttttcacggagtatggcaattgctttacttttaaccacggcgaaacactccaggccaagcgcaaagtgtcagtcagcggcaggggcctgtcacttttattcaacgtgaatcaagaggcgtttactgacaacccagcactgggattcgtcgacgctggaattatttttgtcatccactcccccaaaaaggtgccccagtttgatggtctgggcctcctgtccccagtgggcatgcatgcgcgagtcacaatacgtcaagtgaaaacggtgcaccaggaatatccctggggcgaatgcaatcctaatattaagttacagaattttagcagttatagcaccagtgggtgcctgaaggagtgcaaagcccagcacataaagaaacaatgcggttgcgtacccttcttgctgcctggatacggaatcgaatgtgacctgcagaagtacttctcctgtgttagcccagtgctagatcacatcgagttcaaggatctctgcaccgtgggtactcataactcctcatgcccagtctcgtgcgaagaaattgaatatccagcaactatctcttactcgagtttcccttctcagaaggcgctaaagtatctaagcaagaagttgaaccaaagcaggaaatacattagagaaaacttggtgaagatcgagatcaattacagcgacctgaactacaaaatcacgcaacagcagaaagcagtttcagtgagtgagttgctggccgatttaggcggacaacttggattattctgcggggcaagcctcatcacaattatcgagataattgagtatctgttcacgaatttttattggatttgcattttcttcctcctgaagatctccgagatgactcagtggactccaccccctcagaaccacctcggcaacaagaatcggatcgaggagtgctag

SEQ ID NO: 193120 - protein, 781 aa, Artificial Sequence
  derived and/or modified sequence
MSSSSPTGQIASAADIKQENGMESASEGQEAHREVAGGAAVGLSPPAPAPFPLEPGDAATAAARVSGEEGAVAAAAAGAAADQVQLHSELLGRHHHAAAAAAQTPLAFSPDHVACVCEALQQGGNLDRLARFLWSLPQSDLLRGNESLLKARALVAFHQGIYPELYSILESHSFESANHPLLQQLWYKARYTEAERARGRPLGAVDKYRLRRKFPLPRTIWDGEETVYCFKEKSRNALKELYKQNRYPSPAEKRHLAKITGLSLTQVSNWFKNRRQRDRNPSETQSKSESDGNPSTEDESSKGHEDLSPHPLSSSSDGITNLSLSSHMEPVYMQQIGNAKISLSSSGVLLNGSLVPASTSPVFLNGNSFIQGPSGVILNGLNVGNTQAVALNPPKMSSNIVSNGISMTDILGSTSQDVKEFKVLQSSANSATTTSYSPSVPVSFPGLIPSTEVKREGIQTVASQDGGSVVTFTTPVQINQYGIVQIPNSGANSQFLNGSIGFSPLQLPPVSVAASQGNISVSSSTSDGSTFTSESTTVQQGKVFLSSLAPSAVVYTVPNTGQTIGSVKQEGLERSLVFSQLMPVNQNAQVNANLSSENISGSGLHPLASSLVNVSPTHNFSLSPSTLLNPTELNRDIADSQPMSAPVASKSTVTSVSNTNYATLQNCSLITGQDLLSVPMTQAALGEIVPTAEDQVGHPSPAVHQDFVQEHRLVLQSVANMKENFLSNSESKATSSLMMLDSKSKYVLDGMVDTVCEDLETDKKELAKLQTVQLDEDMQDL

SEQ ID NO: 193121 - DNA, 6217 bp, Artificial Sequence
  derived and/or modified sequence
atgtcctcttcctcccccaccgggcagatcgcaagtgcggcggacatcaagcaagagaatgggatggaaagcgcctcggaagggcaggaggcgcaccgagaagtggcggggggcgcggcggtagggctgagccccccggctccagccccttttcccctggagccgggggacgccgcgaccgctgccgccagggtgagcggagaggaaggggcagtggcggcggcggcggccggagcggcggcggatcaggtacaactccactcggaacttctgggcaggcaccaccacgccgccgccgccgccgcgcagaccccgctggccttctcgcccgaccacgtcgcctgcgtgtgcgaggcactgcagcaggggggcaacctggaccgcctggcccggttcctgtggtccctgccccagagcgacctgctacgtggcaacgagagcctgctgaaggcgcgggcgctcgtggccttccaccagggcatctaccccgagctctacagcatcctcgagagccacagcttcgagtcggccaaccacccgctgctgcagcagctctggtacaaggcgcgctacaccgaggccgagcgagcccgcggccggccgctgggagccgtagacaagtaccggctgcgcaggaaattccccctgccccgcaccatctgggacggcgaggagacggtgtattgtttcaaggagaagtcgcgcaacgcgctcaaggagctctacaagcagaatcgctacccttcgcccgccgagaagcggcacctggccaagatcaccggcctctccctcacccaggtcagcaactggttcaagaaccgccggcagcgcgacaggaacccctccgagacccagtccaaaagtgagtcagatggcaaccccagcactgaagatgaatccagcaagggacatgaggatttatctcctcacccactctccagttcatctgatggcatcaccaacctcagcctttccagtcatatggagccagtatatatgcaacaaattggaaatgctaagatatcattaagctcttctggagttctgttgaatggaagcttggtacctgcaagtacttcacctgtcttccttaatggaaattcttttattcagggacccagtggagttatccttaatggattaaatgtgggaaatacacaggcagtggcattgaacccaccaaaaatgtcatcaaacattgtgagcaatggtatatccatgactgacatactggggtctacttcccaggacgtgaaggaattcaaagtcctccagagttctgctaactcagcaaccaccacgtcctacagccccagtgtccctgtctcattcccaggcctgatacccagcactgaggtgaaaagagaaggcattcaaacagtggcttcccaagatggagggtctgtagtgacttttactacaccagtgcaaattaaccagtatggcattgtccagatccccaattccggagcaaacagccagttccttaatgggagcattggattctctccactgcagctgccccctgtgtcagtggcagcttcacaaggtaatatctcagtaagctcaagcacttcagatggaagcacatttacaagtgagtctaccacagtccagcaaggaaaggttttcttgagctctcttgctcccagtgcagtggtatacacggttcctaatacaggccagactataggatctgtgaaacaggaaggcttggaaaggagcctggtattttctcagttgatgcctgtcaatcagaatgcacaagtaaatgcaaacctgtcttctgaaaacatctcggggagtggcctgcatccactggcctcctcattagttaatgtatctccaactcacaatttttctctcagtccctctacactactaaatcccactgagctaaaccgcgacattgccgatagccaaccaatgtctgcaccggtggcaagcaaatctactgtgacatctgtcagcaacactaactatgcaactcttcagaactgctcccttattactggtcaagacctattgtcagtccctatgactcaggctgcccttggggaaatagttcctacagctgaagatcaggtaggtcacccctccccagcagtacatcaggattttgtccaagaacatcgtttggttctgcaatcggtagctaacatgaaagagaatttcttatcaaattctgagagcaaagcaacaagtagcttaatgatgctggactctaaatccaagtatgtcttagatggcatggttgatactgtctgtgaagacctggaaacagacaaaaaagagcttgccaagctccagactgtccagctggatgaagatatgcaagacttatgaactttatttcctcctcacctctttttggcatcagcggcaaatcttttcatgaagccccaaggacacaaaacattttcccatttaaaggaaaacactctagttttgcaagtatatgcatacaagagactttagattgatctgcatgaagatcacagttaagtatacaggagtagaactgcattattgcagcctttttgttcacttataaatttctcttttaaatagatggagacaaaggacaaggtgaaatgtatcaagtcaaagtgaatcatttagttgactctataattctaaggtcaaaatggaacttgatagttttttaaattaaaaaatgtatacacctaacatagaaaattaaagatagctgcagaccattagaaataatacaattgtttttgtttacttttactccatgggcattgaaaaggttaagaaacataaatggtacatatttttaaagttaagtagcatgcatatatatatgcacacacacctctttttcagcattttttgagaaagtcttgggtctcaaacacatttgtctcaacacatttccaaatgtgatttctaatagctcagtgtggctgagaaagtgcggaactccactaaaaactctgaaacttcagtataaatgtaaatatatcagttctataagcaggatttgagtaattacagtgaattttatttttaatgtatatgtttctcttcaggcgctatgaactgaaaaatatgttttcttactgtttaatttatttttattgtttgaacaggaagtgaacatagtcgtttccaacaaagttttactttttgtaggattttaaaaataatgatttttaccaggaatctattaaggtcaatattaataacactgaaacaggaaatctaactcccaatattggaattttggtactttttttcacatccttgttctttatttagcaactctgattcatttaaatatgttttttatagaattctatgtgcctttttacctcgtggcctttttattggtagtaaggtacagaagtgtcaacagaagcactgatggttcttttctactatctaacagggttaatttcaccacaaaattgctttaaatctgaagaacttaagtttcactaaataatatatatgacatttatcacacaaatggataaacaactaattattgttgatacttttcattacaaggaaaataagttataaataccatgtcaaattgattatacaggctatgaaaaccattttaaaggaaagaaaatatgtaaattctattgagcaaaattctgtcctgttgaaacttagttctaaaggttttgaatcagttgttacactctgacacatgactgttgtttgcactatattatcatgtcttctttaaaagtaaatatttttggtttctgtaagaagcttgtttaataatgttgtaagccgtggctatagttttatcaagactctgaacacaagatgtaacaatgcaaataaatttatgtagtgagtaaagttgctctctagtctctgaaaagcaaaaaaagtgagaaaataatttcttcagagataacttcaagttgttgaacataaaggtgttagatgttagcacatcttgctttttttttttttttgagatggagtctcgctctgttgcccaggctggagtgcagtggcacgatcttggctcactgcaagctctgcctcctgggttcacgccattctcctgcctcagcctcccgagtagctgggactacaggcacctgccaccatgcccggctaaatttttgtatttttagtagagacggggtttcaccgtgttagccaggatggtcttgatctcctgacctcgtgatctgcccgcctcggcctcccaaagtgctgggattataggcatgagccactgtgcctggccacatcttgcttttttttttatgatcagaacaaagggcccactctagttctctacatgtcaatcaatcaagcatgttgaataagggacatagaggatttaacttttgttatcataaatggaacttgcaggcatatatcaagaaccctatgaagaattcctctcccatcattttgataaagaactacatcatttttgatagaattggtgaatgttcctaaactgctgaagctacatgttttttgttttgttttacaaagtcaggtgtttgagagttcttttccactctactactactcatagagcttgttttttctttgggtgtgtgctgatcctgttactgagattaattacatggctctgcagtgtagtttacataaaaatgatgttttccacttgattgctgcagatatcaagagtttgttattttcaaatacccatccaacaagagagatggggaggtttttagttatatatgctatatatatatatataactggaaatgttttatatgttttccgaaaatacaataagcctctcttttattcagtgttcttcctcttttctcccttatgaaaaagaaaagatagcacaaaacttaagacttacctaggaaacccattcatattcccaccatgatgtaattataaccctacaattacttcaggtagctacacaatataccaggtaagaatcaatgcacagtataaagaacttattgttcttttctattctttcagttgaataagggccagttggtatgcagcccatgtatatgtgaatggagtaagataaaccccatgatctccttgcacagaattgcaaatgtcttttgccataccaagggccagactcagaacccttggagtcatgtggcagaatttccctcttacataaaccaatgcttgaaaatgctgcaaatgaccctctaatgatccctgaagatcaaaacaggggtaaatgactccctgcaaaacccaacccatgctgctggctgtgggatttttggtgtaagcctatctatgcactctatcagccagaatttggcatttagctcttagttaaatctagtaaaggacagtctattgtttaaagagaaggtgcatttgttcctcaatcaagcaagagcacctgtgttgtactgctttatatctcatgtatatttatagtaatgaaaagactttttaaattgtacacgtttcagtgcctttcttgtgttatgaaaggcaggtagatattatagccataggtaaaaatccatagttaaattgcacactgaccttaaatctctctgtgtatgcccttgtatcttgcatgttaaaagttggattattgggcatgtgtggcagcctgccctgctacatgctagacaagtgtgctttagtacatagccacaagttcttcattctttaaaatgttttgacagatcatctcataataaaaataattcaggaaaactatggggaaatagttacatttcacaaaagatattttaaactctttgtaaaacttagataatagagcctagcagttactttgtatctaattgatacattttatgttaatttaccaccatacattttattaatcaaaattgtatagcatgtgactcttttggctttcagagttctcaaaaatattattttgttgcatgtactgtatgtttagaggcaaccaattatatactcaatatggttttactgtgccttacacaaagagaaactctatacagaatgtatatcatggggtggggtaacagagtctttactgcactgttaggtgatggcacacagagcatgtcccagaacatttctgtgcttaattacccaaccaaagagatctgaagtatgtatgtcgtactgtaatgggggtttatgcctggacaattaagtgttttatttgttttctgaaatgatgtgaacttatttttctaaacactatgctaaataaactttatatttatacatacaa

SEQ ID NO: 193122 - DNA, 2346 bp, Artificial Sequence
  derived and/or modified sequence
atgtccagcagctccccgaccggacagatagcaagtgcagccgatatcaaacaggagaacggaatggaatctgcatccgagggacaagaggctcatagagaggtcgcgggcggggccgccgtgggcctgtctccgcccgctcccgcacccttccccctggagcccggtgatgccgctactgctgccgctagggtgtccggtgaggagggagctgtggcagctgccgcagctggcgccgccgccgatcaggtgcagctccactctgagttgcttgggcgacaccaccatgcggccgccgcagccgctcaaacccccctggcatttagtcccgaccacgtcgcttgtgtgtgcgaggctctgcagcaaggggggaacttagatagacttgcccgattcctttggtccctgccacagagtgacctgctccgcggtaatgagtcccttcttaaggctagagccctggtggctttccaccagggaatctatccagagctctactctatattggagagtcactcttttgagagtgcgaaccaccctctgctacaacagctgtggtacaaagcccgatacacagaagccgagcgagccagaggcaggcccttgggcgcagtggataaatatcgccttcgacgcaaatttcctctgcctcggacaatctgggacggtgaagagaccgtttactgttttaaagaaaagagtcgtaacgccctgaaagagctgtataagcagaacaggtatccatcccctgcagaaaaacggcacttggccaagatcacaggactgtcccttacccaggtcagtaattggtttaaaaacaggaggcaacgagataggaacccttctgagactcaatctaagtctgagagcgatgggaacccaagtaccgaggatgagagtagcaaaggacacgaagacctcagtcctcaccccctttctagtagctctgacgggatcacgaaccttagtctgtcctcccacatggagcctgtgtatatgcaacagatcggtaatgcgaagatttcgctgtcatcctccggagtgttgttaaatggttcactggtgccagccagcacgtcaccagtattcttaaatggtaacagtttcatccaagggccaagtggagtgatcttgaacggtctcaacgtggggaacacccaagccgtggcgctaaacccgccaaagatgtcctccaacattgtgtccaacggaataagtatgacagacattctggggtccaccagccaagacgtgaaggaattcaaggtccttcagtctagtgctaactctgcaacgacaaccagctatagtcccagtgtccccgtgagctttcctggattgatcccttccacagaagtaaagcgtgaaggaatccagacagtcgcaagccaggatggtggaagcgtagtgaccttcacaacgcctgtccagatcaatcagtatggcatcgtacagattccaaattccggagccaatagtcagttccttaacggatccatagggtttagtcctctccaacttccccccgtgagtgtggctgcttcacagggcaacatttctgtgtcctcatctacctcagatgggtccacgttcacgtcagagtccactacagttcagcaaggaaaagtgtttttgagtagccttgccccgtctgctgtcgtgtacacagtgccgaataccggccagacaatcggttctgtgaagcaggagggccttgagcgcagcctagtctttagccaattaatgcctgtgaaccagaacgctcaggtaaacgctaatctgtcttccgaaaacatctccggctcaggactacacccccttgcctctagcctggtcaatgtcagtcccacccataatttttctctgagcccaagcaccttgctgaaccctaccgaattgaatagagatatcgccgactcccagccaatgtctgcgccggttgccagcaaatcaacagttacgagtgtgtcaaatacaaattacgccaccctgcagaattgcagcctcatcacaggtcaagatttgctgtcagttcccatgacccaggcggcactgggagagattgtacccacagctgaggaccaggttggtcacccctctcccgcggtgcatcaggatttcgtgcaggaacacaggctggtgctgcagagcgtcgcaaacatgaaagagaacttcctttctaactccgaaagcaaggcgacatcttcgttgatgatgctggatagcaaatcgaagtatgtgttagatggcatggtggacaccgtttgcgaggacctagagacagataaaaaggagttggctaagcttcagaccgtacagctggatgaagacatgcaggatctttag

SEQ ID NO: 193123 - DNA, 2346 bp, Artificial Sequence
  derived and/or modified sequence
atgagcagcagcagccccaccggccagatcgccagcgctgctgacatcaagcaggagaatggcatggagagcgccagcgagggccaggaggcccaccgggaggtggccggcggcgctgctgtgggcctgagccccccagccccagcccccttccccctggagcctggagatgctgccacagctgctgcccgggtgtctggagaggagggcgctgtggccgctgctgctgctggagctgctgctgaccaggtgcagctgcacagcgagctgctgggccgccaccaccacgccgctgctgctgctgcccagacccccctggccttctccccagaccacgtggcctgtgtgtgtgaggccctgcagcagggcggcaacctggaccggctggcccgcttcctgtggagcctgccccagagcgacctgctgcggggaaatgaaagcctgctgaaggcccgggccctggtggccttccaccagggcatctacccagagctgtacagcatcctggagagccacagctttgagagcgccaaccaccccctgctgcagcagctgtggtacaaggcccgctacacagaggccgagcgggcccggggccggcccctgggcgctgtggacaagtaccgcctgcggaggaagttccccctgcccaggaccatctgggatggagaggagaccgtgtactgcttcaaggagaagagcagaaatgccctgaaggagctgtacaagcagaaccgctaccccagccctgctgagaagaggcacctggccaagatcaccggcctgagcctgacccaggtgagcaactggttcaagaacagacggcagagggacaggaaccccagcgagacccagagcaagtctgagagtgatggcaaccccagcacagaagatgagagcagcaagggccacgaggacctgagcccccaccccctgagcagcagcagtgatggcatcaccaacctgagcctgagcagccacatggagcctgtgtacatgcagcagattggaaatgccaagatcagcctgagcagcagcggcgtgctgctgaatggcagcctggtgcctgccagcaccagccctgtgttcctgaatggaaacagcttcatccagggccccagcggggtcatcctgaatggcctgaatgtgggcaacacccaggccgtggccctgaacccccccaagatgagcagcaacatcgtgtccaatggcatctccatgacagacatcctgggcagcaccagccaggatgtgaaggagttcaaggtgctgcagagcagcgccaacagcgccaccaccaccagctacagccccagcgtgcctgtgtccttccctggcctcatccccagcacagaggtgaagcgggagggcatccagacagtggccagccaggacggcggctctgtggtgaccttcaccacccctgtgcagatcaaccagtatggaattgtgcagatccccaacagcggggccaacagccagttcctgaatggcagcatcggcttcagccccctgcagctgccccctgtgtctgtggccgccagccagggcaacatctctgtgagcagcagcaccagtgatggcagcaccttcaccagcgagagcaccaccgtgcagcagggcaaggtgttcctgagcagcctggcccccagcgctgtggtgtacacagtgcccaacacaggccagaccatcggctctgtgaagcaggagggcctggagaggagcctggtgttcagccagctgatgcctgtgaaccagaatgcccaggtgaatgccaacctgagcagcgagaacatcagcggcagcggcctgcaccccctggccagcagcctggtgaatgtgagccccacccacaacttcagcctgagccccagcaccctgctgaaccccacagagctgaacagagacattgctgacagccagcccatgtctgcccctgtggccagcaagagcacagtgacctctgtgagcaacaccaactatgccaccctgcagaactgcagcctcatcaccggccaggacctgctgtctgtgcccatgacccaggccgccctgggggagatcgtgcccacagctgaggaccaggtgggccaccccagccctgctgtgcaccaggactttgtgcaggagcaccggctggtgctgcagagcgtggccaacatgaaggagaacttcctgagcaacagcgagagcaaggccaccagcagcctgatgatgctggacagcaagagcaaatatgtgctggatggcatggtggacacagtgtgtgaggacctggagacagacaagaaggagctggccaagctgcagacagtgcagctggatgaggacatgcaggacctgtag

SEQ ID NO: 193124 - DNA, 2346 bp, Artificial Sequence
  derived and/or modified sequence
atgagcagcagcagccccaccggccagatcgccagcgccgccgacatcaaacaggagaacgggatggaatctgctagcgagggacaggaagcccacagagaagtcgcagggggagcggccgtggggctatctcctccagcccccgctccgttcccccttgagccaggcgacgccgctactgcggcggccagagtgagcggagaagagggcgccgtggctgccgccgccgccggggccgcagcagaccaggtgcagctacattctgaactcctgggccgtcaccatcatgccgctgcagctgctgctcagacacccctggccttctcacctgatcacgtggcttgcgtgtgcgaagcactacagcaaggaggtaatctagaccgtcttgcaagatttctgtggtctcttccacagagtgacttactacgcggaaatgagtctcttttgaaggccagagctctggtggcgttccaccaaggtatatacccagagctgtattcaatccttgagtcgcattcttttgaatcagccaatcaccctttgctccaacaactgtggtataaagcacggtacactgaggccgaaagagcacgcgggaggcccctgggagctgtggataaatacaggctgcggaggaaatttccccttcctaggacaatttgggacggggaggaaactgtgtattgtttcaaggagaagtctcgaaatgccctaaaagaattgtataagcaaaaccgatacccaagtcctgctgagaagaggcacctggccaaaatcaccggcctgtcacttactcaggtgtcaaactggttcaagaatcgaaggcagagagacagaaacccatccgaaactcaatccaagtctgaatctgatggcaatccttctacggaggatgaaagtagtaagggccacgaggatctgtccccacatcccctgtccagtagcagcgacggcattaccaatttaagcctgagctctcacatggaacctgtctacatgcagcagatagggaatgccaagatcagcctgtcctctagcggtgtgctccttaacggaagtctagtcccagcctccacctcaccagtttttctgaatggtaatagtttcatccagggcccctcgggcgtgattctgaatggcctcaacgttggcaacacccaagcggtcgccctgaatcccccgaaaatgagtagcaacatcgtgagcaatggtatttctatgacagacattctcggctcgacatctcaggatgtgaaggaattcaaggtgttgcagagcagcgccaacagcgcaacaactacttcatactctccatctgttcccgtgagcttcccagggctaattccaagcactgaagtgaaacgggaaggaattcagaccgtcgcgagccaggacggcggcagtgtggtaacatttacaacccctgtccagatcaatcagtatgggatcgtacagattcccaacagcggcgccaactctcagttcctgaacggatccatcgggtttagtcccctgcaactgccgcctgttagtgtggctgcgagccaggggaatattagcgtgagctcttccacctccgatggctctactttcacatccgaatcgactaccgtgcagcagggtaaggtgtttctctcttctctcgccccgtctgccgtagtttacaccgttcccaacaccggccagacgattggctccgttaaacaggagggtctggagagatctttagtattctcccaactcatgcccgttaaccagaacgctcaggtgaacgctaatctgtccagcgagaacattagtgggtcaggactgcatcccctagcctcctctctggttaacgtgtctcctacacacaacttcagtctgtctccttcaacactgttaaatccaaccgaactgaaccgcgacattgctgattcccagccaatgtccgcacccgttgcctccaaatccacagtcacatcggtttcgaacaccaattatgccacccttcagaattgcagcttaattactgggcaagacctcctcagtgtgcctatgacccaggctgcccttggcgagatcgtcccaactgccgaggatcaagtgggacatccatctccagccgtccaccaggattttgtgcaagaacaccgtctggtcctccagagtgtagccaacatgaaagagaatttccttagtaactctgagagcaaggcaacaagcagcctcatgatgctggatagcaagtccaaatacgtgctagatggcatggtagataccgtgtgtgaggatctagaaaccgataagaaggaattagcgaagctgcaaaccgtacagcttgacgaggacatgcaggacctgtag

SEQ ID NO: 193125 - DNA, 2346 bp, Artificial Sequence
  derived and/or modified sequence
atgagctcctcctctcctaccgggcaaatagcatccgctgccgacatcaaacaggagaatggaatggagagtgcatctgagggacaggaggctcatagggaagtggccggaggcgcagccgtgggtcttagcccacccgctccagccccttttcctctagagccgggagatgctgccaccgccgctgctagggtgagtggggaagagggagcagtggccgcagccgctgccggagcagcggcagaccaagttcagctacactccgaactcctggggcgacatcatcacgctgcagctgcagctgcccaaactcccctggcttttagcccggaccatgtcgcgtgcgtctgtgaggccctgcagcaagggggtaacctggaccgacttgccaggtttctgtggtctctcccccaatccgacttgctgcggggaaacgaaagtttactgaaggctagagcactggtcgcctttcaccaggggatatatcccgaattgtactcaatactggagtctcactcctttgagagcgcgaaccaccccctgttgcagcaactgtggtataaagctagatatacggaagctgaaagagcccgtggacggcctttgggcgcagtagataagtatcgcctgcgcagaaagtttcctctcccccgaaccatatgggatggagaagaaactgtgtattgtttcaaagagaagtctagaaacgccctgaaagagttgtacaagcagaatcggtatcccagccccgctgaaaaaagacatctggccaagatcaccgggctgtcactgacacaggtttcaaattggtttaagaatcggaggcagagggatagaaacccttctgagacacagtctaagagcgagtcagacggaaaccccagtaccgaggacgagagttctaagggacacgaagacctgtcacctcaccccctgagctcctctagtgatggcatcacgaatctcagcctcagctctcacatggaacccgtatatatgcagcagattggcaacgccaaaatcagcctgtccagcagcggagtgcttctaaatggctctctggtgccagccagtacgtcacctgtattccttaatggaaactctttcatacagggaccatccggagtgatcctgaatggactgaacgtgggtaacacccaggctgttgccctgaatcctccaaagatgagctcgaatatcgtgtccaacgggatttctatgacggacattctgggttctaccagtcaggacgtgaaagaattcaaagttctccagagctccgccaactcggccacaactactagctatagcccctctgttcccgtcagtttcccaggcctcatcccttctaccgaggtcaagcgggagggtatacagaccgtggcttcgcaggacggtgggagcgttgtgacatttaccacccccgttcagattaaccaatacggaatagtccagatccccaattctggcgctaattctcaatttctgaatggcagtattggtttcagtccacttcagttgccaccagtatctgttgccgctagtcaaggtaatatcagcgtgtcttcaagtaccagtgatggatccacgtttacaagtgagtctacaacggttcagcagggtaaggtgttcttgagtagcctggccccatctgccgttgtctacacagttccgaacaccgggcagacgatcggctcagtgaaacaggaggggcttgagagatcactagtttttagccagcttatgcccgtgaatcagaatgcccaggtcaatgcgaatctatcctcagaaaacatttctggctctggcttgcaccctttggcttccagcctagtgaacgtctcgcctacccataacttcagtctgagtccttctacactgctgaaccctacagagttaaatcgcgacattgcagactctcagccaatgtcggcccctgtggcttcaaaaagcaccgtcacaagcgtgtctaacaccaactatgccactttgcagaattgtagcctgatcactgggcaggatttactgtcagtacccatgactcaggccgcactaggcgagattgtccctaccgctgaggaccaggtaggccaccccagcccagcagtccaccaagacttcgtgcaggagcaccgcctcgttcttcagagcgtggccaacatgaaggaaaattttctgtccaattcagagagcaaggcgaccagctcattgatgatgctggacagtaagtctaaatacgtcctggatggaatggttgataccgtttgtgaggatttggaaaccgacaagaaagaactggcgaagctacagactgttcaattggacgaagacatgcaggacctgtag

SEQ ID NO: 193126 - DNA, 2346 bp, Artificial Sequence
  derived and/or modified sequence
atgagcagcagcagccccaccggccagatcgccagcgccgccgacatcaagcaggagaacggcatggagagcgccagcgagggccaggaggcccacagagaggtggccggcggcgccgccgtgggcctgagcccccccgcccccgcccccttccccctggagcccggcgacgccgccaccgccgccgccagagtgagcggcgaggagggcgccgtggccgccgccgccgccggcgccgccgccgaccaggtgcagctgcacagcgagctgctgggcagacaccaccacgccgccgccgccgccgcccagacccccctggccttcagccccgaccacgtggcctgcgtgtgcgaggccctgcagcagggcggcaacctggacagactggccagattcctgtggagcctgccccagagcgacctgctgagaggcaacgagagcctgctgaaggccagagccctggtggccttccaccagggcatctaccccgagctgtacagcatcctggagagccacagcttcgagagcgccaaccaccccctgctgcagcagctgtggtacaaggccagatacaccgaggccgagagagccagaggcagacccctgggcgccgtggacaagtacagactgagaagaaagttccccctgcccagaaccatctgggacggcgaggagaccgtgtactgcttcaaggagaagagcagaaacgccctgaaggagctgtacaagcagaacagataccccagccccgccgagaagagacacctggccaagatcaccggcctgagcctgacccaggtgagcaactggttcaagaacagaagacagagagacagaaaccccagcgagacccagagcaagagcgagagcgacggcaaccccagcaccgaggacgagagcagcaagggccacgaggacctgagcccccaccccctgagcagcagcagcgacggcatcaccaacctgagcctgagcagccacatggagcccgtgtacatgcagcagatcggcaacgccaagatcagcctgagcagcagcggcgtgctgctgaacggcagcctggtgcccgccagcaccagccccgtgttcctgaacggcaacagcttcatccagggccccagcggcgtgatcctgaacggcctgaacgtgggcaacacccaggccgtggccctgaacccccccaagatgagcagcaacatcgtgagcaacggcatcagcatgaccgacatcctgggcagcaccagccaggacgtgaaggagttcaaggtgctgcagagcagcgccaacagcgccaccaccaccagctacagccccagcgtgcccgtgagcttccccggcctgatccccagcaccgaggtgaagagagagggcatccagaccgtggccagccaggacggcggcagcgtggtgaccttcaccacccccgtgcagatcaaccagtacggcatcgtgcagatccccaacagcggcgccaacagccagttcctgaacggcagcatcggcttcagccccctgcagctgccccccgtgagcgtggccgccagccagggcaacatcagcgtgagcagcagcaccagcgacggcagcaccttcaccagcgagagcaccaccgtgcagcagggcaaggtgttcctgagcagcctggcccccagcgccgtggtgtacaccgtgcccaacaccggccagaccatcggcagcgtgaagcaggagggcctggagagaagcctggtgttcagccagctgatgcccgtgaaccagaacgcccaggtgaacgccaacctgagcagcgagaacatcagcggcagcggcctgcaccccctggccagcagcctggtgaacgtgagccccacccacaacttcagcctgagccccagcaccctgctgaaccccaccgagctgaacagagacatcgccgacagccagcccatgagcgcccccgtggccagcaagagcaccgtgaccagcgtgagcaacaccaactacgccaccctgcagaactgcagcctgatcaccggccaggacctgctgagcgtgcccatgacccaggccgccctgggcgagatcgtgcccaccgccgaggaccaggtgggccaccccagccccgccgtgcaccaggacttcgtgcaggagcacagactggtgctgcagagcgtggccaacatgaaggagaacttcctgagcaacagcgagagcaaggccaccagcagcctgatgatgctggacagcaagagcaagtacgtgctggacggcatggtggacaccgtgtgcgaggacctggagaccgacaagaaggagctggccaagctgcagaccgtgcagctggacgaggacatgcaggacctgtag

SEQ ID NO: 193127 - DNA, 6285 bp, Artificial Sequence
  derived and/or modified sequence
ggaaagaaagaggaaaagagtgcgagggagtgagggagggaggaaaataaacaacaaaaaatgtcctcttcctcccccaccgggcagatcgcaagtgcggcggacatcaagcaagagaatgggatggaaagcgcctcggaagggcaggaggcgcaccgagaagtggcggggggcgcggcggtagggctgagccccccggctccagccccttttcccctggagccgggggacgccgcgaccgctgccgccagggtgagcggagaggaaggggcagtggcggcggcggcggccggagcggcggcggatcaggtacaactccactcggaacttctgggcaggcaccaccacgccgccgccgccgccgcgcagaccccgctggccttctcgcccgaccacgtcgcctgcgtgtgcgaggcactgcagcaggggggcaacctggaccgcctggcccggttcctgtggtccctgccccagagcgacctgctacgtggcaacgagagcctgctgaaggcgcgggcgctcgtggccttccaccagggcatctaccccgagctctacagcatcctcgagagccacagcttcgagtcggccaaccacccgctgctgcagcagctctggtacaaggcgcgctacaccgaggccgagcgagcccgcggccggccgctgggagccgtagacaagtaccggctgcgcaggaaattccccctgccccgcaccatctgggacggcgaggagacggtgtattgtttcaaggagaagtcgcgcaacgcgctcaaggagctctacaagcagaatcgctacccttcgcccgccgagaagcggcacctggccaagatcaccggcctctccctcacccaggtcagcaactggttcaagaaccgccggcagcgcgacaggaacccctccgagacccagtccaaaagtgagtcagatggcaaccccagcactgaagatgaatccagcaagggacatgaggatttatctcctcacccactctccagttcatctgatggcatcaccaacctcagcctttccagtcatatggagccagtatatatgcaacaaattggaaatgctaagatatcattaagctcttctggagttctgttgaatggaagcttggtacctgcaagtacttcacctgtcttccttaatggaaattcttttattcagggacccagtggagttatccttaatggattaaatgtgggaaatacacaggcagtggcattgaacccaccaaaaatgtcatcaaacattgtgagcaatggtatatccatgactgacatactggggtctacttcccaggacgtgaaggaattcaaagtcctccagagttctgctaactcagcaaccaccacgtcctacagccccagtgtccctgtctcattcccaggcctgatacccagcactgaggtgaaaagagaaggcattcaaacagtggcttcccaagatggagggtctgtagtgacttttactacaccagtgcaaattaaccagtatggcattgtccagatccccaattccggagcaaacagccagttccttaatgggagcattggattctctccactgcagctgccccctgtgtcagtggcagcttcacaaggtaatatctcagtaagctcaagcacttcagatggaagcacatttacaagtgagtctaccacagtccagcaaggaaaggttttcttgagctctcttgctcccagtgcagtggtatacacggttcctaatacaggccagactataggatctgtgaaacaggaaggcttggaaaggagcctggtattttctcagttgatgcctgtcaatcagaatgcacaagtaaatgcaaacctgtcttctgaaaacatctcggggagtggcctgcatccactggcctcctcattagttaatgtatctccaactcacaatttttctctcagtccctctacactactaaatcccactgagctaaaccgcgacattgccgatagccaaccaatgtctgcaccggtggcaagcaaatctactgtgacatctgtcagcaacactaactatgcaactcttcagaactgctcccttattactggtcaagacctattgtcagtccctatgactcaggctgcccttggggaaatagttcctacagctgaagatcaggtaggtcacccctccccagcagtacatcaggattttgtccaagaacatcgtttggttctgcaatcggtagctaacatgaaagagaatttcttatcaaattctgagagcaaagcaacaagtagcttaatgatgctggactctaaatccaagtatgtcttagatggcatggttgatactgtctgtgaagacctggaaacagacaaaaaagagcttgccaagctccagactgtccagctggatgaagatatgcaagacttatgaactttatttcctcctcacctctttttggcatcagcggcaaatcttttcatgaagccccaaggacacaaaacattttcccatttaaaggaaaacactctagttttgcaagtatatgcatacaagagactttagattgatctgcatgaagatcacagttaagtatacaggagtagaactgcattattgcagcctttttgttcacttataaatttctcttttaaatagatggagacaaaggacaaggtgaaatgtatcaagtcaaagtgaatcatttagttgactctataattctaaggtcaaaatggaacttgatagttttttaaattaaaaaatgtatacacctaacatagaaaattaaagatagctgcagaccattagaaataatacaattgtttttgtttacttttactccatgggcattgaaaaggttaagaaacataaatggtacatatttttaaagttaagtagcatgcatatatatatgcacacacacctctttttcagcattttttgagaaagtcttgggtctcaaacacatttgtctcaacacatttccaaatgtgatttctaatagctcagtgtggctgagaaagtgcggaactccactaaaaactctgaaacttcagtataaatgtaaatatatcagttctataagcaggatttgagtaattacagtgaattttatttttaatgtatatgtttctcttcaggcgctatgaactgaaaaatatgttttcttactgtttaatttatttttattgtttgaacaggaagtgaacatagtcgtttccaacaaagttttactttttgtaggattttaaaaataatgatttttaccaggaatctattaaggtcaatattaataacactgaaacaggaaatctaactcccaatattggaattttggtactttttttcacatccttgttctttatttagcaactctgattcatttaaatatgttttttatagaattctatgtgcctttttacctcgtggcctttttattggtagtaaggtacagaagtgtcaacagaagcactgatggttcttttctactatctaacagggttaatttcaccacaaaattgctttaaatctgaagaacttaagtttcactaaataatatatatgacatttatcacacaaatggataaacaactaattattgttgatacttttcattacaaggaaaataagttataaataccatgtcaaattgattatacaggctatgaaaaccattttaaaggaaagaaaatatgtaaattctattgagcaaaattctgtcctgttgaaacttagttctaaaggttttgaatcagttgttacactctgacacatgactgttgtttgcactatattatcatgtcttctttaaaagtaaatatttttggtttctgtaagaagcttgtttaataatgttgtaagccgtggctatagttttatcaagactctgaacacaagatgtaacaatgcaaataaatttatgtagtgagtaaagttgctctctagtctctgaaaagcaaaaaaagtgagaaaataatttcttcagagataacttcaagttgttgaacataaaggtgttagatgttagcacatcttgctttttttttttttttgagatggagtctcgctctgttgcccaggctggagtgcagtggcacgatcttggctcactgcaagctctgcctcctgggttcacgccattctcctgcctcagcctcccgagtagctgggactacaggcacctgccaccatgcccggctaaatttttgtatttttagtagagacggggtttcaccgtgttagccaggatggtcttgatctcctgacctcgtgatctgcccgcctcggcctcccaaagtgctgggattataggcatgagccactgtgcctggccacatcttgcttttttttttatgatcagaacaaagggcccactctagttctctacatgtcaatcaatcaagcatgttgaataagggacatagaggatttaacttttgttatcataaatggaacttgcaggcatatatcaagaaccctatgaagaattcctctcccatcattttgataaagaactacatcatttttgatagaattggtgaatgttcctaaactgctgaagctacatgttttttgttttgttttacaaagtcaggtgtttgagagttcttttccactctactactactcatagagcttgttttttctttgggtgtgtgctgatcctgttactgagattaattacatggctctgcagtgtagtttacataaaaatgatgttttccacttgattgctgcagatatcaagagtttgttattttcaaatacccatccaacaagagagatggggaggtttttagttatatatgctatatatatatatataactggaaatgttttatatgttttccgaaaatacaataagcctctcttttattcagtgttcttcctcttttctcccttatgaaaaagaaaagatagcacaaaacttaagacttacctaggaaacccattcatattcccaccatgatgtaattataaccctacaattacttcaggtagctacacaatataccaggtaagaatcaatgcacagtataaagaacttattgttcttttctattctttcagttgaataagggccagttggtatgcagcccatgtatatgtgaatggagtaagataaaccccatgatctccttgcacagaattgcaaatgtcttttgccataccaagggccagactcagaacccttggagtcatgtggcagaatttccctcttacataaaccaatgcttgaaaatgctgcaaatgaccctctaatgatccctgaagatcaaaacaggggtaaatgactccctgcaaaacccaacccatgctgctggctgtgggatttttggtgtaagcctatctatgcactctatcagccagaatttggcatttagctcttagttaaatctagtaaaggacagtctattgtttaaagagaaggtgcatttgttcctcaatcaagcaagagcacctgtgttgtactgctttatatctcatgtatatttatagtaatgaaaagactttttaaattgtacacgtttcagtgcctttcttgtgttatgaaaggcaggtagatattatagccataggtaaaaatccatagttaaattgcacactgaccttaaatctctctgtgtatgcccttgtatcttgcatgttaaaagttggattattgggcatgtgtggcagcctgccctgctacatgctagacaagtgtgctttagtacatagccacaagttcttcattctttaaaatgttttgacagatcatctcataataaaaataattcaggaaaactatggggaaatagttacatttcacaaaagatattttaaactctttgtaaaacttagataatagagcctagcagttactttgtatctaattgatacattttatgttaatttaccaccatacattttattaatcaaaattgtatagcatgtgactcttttggctttcagagttctcaaaaatattattttgttgcatgtactgtatgtttagaggcaaccaattatatactcaatatggttttactgtgccttacacaaagagaaactctatacagaatgtatatcatggggtggggtaacagagtctttactgcactgttaggtgatggcacacagagcatgtcccagaacatttctgtgcttaattacccaaccaaagagatctgaagtatgtatgtcgtactgtaatgggggtttatgcctggacaattaagtgttttatttgttttctgaaatgatgtgaacttatttttctaaacactatgctaaataaactttatatttatacataccttgcattga

SEQ ID NO: 193128 - protein, 369 aa, Artificial Sequence
  derived and/or modified sequence
MWSGRKLGSSGGWFLRVLGPGGCNTKAARPLISSAVYVKNQLSGTLQIKPGVFNEYRTIWFKSYRTIFSCLNRIKSFRYPWARLYSTSQTTVDSGEVKTFLALAHKWWDEQGVYAPLHSMNDLRVPFIRDNLLKTIPNHQPGKPLLGMKILDVGCGGGLLTEPLGRLGASVIGIDPVDENIKTAQCHKSFDPVLDKRIEYRVCSLEEIVEETAETFDAVVASEVVEHVIDLETFLQCCCQVLKPGGSLFITTINKTQLSYALGIVFSEQIASIVPKGTHTWEKFVSPETLESILESNGLSVQTVVGMLYNPFSGYWHWSENTSLNYAAYAVKSRVQEHPASAEFVLKGETEELQANACTNPAVHEKLKK

SEQ ID NO: 193129 - DNA, 1110 bp, Artificial Sequence
  derived and/or modified sequence
atgtggtccgggagaaagctgggaagcagcggaggatggttcttaagagtgctaggcccaggcgggtgcaatactaaggcagctcggccactcatctcatcggctgtgtatgttaagaaccagttatccggaactctgcaaatcaagcctggcgtgttcaatgagtatagaaccatttggtttaagtcttatcggactatctttagctgtctgaatcgcatcaaatcatttagatatccctgggcacgactgtattccacaagccaaacgactgttgactcgggggaagtcaagacattcctggcactggcccataagtggtgggatgagcagggagtgtacgctccccttcactcaatgaacgacctaagggtgccattcatcagagacaatctccttaagaccataccgaaccatcagcctggaaagccccttctgggtatgaagatacttgacgtaggctgtgggggagggcttctgacagagcctctcgggaggttgggcgcaagcgtaataggaattgatccagtcgatgagaacatcaagacggcccaatgccataagtcatttgatcccgtactggataaacggattgagtatagagtctgttccctcgaggaaattgttgaggaaactgccgaaacttttgatgcagtggtcgccagcgaggtggttgagcacgtaattgacctggaaacttttttgcaatgttgctgtcaggttctgaaacccggcggatctctgttcatcaccaccattaataagacacagttatcatacgctttgggaattgtgttctctgagcagatcgcctccatagtgcccaagggaacccacacctgggagaagtttgtgagcccagagaccctggagtcaatactggagtccaacgggctgtctgtgcagacggttgtgggaatgctgtataatcccttcagtgggtactggcactggtccgaaaatacctcactgaattacgccgcttatgccgtcaagtctagggtccaagagcatcccgctagcgccgaattcgttcttaagggtgaaacagaggaactgcaggcaaacgcttgtacaaaccctgccgtgcacgagaaactgaaaaagtag

SEQ ID NO: 193130 - DNA, 1110 bp, Artificial Sequence
  derived and/or modified sequence
atgtggagcggcaggaagctgggcagcagcggcggctggttcctgcgggtgctgggccctgggggctgcaacaccaaggccgcccggcccctcatcagcagcgctgtgtatgtgaagaaccagctgagcggcaccctgcagatcaagccaggagtcttcaatgagtaccgcaccatctggttcaagagctaccgcaccatcttcagctgcctgaaccgcatcaagagcttccgctacccctgggcccggctgtacagcaccagccagaccaccgtggacagcggggaggtgaagaccttcctggccctggcccacaagtggtgggatgagcagggcgtgtatgcccccctgcacagcatgaatgacctgcgggtgcccttcatccgggacaacctgctgaagaccatccccaaccaccagcccgggaagcccctgctgggcatgaagatcctggatgtgggctgcggcggcggcctgctgacagagcccctgggccgcctgggcgccagcgtcatcggcatcgaccctgtggatgagaacatcaagacagcccagtgccacaagagctttgatcctgtgctggacaagagaattgagtacagagtgtgcagcctggaggagatcgtggaggagacagctgagacctttgatgctgtggtggccagcgaggtggtggagcacgtgattgacctggagaccttcctgcagtgctgctgccaggtgctgaagccaggcggcagcctcttcatcaccaccatcaacaagacccagctgtcctatgccctgggcatcgtgttttctgagcagatcgccagcatcgtgcccaagggcacccacacctgggagaagtttgtgtccccagagaccctggagagcatcctggagagcaatggcctgtctgtgcagacagtggtgggcatgctgtacaaccccttcagcggctactggcactggagcgagaacaccagcctgaactatgctgcctatgctgtgaagagccgggtgcaggagcacccagccagcgctgagtttgtgctgaagggggagacagaggagctgcaggccaatgcctgcaccaacccagctgtgcatgagaagctgaagaagtag

SEQ ID NO: 193131 - DNA, 1110 bp, Artificial Sequence
  derived and/or modified sequence
atgtggagcggccggaagctgggcagcagcggcggctggttcctgcgggttttgggccctggcgggtgtaacactaaggctgcccgtccgcttattagctcggccgtgtatgtgaagaatcagctaagcgggaccctgcagataaagcctggtgtattcaacgaatatcgaacaatctggttcaagagctaccgcactatcttcagctgtctaaatcggatcaagagcttccgctatccttgggcccgactctatagcacttcgcagaccactgttgatagtggcgaggtcaaaacctttctggctctggcccacaagtggtgggacgaacagggcgtatatgcgcccctgcattcaatgaacgacctgagggtgccattcatcagggacaatctgctgaagactatccccaaccaccagcccggcaaacctctgcttggcatgaagatcctggacgtgggttgcggcggcgggcttcttacagagcccttgggacgattaggagcaagcgtaatcggaattgatcctgtggacgagaacattaagacagcacagtgccacaagtcattcgatccagtgctggacaaaaggatcgaatacagagtctgctcgctcgaggagatagtggaggagaccgcagagactttcgacgccgtggtagcatccgaggtcgtcgaacacgtgatagaccttgaaacctttcttcagtgctgctgccaagtgttgaagcctgggggtagtttgtttatcactactatcaacaaaactcagctgagctacgcattaggtattgtctttagtgaacagatcgcaagcatcgtcccgaaggggactcatacctgggagaaattcgtttcccctgaaaccctggaatccatcctcgaaagcaatggcctgtccgttcagacagtcgtcggtatgctgtacaatccttttagcggctattggcattggagtgagaatacaagtctcaactacgccgcttacgctgtgaagtctcgtgtgcaggaacatcccgcgtccgctgaattcgtgctgaaaggggagacggaagagctgcaggccaatgcttgcaccaaccccgcagttcacgagaagttgaagaaatag

SEQ ID NO: 193132 - DNA, 1110 bp, Artificial Sequence
  derived and/or modified sequence
atgtggtccggtcggaagcttggttccagtgggggttggttcttaagagttctaggcccaggtggatgtaacaccaaagccgctaggccattgatcagttcggctgtatacgtcaagaaccaactttccggaacccttcaaataaagcccggagtgttcaatgagtatcgcaccatctggttcaaaagttataggacgatcttctcctgcctcaaccgcattaagtcattcagatacccttgggcacgactgtattccacctcgcagacgacagtggattcgggtgaggtgaaaacctttcttgccctcgcacacaaatggtgggatgaacagggagtctacgccccactccactcaatgaacgacttgagggtgcccttcatacgagacaaccttctgaaaacaattcctaaccatcagcctgggaaacctctcctcgggatgaaaattctggacgtgggttgcggtggtggcctacttactgaacccctgggtagactcggagccagtgtaatcggcatcgaccctgtagacgaaaatatcaagacagcccagtgtcataagagcttcgacccagttctagacaaaaggattgagtaccgggtttgtagcttagaggaaatcgtggaggagaccgccgagacattcgatgccgtagtggcgtctgaagtggtcgagcatgtcattgacctggagacattcctgcaatgctgttgtcaagttcttaaacccggaggcagcttgttcattacaacaattaataaaacccaactcagttacgccctgggcattgtattcagtgaacagattgcatcaatcgttccaaaaggcacccacacatgggaaaagttcgtgtcacctgaaactctcgaatctatcctggagagcaatggcctgagtgtccagaccgtcgtgggcatgctctataaccctttctcaggctattggcattggtctgagaatacatctctcaactacgctgcatacgctgtgaagtcgagagtacaggagcatcccgcttccgctgaattcgtactgaagggggaaacagaggaactgcaagccaacgcgtgtaccaacccagctgtacacgaaaagctcaaaaaatag

SEQ ID NO: 193133 - DNA, 1335 bp, Artificial Sequence
  derived and/or modified sequence
aaaagaggtgggatcgtttgtcgcgatgtggagtggccgtaagctgggctcctccgggggttggtttttaagagtgctggggcctggaggctgtaatacaaaagctgcgcgtcccttaatttcctcggcggtttatgtgaagaaccagctcagtgggactctacagattaaaccaggggttttcaatgaatacagaaccatatggttcaaatcctacaggacgatcttttcctgtttgaacagaataaagagtttcaggtacccttgggcgagactgtacagtacttcccaaaccactgtcgacagcggtgaggtaaaaaccttcttggccctggctcacaaatggtgggatgaacaaggagtatatgcacctcttcattccatgaatgacctgagggtgccatttattagggacaatcttctgaaaacaattcctaatcaccagccaggaaaacctttgttggggatgaagattcttgacgttggctgtggtggtgggctgttaactgaacctctagggcggcttggggcttcagttattggaatcgaccctgtggatgagaacattaaaacagcacaatgccataaatcatttgatccagtcctggataagagaatagagtacagagtgtgttccctggaagagattgtggaagagactgcagaaacatttgatgctgttgtagcttctgaagttgtagaacatgtgattgatctagaaacatttttacagtgctgctgtcaagtgttaaaacccggtggttctttattcattactacaatcaacaaaacacaactttcctatgccttgggaattgttttttcagagcaaattgcaagtattgtaccaaaaggtactcatacatgggagaagtttgtttcacctgaaacactagagagcattctggaatcaaatggtctgtcagttcaaacagtggtaggaatgctctataaccccttctcaggttactggcattggagtgaaaataccagccttaactatgcagcttatgctgtgaaatccagggtccaggaacacccagcctctgctgagtttgttttaaagggagaaacagaagagctccaagctaatgcctgcaccaatccagctgtgcatgaaaagctgaagaaatgaattgtttctgagaactatagtaatatggcttggatatctgatgttttcaaatacaaaaatgtacaatttatcctttgagagagaatcatgaagaaaagaaggtcaataaaaagggctaaaaccttggacaaaagtttttgttatttcgtctaatagctactttcaagggattctgtgaataaaaagttttgtcaagatat

SEQ ID NO: 193134 - DNA, 1110 bp, Artificial Sequence
  derived and/or modified sequence
atgtggagcggcagaaagctgggcagcagcggcggctggttcctgagagtgctgggccccggcggctgcaacaccaaggccgccagacccctgatcagcagcgccgtgtacgtgaagaaccagctgagcggcaccctgcagatcaagcccggcgtgttcaacgagtacagaaccatctggttcaagagctacagaaccatcttcagctgcctgaacagaatcaagagcttcagatacccctgggccagactgtacagcaccagccagaccaccgtggacagcggcgaggtgaagaccttcctggccctggcccacaagtggtgggacgagcagggcgtgtacgcccccctgcacagcatgaacgacctgagagtgcccttcatcagagacaacctgctgaagaccatccccaaccaccagcccggcaagcccctgctgggcatgaagatcctggacgtgggctgcggcggcggcctgctgaccgagcccctgggcagactgggcgccagcgtgatcggcatcgaccccgtggacgagaacatcaagaccgcccagtgccacaagagcttcgaccccgtgctggacaagagaatcgagtacagagtgtgcagcctggaggagatcgtggaggagaccgccgagaccttcgacgccgtggtggccagcgaggtggtggagcacgtgatcgacctggagaccttcctgcagtgctgctgccaggtgctgaagcccggcggcagcctgttcatcaccaccatcaacaagacccagctgagctacgccctgggcatcgtgttcagcgagcagatcgccagcatcgtgcccaagggcacccacacctgggagaagttcgtgagccccgagaccctggagagcatcctggagagcaacggcctgagcgtgcagaccgtggtgggcatgctgtacaaccccttcagcggctactggcactggagcgagaacaccagcctgaactacgccgcctacgccgtgaagagcagagtgcaggagcaccccgccagcgccgagttcgtgctgaagggcgagaccgaggagctgcaggccaacgcctgcaccaaccccgccgtgcacgagaagctgaagaagtag

SEQ ID NO: 193135 - protein, 146 aa, Artificial Sequence
  derived and/or modified sequence
MAGELTPEEEAQYKKAFSAVDTDGNGTINAQELGAALKATGKNLSEAQLRKLISEVDSDGDGEISFQEFLTAAKKARAGLEDLQVAFRAFDQDGDGHITVDELRRAMAGLGQPLPQEELDAMIREADVDQDGRVNYEEFARMLAQE

SEQ ID NO: 193136 - DNA, 441 bp, Artificial Sequence
  derived and/or modified sequence
atggccggcgagctgacccccgaggaggaggcccagtacaagaaggccttcagcgccgtggacaccgacggcaacggcaccatcaacgcccaggagctgggcgccgccctgaaggccaccggcaagaacctgagcgaggcccagctgagaaagctgatcagcgaggtggacagcgacggcgacggcgagatcagcttccaggagttcctgaccgccgccaagaaggccagagccggcctggaggacctgcaggtggccttcagagccttcgaccaggacggcgacggccacatcaccgtggacgagctgagaagagccatggccggcctgggccagcccctgccccaggaggagctggacgccatgatcagagaggccgacgtggaccaggacggcagagtgaactacgaggagttcgccagaatgctggcccaggagtag

SEQ ID NO: 193137 - DNA, 441 bp, Artificial Sequence
  derived and/or modified sequence
atggcgggcgagctaacccctgaagaagaggcccagtacaaaaaggccttttcggccgtcgataccgatggaaacggaactataaacgcacaggagttgggcgccgcattgaaggctactggaaaaaatcttagcgaggcccagctccgcaaactgatctcagaagtagactctgacggcgatggggaaatttcatttcaggagtttctcaccgcagccaagaaggccagagccggtctcgaagaccttcaggtcgccttccgggctttcgaccaggatggcgacggtcacatcactgtggacgaactcaggcgggcaatggcagggctcggccagccactccctcaggaggaacttgatgcaatgattagagaagctgacgtagatcaggatggccgcgtcaactatgaagaatttgcccgcatgctcgctcaggaatag

SEQ ID NO: 193138 - DNA, 441 bp, Artificial Sequence
  derived and/or modified sequence
atggccggggagctgaccccagaggaggaggcccagtacaagaaggccttctctgctgtggacacagatggaaatggcaccatcaatgcccaggagctgggcgccgccctgaaggccaccgggaagaacctgtctgaggcccagctgaggaagctgatcagcgaggtggacagtgatggagatggagagatctccttccaggagttcctgacagctgccaagaaggcccgggccggcctggaggacctgcaggtggccttccgggcctttgaccaggatggagatggccacatcaccgtggatgagctgcggcgggccatggccggcctgggccagcccctgccccaggaggagctggatgccatgatccgggaggctgatgtggaccaggacggccgggtgaactatgaggagtttgccaggatgctggcccaggagtag

SEQ ID NO: 193139 - DNA, 441 bp, Artificial Sequence
  derived and/or modified sequence
atggccggcgagctgacccccgaggaggaggcccagtacaagaaggctttttccgccgttgacaccgacgggaatgggaccattaatgcccaggaactgggagcggccttaaaggccaccggaaaaaatctttccgaggcccagttgcgaaaactgataagcgaagtagactcggacggggacggagaaattagcttccaggaatttctcactgcagctaagaaggcccgcgccggactcgaagacctccaggtggctttccgagctttcgaccaagatggagatggtcatataacagtggacgagctccgtcgggctatggcaggcctcggccagccactgccccaggaggagttggacgctatgattagggaggcggatgtggatcaagatggaagagttaattatgaagagtttgctaggatgctggcgcaggagtag

SEQ ID NO: 193140 - DNA, 441 bp, Artificial Sequence
  derived and/or modified sequence
atggccggagagctgaccccagaagaggaagcgcaatacaagaaggcatttagcgccgttgataccgatgggaatggaactataaacgcccaggaactgggcgctgctctgaaagctaccggaaagaaccttagcgaggcacagctgcgaaagctgatatcagaggttgactcagatggtgatggagaaatttccttccaggaatttctgactgccgctaaaaaggcgagggcaggtctggaggatctgcaagtggcattccgcgcattcgatcaggatggcgacgggcatattactgtcgatgaacttcgcagggctatggcgggactgggccagcccctcccccaggaagagctcgatgccatgattagggaggccgatgtcgaccaagacggaagggtgaattatgaagaatttgctagaatgctggcccaggagtag

SEQ ID NO: 193141 - DNA, 876 bp, Artificial Sequence
  derived and/or modified sequence
agaactgtctgggacagacgctgcccggatccctgcggctgcctgcactctggaccacgagctctgagagcagcaggttgagggccggtgggcagcagctcggaggctccgcgaggtgcaggagacgcaggcatggccggtgagctgactcctgaggaggaggcccagtacaaaaaggctttctccgcggttgacacggatggaaacggcaccatcaatgcccaggagctgggcgcggcgctgaaggccacgggcaagaacctctcggaggcccagctaaggaaactcatctccgaggttgacagcgacggcgacggcgaaatcagcttccaggagttcctgacggcggcgaagaaggccagggccggcctggaggacctgcaggtcgccttccgcgccttcgaccaggatggcgacggccacatcaccgtggacgagctcaggcgggccatggcggggctggggcagccgctgccgcaggaggagctggacgccatgatccgcgaggccgacgtggaccaggacgggcgggtgaactacgaggagttcgcgaggatgctcgcccaggagtgaggctccccgcctgtgtccccctggctgcgctctgagccttcagggccaccgcccgctgctgcttttgtgctgggactctccggggaaacctggtcggtggatgggaaactgcctccccctgggaggaaggctttgcgctccggggcctggatgcggcgccctcgggccgcctgcgagcccctctctgcctccagaccttgggcagaaggaggcctccttgggcctggtccccctttgccctgcagtggaatgagggcccctcagccccgcattgatctaaataaaggactgccgagttccatg

SEQ ID NO: 193142 - protein, 657 aa, Artificial Sequence
  derived and/or modified sequence
MRLKIGFILRSLLVVGSFLGLVVLWSSLTPRPDDPSPLSRMREDRDVNDPMPNRGGNGLAPGEDRFKPVVPWPHVEGVEVDLESIRRINKAKNEQEHHAGGDSQKDIMQRQYLTFKPQTFTYHDPVLRPGILGNFEPKEPEPPGVVGGPGEKAKPLVLGPEFKQAIQASIKEFGFNMVASDMISLDRSVNDLRQEECKYWHYDENLLTSSVVIVFHNEGWSTLMRTVHSVIKRTPRKYLAEIVLIDDFSNKEHLKEKLDEYIKLWNGLVKVFRNERREGLIQARSIGAQKAKLGQVLIYLDAHCEVAVNWYAPLVAPISKDRTICTVPLIDVINGNTYEIIPQGGGDEDGYARGAWDWSMLWKRVPLTPQEKRLRKTKTEPYRSPAMAGGLFAIEREFFFELGLYDPGLQIWGGENFEISYKIWQCGGKLLFVPCSRVGHIYRLEGWQGNPPPIYVGSSPTLKNYVRVVEVWWDEYKDYFYASRPESQALPYGDISELKKFREDHNCKSFKWFMEEIAYDITSHYPLPPKNVDWGEIRGFETAYCIDSMGKTNGGFVELGPCHRMGGNQLFRINEANQLMQYDQCLTKGADGSKVMITHCNLNEFKEWQYFKNLHRFTHIPSGKCLDRSEVLHQVFISNCDSSKTTQKWEMNNIHSV

SEQ ID NO: 193143 - DNA, 1974 bp, Artificial Sequence
  derived and/or modified sequence
atgagactgaagatcggcttcatcctgagaagcctgctggtggtgggcagcttcctgggcctggtggtgctgtggagcagcctgacccccagacccgacgaccccagccccctgagcagaatgagagaggacagagacgtgaacgaccccatgcccaacagaggcggcaacggcctggcccccggcgaggacagattcaagcccgtggtgccctggccccacgtggagggcgtggaggtggacctggagagcatcagaagaatcaacaaggccaagaacgagcaggagcaccacgccggcggcgacagccagaaggacatcatgcagagacagtacctgaccttcaagccccagaccttcacctaccacgaccccgtgctgagacccggcatcctgggcaacttcgagcccaaggagcccgagccccccggcgtggtgggcggccccggcgagaaggccaagcccctggtgctgggccccgagttcaagcaggccatccaggccagcatcaaggagttcggcttcaacatggtggccagcgacatgatcagcctggacagaagcgtgaacgacctgagacaggaggagtgcaagtactggcactacgacgagaacctgctgaccagcagcgtggtgatcgtgttccacaacgagggctggagcaccctgatgagaaccgtgcacagcgtgatcaagagaacccccagaaagtacctggccgagatcgtgctgatcgacgacttcagcaacaaggagcacctgaaggagaagctggacgagtacatcaagctgtggaacggcctggtgaaggtgttcagaaacgagagaagagagggcctgatccaggccagaagcatcggcgcccagaaggccaagctgggccaggtgctgatctacctggacgcccactgcgaggtggccgtgaactggtacgcccccctggtggcccccatcagcaaggacagaaccatctgcaccgtgcccctgatcgacgtgatcaacggcaacacctacgagatcatcccccagggcggcggcgacgaggacggctacgccagaggcgcctgggactggagcatgctgtggaagagagtgcccctgaccccccaggagaagagactgagaaagaccaagaccgagccctacagaagccccgccatggccggcggcctgttcgccatcgagagagagttcttcttcgagctgggcctgtacgaccccggcctgcagatctggggcggcgagaacttcgagatcagctacaagatctggcagtgcggcggcaagctgctgttcgtgccctgcagcagagtgggccacatctacagactggagggctggcagggcaaccccccccccatctacgtgggcagcagccccaccctgaagaactacgtgagagtggtggaggtgtggtgggacgagtacaaggactacttctacgccagcagacccgagagccaggccctgccctacggcgacatcagcgagctgaagaagttcagagaggaccacaactgcaagagcttcaagtggttcatggaggagatcgcctacgacatcaccagccactaccccctgccccccaagaacgtggactggggcgagatcagaggcttcgagaccgcctactgcatcgacagcatgggcaagaccaacggcggcttcgtggagctgggcccctgccacagaatgggcggcaaccagctgttcagaatcaacgaggccaaccagctgatgcagtacgaccagtgcctgaccaagggcgccgacggcagcaaggtgatgatcacccactgcaacctgaacgagttcaaggagtggcagtacttcaagaacctgcacagattcacccacatccccagcggcaagtgcctggacagaagcgaggtgctgcaccaggtgttcatcagcaactgcgacagcagcaagaccacccagaagtgggagatgaacaacatccacagcgtgtag

SEQ ID NO: 193144 - DNA, 1974 bp, Artificial Sequence
  derived and/or modified sequence
atgcgcttgaaaattggttttattctgagatctctgctggtggtcggaagctttctgggtctggtggttctctggagttcgttgactccaagacccgatgacccctctccgctgtcccgcatgagggaggaccgcgacgtgaatgaccccatgcctaatcggggaggaaacggactggcacctggggaggacaggtttaagcccgtggtgccctggccccatgttgagggcgtggaagtcgaccttgaatcaatccgccgaatcaacaaggccaagaatgaacaggaacaccacgctggtggtgattcacagaaggatattatgcagagacagtacctcacctttaagcctcagacattcacgtaccatgatcctgtcttgagaccggggatcttgggaaacttcgagccaaaagagcctgaaccacccggtgtcgtgggaggacccggtgagaaggcaaaaccactggtgctggggcctgagtttaaacaggctatccaagcctcaataaaagagtttggcttcaacatggtagctagtgatatgatctcattggacaggtccgtgaacgacctacgacaggaagaatgtaaatattggcattacgacgaaaatctgttaacgagttcggtggttattgtctttcacaatgagggttggtcgacgctgatgagaactgtgcacagcgtcatcaaacggactccacggaaatatttagccgaaatcgtcctgatcgacgattttagcaacaaagagcacctcaaggaaaagctcgatgagtatatcaagttatggaacggattagttaaggtgttcagaaacgaaagacgtgaaggccttattcaggccaggtctataggcgcccaaaaagcgaagctgggccaggtacttatctacctagatgcccactgcgaggtcgctgtaaactggtatgccccgctcgttgctcctatttcgaaggatagaacgatctgtaccgtcccattgatagacgtcattaatgggaacacgtacgagatcattcctcagggcggcggagatgaggacggatacgcaagaggagcctgggactggagtatgctatggaagcgcgtccctttgacaccccaggaaaaaaggttgcggaaaactaagacagaaccctaccgcagcccggcgatggccggtggactttttgccatagagagggagttcttcttcgagctggggctgtatgatcctggcctgcagatttgggggggcgaaaacttcgagatctcatacaagatatggcagtgcggggggaagctactatttgtgccctgttcacgcgttggccatatctacaggttggaaggctggcaagggaaccccccacctatatatgtggggtcttcacccactctgaaaaactatgtaagggtcgttgaggtttggtgggatgaatacaaagactacttctatgcaagcaggccggagtcgcaggctcttccctacggagatatctcagaactgaaaaaatttcgcgaagatcataattgcaagtcatttaaatggtttatggaggaaatcgcctatgacatcacatcccattacccgttaccacctaaaaacgtggactggggagagattcgaggattcgagacagcttattgtattgattcaatgggcaagacaaacggagggttcgttgaactcggcccgtgccatcgcatgggcggcaaccaacttttccgaattaatgaggccaaccagttgatgcagtatgatcaatgtcttacgaagggagccgacggcagtaaggtaatgattacacattgcaacctgaatgagtttaaagagtggcagtattttaaaaacctgcacaggttcacccatatcccttccggcaaatgtttagacaggagcgaagtcctacaccaggtattcatttccaattgcgattcaagcaagaccacacagaagtgggaaatgaacaatatccactccgtctag

SEQ ID NO: 193145 - DNA, 1974 bp, Artificial Sequence
  derived and/or modified sequence
atgaggctgaagattggcttcatcctgcggagcctgctggtggtgggcagcttcctgggcctggtggtgctgtggagcagcctgacccccaggccagatgaccccagccccctgagcaggatgagagaagatagagatgtgaatgaccccatgcccaacagaggaggaaatggcctggcccctggagaagatcgcttcaagcctgtggtgccctggccccacgtggagggcgtggaggtggacctggagagcatccgccgcatcaacaaggccaagaatgagcaggagcaccacgccggcggggacagccagaaggacatcatgcagaggcagtacctgaccttcaagccccagaccttcacctaccatgaccctgtgctgcggcccggcatcctgggcaactttgagcccaaggagcctgagcccccaggagtggtgggcggccctggagagaaggccaagcccctggtgctgggccctgagttcaagcaggccatccaggccagcatcaaggagtttggcttcaacatggtggccagtgacatgatcagcctggacagatctgtgaatgacctgcggcaggaggagtgcaagtactggcactatgatgagaacctgctgaccagctctgtggtgattgtgttccacaatgaaggctggagcaccctgatgaggacagtgcacagcgtcatcaagaggacccccaggaagtacctggccgagatcgtgctgattgatgacttcagcaacaaggagcacctgaaggagaagctggatgagtacatcaagctgtggaatggcctggtgaaggtgttcagaaatgaaagaagagagggcctcatccaggcccggagcatcggggcccagaaggccaagctgggccaggtgctgatctacctggatgcccactgtgaggtggccgtgaactggtacgcccccctggtggcccccatcagcaaggacaggaccatctgcaccgtgcccctgattgatgtgatcaatggaaacacctatgagatcatcccccagggcggcggagatgaagatggctacgcccggggggcctgggactggagcatgctgtggaagagggtgcccctgaccccccaggagaagaggctgaggaagaccaagacagagccctaccgcagccctgccatggccggcggcctgtttgccatcgagcgggagttcttctttgagctgggcctgtatgaccccggcctgcagatctggggcggagaaaattttgagatctcctacaagatctggcagtgtggcggcaagctgctgtttgtgccctgcagccgggtgggccacatctaccgcctggagggctggcagggcaaccccccacccatctacgtgggcagcagccccaccctgaagaactacgtgcgggtggtggaggtgtggtgggatgagtacaaggactacttctacgccagcaggcctgagagccaggccctgccctacggggacatcagcgagctgaagaagttccgggaggaccacaactgcaagagcttcaagtggttcatggaggagatcgcctatgacatcaccagccactaccccctgccccccaagaatgtggactggggcgagatccggggctttgaaacagcctactgcatcgacagcatgggcaagaccaatggaggctttgtggagctgggcccctgccacaggatgggcggcaaccagctgttccgcatcaatgaggccaaccagctgatgcagtatgaccagtgcctgaccaagggagcagatggcagcaaggtgatgatcacccactgcaacctgaatgagttcaaggagtggcagtacttcaagaacctgcaccgcttcacccacatccccagcggcaagtgcctggacagaagtgaggtgctgcaccaggtgttcatcagcaactgtgacagcagcaagaccacccagaagtgggagatgaacaacatccacagcgtgtag

SEQ ID NO: 193146 - DNA, 1974 bp, Artificial Sequence
  derived and/or modified sequence
atgcggctgaagatcggcttcatcctgcggagcctgctggtggtgggctcttttctcggactggtggtgctgtggtcatcgctgacaccgcggcctgatgatcctagtcccctgagtcgtatgagagaagatagggatgtgaacgaccctatgcctaaccggggtggtaacgggctggcccctggcgaagacagatttaaacccgtagtgccgtggcctcacgtggaaggggttgaagtggatcttgagtcaattaggcggatcaataaggcgaaaaatgaacaggagcaccacgcaggaggtgattcccaaaaggatatcatgcagagacaatatctcaccttcaagccccagacattcacctaccatgaccccgtgttacgacctggtatattaggtaatttcgagcctaaagagccagaacctccaggggtagtcgggggccctggtgaaaaggctaagcctctcgtcctggggcccgaatttaagcaggctatacaggcctccatcaaagagttcggcttcaacatggttgcttctgatatgatatccctggataggtccgtcaacgatctaagacaagaggagtgcaaatactggcattacgatgaaaaccttcttactagctccgtcgttattgtgtttcataatgaaggctggtctacgctgatgcgcacagtccatagtgtgatcaaacgcacaccccgtaagtacctggcagagatcgtgctaatagatgactttagcaataaagaacaccttaaggaaaagctggatgaatacatcaaactgtggaatggcttggtgaaggttttcagaaacgaaagacgcgaaggattaatccaagctaggtccatcggggctcagaaggccaaactgggtcaagtcttgatttatttagatgcgcactgcgaggtagcggtgaactggtacgctccactggtcgctccaatcagcaaggacaggacaatctgcacagtgcctcttattgatgtaattaatgggaatacttacgagatcatcccccagggcgggggagacgaagacgggtacgcccggggtgcctgggattggtccatgctgtggaagcgggtccccctgaccccccaggaaaaacgactaagaaaaactaagaccgagccatacaggtctcccgcgatggcaggcggcttgttcgcaattgaaagagagttcttctttgaattggggctgtatgatccaggccttcagatttggggaggtgaaaactttgagatcagctataagatatggcaatgcgggggaaagttgctatttgtgccctgcagcagagtaggccacatttaccgcttggagggttggcaggggaatcccccgcctatctatgtcggttccagtcccactttaaagaactatgtcagagtggtggaagtctggtgggacgagtacaaggattatttctacgcgagccggcccgaatcacaggctttgccttacggggacataagcgagctgaagaagtttcgggaagaccataactgtaaaagcttcaagtggttcatggaggagattgcatatgacataaccagtcactaccccctgccccccaaaaatgtggattggggtgaaatacgtggtttcgaaactgcctactgcatcgattccatgggcaagaccaacgggggatttgtcgagcttggtccttgtcatcgtatgggagggaatcagctatttcgaataaacgaggccaaccaactaatgcagtatgaccaatgcttgaccaagggggcggacggctccaaagtcatgatcacacactgtaatctgaatgagttcaaagaatggcagtacttcaaaaacttgcacagattcacccacattccatctggcaaatgtctggatcgcagcgaagtccttcatcaggtgtttatcagtaattgtgactctagcaagactacccagaagtgggaaatgaataacatccactccgtttag

SEQ ID NO: 193147 - DNA, 1974 bp, Artificial Sequence
  derived and/or modified sequence
atgagacttaaaatcggattcatactccggagtttactcgtggtgggcagtttcttaggcttggtcgtactgtggtcctctctcactccaaggcccgatgacccctccccgctgagtaggatgcgtgaggatcgggacgtgaatgatcccatgcccaaccgcggtgggaatggccttgcacccggagaagataggttcaaacccgtggtgccttggccacacgtcgagggggtcgaggtggaccttgaatcaattcggagaataaacaaggcaaagaatgagcaggagcatcatgcaggtggcgactcgcagaaggatattatgcagagacagtacttaaccttcaagccgcagacctttacatatcatgatcctgttcttcgtccagggattcttgggaattttgaacctaaggagcctgaacctcccggagttgtggggggacccggagaaaaggctaaacctctggttctgggtcctgagtttaagcaggccattcaggcttctatcaaagagttcggatttaatatggtagcgtccgacatgattagtctggaccgatctgtgaacgacctgcgtcaggaggaatgcaagtattggcactatgatgagaatctactgacttcctccgtcgtgattgtgttccacaacgaggggtggtcaacgctgatgagaactgtgcattcagtgatcaagagaacacctcgtaagtacttggctgaaattgtgcttatagatgatttttccaataaagaacatcttaaggagaagctcgatgagtatataaagctgtggaacggcttagtcaaggtttttcggaatgaaaggcgggaaggtttgatccaggcaaggagcataggcgctcaaaaagctaagctgggacaggtgctgatttatttagatgcccattgcgaagtggccgtcaactggtatgcccctctggtggccccaatcagcaaggacagaacaatctgcacagtgccgttaattgatgtgatcaacggcaacacttacgagatcatcccccaaggaggcggagacgaggatggttatgccagaggagcctgggattggtctatgctttggaaacgggttcccctcacaccacaagaaaagcgcctgagaaaaaccaaaacggagccttatcggagtccggcaatggcgggaggcttgtttgctattgaacgcgagttcttttttgaactgggcctttatgatccaggcttacagatttgggggggtgaaaatttcgaaatctcctataagatctggcaatgcgggggtaagctcctattcgttccatgttctagagtaggtcatatctacagactcgagggttggcagggcaatccacccccaatatacgtcggaagttccccaacactgaaaaactatgtgcgggtcgtggaggtgtggtgggacgaatataaagattacttctacgcgagtaggcctgaaagtcaggctctgccctacggtgatatttcggaactgaagaagttcagggaggaccacaattgtaagtcttttaagtggtttatggaggagatagcctacgacataacttcacactatccactgccaccaaagaacgttgattggggcgagattcgaggttttgagacggcctattgcatcgatagcatgggcaaaaccaatggcggtttcgtggaactgggcccatgtcacaggatggggggaaatcaattgtttcgtattaacgaggctaatcaactgatgcaatatgatcagtgcttgacaaagggcgcagacggtagcaaggtgatgattacacattgtaacctcaacgagtttaaggaatggcagtattttaaaaacctgcatcggtttacacacattccctccggcaagtgtctggatagatcagaggtccttcaccaagtgttcatttctaactgcgattcatcaaaaactacacagaagtgggaaatgaacaacattcattctgtttag

SEQ ID NO: 193148 - DNA, 4307 bp, Artificial Sequence
  derived and/or modified sequence
agagccggaggagggggaaggagggaggggagagcggtggcggcggctgcgccgggctgtgagtctctcgccgccggaggaagatgaggctgaagattgggttcatcttacgcagtttgctggtggtgggaagcttcctggggctagtggtcctctggtcttccctgaccccgcggccggacgacccaagcccgctgagcaggatgagggaagacagagatgtcaatgaccccatgcccaaccgaggcggcaatggactagctcctggggaggacagattcaaacctgtggtaccatggcctcatgttgaaggagtagaagtggacttagagtctattagaagaataaacaaggccaaaaatgaacaagagcaccatgctggaggagattcccagaaagatatcatgcagaggcagtatctcacatttaagcctcagacattcacctaccatgatcctgtgcttcgcccagggatcctcggtaactttgaacccaaagaacctgagcctcctggagtggttggtggccctggagagaaagccaagccattggttttgggaccagaattcaaacaagcaattcaagccagcattaaagagtttggatttaacatggtggcaagtgacatgatctcactggaccgcagcgtcaatgacttacgccaagaagaatgcaagtattggcattatgatgaaaacttgctcacttcgagcgttgtcattgtcttccataatgaaggatggtcaaccctcatgagaacagtccacagtgtaattaaaaggactccaaggaaatatttagcagaaattgtgttaattgacgatttcagtaataaagaacacttaaaagaaaaactggatgaatatattaagctgtggaatggcctagtgaaggtatttcgaaatgaaagaagggaaggtttaattcaagcacgaagtattggtgctcagaaggctaaacttggacaggttttgatataccttgatgcccactgtgaggtggcagttaactggtatgcaccacttgtagctcccatatctaaggacagaaccatttgcactgtgccgcttatagatgtcataaatggcaacacatatgaaattataccccaagggggtggtgatgaagatgggtatgcccgaggagcatgggattggagtatgctctggaaacgggtgcctctgacccctcaagagaagagactgagaaagacaaaaactgaaccgtatcggtccccagccatggctgggggattatttgccattgaacgagagttcttctttgaattgggtctctatgatccaggtctccagatttggggtggtgaaaactttgagatctcatacaagatatggcagtgtggtggcaaattattatttgttccttgttctcgtgttggacatatctaccgtcttgagggctggcaaggaaatcctccgcccatttatgttgggtcttctccaactctgaagaattatgttagagttgtggaggtttggtgggatgaatataaagactacttctatgctagtcgtcctgaatcgcaggcattaccatatggggatatatcggagctgaaaaaatttcgagaagatcacaactgcaaaagttttaagtggttcatggaagaaatagcttatgatatcacctcacactaccctttgccacccaaaaatgttgactggggagaaatcagaggcttcgaaactgcttactgcattgatagcatgggaaaaacaaatggaggctttgttgaactaggaccctgccacaggatgggagggaatcagcttttcagaatcaatgaagcaaatcaactcatgcagtatgaccagtgtttgacaaagggagctgatggatcaaaagttatgattacacactgtaatctaaatgaatttaaggaatggcagtacttcaagaacctgcacagatttactcatattccttcaggaaagtgtttagatcgctcagaggtcctgcatcaagtattcatctccaattgtgactccagtaaaacgactcaaaaatgggaaatgaataacatccatagtgtttagagagaaaaaaataaaccaataacctacctactgacaagtaaatttatacaggactgaaaaccgcctgaaacctgctgcaactattgttattaactctgtatagctccaaacctggaacctcctgatcagtttgaaggacattgataaactgtgattttacaataacattatcatctgcagttactgtttacaagactgcttttaccttaaactttgtagatgtttacatctttttgttgtgttttaagatgatgttggtaatttgtgcctttagctctgttttattagacagagttaaagcatgttgtcttctttgggattacactcaggggtctgaaaggcagtttgatttttatttttaacacacttgaaaaaaggttggagtagccagactttcatatataacttggtgattatcaacctgttgtgtctttatttaattttacatctttttgaagcactgccacaggttattagccaaggtggccttccttcacagtcatgctgcttttttgaaaggtgaatttcaacacatttagtgcctctttcatttctcagtatatatttcaagagcttgtgatgaaatctataggatggtaatgatggacttgtcacctgtatggggaatacttttactactcagaaatgaatttatgtgctgccatttgctataaagttgaactttgtatggcttgaaaaagaaatgacaatatggaacatcccaaggctgtcccatagggttggaagttgtgtagcattcactcccttacctactggcattcccagtgccctctgtccatacctacttctaggattgcaaaggagtcttccaactagagaaaaattgtccactgacatttgggatttacttttctccaatacctgccaatacagaaaactattatcagttgttattgttatcccttgaaagcgagggtgacaaaaacaacaaaacaccgttataaacacatcaaaggttcattctgactgaggtaagactttccaagcccttgttagattaggccttataaaacttgtgtgcattataacctaagctgtgcaacctgtgaagccaagagtgaactgatgtttcatttatattttcatccaaatgacattatctgcacgtttttaaaatttaaaaacaaaggactatttaaaaatacagtttattaacaaacgtgaactactttctgttacattaggtgttccctagtgtttcttaatttctttttagaaagtgtatttttattagtatttttccggtgaacagaagatttgtttggatttaaacatttactaagacagtacctattaggaaaaccaaatattgcaaatggtcaattcgattttaatttctcaaaagatactctgttatccagaagattaaaatgcctacattgagtgcttaaaaaaaaaaaaacaactgtgatgatgtgagcagaatggcaagtaagttaagcatttttgatcctgtaatcatggtatcattacaatgaaaggaattcacaaactactgccagaggaagtttgttttttaatttaagagggaaatataacctataaatttgtttcttccaagcttagctcttaaatttggagactcaaagttaaacatcctcaacagagttttatttataattttgaattgtcaatttgtattttgctactgatctgtgatcaaccattttaactttcatctctagggatgtttaacatttataattgcaaaataaaccaactataaaaaaagaaactaagagagaattggtactttaattacttgtgtgtttgcaaataggctccattttccatgttgagtagattataaccttattaactatgcataggcctaagaaaggtggcaatgaactgtgcatgtaaattttaaatgggtactttgtgcaattcgttaaaagaagatactctatgaatatgattctatatattgaaatcagaaaacctaccaaacaaaaacatcagaagctgctgccataatgactattttctactgtaggctgctttggaaataattcccatatccttgctttgtaagttggtaatatcactatgcatttctacacattttataaatttgatttatgcagattttgatacactgtatgtttctgtagaaattgtataaatattcaaaattttattaggataaatttgagaaacttacgtatatcttaattctgggttgcttgttttttaggtgacaaaaataaaatattgtattttaattca

SEQ ID NO: 193149 - protein, 547 aa, Artificial Sequence
  derived and/or modified sequence
MDIIFGRNRKEQLEPVRAKVTGKIPAWLQGTLLRNGPGMHTVGESRYNHWFDGLALLHSFTIRDGEVYYRSKYLRSDTYNTNIEANRIVVSEFGTMAYPDPCKNIFSKAFSYLSHTIPDFTDNCLINIMKCGEDFYATSETNYIRKINPQTLETLEKVDYRKYVAVNLATSHPHYDEAGNVLNMGTSIVEKGKTKYVIFKIPATVPEGKKQGKSPWKHTEVFCSIPSRSLLSPSYYHSFGVTENYVIFLEQPFRLDILKMATAYIRRMSWASCLAFHREEKTYIHIIDQRTRQPVQTKFYTDAMVVFHHVNAYEEDGCIVFDVIAYEDNSLYQLFYLANLNQDFKENSRLTSVPTLRRFAVPLHVDKNAEVGTNLIKVASTTATALKEEDGQVYCQPEFLYEGLELPRVNYAHNGKQYRYVFATGVQWSPIPTKIIKYDILTKSSLKWREDDCWPAEPLFVPAPGAKDEDDGVILSAIVSTDPQKLPFLLILDAKSFTELARASVDVDMHMDLHGLFITDMDWDTKKQAASEEQRDRASDCHGAPLT

SEQ ID NO: 193150 - protein, 478 aa, Artificial Sequence
  derived and/or modified sequence
MAAGNPAPQWAWDAHSWGVQIQPLVRRPCPAPQLHHQRRAFSYLSHTIPDFTDNCLINIMKCGEDFYATSETNYIRKINPQTLETLEKVDYRKYVAVNLATSHPHYDEAGNVLNMGTSIVEKGKTKYVIFKIPATVPEGKKQGKSPWKHTEVFCSIPSRSLLSPSYYHSFGVTENYVIFLEQPFRLDILKMATAYIRRMSWASCLAFHREEKTYIHIIDQRTRQPVQTKFYTDAMVVFHHVNAYEEDGCIVFDVIAYEDNSLYQLFYLANLNQDFKENSRLTSVPTLRRFAVPLHVDKNAEVGTNLIKVASTTATALKEEDGQVYCQPEFLYEGLELPRVNYAHNGKQYRYVFATGVQWSPIPTKIIKYDILTKSSLKWREDDCWPAEPLFVPAPGAKDEDDGVILSAIVSTDPQKLPFLLILDAKSFTELARASVDVDMHMDLHGLFITDMDWDTKKQAASEEQRDRASDCHGAPLT

SEQ ID NO: 193151 - DNA, 1644 bp, Artificial Sequence
  derived and/or modified sequence
atggacattatctttggccgtaatcggaaggagcaactggagcctgtaagggccaaagtaaccggcaaaattcctgcatggctacaaggcactctgctacgaaacggcccgggcatgcacaccgtgggggagagtaggtataaccactggtttgatgggctggccctgcttcactcattcacaattagagatggagaagtgtactatcgatccaagtacctccggagtgacacttacaatactaacatcgaggctaatagaatagtggtgtctgagttcgggactatggcctatcccgacccatgtaagaacatctttagcaaagcctttagctatttgtcccacactattccagactttactgataattgcttgattaacataatgaagtgcggcgaggatttctacgccacctcagagactaactacattcggaagattaatcctcagaccctcgaaactttggaaaaggtggattaccgcaagtacgtggccgtgaatttagcaactagccaccctcactatgacgaggccgggaacgttcttaacatgggcacgagcatagtggagaaggggaaaactaagtatgttatcttcaagatacctgccaccgtgccggagggcaagaaacaaggcaagtcgccttggaagcatactgaggtgttttgctcaatcccgtctcggagtttgctctcacccagctattaccacagcttcggggttaccgagaactatgtgattttcctggaacagccatttagattggatattctgaagatggctacagcgtacattaggcgaatgagttgggcatcatgcttggcctttcacagggaggagaagacatacatccatattattgaccagcgtacccgacagcctgtccagacaaagttctacactgatgcaatggtggtgtttcatcatgtaaatgcatacgaggaagatgggtgcatcgtcttcgacgtgatcgcctatgaagataactccctttaccaactcttctacctggccaacctgaaccaagacttcaaagagaactctcgccttacatcagtgcctaccttaagaagatttgccgtgcctctccacgtcgataaaaacgctgaggtgggaaccaatctgatcaaggtcgcatcaaccactgcgacagccctcaaggaggaggatgggcaggtctactgtcagcctgaatttttgtacgagggattggagttgcccagggttaattacgcccacaatgggaaacaatatcgctatgtgttcgcaactggggttcagtggagtcctattcctaccaaaatcataaagtacgatatcctgacgaagtcaagtctaaagtggcgtgaggacgattgctggccggctgagcctctttttgtacccgctcctggcgccaaagatgaggacgacggagtcattcttagtgctatcgtgtctacggatccgcagaagcttcccttcctcttgatcctagacgcgaagtcatttaccgagctggctagggctagcgttgatgtggacatgcatatggatcttcacgggctctttattacagacatggattgggacacgaaaaaacaggccgcctctgaggagcagcgcgatcgtgcttcggattgccacggagcgcccctcacctag

SEQ ID NO: 193152 - DNA, 1437 bp, Artificial Sequence
  derived and/or modified sequence
atggctgccggcaaccccgcgcctcaatgggcctgggacgcgcattcttggggcgtgcaaatccagcccctcgtgcgtcgaccatgccctgccccccagctgcatcaccagagacgcgccttcagctacctgtcacacaccatccccgatttcaccgacaactgtctgattaacatcatgaagtgtggcgaagacttctacgccacatcagaaaccaattatatccgcaagatcaaccctcagaccttagagacgttagagaaggtcgactatagaaagtacgtggctgtgaatctggccacaagccatccacactacgatgaagccggtaatgtactgaatatgggaacttctattgtcgagaagggcaaaaccaaatatgtgatattcaaaatcccagcaaccgtgcccgagggaaaaaaacagggcaagagcccctggaaacataccgaggtattttgtagcatcccgtctagatcgttgctgtctccttcctactaccactctttcggagtcaccgaaaactatgtgatcttcttggagcagccatttcggctggacattttgaagatggccaccgcatacatacgacgcatgtcttgggcgagctgtctggccttccacagggaggagaaaacttacatacacatcatagatcaacggacaagacagcctgtgcaaacaaaattttacaccgacgccatggtagtttttcatcatgtcaacgcctacgaggaagacggctgtattgtcttcgacgtcatcgcctatgaggacaacagcttataccagctgttttatctggctaacttgaatcaggactttaaggagaacagcagactgacctctgtcccaactttaagaagatttgccgttcccctgcatgtagataaaaacgcagaggttgggaccaacctgatcaaagttgcatctactacagccacagccctaaaagaagaggatggtcaagtgtattgtcagcccgagttcctttacgaggggcttgagctgccaagagtaaattacgcccacaatgggaaacagtatcggtacgtgttcgccacaggtgtacaatggtcccctataccaacaaaaataatcaagtacgatatactcaccaagagtagcttaaagtggagggaggacgattgttggccagctgagcctctgttcgtgcctgcacccggggccaaggatgaggatgacggcgtgatcttgagcgccattgtgagtacagatccccagaaactgccttttctgctcatcctggacgcgaagtcctttacagagctcgcacgagcgtctgtcgatgttgacatgcatatggacctgcatggactctttattactgacatggactgggatacaaagaagcaagccgcatccgaggagcaacgcgatagagcttccgactgtcacggagcgccgcttacctag

SEQ ID NO: 193153 - DNA, 1644 bp, Artificial Sequence
  derived and/or modified sequence
atggacatcatctttggaagaaacaggaaggagcagctggagcctgtgcgggccaaggtgacaggcaagatcccagcctggctgcagggcaccctgctgagaaatggacctggcatgcacacagtgggggagagccgctacaaccactggtttgatggcctggccctgctgcacagcttcaccatcagagatggagaggtgtactaccgcagcaagtacctgcggagtgacacctacaacaccaacatcgaggccaaccgcatcgtggtgtctgaatttggcaccatggcctacccagacccctgcaagaacatcttcagcaaggccttctcctacctgagccacaccatcccagacttcacagacaactgcctgatcaacatcatgaagtgtggggaggacttctacgccaccagcgagaccaactacatcaggaagatcaacccccagaccctggagaccctggagaaggtggactacagaaaatatgtggccgtgaacctggccaccagccacccccactatgatgaggccggaaatgtgctgaacatgggcaccagcatcgtggagaagggcaagaccaagtatgtgatcttcaagatcccagccaccgtgcctgagggcaagaagcagggcaagagcccctggaagcacacagaggtgttctgcagcatccccagccgcagcctgctgagccccagctactaccacagctttggagtgacagaaaattatgtgatcttcctggagcagcccttccggctggacatcctgaagatggccacagcctacatccggaggatgtcctgggccagctgcctggccttccaccgggaggagaagacctacatccacatcatcgaccagaggacccggcagcctgtgcagaccaagttctacacagatgccatggtggtgttccaccacgtgaatgcctatgaagaagatggctgcatcgtgtttgatgtgattgcctatgaggacaacagcctgtaccagctgttctacctggccaacctgaaccaggacttcaaggagaacagccggctgacctctgtgcccaccctgcggagatttgctgtgcccctgcacgtggacaagaatgctgaggtgggcaccaacctgatcaaggtggccagcaccacagccacagccctgaaggaggaggatggccaggtgtactgccagcctgagttcctgtatgagggcctggagctgccccgggtgaactatgcccacaacgggaagcagtaccgctacgtgtttgccaccggggtgcagtggagccccatccccaccaagatcatcaagtatgacatcctgaccaagagcagcctgaagtggagagaagatgactgctggccagctgagcccctgtttgtgcctgcccctggggccaaggatgaagatgatggagtcatcctgagcgccatcgtgtccacagacccccagaagctgcccttcctgctgatcctggatgccaagagcttcacagagctggcccgggcctctgtggatgtggacatgcacatggacctgcacggcctcttcatcacagacatggactgggacaccaagaagcaggccgccagcgaggagcagagggaccgggccagtgactgccacggggcccccctgacctag

SEQ ID NO: 193154 - DNA, 1437 bp, Artificial Sequence
  derived and/or modified sequence
atggctgctggcaacccagccccccagtgggcctgggatgcccacagctggggcgtgcagatccagcccctggtgcggcggccctgcccagccccccagctgcaccaccagaggcgggccttctcctacctgagccacaccatcccagacttcacagacaactgcctgatcaacatcatgaagtgtggggaggacttctacgccaccagcgagaccaactacatcaggaagatcaacccccagaccctggagaccctggagaaggtggactacagaaaatatgtggccgtgaacctggccaccagccacccccactatgatgaagctggaaatgtgctgaacatgggcaccagcatcgtggagaagggcaagaccaagtatgtgatcttcaagatcccagccaccgtgcctgagggcaagaagcagggcaagagcccctggaagcacacagaggtgttctgcagcatccccagccgcagcctgctgagccccagctactaccacagctttggagtgacagagaactacgtgatcttcctggagcagcccttccggctggacatcctgaagatggccacagcctacatccggaggatgtcctgggccagctgcctggccttccaccgggaggagaagacctacatccacatcatcgaccagaggacccggcagcctgtgcagaccaagttctacacagatgccatggtggtgttccaccacgtgaatgcctatgaggaggatggctgcatcgtgtttgatgtgattgcctatgaggacaacagcctgtaccagctgttctacctggccaacctgaaccaggacttcaaggagaacagccggctgacctctgtgcccaccctgcggagatttgctgtgcccctgcacgtggacaagaatgctgaggtgggcaccaacctgatcaaggtggccagcaccacagccacagccctgaaggaggaggatggccaggtgtactgccagcctgagttcctgtatgagggcctggagctgccccgggtgaactatgcccacaacgggaagcagtaccgctacgtgtttgccactggagtgcagtggagccccatccccaccaagatcatcaagtatgacatcctgaccaagagcagcctgaagtggagagaagatgactgctggccagctgagcccctgtttgtgcctgcccctggggccaaggatgaagatgatggagtcatcctgagcgccatcgtgtccacagacccccagaagctgcccttcctgctgatcctggatgccaagagcttcacagagctggcccgggcctctgtggatgtggacatgcacatggacctgcacggcctcttcatcacagacatggactgggacaccaagaagcaggccgccagcgaggagcagagggaccgggccagtgactgccacggggcccccctgacctag

SEQ ID NO: 193155 - DNA, 1644 bp, Artificial Sequence
  derived and/or modified sequence
atggacatcatcttcggccggaaccggaaggagcagctggagcccgtcagagctaaggtcaccggaaagatccccgcatggctgcagggcactctgctgagaaacggaccgggaatgcacaccgtcggggaaagtcggtacaatcactggtttgacggtctggcactgctccattctttcaccatccgagacggagaggtgtactatcgatcaaagtacctgcgcagcgacacctacaataccaacatagaagccaataggatagtggtgagtgagttcggaaccatggcgtaccccgacccctgcaaaaacatctttagtaaggccttttcttatctgagccacacaatccctgattttacagacaattgcctcattaatattatgaagtgtggggaggatttctacgcgacatccgaaactaactacatccgaaaaataaacccccaaactcttgaaacattagaaaaagtcgactaccgtaagtacgtggcagtgaatttggccacttcccacccacattatgatgaggctggcaacgtcctgaacatgggaacctctatagtggaaaagggaaagaccaaatacgtgatttttaagatacccgcaaccgtgcccgaaggtaagaaacagggaaagtcaccctggaaacatacagaggtgttctgtagcattcccagtcgctccttgttatccccttcctactaccactcatttggagtaaccgagaattacgtaatcttcctggaacagccctttcgcctggatattctgaaaatggccaccgcatatatccgtagaatgtcctgggcctcctgcctggcttttcatcgcgaggaaaaaacatacatccatatcatcgaccagaggactaggcagcccgtccagaccaaattctatacggacgcaatggtcgtttttcaccacgtgaatgcttatgaggaggatggttgcatcgtgtttgacgtgatcgcatacgaggacaattcactctaccagctgttctatctggctaacctcaatcaggacttcaaagagaacagccgcctgaccagtgttccaactcttaggcgctttgcagtgccgctccatgtagacaaaaacgctgaagtggggaccaacctcattaaggtcgcttctacaactgccacagcattgaaagaagaggacgggcaggtgtactgccaaccggagttcctttacgagggtctcgagctgccaagggtgaactatgcccacaatggaaagcagtaccgttacgtgttcgccaccggggtgcaatggagcccgatccctaccaagatcattaagtacgatatcctgaccaagagctcacttaagtggcgggaagatgattgctggcctgctgagcctctcttcgtgccagctcctggagccaaggatgaggatgatggcgtgatcctatcggctatcgtttctaccgaccctcagaagctcccgttcctacttatcctggacgcaaaatcatttacggagctggcgcgcgcctccgtggatgttgatatgcacatggatctccatgggcttttcattacagatatggactgggatactaagaaacaggccgcaagcgaagaacagcgtgatagagcaagcgattgccacggggcacccctcacctag

SEQ ID NO: 193156 - DNA, 1437 bp, Artificial Sequence
  derived and/or modified sequence
atggccgccggcaaccccgccccccagtgggcctgggacgcccactcttggggtgtgcaaatccagcccctagtgcggcgtccgtgccccgccccacagctccaccatcaacgcagggctttttcctatctgtcccacactattccagatttcaccgacaactgtctgataaacattatgaagtgtggggaagacttttatgcaacatcagagacaaactacattcgtaaaatcaatccccagactctggaaaccctggaaaaggtagattatcgcaaatatgtagcagttaatctcgcaacttctcacccgcactacgatgaagcaggtaacgtgcttaacatggggacaagcattgttgagaaaggcaagaccaaatatgttatctttaagattcccgcaacagtgccggagggaaagaagcagggcaaatccccttggaaacacactgaggttttttgtagcatcccctccagatcgcttctttctccatcctactatcacagtttcggtgtgacggagaactatgttattttccttgagcagccatttagacttgatatattgaagatggccactgcctatatcagacgaatgagttgggcttcatgtctggccttccaccgcgaggagaagacctacatccatatcatagaccaacggacccgccagcctgtccagactaagttctatactgatgctatggtggtgttccaccatgttaacgcttacgaggaagatggatgtatcgtgtttgacgtgattgcttacgaggacaactccctgtatcagctattctatctggcgaatctaaaccaggactttaaggagaactccaggttgacatcagtgcccacgctgaggcgattcgctgttccacttcacgtcgacaaaaacgcagaggtgggaactaacttgatcaaggttgcatccactaccgccacggccctcaaggaagaggacggacaggtttactgtcaaccggagtttctgtacgagggcctcgagcttccacgcgtcaattatgctcataatggaaagcaataccgatatgtcttcgcaactggcgtgcagtggagccccatccccaccaaaattattaagtatgatatcttaactaaatcaagcctaaaatggcgtgaggacgactgctggcctgctgagcccctcttcgtaccagctcctggtgcaaaggatgaagatgatggcgtcatcctttccgccatagtctcaacagacccccaaaaactcccctttctcctgatactggatgccaaaagcttcaccgagttggcacgtgctagcgtcgatgtggacatgcacatggacttgcatgggctgttcataaccgatatggactgggatacaaagaagcaggccgcctcagaggagcagcgggatcgggcctcagattgtcacggcgctccactaacatag

SEQ ID NO: 193157 - DNA, 1644 bp, Artificial Sequence
  derived and/or modified sequence
atggacatcatcttcggcaggaaccgcaaggaacaactcgagcctgtcagggccaaggtgacaggtaaaatccctgcatggctccaaggaactctgctccgcaacggcccaggaatgcatacagtgggcgaatcgcgctataatcactggtttgatgggctggctctgctgcatagtttcactatcagagatggagaggtttactatcgctctaagtatctccggtctgacacatacaacaccaacatagaggctaaccggattgtggtcagtgaattcggaacaatggcgtaccccgacccatgcaagaatatcttctcaaaggcgtttagctacttaagccataccatccccgatttcacagataattgcttaatcaacattatgaagtgcggtgaagacttctacgctacgtccgagactaattatatccgcaaaatcaaccctcagaccttagaaacattagagaaggttgattaccgcaagtatgtagccgtcaatctggccacctcacacccccactatgacgaggctggaaacgttctgaacatgggaactagcattgtcgagaagggtaaaacgaaatacgtgatcttcaagatacccgctaccgtcccagagggtaaaaaacaaggaaagtctccatggaagcacacagaggtgttttgtagcatcccctctagatctctactctcacccagttattatcacagtttcggcgtgacagaaaattatgtcatctttctggagcagcctttcaggcttgacatcctgaagatggcaactgcgtacatccgtcgaatgagctgggcaagttgtcttgcattccaccgagaagaaaaaacgtacattcatatcatcgatcagcgcacacggcagccagtacaaaccaaattctacaccgacgcaatggtggtgtttcatcacgtcaatgcatacgaggaagacgggtgtattgtgtttgacgttatcgcatacgaagacaattcactgtaccagctcttttatctcgctaacctcaaccaagatttcaaagaaaacagccgactcacatctgtacccacgctcagaaggtttgctgtccccctccatgttgacaaaaatgcagaggttggaacaaatctgattaaagtagcaagtactactgctactgcactcaaggaggaagatggccaagtctattgtcagccagagtttctgtatgaagggcttgagctgcctcgggtgaactatgcgcataatgggaagcagtatcgctacgtattcgctacgggagtacagtggagcccgattcccacaaaaattattaaatatgacattctcaccaagtcaagccttaagtggagggaggacgattgttggccagctgaaccgctgtttgtcccagctcccggagcaaaggacgaggatgatggggtaattttgagtgccattgtatccactgatcctcagaaactgcctttcctcctgattttggatgcgaaatcttttaccgagctagccagggccagcgtggacgtagatatgcacatggatctccatggcttgttcattacagacatggactgggacaccaagaagcaggcggcatcagaggagcagagggatcgggcaagcgattgtcatggggctccattgacctag

SEQ ID NO: 193158 - DNA, 1437 bp, Artificial Sequence
  derived and/or modified sequence
atggctgcaggcaaccccgcaccccagtgggcctgggacgctcactcgtggggggtgcaaatccagcccctggtccgcagaccttgtcctgcccctcagctccatcaccagcggagagcgttttcatatctgtcccatacaattcccgatttcactgataactgtctgataaatatcatgaaatgtggtgaggatttctacgccactagcgagactaactacattaggaaaattaatccacagaccctagaaactctggaaaaggtagattaccgcaaatatgtggctgttaatttagccacatcccaccctcattatgatgaggccggaaatgtgctcaacatggggacttccattgtggagaagggaaaaacaaaatatgtcatcttcaaaatcccagctacagtccccgaagggaaaaagcagggtaaaagtccctggaaacatactgaggtgttttgttccataccaagccgtagtcttctgtcgccatcctactatcatagttttggggtcaccgaaaactatgtgatttttttggaacagccatttcgattagacattttgaagatggccactgcatatattagacgaatgtcgtgggcatcttgtctcgccttccacagggaagaaaagacctacatacatattatagaccagagaaccagacagcccgtgcagactaagttttacacggatgctatggtggtgtttcatcacgtgaacgcctacgaagaggacggctgcattgtatttgatgtaatcgcctacgaagataatagcctgtaccagctgttttacctggccaacctgaatcaggacttcaaggaaaacagcagactgacctccgtcccgaccttgaggcgttttgccgtgcctctgcacgtggataagaatgctgaggtcggaaccaatctgattaaggtggctagtacaaccgcaaccgcactcaaggaagaggacggacaagtgtactgtcaacctgagtttttatacgaggggctcgagctgccgagggttaactacgcccacaacggaaaacagtataggtacgtgtttgcaaccggagtgcagtggagccctatcccaactaaaatcatcaagtacgacatcttaacaaaatcgtccctgaaatggagggaagacgactgttggcccgctgagcctctgttcgtcccagctccaggagccaaagatgaggatgatggtgtgatcctctctgctattgtgagtacagacccacaaaaacttccttttctgctaatcctggacgcgaagtcttttaccgagctggcccgagccagtgtcgatgtggatatgcatatggacttgcacggcctgtttatcacggatatggattgggacactaagaaacaggcggcttccgaagagcagcgagatagagcaagtgactgtcacggagctccattaacatag

SEQ ID NO: 193159 - DNA, 2670 bp, Artificial Sequence
  derived and/or modified sequence
tcataaacaactccagctcttggattacgtcgggcaacataacagcaggcacggaattctctctgcttatttagaacctagtctgaagcaagcttttttttttttttggttaagtcaaaagtgaaactggagagggaaagctgagggaacaataagaggattaaagattagctatgacacatggcttggaaattaacctttaaccaaacatcttataagtaacgccagcgcagcttcccttgtgaatgtaaagagatccagggctcttggagagggacaagtgagagccagccaaaaaggaaaaagcaaaggcagaaacggcatcaggagagacagagatgtgaaggagggaaggagcaggagagcaggaaggaaacgcaggaggagggagcagcatctcctgtgaacacagaggagcacctgtttgctgttaaaatcgatctccctcggcaccctgagcaatggatataatatttggcaggaataggaaagaacagctggagcctgtgagggccaaagtgacaggcaagattccagcatggctgcagggaaccctgctccgcaatgggcctgggatgcacacagttggggagtccagatacaaccattggttcgacggccttgccctgctccacagcttcaccatcagagacggtgaagtctattacaggagcaaatacctgagaagcgatacctacaacaccaatattgaggcaaacaggattgtggtgtctgagtttggaacaatggcctatccggacccctgcaaaaacatattttccaaagctttctcctacttgtctcacaccatccccgatttcaccgacaactgcctgatcaacatcatgaagtgcggagaagacttctacgcgacctcagagaccaattacatcaggaaaatcaacccacagactctggaaaccctggagaaggttgattatcgtaaatacgtggcggtaaatctggcaacgtcacatccccattatgatgaggctggaaatgttctaaacatgggcacatccattgtggaaaaggggaagacaaagtatgtgatttttaagatccctgccacagtaccagagggcaagaagcaggggaagagcccctggaagcacacagaggtgttctgctccatcccatcccgctccctgctctccccaagctactaccacagctttggagtcaccgagaactatgtcatcttccttgagcagcctttcaggttggatattctcaagatggcaaccgcatacatccggagaatgagctgggcctcctgcctggctttccacagggaggagaagacttatatccacatcatcgaccaaaggaccaggcagcctgtgcagaccaagttttacacagacgccatggtggtcttccatcacgtcaacgcctacgaagaggacggctgcatcgtgtttgacgtcattgcctacgaggacaacagcctctaccagctcttctacctggccaacctgaaccaggacttcaaggagaactccaggctcacctcggtccccaccctcaggaggtttgccgtgcccctccacgtggacaagaatgcagaagtgggcacaaatttaatcaaagtggcatctacaacagccacggccctgaaggaagaagatggccaagtctactgccagccggaatttctttatgaaggcttagagcttccacgggtcaattatgctcacaatggaaagcaataccgatatgtctttgctacaggagttcagtggagtccaatcccaaccaagataataaaatatgacattctcacaaagtcatccttaaaatggagagaggacgactgctggccagcggaacccctgtttgtgcccgcgccaggtgccaaggatgaggatgacggagtaatcttatcagccattgtctctactgatccccaaaagctgccttttctgctcattctggatgccaaaagctttacggaattggcccgtgcctctgttgatgtcgatatgcacatggatctccatggattattcattacagacatggactgggacacaaaaaagcaggccgcttctgaggaacagcgggacagggcttccgactgccacggggctcctctgacctgatggtgttggggtttgggtaggggaggggagctcggctgtcagaactccatggatatgtttctttggatggaggggagggcctttgttaccttttgcacttattctttctgtgggtgctttgacaagggcatggcaagagagcttgtcagtatcatttctttcattttattttggctgtaaaaattttgtttgaaagtcaaacatttgaacatcaaatatgtattgattagatccagtccttctaagaaacctcctttcctttaacaaaaagaccttgaccatgaatcagagattgtattcaatgacattatcatcatttttagaacgagccactaacctattagagaagaggcagataattatttatcattgtgccttcctctgtctctttctctttcctttgctccctcccatgtttctggtggactaaattgtgtatctgggagttctcactttctagccaggcctgatgagttaagttacatgaccaggaaggttatgccactttgtggtcattccatgcaagtcatggcgtaatataaaataataaaaactttaaagtctg

SEQ ID NO: 193160 - DNA, 1857 bp, Artificial Sequence
  derived and/or modified sequence
gtgaatgtaaagagatccagggctcttggagagggacaagtgagagccagccaaaaaggaaaaagcaaaggcagaaacggcatcaggagagacagagatgtgaaggagggaaggagcaggagagcaggaaggaaacgcaggaggagggagcagcatctcctgtgaacacagaggagcacctgtttgctgttaaaatcgatctccctcggcaccctgagcaatggatataatatttggcaggaataggaaagaacagctggagcctgtgagggccaaagtgacaggcaagattccagcatggctgcagggaaccctgctccgcaatgggcctgggatgcacacagttggggagtccagatacaaccattggttcgacggccttgccctgctccacagcttcaccatcagagacgagctttctcctacttgtctcacaccatccccgatttcaccgacaactgcctgatcaacatcatgaagtgcggagaagacttctacgcgacctcagagaccaattacatcaggaaaatcaacccacagactctggaaaccctggagaaggttgattatcgtaaatacgtggcggtaaatctggcaacgtcacatccccattatgatgaggctggaaatgttctaaacatgggcacatccattgtggaaaaggggaagacaaagtatgtgatttttaagatccctgccacagtaccagagggcaagaagcaggggaagagcccctggaagcacacagaggtgttctgctccatcccatcccgctccctgctctccccaagctactaccacagctttggagtcaccgagaactatgtcatcttccttgagcagcctttcaggttggatattctcaagatggcaaccgcatacatccggagaatgagctgggcctcctgcctggctttccacagggaggagaagacttatatccacatcatcgaccaaaggaccaggcagcctgtgcagaccaagttttacacagacgccatggtggtcttccatcacgtcaacgcctacgaagaggacggctgcatcgtgtttgacgtcattgcctacgaggacaacagcctctaccagctcttctacctggccaacctgaaccaggacttcaaggagaactccaggctcacctcggtccccaccctcaggaggtttgccgtgcccctccacgtggacaagaatgcagaagtgggcacaaatttaatcaaagtggcatctacaacagccacggccctgaaggaagaagatggccaagtctactgccagccggaatttctttatgaaggcttagagcttccacgggtcaattatgctcacaatggaaagcaataccgatatgtctttgctacaggagttcagtggagtccaatcccaaccaagataataaaatatgacattctcacaaagtcatccttaaaatggagagaggacgactgctggccagcggaacccctgtttgtgcccgcgccaggtgccaaggatgaggatgacggagtaatcttatcagccattgtctctactgatccccaaaagctgccttttctgctcattctggatgccaaaagctttacggaattggcccgtgcctctgttgatgtcgatatgcacatggatctccatggattattcattacagacatggactgggacacaaaaaagcaggccgcttctgaggaacagcgggacagggcttccgactgccacggggctcctctgacctgatggtgttggggtttgggtaggggaggggagctcggctgtcagaactccatggatatgtttctttggatggaggggagggcctttgttaccttttgcacttattctttctgtgggtgctttgac

SEQ ID NO: 193161 - DNA, 1644 bp, Artificial Sequence
  derived and/or modified sequence
atggacatcatcttcggcagaaacagaaaggagcagctggagcccgtgagagccaaggtgaccggcaagatccccgcctggctgcagggcaccctgctgagaaacggccccggcatgcacaccgtgggcgagagcagatacaaccactggttcgacggcctggccctgctgcacagcttcaccatcagagacggcgaggtgtactacagaagcaagtacctgagaagcgacacctacaacaccaacatcgaggccaacagaatcgtggtgagcgagttcggcaccatggcctaccccgacccctgcaagaacatcttcagcaaggccttcagctacctgagccacaccatccccgacttcaccgacaactgcctgatcaacatcatgaagtgcggcgaggacttctacgccaccagcgagaccaactacatcagaaagatcaacccccagaccctggagaccctggagaaggtggactacagaaagtacgtggccgtgaacctggccaccagccacccccactacgacgaggccggcaacgtgctgaacatgggcaccagcatcgtggagaagggcaagaccaagtacgtgatcttcaagatccccgccaccgtgcccgagggcaagaagcagggcaagagcccctggaagcacaccgaggtgttctgcagcatccccagcagaagcctgctgagccccagctactaccacagcttcggcgtgaccgagaactacgtgatcttcctggagcagcccttcagactggacatcctgaagatggccaccgcctacatcagaagaatgagctgggccagctgcctggccttccacagagaggagaagacctacatccacatcatcgaccagagaaccagacagcccgtgcagaccaagttctacaccgacgccatggtggtgttccaccacgtgaacgcctacgaggaggacggctgcatcgtgttcgacgtgatcgcctacgaggacaacagcctgtaccagctgttctacctggccaacctgaaccaggacttcaaggagaacagcagactgaccagcgtgcccaccctgagaagattcgccgtgcccctgcacgtggacaagaacgccgaggtgggcaccaacctgatcaaggtggccagcaccaccgccaccgccctgaaggaggaggacggccaggtgtactgccagcccgagttcctgtacgagggcctggagctgcccagagtgaactacgcccacaacggcaagcagtacagatacgtgttcgccaccggcgtgcagtggagccccatccccaccaagatcatcaagtacgacatcctgaccaagagcagcctgaagtggagagaggacgactgctggcccgccgagcccctgttcgtgcccgcccccggcgccaaggacgaggacgacggcgtgatcctgagcgccatcgtgagcaccgacccccagaagctgcccttcctgctgatcctggacgccaagagcttcaccgagctggccagagccagcgtggacgtggacatgcacatggacctgcacggcctgttcatcaccgacatggactgggacaccaagaagcaggccgccagcgaggagcagagagacagagccagcgactgccacggcgcccccctgacctag

SEQ ID NO: 193162 - DNA, 1437 bp, Artificial Sequence
  derived and/or modified sequence
atggccgccggcaaccccgccccccagtgggcctgggacgcccacagctggggcgtgcagatccagcccctggtgagaagaccctgccccgccccccagctgcaccaccagagaagagccttcagctacctgagccacaccatccccgacttcaccgacaactgcctgatcaacatcatgaagtgcggcgaggacttctacgccaccagcgagaccaactacatcagaaagatcaacccccagaccctggagaccctggagaaggtggactacagaaagtacgtggccgtgaacctggccaccagccacccccactacgacgaggccggcaacgtgctgaacatgggcaccagcatcgtggagaagggcaagaccaagtacgtgatcttcaagatccccgccaccgtgcccgagggcaagaagcagggcaagagcccctggaagcacaccgaggtgttctgcagcatccccagcagaagcctgctgagccccagctactaccacagcttcggcgtgaccgagaactacgtgatcttcctggagcagcccttcagactggacatcctgaagatggccaccgcctacatcagaagaatgagctgggccagctgcctggccttccacagagaggagaagacctacatccacatcatcgaccagagaaccagacagcccgtgcagaccaagttctacaccgacgccatggtggtgttccaccacgtgaacgcctacgaggaggacggctgcatcgtgttcgacgtgatcgcctacgaggacaacagcctgtaccagctgttctacctggccaacctgaaccaggacttcaaggagaacagcagactgaccagcgtgcccaccctgagaagattcgccgtgcccctgcacgtggacaagaacgccgaggtgggcaccaacctgatcaaggtggccagcaccaccgccaccgccctgaaggaggaggacggccaggtgtactgccagcccgagttcctgtacgagggcctggagctgcccagagtgaactacgcccacaacggcaagcagtacagatacgtgttcgccaccggcgtgcagtggagccccatccccaccaagatcatcaagtacgacatcctgaccaagagcagcctgaagtggagagaggacgactgctggcccgccgagcccctgttcgtgcccgcccccggcgccaaggacgaggacgacggcgtgatcctgagcgccatcgtgagcaccgacccccagaagctgcccttcctgctgatcctggacgccaagagcttcaccgagctggccagagccagcgtggacgtggacatgcacatggacctgcacggcctgttcatcaccgacatggactgggacaccaagaagcaggccgccagcgaggagcagagagacagagccagcgactgccacggcgcccccctgacctag

SEQ ID NO: 193163 - protein, 489 aa, Artificial Sequence
  derived and/or modified sequence
MEPGLEHALRRTPSWSSLGGSEHQEMSFLEQENSSSWPSPAVTSSSERIRGKRRAKALRWTRQKSVEEGEPPGQGEGPRSRPAAESTGLEATFPKTTPLAQADPAGVGTPPTGWDCLPSDCTASAAGSSTDDVELATEFPATEAWECELEGLLEERPALCLSPQAPFPKLGWDDELRKPGAQIYMRFMQEHTCYDAMATSSKLVIFDTMLEIKKAFFALVANGVRAAPLWDSKKQSFVGMLTITDFILVLHRYYRSPLVQIYEIEQHKIETWREIYLQGCFKPLVSISPNDSLFEAVYTLIKNRIHRLPVLDPVSGNVLHILTHKRLLKFLHIFGSLLPRPSFLYRTIQDLGIGTFRDLAVVLETAPILTALDIFVDRRVSALPVVNECGQVVGLYSRFDVIHLAAQQTYNHLDMSVGEALRQRTLCLEGVLSCQPHESLGEVIDRIAREQVHRLVLVDETQHLLGVVSLSDILQALVLSPAGIDALGA

SEQ ID NO: 193164 - protein, 353 aa, Artificial Sequence
  derived and/or modified sequence
MEPGLEHALRRTPSWSSLGGSEHQEMSFLEQENSSSWPSPAVTSSSERIRGKRRAKALRWTRQKSVEEGEPPGQGEGPRSRPAAESTGLEATFPKTTPLAQADPAGVGTPPTGWDCLPSDCTASAAGSSTDDVELATEFPATEAWECELEGLLEERPALCLSPQAPFPKLGWDDELRKPGAQIYMRFMQEHTCYDAMATSSKLVIFDTMLEIKKAFFALVANGVRAAPLWDSKKQSFVGMLTITDFILVLHRYYRSPLRSTCKAASSLWSPSLLMIACLKLSTPSSRTGSIACLFLTRCQATYSTSSHTNACSSSCTSLVPCCPGPPSSTALSKIWASAHSETWLWCWRQHPS

SEQ ID NO: 193165 - protein, 464 aa, Artificial Sequence
  derived and/or modified sequence
MSFLEQENSSSWPSPAVTSSSERIRGKRRAKALRWTRQKSVEEGEPPGQGEGPRSRPAAESTGLEATFPKTTPLAQADPAGVGTPPTGWDCLPSDCTASAAGSSTDDVELATEFPATEAWECELEGLLEERPALCLSPQAPFPKLGWDDELRKPGAQIYMRFMQEHTCYDAMATSSKLVIFDTMLEIKKAFFALVANGVRAAPLWDSKKQSFVGMLTITDFILVLHRYYRSPLVQIYEIEQHKIETWREIYLQGCFKPLVSISPNDSLFEAVYTLIKNRIHRLPVLDPVSGNVLHILTHKRLLKFLHIFGSLLPRPSFLYRTIQDLGIGTFRDLAVVLETAPILTALDIFVDRRVSALPVVNECGQVVGLYSRFDVIHLAAQQTYNHLDMSVGEALRQRTLCLEGVLSCQPHESLGEVIDRIAREQVHRLVLVDETQHLLGVVSLSDILQALVLSPAGIDALGA

SEQ ID NO: 193166 - protein, 305 aa, Artificial Sequence
  derived and/or modified sequence
MRFMQEHTCYDAMATSSKLVIFDTMLEIKKAFFALVANGVRAAPLWDSKKQSFVGMLTITDFILVLHRYYRSPLVQIYEIEQHKIETWREIYLQGCFKPLVSISPNDSLFEAVYTLIKNRIHRLPVLDPVSGNVLHILTHKRLLKFLHIFGSLLPRPSFLYRTIQDLGIGTFRDLAVVLETAPILTALDIFVDRRVSALPVVNECGQVVGLYSRFDVIHLAAQQTYNHLDMSVGEALRQRTLCLEGVLSCQPHESLGEVIDRIAREQVHRLVLVDETQHLLGVVSLSDILQALVLSPAGIDALGA

SEQ ID NO: 193167 - DNA, 1470 bp, Artificial Sequence
  derived and/or modified sequence
atggagcccggcctggagcacgccctgagaagaacccccagctggagcagcctgggcggcagcgagcaccaggagatgagcttcctggagcaggagaacagcagcagctggcccagccccgccgtgaccagcagcagcgagagaatcagaggcaagagaagagccaaggccctgagatggaccagacagaagagcgtggaggagggcgagccccccggccagggcgagggccccagaagcagacccgccgccgagagcaccggcctggaggccaccttccccaagaccacccccctggcccaggccgaccccgccggcgtgggcaccccccccaccggctgggactgcctgcccagcgactgcaccgccagcgccgccggcagcagcaccgacgacgtggagctggccaccgagttccccgccaccgaggcctgggagtgcgagctggagggcctgctggaggagagacccgccctgtgcctgagcccccaggcccccttccccaagctgggctgggacgacgagctgagaaagcccggcgcccagatctacatgagattcatgcaggagcacacctgctacgacgccatggccaccagcagcaagctggtgatcttcgacaccatgctggagatcaagaaggccttcttcgccctggtggccaacggcgtgagagccgcccccctgtgggacagcaagaagcagagcttcgtgggcatgctgaccatcaccgacttcatcctggtgctgcacagatactacagaagccccctggtgcagatctacgagatcgagcagcacaagatcgagacctggagagagatctacctgcagggctgcttcaagcccctggtgagcatcagccccaacgacagcctgttcgaggccgtgtacaccctgatcaagaacagaatccacagactgcccgtgctggaccccgtgagcggcaacgtgctgcacatcctgacccacaagagactgctgaagttcctgcacatcttcggcagcctgctgcccagacccagcttcctgtacagaaccatccaggacctgggcatcggcaccttcagagacctggccgtggtgctggagaccgcccccatcctgaccgccctggacatcttcgtggacagaagagtgagcgccctgcccgtggtgaacgagtgcggccaggtggtgggcctgtacagcagattcgacgtgatccacctggccgcccagcagacctacaaccacctggacatgagcgtgggcgaggccctgagacagagaaccctgtgcctggagggcgtgctgagctgccagccccacgagagcctgggcgaggtgatcgacagaatcgccagagagcaggtgcacagactggtgctggtggacgagacccagcacctgctgggcgtggtgagcctgagcgacatcctgcaggccctggtgctgagccccgccggcatcgacgccctgggcgcctag

SEQ ID NO: 193168 - DNA, 1470 bp, Artificial Sequence
  derived and/or modified sequence
atggaaccaggcctcgaacacgccctgcgtcgaacaccgtcttggtctagcctcggtggcagcgagcaccaggaaatgtcatttctggagcaggaaaattcatcttcctggcccagcccagctgtgacttcaagctccgagaggattcgcggaaagcgcagagcaaaggccctgagatggacaaggcagaaaagtgtggaggaaggggaacccccagggcaaggcgagggtcctcggagcaggccggccgctgaatcaacagggttagaggcgacgttccctaagaccactcccctggcccaagccgacccagctggagtaggcactcctcccaccggctgggactgccttccatcggactgcacagcgagcgcagctggttcttctaccgatgacgttgaattggctacggaattcccggcaacggaagcctgggagtgtgagttggaggggctgctagaagaacgccctgcactctgcttgagtcctcaggccccattcccaaagctgggctgggacgacgagctgagaaagccaggagcccagatctatatgagatttatgcaagaacatacttgctatgatgccatggcaacatcctcaaaactggtcattttcgacactatgcttgaaatcaaaaaggccttctttgccctcgtagccaatggcgtccgagccgccccactgtgggatagcaagaagcaaagtttcgtgggcatgctgactattacggattttatattggtgctgcacagatactatagatctcccctggttcagatttatgagatcgaacagcacaagatcgagacctggagggagatttacctgcaaggttgttttaagcctcttgtgtccatcagccctaatgatagtctgttcgaagcagtttacactttaatcaaaaacagaatccaccgactgccagtcctggacccagtgtcaggcaatgtgctgcacattctcacccacaagcgcttgctaaagttccttcacatcttcgggtcgttactgccccgaccttcctttctgtatcgcacaatccaggacttgggtatcggtactttcagagacctggccgtcgtgctggagacagcccccattctaaccgcacttgatatttttgtggaccgtagagtgtcagccttgccagtagtgaacgaatgcggccaggtggtggggctgtattcccggtttgatgtgattcatttggctgcgcagcagacctataaccacctggacatgtccgtaggagaggcactgagacagcgaacactgtgtctcgagggggtgttatcttgtcagccccatgagagtctgggtgaggtcatcgaccggattgcgcgcgagcaggtacaccggctcgtgctggtggacgaaacacagcacctactgggagtcgtctctctcagcgacattctgcaagccctggtcctcagtcctgcaggaatcgacgctctgggggcctag

SEQ ID NO: 193169 - DNA, 1470 bp, Artificial Sequence
  derived and/or modified sequence
atggagcccggcctggagcacgccctgcggaggacccccagctggagcagcctgggcggcagcgagcaccaggagatgtccttcctggagcaggagaacagcagctcctggcccagccctgctgtgaccagcagcagcgagcgcatccggggcaagagaagagccaaggccctgcgctggacccggcagaagtctgtggaggagggggagcccccaggccagggcgagggccccaggagcaggcctgctgctgagagcacaggcctggaggccaccttccccaagaccacccccctggcccaggccgaccctgctggggtgggcaccccacccaccggctgggactgcctgcccagcgactgcacagccagcgctgctggcagcagcacagatgatgtggagctggccacagagttccctgccacagaggcctgggagtgtgagctggagggcctgctggaggagaggcctgccctgtgcctgagcccccaggcccccttccccaagctgggctgggatgatgagctgaggaagccaggggcccagatctacatgaggttcatgcaggagcacacctgctatgatgccatggccaccagcagcaagctggtgatctttgacaccatgctggagatcaagaaggccttctttgccctggtggccaacggggtgcgggccgcccccctgtgggacagcaagaagcagagctttgtgggcatgctgaccatcacagacttcatcctggtgctgcaccgctactaccgcagccccctggtgcagatctatgaaattgagcagcacaagattgagacctggagggagatctacctgcagggctgcttcaagcccctggtgtccatcagccccaatgacagcctgtttgaggccgtgtacaccctcatcaagaaccgcatccaccggctgcctgtgctggaccctgtgtctggaaatgtgctgcacatcctgacccacaagaggctgctgaagttcctgcacatcttcggcagcctgctgccccggcccagcttcctgtaccgcaccatccaggacctgggcatcggcaccttccgggacctggccgtggtgctggagacagcccccatcctgacagccctggacatctttgtggaccggcgggtgtctgccctgcctgtggtgaatgaatgtggccaggtggtgggcctgtacagcagatttgatgtgatccacctggccgcccagcagacctacaaccacctggacatgtctgtgggggaggccctgcggcagaggaccctgtgcctggagggcgtgctgagctgccagccccatgagagcctgggggaggtgattgacagaattgcccgggagcaggtgcaccggctggtgctggtggatgagacccagcacctgctgggcgtggtgtccctgagtgacatcctgcaggccctggtgctgagccctgctggcattgatgccctgggcgcctag

SEQ ID NO: 193170 - DNA, 1470 bp, Artificial Sequence
  derived and/or modified sequence
atggagcccggcctggagcacgccctgcggcggacccccagctggagctcattgggcggttcagagcaccaagaaatgtcattcctggagcaagaaaactcttcgtcctggcccagcccagccgtgaccagttcgtcggagcggatcagggggaaacgaagggccaaggctctgcggtggactcgccagaaaagcgtcgaggaaggcgagccaccagggcagggcgaggggccacggagccggccagcagcagagagcaccggcttagaagcaactttcccaaagaccacccccctggctcaagcagaccccgccggcgtcgggacaccgcctacgggatgggactgtctacccagtgattgtaccgctagcgccgctggatcatcaacagacgacgtggagctagcgacagaatttccagccaccgaagcctgggaatgtgagttagaaggacttcttgaggagcgacctgccctgtgtctcagcccccaggcgccctttcctaagctgggttgggacgatgaactgcgtaaaccaggagcacagatttatatgaggtttatgcaagagcacacttgttatgacgccatggccacaagtagcaaactagttatcttcgacaccatgctagagatcaaaaaagcgttcttcgccctagtcgcaaacggggtgagggccgcaccactctgggatagcaaaaagcagtctttcgttggtatgcttaccattacagattttatcctcgttctgcaccggtattacaggtccccactggtccagatttacgagattgagcagcataagattgaaacatggcgcgaaatctacctgcaaggatgctttaaaccgctggtcagtatcagcccgaatgacagcctgtttgaagccgtctatacccttatcaaaaaccgcatacatagactgccagtgctggatcctgtgtctggcaacgtgttgcatattctgacccacaagaggctgctgaagtttctccacatctttggcagcctgctccctagaccaagcttcctctacagaacaattcaggatctcggtatcgggaccttcagggacctcgccgtcgtccttgagactgcacctattctgacggccctggacatcttcgtggatcgtcgtgtgtccgctctgccggtcgtcaacgagtgtggccaggtcgttggcctgtacagcagatttgacgttattcacctggccgcacaacaaacctataatcacctcgatatgtccgtgggcgaggcactgcggcaacggactttgtgcttggagggggtgctgagttgtcagccgcacgaatccctcggggaagtgattgatcgcattgctcgcgaacaagtacataggctggttctggtggacgagactcaacacctcctcggcgtagtatcactttccgacatactccaggcactggtgttatctcctgcgggtatcgacgccctcggggcttag

SEQ ID NO: 193171 - DNA, 1470 bp, Artificial Sequence
  derived and/or modified sequence
atggagccaggcctggagcacgcccttcggcgaacccccagctggtctagcttaggcggttccgagcaccaggaaatgagtttcctggagcaggagaacagttcaagctggcctagtcctgccgtaacgtcgtccagcgagaggatacgagggaaacggagggcaaaagcccttcgctggacacggcagaagagtgtggaagagggcgaacccccaggacagggcgaggggcctaggagcaggcccgctgcagagtccactggacttgaggcaaccttcccaaaaaccacccctctagcacaggcagatccagctggcgtggggactcctccaacgggctgggattgccttccatcagactgtactgccagtgctgctggaagtagcacagacgatgtggaactggctactgagtttccagccaccgaggcctgggagtgcgaactggagggtctgttggaagagcggccagcgttatgcttaagcccccaggccccttttccaaaactcgggtgggacgacgagctaagaaaaccgggtgcccagatctatatgaggtttatgcaggagcacacttgctacgacgccatggccacctctagtaaattggtgatattcgataccatgctagagattaagaaagccttctttgccctggttgccaacggggtccgcgcagcacccctgtgggattctaagaagcagtcgtttgtggggatgttaactatcaccgacttcatccttgtactgcatcgatactatcggtccccgcttgtgcagatctacgagatagagcagcacaagatagagacttggcgggaaatctatttacagggctgcttcaagcctctggtctccatttccccaaatgactccttgtttgaagccgtttataccttaattaagaacagaattcacagactccccgtgttagacccagtgtctggcaatgttctgcacatcctgacccacaaacgcctcctgaagttcctgcatattttcggctcattgctccctagacccagtttcctttaccgtacgattcaagacctaggtatcggcacattccgagatctggcagtcgtgctggagacagcgccaatcctgaccgctctagatatttttgtcgatcggagggtgagcgctctccctgtggtgaatgaatgcggccaagtcgttggtctgtacagccggtttgatgtgatccatctggctgcacagcaaacatacaaccacctagacatgagtgtaggggaggcacttagacagaggaccctgtgcctcgagggagtcttatcgtgccagccccacgaaagtctgggagaggtgatcgaccgcatcgctcgggagcaagtacacaggcttgtcctcgtggacgaaacccagcacctgttaggcgtggtaagcctttcggatatcctccaagctctggtgctctctcctgcgggaatagacgccctgggagcgtag

SEQ ID NO: 193172 - DNA, 1062 bp, Artificial Sequence
  derived and/or modified sequence
atggagcctggactcgaacatgccctgagacgtacaccaagctggagcagtcttggtggctctgagcatcaagaaatgtccttccttgagcaggagaactcttcgagttggccttcacccgctgtaacgtcaagctcagaacggatccgaggcaagagacgtgcgaaagccctgagatggactcggcaaaaatcagtggaagagggcgaacctcctgggcagggggaggggccacggtcccgccctgcggctgagtcaaccggcctcgaagcaacttttcctaaaacgacccccctagcccaagccgatccagcgggcgtgggtaccccaccgacaggctgggactgcctgcctagcgattgtacagcctccgccgctggttcatccacggacgatgtggagctcgccactgagttccctgccactgaggcatgggaatgcgagttggagggcctccttgaggaaaggcccgcactttgcctgtcaccccaagcaccctttcccaagctagggtgggacgatgagctgcggaagccaggcgcgcagatttacatgcgatttatgcaggaacatacatgttacgacgctatggcaacctcttcaaaactggtgatttttgacaccatgctggaaatcaagaaggccttcttcgccctggttgcaaacggcgttagggctgcaccactgtgggacagtaagaagcagtcattcgtgggcatgttgacaatcactgatttcattctcgtgctgcaccggtactatcggtcccctcttagatcaacatgcaaggctgcgagctctttatggtcacccagcttactgatgatagcgtgcctcaagttatccacaccaagctcccggacgggctcaatagcatgcttattcctgacacggtgtcaggccacatatagcacgtcttcccataccaatgcatgttcctcctcgtgcacttctctcgtaccatgctgcccaggtcccccatcttcaaccgcgctgagcaagatatgggcttcagcacattctgaaacatggctgtggtgttggcggcaacacccgagttag

SEQ ID NO: 193173 - DNA, 1395 bp, Artificial Sequence
  derived and/or modified sequence
atgtcttttttagagcaagagaattcatccagctggccttcacctgcagtaacttcttcaagcgagagaatacgaggtaagaggagagctaaagctctcagatggactcgccagaaatcagtggaggaaggcgaacctccagggcagggagaaggaccccgcagccggcccgccgcagagtccactggcctggaggccacctttcctaaaacaacacccttagctcaggctgatccagctggagttggaacaccacccacagggtgggactgcctgccaagcgactgcacggcttctgctgcaggtagcagcaccgatgatgtggaactggccacagaattccctgccacagaggcttgggagtgcgaactggaggggctgctggaagaaagaccagccctttgcctgagtcctcaggcgccctttcccaagctgggctgggacgatgaactgaggaagccaggggcccagatctatatgaggtttatgcaggaacatacatgctacgacgcaatggccacatcttccaaactcgtcatttttgacactatgctggagataaaaaaggcgtttttcgccctcgtcgcgaatggagtccgggcagcgccgctgtgggattcaaagaagcagagcttcgtgggcatgctgactattaccgactttatcctggtgctccataggtactatcggagtccattagtgcagatatatgagatcgagcagcataagatcgaaacctggagggaaatttacctacagggatgctttaagcccctggtgtccatatcccccaacgatagtctcttcgaggctgtgtacaccctcattaagaacaggattcatagattgcccgtgctggaccctgtatccgggaacgtactgcacatccttacccataagcggctgctaaaattccttcacatattcggcagtctactgccgcgacctagttttctgtatcggacaatccaggatcttggcatcggtacctttcgggacctcgccgtcgtgctggagaccgcgccgatcctgactgccctggacatattcgtggatcggagggtcagcgccctccctgtcgtaaatgaatgtggacaggtagttggcctgtactccagattcgatgtcattcatttagcagcacagcagacttataatcacctggacatgtccgttggcgaggccctcagacagcgtacactatgcctggagggtgtgctttcttgccaacctcatgagtccctcggggaagtaattgacagaatcgcaagagaacaggttcatcgcttggtactggtcgacgagacacagcacctgctgggagtagtctccctgagcgacatcctgcaggctctggttctctcccctgctggaatcgacgcactcggagcgtag

SEQ ID NO: 193174 - DNA, 1470 bp, Artificial Sequence
  derived and/or modified sequence
atggagccaggccttgagcacgcactgagaagaaccccttcttggagctctcttgggggatctgaacaccaagaaatgagtttcctggagcaagagaattcaagctcgtggccttctcccgctgtaacatcgagctctgaacggattcgtgggaagcgacgggcgaaggccctaaggtggactaggcagaagtccgtcgaagagggggagccacccggacagggcgaggggccacgcagccgccctgctgcagaaagtaccggactcgaggccacctttcccaagactacgcccctggcacaggccgatcccgccggggtgggcacacctcctacgggctgggattgtctccctagcgactgtaccgctagcgccgcgggcagcagtacggacgatgtcgagttggccacagaattccctgccaccgaggcctgggaatgcgagctggaaggcttgcttgaggaacgccccgcactctgcctatccccgcaggcacctttccctaagctgggatgggacgacgaacttcgtaagccgggggcgcagatctacatgcgttttatgcaagagcacacttgttatgacgctatggccacatcgtccaagctcgttatcttcgacacaatgttggaaatcaaaaaggcctttttcgcgctggtggccaacggcgtacgcgcggcgccactctgggattctaaaaagcagagtttcgtgggtatgctcacaattacggatttcatcctggtattacataggtattaccgcagtcccctagtgcaaatctacgaaatcgagcagcacaaaattgaaacctggagggaaatctatttacagggttgtttcaagcctctcgtgtcaatctctcccaacgactcattgttcgaggcggtgtacacattgatcaagaacagaatccaccggctgcccgtgctcgaccctgttagcggaaatgtgctgcacatcctcacacacaaacggctcttaaagttcctacatatattcggctccctcttgccgagaccatcctttctataccgtaccatccaggatcttggtattgggacctttcgggatttggcagtggtgcttgaaacagcgccaattttgactgccctggacatcttcgtggacaggagagtttcggctttaccagtggtaaacgaatgcggacaggtggtcgggttgtacagtcgctttgacgtgattcaccttgctgcccaacagacttataatcacctggatatgtctgtgggtgaggccctgcgacagaggacactgtgcctggagggcgtgctctcttgtcaaccacatgagtcactcggcgaagtgatcgatcgtatcgcacgcgagcaggtgcatcgattagtgctcgtggatgagacccagcaccttctgggagtcgtgtccctgtctgatatcctgcaagcactcgtcctctcacctgcaggaatcgatgcactgggcgcgtag

SEQ ID NO: 193175 - DNA, 918 bp, Artificial Sequence
  derived and/or modified sequence
atgcggttcatgcaggagcatacatgctatgatgccatggccacctcctctaagttggtgatattcgacaccatgctggagattaagaaagctttttttgccctggtggctaatggcgtgagagcagcccctttatgggactctaaaaagcagtcattcgtgggtatgctcactatcaccgacttcatcttggtgctgcaccggtactaccgcagcccgctcgtccagatatatgaaatcgagcagcataagatcgagacttggcgggagatctacctccagggttgctttaagcctcttgtcagcatttccccaaacgacagcctgttcgaagcggtatacactcttatcaaaaatagaattcataggttgccagtgcttgatcccgtatcaggcaacgtgctacatattctgacgcacaagaggcttctgaagttcttgcacatcttcggaagtctgcttccaagaccctccttcctgtacagaacgatacaggacctgggaatcggaacatttagagatctggcagttgtgctggagaccgcgccgattctgacggccctggacatcttcgttgatcgtcgcgtgtccgcgcttcctgttgttaacgaatgcggccaggtggtgggcctctattcaagatttgatgtaattcaccttgccgcccagcagacctacaatcaccttgacatgagcgtgggggaagctctgcggcagaggaccctctgcctggagggcgtattgtcgtgccaacctcacgagagtttgggagaggttattgaccgtatcgcaagagagcaagtccatcgcctcgtgcttgtggacgagactcagcacctgctgggcgtcgtcagcctgagcgacatactgcaagcccttgtgttaagcccggccggcatcgacgctcttggggcatag

SEQ ID NO: 193176 - DNA, 1062 bp, Artificial Sequence
  derived and/or modified sequence
atggagcccggcctggagcacgccctgcggaggacccccagctggagcagcctgggcggcagcgagcaccaggagatgtccttcctggagcaggagaacagcagctcctggcccagccctgctgtgaccagcagcagcgagcgcatccggggcaagagaagagccaaggccctgcgctggacccggcagaagtctgtggaggagggggagcccccaggccagggcgagggccccaggagcaggcctgctgctgagagcacaggcctggaggccaccttccccaagaccacccccctggcccaggccgaccctgctggggtgggcaccccacccaccggctgggactgcctgcccagcgactgcacagccagcgctgctggcagcagcacagatgatgtggagctggccacagagttccctgccacagaggcctgggagtgtgagctggagggcctgctggaggagaggcctgccctgtgcctgagcccccaggcccccttccccaagctgggctgggatgatgagctgaggaagccaggggcccagatctacatgaggttcatgcaggagcacacctgctatgatgccatggccaccagcagcaagctggtgatctttgacaccatgctggagatcaagaaggccttctttgccctggtggccaacggggtgcgggccgcccccctgtgggacagcaagaagcagagctttgtgggcatgctgaccatcacagacttcatcctggtgctgcaccgctactaccgcagccccctgcggagcacctgcaaggccgccagcagcctgtggagccccagcctgctgatgattgcctgcctgaagctgagcacccccagcagcaggacaggcagcatcgcctgcctcttcctgacccgctgccaggccacctacagcaccagcagccacaccaatgcctgcagcagcagctgcaccagcctggtgccctgctgccccggcccccccagcagcacagccctgagcaagatctgggccagcgcccacagcgagacctggctgtggtgctggaggcagcaccccagctag

SEQ ID NO: 193177 - DNA, 1395 bp, Artificial Sequence
  derived and/or modified sequence
atgtccttcctggagcaggagaacagcagctcctggcccagccctgctgtgaccagcagcagcgagcgcatccggggcaagaggcgggccaaggccctgcgctggacccggcagaagtctgtggaggagggggagcccccaggccagggcgagggccccaggagcaggcctgctgctgagagcacaggcctggaggccaccttccccaagaccacccccctggcccaggccgaccctgctggggtgggcaccccacccaccggctgggactgcctgcccagcgactgcacagccagcgctgctggcagcagcacagatgatgtggagctggccacagagttccctgccacagaggcctgggagtgtgagctggagggcctgctggaggagaggcctgccctgtgcctgagcccccaggcccccttccccaagctgggctgggatgatgagctgaggaagccaggggcccagatctacatgaggttcatgcaggagcacacctgctatgatgccatggccaccagcagcaagctggtgatctttgacaccatgctggagatcaagaaggccttctttgccctggtggccaatggagtgcgggccgcccccctgtgggacagcaagaagcagagctttgtgggcatgctgaccatcacagacttcatcctggtgctgcaccgctactaccgcagccccctggtgcagatctatgaaattgagcagcacaagattgagacctggagggagatctacctgcagggctgcttcaagcccctggtgtccatcagccccaatgacagcctgtttgaagctgtgtacaccctcatcaagaaccgcatccaccggctgcctgtgctggaccctgtgtctggaaatgtgctgcacatcctgacccacaagaggctgctgaagttcctgcacatcttcggcagcctgctgccccggcccagcttcctgtaccgcaccatccaggacctgggcatcggcaccttccgggacctggccgtggtgctggagacagcccccatcctgacagccctggacatctttgtggacagaagagtgtctgccctgcctgtggtgaatgaatgtggccaggtggtgggcctgtacagcagatttgatgtgatccacctggccgcccagcagacctacaaccacctggacatgtctgtgggggaggccctgcggcagaggaccctgtgcctggagggcgtgctgagctgccagccccatgagagcctgggggaggtgattgaccgcatcgcccgggagcaggtgcaccggctggtgctggtggatgagacccagcacctgctgggcgtggtgtccctgagtgacatcctgcaggccctggtgctgagccctgctggcattgatgccctgggcgcctag

SEQ ID NO: 193178 - DNA, 918 bp, Artificial Sequence
  derived and/or modified sequence
atgaggttcatgcaggagcacacctgctatgatgccatggccaccagcagcaagctggtgatctttgacaccatgctggagatcaagaaggccttctttgccctggtggccaacggggtgcgggccgcccccctgtgggacagcaagaagcagagctttgtgggcatgctgaccatcacagacttcatcctggtgctgcaccgctactaccgcagccccctggtgcagatctatgaaattgagcagcacaagattgagacctggagggagatctacctgcagggctgcttcaagcccctggtgtccatcagccccaatgacagcctgtttgaggccgtgtacaccctcatcaagaaccgcatccaccggctgcctgtgctggaccctgtgtctggaaatgtgctgcacatcctgacccacaagaggctgctgaagttcctgcacatcttcggcagcctgctgccccggcccagcttcctgtaccgcaccatccaggacctgggcatcggcaccttccgggacctggccgtggtgctggagacagcccccatcctgacagccctggacatctttgtggaccggcgggtgtctgccctgcctgtggtgaatgaatgtggccaggtggtgggcctgtacagcagatttgatgtgatccacctggccgcccagcagacctacaaccacctggacatgtctgtgggggaggccctgcggcagaggaccctgtgcctggagggcgtgctgagctgccagccccatgagagcctgggggaggtgattgacagaattgcccgggagcaggtgcaccggctggtgctggtggatgagacccagcacctgctgggcgtggtgtccctgagtgacatcctgcaggccctggtgctgagccctgctggcattgatgccctgggcgcctag

SEQ ID NO: 193179 - DNA, 1062 bp, Artificial Sequence
  derived and/or modified sequence
atggagcccggcctggagcacgccctgcggcggacccccagctggagcagcctgggcggctccgaacatcaggagatgtcatttttggaacaggagaactcttcctcttggccctcccctgcggtgacttcatcctccgaaaggattcgcggcaagaggcgggccaaggctctaagatggactcggcaaaagagtgtggaagagggagaaccacccgggcaaggagaaggtcccaggagtcggcctgcagccgagtcaacaggtctggaggccacgttcccgaagacaaccccccttgcacaagctgatcccgcaggagtgggaactcctccaactgggtgggattgtctcccctccgattgtactgcatctgctgctggatcctccacagacgatgttgaactggctacagagtttcctgctaccgaggcttgggagtgtgagcttgagggtctgctcgaggagagacccgctctgtgcctgtctcctcaggcccccttccctaagttgggctgggatgacgagctgaggaaacccggtgctcagatttatatgaggtttatgcaagaacatacatgctatgacgctatggctacttcttctaagctggtgattttcgatactatgttggagatcaagaaagccttctttgcattggttgcaaatggcgttagagctgctccgctatgggacagtaaaaagcagtcatttgtgggaatgctcacaattacagacttcatcctagtgctgcaccgctactatagaagtccgttgcggtccacatgcaaagccgcttcgtcgctttggagccctagcctgctgatgattgcctgcctgaagttgtcaacaccatctagcaggacaggcagcattgcctgcctatttctgacacgttgtcaagctacatacagcacctcttcccataccaacgcttgctccagttcttgtactagtttagtaccatgctgtccaggaccgccctcttccaccgccctgagcaaaatctgggctagcgcccactctgagacatggctctggtgctggcggcagcaccccagttag

SEQ ID NO: 193180 - DNA, 1395 bp, Artificial Sequence
  derived and/or modified sequence
atgagcttcctggagcaggagaacagcagcagctggcccagccccgccgtgaccagcagtagtgagagaatccgggggaaaagacgtgccaaagccctacggtggacgagacagaagagcgtggaggagggcgagcctccagggcagggagagggaccgcggtctagacctgcagcggagagtaccggcctggaggcgactttccctaaaactacgcctctggcacaagccgatcctgctggagtcggaacaccacctacagggtgggactgcctgcccagcgactgcactgctagcgcagctgggagttccacagatgacgtagagctggccaccgagtttcctgctacagaggcctgggagtgcgaactggaaggacttttggaggaaaggcctgctctgtgcctctcaccccaggccccttttcccaaattggggtgggatgacgaactgagaaaacccggagctcaaatctacatgagattcatgcaggagcatacttgctatgacgccatggccacctcatctaagctggtgatcttcgatacaatgctagaaatcaagaaagcgttcttcgctctcgtagctaacggcgtgcgcgctgcccctctgtgggacagcaagaagcaaagtttcgtgggcatgctcaccatcacagactttattctggtccttcaccgctactaccgttcaccgctcgtacagatatatgagatcgagcagcataagattgagacgtggcgggaaatatacctgcaaggatgtttcaaacccctcgtgagcataagccctaatgattcactcttcgaagctgtgtacacccttattaagaatcgaattcaccgactaccagtccttgatcctgtttcaggcaacgtgttgcacatcctcacacataagcgcctgctcaaattcctgcacatctttggaagcctgttacccaggcccagttttctgtatcgcactattcaagatttggggattgggactttcagggatctggccgtcgtcctggagactgcccccatactcaccgccctggatatctttgtggatcggcgtgtctcagccctgcctgtagttaacgaatgcggccaggttgtgggactctattcccggtttgatgtcattcacctagccgcccagcagacttataaccacctggatatgtctgtcggggaggctcttaggcagagaacgctctgtctggagggtgttctcagttgtcagcctcacgagagtctaggagaagtgatcgaccgcatcgcacgagagcaggtccatagactggtgctggtcgatgaaacacagcacttattgggcgttgtctcgctcagcgatatcctccaagcactggtgctgtcccccgccgggattgacgccctgggggcttag

SEQ ID NO: 193181 - DNA, 1470 bp, Artificial Sequence
  derived and/or modified sequence
atggagcccggcctggagcacgccctgcggcggacccccagctggagtagtctgggaggaagtgaacaccaggagatgagcttcctggagcaggagaacagcagcagctggccttccccagccgtcacgtcctcaagcgaaagaattaggggcaaaagaagagcaaaagctttgcgatggactcgtcagaaatctgtagaggagggtgaaccccctgggcagggggaggggccccgttctcgaccagctgcagagagtaccgggcttgaagctacattccctaaaaccacccctctggcccaggccgacccagcaggagtgggcacccctccaacgggttgggattgtctgccctctgactgcacagcttccgcagcaggctcaagtactgacgatgtcgaactcgccaccgagtttcctgcaacagaagcctgggagtgcgaactcgaaggacttcttgaagagcgacctgccctgtgcctgagccctcaagccccctttcctaaactggggtgggatgatgaactgcgtaagcccggagcacagatctacatgagattcatgcaggagcacacgtgttacgacgctatggccacgagttcaaagttagtcattttcgacactatgctcgagatcaaaaaggctttttttgccctcgtcgcaaacggggtgcgagccgcacccctttgggactctaagaagcagtctttcgtagggatgctaacaataacggattttattttggttctgcaccgttactaccgctctccccttgtgcagatatacgaaatcgaacaacacaagattgagacgtggcgggagatataccttcaaggctgtttcaagcccctggtgagtatctcccctaacgactcgcttttcgaagctgtctacactctgattaagaaccgaattcatagactacccgtccttgacccagttagtggtaatgtgctgcatattctgacacataaacgactcctgaaatttttgcacatctttggctccctgctcccaagaccgtccttcctgtatcgcaccatacaagatctgggcattggaaccttccgggacctggccgttgtgctggaaaccgcacccattctaactgccctagatatctttgtggatcgtagggtatccgccttgcctgtcgtgaatgaatgtgggcaagttgtggggctttacagcagatttgatgtgatccatctggccgctcagcaaacctacaaccatctggacatgagtgtcggagaggcgctgcgtcagcgcactctatgccttgaaggtgttctcagctgccagccacatgaatctctgggcgaggttatcgacaggatcgcccgcgaacaggttcaccgtcttgtgttggtggacgaaactcagcacctgctcggcgtcgtctcactgagtgatatactgcaagccctagtgttgtctcccgctggtatagacgcactgggggcatag

SEQ ID NO: 193182 - DNA, 918 bp, Artificial Sequence
  derived and/or modified sequence
atgcggttcatgcaggagcacacctgctacgacgccatggccaccagcagcaaactcgtaatcttcgacacaatgctcgagatcaaaaaggcttttttcgcattggttgctaatggcgtccgcgctgctccactgtgggacagcaaaaaacagtcattcgtggggatgctgacaattactgactttatccttgtgctgcatcggtactatcggagccctctggtgcagatctatgaaattgaacagcacaagatcgagacttggcgggagatctacttgcagggctgctttaaaccgctggtgagcatctctcctaacgattccctgtttgaagctgtgtacacgctaataaagaatcgcatacatagattgccggtcttggatccggtctctggaaacgtgctgcacatcctgacgcataagagactcctgaaattcctccacatcttcggatctctactgcctcggcctagctttctgtataggacaatccaggatttaggcattgggacctttcgggacctggcagtcgtcctggagaccgcccctatactgacggccctcgatatattcgttgatagacgtgtgtcagccctgcccgtagtaaacgagtgtgggcaggtcgttggtctgtactcacggtttgacgtgatacacctggccgcccagcagacctataaccaccttgacatgtccgttggtgaggcactgcggcagcgcactctgtgcctggaaggcgttcttagctgtcagccccacgaatcgctaggtgaagtgatcgaccggatcgccagagaacaggttcataggcttgtcctagtcgatgaaacgcagcatctactcggcgttgtgtcgctcagcgacattctccaagccctggttctgagccccgcagggattgatgcccttggcgcatag

SEQ ID NO: 193183 - DNA, 1062 bp, Artificial Sequence
  derived and/or modified sequence
atggagcctggcctcgagcatgcactgcggaggacaccctcctggtctagtctgggaggctcggagcaccaggagatgtcctttttagagcaggagaacagcagcagttggccctctccggctgtgacttcttccagtgaaagaattagggggaagagaagagcgaaggcgctgcgatggacacgacagaagagtgtggaggaaggagaacccccaggccagggggaaggccctagatccagacctgccgctgagtccactgggttagaggctactttccctaagacgacccccctggcccaggccgatccagccggagttggaactcctcctacggggtgggattgcctgccctctgactgcaccgccagcgctgccggaagctctactgatgacgtggagttggcaacagaattccctgcgactgaggcctgggaatgcgaactcgaaggtctgctggaggagaggcctgcgctgtgcctgtccccacaggcaccttttcctaagctgggctgggacgacgagctcaggaaacctggagcacagatatacatgcgttttatgcaggaacacacttgctatgacgctatggcaaccagtagcaagctcgtcatatttgatactatgctggagatcaagaaagcatttttcgccttagtcgctaacggtgttcgtgccgctcctctttgggactctaagaaacagtccttcgtgggtatgctgactatcactgacttcatccttgtactgcatagatattacaggtctccgctcagatcaacatgcaaggccgcaagctccctttggagcccctctctgttgatgatcgcctgcctgaaattgtccactccatccagccggactggttcaatcgcatgtctattcctgacgcggtgccaggccacatactccacctcctcgcatacgaacgcatgtagctcttcctgtactagcctggtaccgtgctgcccaggccctccaagctcgaccgctctgtctaagatctgggccagcgcacactctgagacatggctgtggtgctggagacagcaccccagttag

SEQ ID NO: 193184 - DNA, 1395 bp, Artificial Sequence
  derived and/or modified sequence
atgtcctttctcgaacaggagaactcaagcagttggcccagtccggcagtgacttcatcttctgagagaatccgaggcaaaagacgagctaaagccctgcggtggacgcgccagaaaagcgtcgaggaaggggaaccacccggtcaaggggaagggccaagatcacgacctgccgcagagtctaccggcctggaagccacgttcccgaagactacccccttggctcaggcggaccctgccggagtgggtactccccctaccggttgggactgcttaccaagcgattgcacagcaagcgccgcaggaagctcaaccgatgacgtcgagctcgcgaccgaattccctgccactgaagcctgggaatgcgagctggaggggctgctggaggaaaggccagcactttgcctgtccccccaagctcctttccctaaactgggatgggatgatgaactcaggaagccaggcgctcagatctacatgagattcatgcaggaacacacatgctatgacgcaatggcgaccagctccaaattggtgattttcgacacaatgctggagattaaaaaagcgttcttcgctctggttgccaatggggtccgggcagctcctctttgggacagtaagaaacaaagcttcgtgggcatgcttacgattacagattttattctcgtactccatcgctactatcggtcaccattggtacagatctacgaaattgaacagcataaaatcgaaacctggcgcgagatatatctacaaggatgcttcaagccattggtttccatctcccctaatgacagcctctttgaggcagtgtacactctgatcaaaaacaggattcatcgattgccagtgcttgatcctgtttcaggtaatgttctgcatatactcacgcacaagcgccttttgaaattcttgcacatattcgggagcctgctgcccagacctagtttcctttatagaaccatccaggatctgggtatcggcaccttccgagacttggctgttgtcttggaaacggccccaattctcacagcgctcgatatcttcgtggacagaagggtttcggctctcccagtagtgaacgaatgcgggcaggtcgtgggcctctactctcgatttgatgtaatccatctcgcagcccagcagacttacaaccacttggatatgtctgtgggcgaagcactccgccagcgcacactctgcctcgagggcgttctctcttgccagccccacgaaagtttgggggaggtaattgaccgtattgccagggaacaggttcatagactggttcttgtggacgagacacagcacctattaggcgtcgtcagcctctctgacatcctccaagcccttgtgttgtcccccgctggcatagacgctctcggggcttag

SEQ ID NO: 193185 - DNA, 1470 bp, Artificial Sequence
  derived and/or modified sequence
atggaaccaggacttgaacacgccttacggcgtacaccaagctggagctcactgggaggctccgagcatcaggaaatgtcgtttctcgagcaggaaaacagttcctcttggccaagccccgctgtgacctcctcaagtgaacggatccggggaaagcggagagctaaggctcttaggtggacccggcagaagagcgtagaggagggagagcctcccggacagggtgagggccctaggtcgcgacctgccgcagagtccaccggtcttgaggcgacctttcctaaaacaacccccctggctcaagccgaccccgctggtgtgggtacccccccaaccggctgggactgccttccgtccgattgtactgccagcgccgcaggcagctctactgatgacgtcgaattggctacagaattcccggcaactgaagcctgggaatgtgaactggaggggctgttagaggagaggcctgctttgtgcctcagtcctcaggctcccttcccgaaactgggatgggacgacgaactgagaaagccaggcgctcagatctacatgaggtttatgcaggagcatacctgctatgacgcaatggccactagctcaaagctggtgatcttcgatacaatgctggaaattaagaaagccttcttcgccctggttgctaacggggtaagggctgcgcctctgtgggattccaaaaagcagtcattcgtcggcatgctgactattacagacttcatattagtgcttcatcggtattatcgctcacccttggtgcagatctatgagattgaacagcataagatagaaacctggagggaaatttatctgcagggttgctttaaacctctggtcagcataagcccgaacgatagcctgtttgaggcagtctatacacttatcaaaaatcggatccaccgcctgccagtgctggaccctgtgtctggcaacgtcctccatattctgacccacaagcggttgctgaaattcctgcatattttcgggagtctgctgcctaggcctagcttcctctatcgtacaatacaggacctggggataggaacgttccgggacctggccgttgtcctagagacagcacccatcttaactgccctggacatcttcgtagatcgcagagtgtccgctctccccgtggtgaacgagtgcggccaggtggttggactgtactcacgatttgacgtgattcatctagccgcacagcagacatacaaccatctggacatgtccgtgggcgaagccctgagacagcggacactttgcctggaaggagtattaagttgccaaccacatgagagtctgggagaagtcattgacaggatcgccagagagcaggtgcatcggctagtgctggtggatgaaactcaacacctgctaggagtggtatctttgtctgatatcctgcaggcgctcgtcttgtcccccgcagggatcgacgctctcggcgcatag

SEQ ID NO: 193186 - DNA, 918 bp, Artificial Sequence
  derived and/or modified sequence
atgaggtttatgcaggaacacacatgctatgatgcaatggccacgtcaagtaaactggtgatcttcgacactatgctagagatcaagaaagccttcttcgccctggtggccaacggagttagggcagctccactctgggacagcaagaaacagtcattcgtcgggatgttgacaattactgactttatcctcgtcctgcaccgctattatagatctcctctcgtgcagatctacgagatcgagcagcataaaatagaaacatggagagagatttacctgcagggatgctttaaaccactagtgtcaattagcccaaatgactcattgtttgaagcagtatacaccctaatcaagaataggattcatcgtctgccagtgctggatcccgttagcggtaatgtcctgcacattctcactcataaacgcctgcttaaattcctccacattttcggctcactgcttcccagaccatcctttctctacaggacaatccaggacctaggaattggaacgtttagagacctcgccgtggtccttgaaacagccccaatcttgacagctctagatatatttgtggaccgccgtgtctcggcactcccagttgttaatgagtgtggccaggttgttggtctgtatagcaggttcgatgtgatccacctggcagcccagcagacatataaccatctggacatgtcagtgggagaagcgctgcgccaaaggaccctgtgcctggagggggtgctcagttgtcagccgcatgagtctctaggtgaagtcatagaccgcattgccagggagcaagtgcataggcttgttctcgtggacgaaacacaacacctcctaggagtggtaagtctctcagatatcctccaagcactggtgctgagtccggctgggattgatgctctgggtgcctag

SEQ ID NO: 193187 - DNA, 2326 bp, Artificial Sequence
  derived and/or modified sequence
gccacagtgtcgcacacttgctctcagttggtctggggctggccacatggagcccgggctggagcacgcactgcgcaggaccccttcctggagcagccttgggggttctgagcatcaagagatgagcttcctagagcaagaaaacagcagctcatggccatcaccagctgtgaccagcagctcagaaagaatccgtgggaaacggagggccaaagccttgagatggacaaggcagaagtcggtggaggaaggggagccaccaggtcagggggaaggtccccggtccaggccagctgctgagtccaccgggctggaggccacattccccaagaccacacccttggctcaagctgatcctgccggggtgggcactccaccaacagggtgggactgcctcccctctgactgtacagcctcagctgcaggctccagcacagatgatgtggagctggccacggagttcccagccacagaggcctgggagtgtgagctagaaggcctgctggaagagaggcctgccctgtgcctgtccccgcaggccccatttcccaagctgggctgggatgacgaactgcggaaacccggcgcccagatctacatgcgcttcatgcaggagcacacctgctacgatgccatggcaactagctccaagctagtcatcttcgacaccatgctggagatcaagaaggccttctttgctctggtggccaacggtgtgcgggcagcccctctatgggacagcaagaagcagagctttgtggggatgctgaccatcactgacttcatcctggtgctgcatcgctactacaggtcccccctggtccagatctatgagattgaacaacataagattgagacctggagggagatctacctgcaaggctgcttcaagcctctggtctccatctctcctaatgatagcctgtttgaagctgtctacaccctcatcaagaaccggatccatcgcctgcctgttcttgacccggtgtcaggcaacgtactccacatcctcacacacaaacgcctgctcaagttcctgcacatctttggttccctgctgccccggccctccttcctctaccgcactatccaagatttgggcatcggcacattccgagacttggctgtggtgctggagacagcacccatcctgactgcactggacatctttgtggaccggcgtgtgtctgcactgcctgtggtcaacgaatgtggtcaggtcgtgggcctctattcccgctttgatgtgattcacctggctgcccagcaaacctacaaccacctggacatgagtgtgggagaagccctgaggcagaggacactatgtctggagggagtcctttcctgccagccccacgagagcttgggggaagtgatcgacaggattgctcgggagcaggtacacaggctggtgctagtggacgagacccagcatctcttgggcgtggtctccctctccgacatccttcaggcactggtgctcagccctgctggcatcgatgccctcggggcctgagaagatctgagtcctcaatcccaagccacctgcacacctggaagccaatgaagggaactggagaactcagccttcatcttcccccacccccatttgctggttcagctatgattcaggcttcttcagccctcccaaattgcccttgccctacctgtgctcccagaagccctcgggcatgcccagtgcaccatgggatgatgaaattaaggagaacagctgagtcaagcttggaggtccctgaaccagaggcactaggattaccccagggccatctgtgctccatgcccgcccatccccttgccgcctgactgggtcggatggccccagtgggtttagtcagggcttctggattcctcggtttctgggctacctatggcttcagccttcagctcctgggagtcccagctgttgttcccagcaacgtcgccactgccctcctactctccaggctttgtcatttcaaggctgctgaaatgctgcatttcaggggccaccatggagcagccgttatttatagaactgcctgttggaggtggggagtcctccctccattcttgtccagaaaactccttagctctcgcagtgagccatgttcttagtctccagggatggatggccttgtatatggacccctgagaatgagcaattgagaaaacaaaacaaaaggaacaatccatgaacttagattttattggtttcactcaaaatgctgcagtcatttgacctgaacttgtggcaagagacttgtgctttctaaattcaaagactagaaggaaaatggataaaaatcacaagtgccgtttctcttgc

SEQ ID NO: 193188 - DNA, 1193 bp, Artificial Sequence
  derived and/or modified sequence
acacttgctctcagttggtctggggctggccacatggagcccgggctggagcacgcactgcgcaggaccccttcctggagcagccttgggggttctgagcatcaagagatgagcttcctagagcaagaaaacagcagctcatggccatcaccagctgtgaccagcagctcagaaagaatccgtgggaaacggagggccaaagccttgagatggacaaggcagaagtcggtggaggaaggggagccaccaggtcagggggaaggtccccggtccaggccagctgctgagtccaccgggctggaggccacattccccaagaccacacccttggctcaagctgatcctgccggggtgggcactccaccaacagggtgggactgcctcccctctgactgtacagcctcagctgcaggctccagcacagatgatgtggagctggccacggagttcccagccacagaggcctgggagtgtgagctagaaggcctgctggaagagaggcctgccctgtgcctgtccccgcaggccccatttcccaagctgggctgggatgacgaactgcggaaacccggcgcccagatctacatgcgcttcatgcaggagcacacctgctacgatgccatggcaactagctccaagctagtcatcttcgacaccatgctggagatcaagaaggccttctttgctctggtggccaacggtgtgcgggcagcccctctatgggacagcaagaagcagagctttgtggggatgctgaccatcactgacttcatcctggtgctgcatcgctactacaggtcccccctgagatctacctgcaaggctgcttcaagcctctggtctccatctctcctaatgatagcctgtttgaagctgtctacaccctcatcaagaaccggatccatcgcctgcctgttcttgacccggtgtcaggcaacgtactccacatcctcacacacaaacgcctgctcaagttcctgcacatctttggttccctgctgccccggccctccttcctctaccgcactatccaagatttgggcatcggcacattccgagacttggctgtggtgctggagacagcacccatcctgactgcactggacatctttgtggaccggcgtgtgtctgcactgcctgtggtcaacgaatgtggtcaggtcgtgggcctctattcccgctttgatgtgatt

SEQ ID NO: 193189 - DNA, 2301 bp, Artificial Sequence
  derived and/or modified sequence
agttggtctggggctggccacatggagcccgggctggagcacgcactgcgcaggaccccttcctggagcagccttgggggttctgagcatcaagagatgagcttcctagagcaagaaaacagcagctcatggccatcaccagctgtgaccagcagctcagaaagaatccgtgggaaacggagggccaaagccttgagatggacaaggcagaagtcggtggaggaaggggagccaccaggtcagggggaaggtccccggtccaggccagctgctgagtccaccgggctggaggccacattccccaagaccacacccttggctcaagctgatcctgccggggtgggcactccaccaacagggtgggactgcctcccctctgactgtacagcctcagctgcaggctccagcacagatgatgtggagctggccacggagttcccagccacagaggcctgggagtgtgagctagaaggcctgctggaagagaggcctgccctgtgcctgtccccgcaggccccatttcccaagctgggctgggatgacgaactgcggaaacccggcgcccagatctacatgcgcttcatgcaggagcacacctgctacgatgccatggcaactagctccaagctagtcatcttcgacaccatgctggagatcaagaaggccttctttgctctggtggccaacggtgtgcgggcagcccctctatgggacagcaagaagcagagctttgtggggatgctgaccatcactgacttcatcctggtgctgcatcgctactacaggtcccccctggtccagatctatgagattgaacaacataagattgagacctggagggagatctacctgcaaggctgcttcaagcctctggtctccatctctcctaatgatagcctgtttgaagctgtctacaccctcatcaagaaccggatccatcgcctgcctgttcttgacccggtgtcaggcaacgtactccacatcctcacacacaaacgcctgctcaagttcctgcacatctttggttccctgctgccccggccctccttcctctaccgcactatccaagatttgggcatcggcacattccgagacttggctgtggtgctggagacagcacccatcctgactgcactggacatctttgtggaccggcgtgtgtctgcactgcctgtggtcaacgaatgtggtcaggtcgtgggcctctattcccgctttgatgtgattcacctggctgcccagcaaacctacaaccacctggacatgagtgtgggagaagccctgaggcagaggacactatgtctggagggagtcctttcctgccagccccacgagagcttgggggaagtgatcgacaggattgctcgggagcaggtacacaggctggtgctagtggacgagacccagcatctcttgggcgtggtctccctctccgacatccttcaggcactggtgctcagccctgctggcatcgatgccctcggggcctgagaagatctgagtcctcaatcccaagccacctgcacacctggaagccaatgaagggaactggagaactcagccttcatcttcccccacccccatttgctggttcagctatgattcaggcttcttcagccctcccaaattgcccttgccctacctgtgctcccagaagccctcgggcatgcccagtgcaccatgggatgatgaaattaaggagaacagctgagtcaagcttggaggtccctgaaccagaggcactaggattaccccagggccatctgtgctccatgcccgcccatccccttgccgcctgactgggtcggatggccccagtgggtttagtcagggcttctggattcctcggtttctgggctacctatggcttcagccttcagctcctgggagtcccagctgttgttcccagcaacgtcgccactgccctcctactctccaggctttgtcatttcaaggctgctgaaatgctgcatttcaggggccaccatggagcagccgttatttatagaactgcctgttggaggtggggagtcctccctccattcttgtccagaaaactccttagctctcgcagtgagccatgttcttagtctccagggatggatggccttgtatatggacccctgagaatgagcaattgagaaaacaaaacaaaaggaacaatccatgaacttagattttattggtttcactcaaaatgctgcagtcatttgacctgaacttgtggcaagagacttgtgctttctaaattcaaagactagaaggaaaatggataaaaatcacaagtgccgtttctcttgc

SEQ ID NO: 193190 - DNA, 2222 bp, Artificial Sequence
  derived and/or modified sequence
ctgctcaatgaccatgttcccacatgctccaagccacatcccctcaaaaagggtccctctagcttgtcctcagtgacccaggaggcagctgaggaccaagtacccagattatccggtgcgccccttccctcccagcaacccccagccttcagggctgtagcagctgagcaaatgggggcccctccctctcattgcctgacacccaatcagagagaaaccgatcctggcagggcagggtgcccggggccgggcccagaatagtgcagcccagccacagtgtcgcacacttgctctcagttggtctggggctggccacatggagcccgggctggagcacgcactgcgcaggaccccttcctggagcagccttgggggttctgagcatcaagagatgagcttcctagagcaagaaaacagcagctcatggccatcaccagctgtgaccagcagctcagaaagaatccgtgggaaacggagggccaaagccttgagatggacaaggcagaagtcggtggaggaaggggagccaccaggtcagggggaaggtccccggtccaggccagctgctgagtccaccgggctggaggccacattccccaagaccacacccttggctcaagctgatcctgccggggtgggcactccaccaacagggtgggactgcctcccctctgactgtacagcctcagctgcaggctccagcacagatgatgtggagctggccacggagttcccagccacagaggcctgggagtgtgagctagaaggcctgctggaagagaggcctgccctgtgcctgtccccgcaggccccatttcccaagctgggctgggatgacgaactgcggaaacccggcgcccagatctacatgcgcttcatgcaggagcacacctgctacgatgccatggcaactagctccaagctagtcatcttcgacaccatgctggagatcaagaaggccttctttgctctggtggccaacggtgtgcgggcagcccctctatgggacagcaagaagcagagctttgtggggatgctgaccatcactgacttcatcctggtgctgcatcgctactacaggtcccccctggtccagatctatgagattgaacaacataagattgagacctggagggagatctacctgcaaggctgcttcaagcctctggtctccatctctcctaatgatagcctgtttgaagctgtctacaccctcatcaagaaccggatccatcgcctgcctgttcttgacccggtgtcaggcaacgtactccacatcctcacacacaaacgcctgctcaagttcctgcacatctttggttccctgctgccccggccctccttcctctaccgcactatccaagatttgggcatcggcacattccgagacttggctgtggtgctggagacagcacccatcctgactgcactggacatctttgtggaccggcgtgtgtctgcactgcctgtggtcaacgaatgtggtcaggtcgtgggcctctattcccgctttgatgtgattcacctggctgcccagcaaacctacaaccacctggacatgagtgtgggagaagccctgaggcagaggacactatgtctggagggagtcctttcctgccagccccacgagagcttgggggaagtgatcgacaggattgctcgggagcaggtacacaggctggtgctagtggacgagacccagcatctcttgggcgtggtctccctctccgacatccttcaggcactggtgctcagccctgctggcatcgatgccctcggggcctgagaagatctgagtcctcaatcccaagccacctgcacacctggaagccaatgaagggaactggagaactcagccttcatcttcccccacccccatttgctggttcagctatgattcaggtaggctctgccctgggccatgacaccagcctcttagtcttcctgatttcctggatctcagattgggacaccctgaggatgggagtggccaagctcaaagctgagcagccctgtgaaaactgcaagtgtaaggactcacaggtccccactttgtcccattttcagctgaggtcatggagactgtcctagaagggagggacaaagccccggctaaaagctaaggctgcgatgtgacttcagacactctgggaagatttacttgttccctcacaattcaatttccacctgctggaaatccccttagaaggaagcaagctata

SEQ ID NO: 193191 - DNA, 1784 bp, Artificial Sequence
  derived and/or modified sequence
acttgctctcagttggtctggggctggccacatggagcccgggctggagcacgcactgcgcaggaccccttcctggagcagccttgggggttctgagcatcaagagatgagcttcctagagcaagaaaacagcagctcatggccatcaccagctgtgaccagcagctcagaaagaatccgtgggaaacggagggccaaagccttgagatggacaaggcagaagtcggtggaggaaggggagccaccaggtccccggtccaggccagctgctgagtccaccgggctggaggccacattccccaagaccacacccttggctcaaggtgggactgcctcccctctgactgtacagcctcagctgcaggctccagcacagatgatgtggagctggccacggagttcccagccacagaggcctgggagtgtgagctagaaggcctgctggaagagaggcctgccctgtgcctgtccccgcaggccccatttcccaagctgggctgggatgacgaactgcggaaacccggcgcccagatctacatgcgcttcatgcaggagcacacctgctacgatgccatggcaactagctccaagctagtcatcttcgacaccatgctggagatcaagaaggccttctttgctctggtggccaacggtgtgcgggcagcccctctatgggacagcaagaagcagagctttgtggggatgctgaccatcactgacttcatcctggtgctgcatcgctactacaggtcccccctggtccagatctatgagattgaacaacataagattgagacctggagggagatctacctgcaaggctgcttcaagcctctggtctccatctctcctaatgatagcctgtttgaagctgtctacaccctcatcaagaaccggatccatcgcctgcctgttcttgacccggtgtcaggcaacgtactccacatcctcacacacaaacgcctgctcaagttcctgcacatctttggttccctgctgccccggccctccttcctctaccgcactatccaagatttgggcatcggcacattccgagacttggctgtggtgctggagacagcacccatcctgactgcactggacatctttgtggaccggcgtgtgtctgcactgcctgtggtcaacgaatgtggtcaggtcgtgggcctctattcccgctttgatgtgattcacctggctgcccagcaaacctacaaccacctggacatgagtgtgggagaagccctgaggcagaggacactatgtctggagggagtcctttcctgccagccccacgagagcttgggggaagtgatcgacaggattgctcgggagcaggtacacaggctggtgctagtggacgagacccagcatctcttgggcgtggtctccctctccgacatccttcaggcactggtgctcagccctgctggcatcgatgccctcggggcctgagaagatctgagtcctcaatcccaagccacctgcacacctggaagccaatgaagggaactggagaactcagccttcatcttcccccacccccatttgctggttcagctatgattcaggcttcttcagccctcccaaattgcccttgccctacctgtgctcccagaagccctcgggcatgcccagtgcaccatgggatgatgaaattaaggagaacagctgagtcaagcttggaggtccctgaaccagaggcactaggattaccccagggccatctgtgctccatgcccgcccatccccttgccgcctgactgggtcggatggccccagtg

SEQ ID NO: 193192 - DNA, 1062 bp, Artificial Sequence
  derived and/or modified sequence
atggagcccggcctggagcacgccctgagaagaacccccagctggagcagcctgggcggcagcgagcaccaggagatgagcttcctggagcaggagaacagcagcagctggcccagccccgccgtgaccagcagcagcgagagaatcagaggcaagagaagagccaaggccctgagatggaccagacagaagagcgtggaggagggcgagccccccggccagggcgagggccccagaagcagacccgccgccgagagcaccggcctggaggccaccttccccaagaccacccccctggcccaggccgaccccgccggcgtgggcaccccccccaccggctgggactgcctgcccagcgactgcaccgccagcgccgccggcagcagcaccgacgacgtggagctggccaccgagttccccgccaccgaggcctgggagtgcgagctggagggcctgctggaggagagacccgccctgtgcctgagcccccaggcccccttccccaagctgggctgggacgacgagctgagaaagcccggcgcccagatctacatgagattcatgcaggagcacacctgctacgacgccatggccaccagcagcaagctggtgatcttcgacaccatgctggagatcaagaaggccttcttcgccctggtggccaacggcgtgagagccgcccccctgtgggacagcaagaagcagagcttcgtgggcatgctgaccatcaccgacttcatcctggtgctgcacagatactacagaagccccctgagaagcacctgcaaggccgccagcagcctgtggagccccagcctgctgatgatcgcctgcctgaagctgagcacccccagcagcagaaccggcagcatcgcctgcctgttcctgaccagatgccaggccacctacagcaccagcagccacaccaacgcctgcagcagcagctgcaccagcctggtgccctgctgccccggcccccccagcagcaccgccctgagcaagatctgggccagcgcccacagcgagacctggctgtggtgctggagacagcaccccagctag

SEQ ID NO: 193193 - DNA, 1395 bp, Artificial Sequence
  derived and/or modified sequence
atgagcttcctggagcaggagaacagcagcagctggcccagccccgccgtgaccagcagcagcgagagaatcagaggcaagagaagagccaaggccctgagatggaccagacagaagagcgtggaggagggcgagccccccggccagggcgagggccccagaagcagacccgccgccgagagcaccggcctggaggccaccttccccaagaccacccccctggcccaggccgaccccgccggcgtgggcaccccccccaccggctgggactgcctgcccagcgactgcaccgccagcgccgccggcagcagcaccgacgacgtggagctggccaccgagttccccgccaccgaggcctgggagtgcgagctggagggcctgctggaggagagacccgccctgtgcctgagcccccaggcccccttccccaagctgggctgggacgacgagctgagaaagcccggcgcccagatctacatgagattcatgcaggagcacacctgctacgacgccatggccaccagcagcaagctggtgatcttcgacaccatgctggagatcaagaaggccttcttcgccctggtggccaacggcgtgagagccgcccccctgtgggacagcaagaagcagagcttcgtgggcatgctgaccatcaccgacttcatcctggtgctgcacagatactacagaagccccctggtgcagatctacgagatcgagcagcacaagatcgagacctggagagagatctacctgcagggctgcttcaagcccctggtgagcatcagccccaacgacagcctgttcgaggccgtgtacaccctgatcaagaacagaatccacagactgcccgtgctggaccccgtgagcggcaacgtgctgcacatcctgacccacaagagactgctgaagttcctgcacatcttcggcagcctgctgcccagacccagcttcctgtacagaaccatccaggacctgggcatcggcaccttcagagacctggccgtggtgctggagaccgcccccatcctgaccgccctggacatcttcgtggacagaagagtgagcgccctgcccgtggtgaacgagtgcggccaggtggtgggcctgtacagcagattcgacgtgatccacctggccgcccagcagacctacaaccacctggacatgagcgtgggcgaggccctgagacagagaaccctgtgcctggagggcgtgctgagctgccagccccacgagagcctgggcgaggtgatcgacagaatcgccagagagcaggtgcacagactggtgctggtggacgagacccagcacctgctgggcgtggtgagcctgagcgacatcctgcaggccctggtgctgagccccgccggcatcgacgccctgggcgcctag

SEQ ID NO: 193194 - DNA, 918 bp, Artificial Sequence
  derived and/or modified sequence
atgagattcatgcaggagcacacctgctacgacgccatggccaccagcagcaagctggtgatcttcgacaccatgctggagatcaagaaggccttcttcgccctggtggccaacggcgtgagagccgcccccctgtgggacagcaagaagcagagcttcgtgggcatgctgaccatcaccgacttcatcctggtgctgcacagatactacagaagccccctggtgcagatctacgagatcgagcagcacaagatcgagacctggagagagatctacctgcagggctgcttcaagcccctggtgagcatcagccccaacgacagcctgttcgaggccgtgtacaccctgatcaagaacagaatccacagactgcccgtgctggaccccgtgagcggcaacgtgctgcacatcctgacccacaagagactgctgaagttcctgcacatcttcggcagcctgctgcccagacccagcttcctgtacagaaccatccaggacctgggcatcggcaccttcagagacctggccgtggtgctggagaccgcccccatcctgaccgccctggacatcttcgtggacagaagagtgagcgccctgcccgtggtgaacgagtgcggccaggtggtgggcctgtacagcagattcgacgtgatccacctggccgcccagcagacctacaaccacctggacatgagcgtgggcgaggccctgagacagagaaccctgtgcctggagggcgtgctgagctgccagccccacgagagcctgggcgaggtgatcgacagaatcgccagagagcaggtgcacagactggtgctggtggacgagacccagcacctgctgggcgtggtgagcctgagcgacatcctgcaggccctggtgctgagccccgccggcatcgacgccctgggcgcctag

SEQ ID NO: 193195 - protein, 416 aa, Artificial Sequence
  derived and/or modified sequence
MVRPRRAPYRSGAGGPLGGRGRPPRPLVVRAVRSRSWPASPRGPQPPRIRARSAPPMEGARVFGALGPIGPSSPGLTLGGLAVSEHRLSNKLLAWSGVLEWQEKRRPYSDSTAKLKRTLPCQAYVNQGENLETDQWPQKLIMQLIPQQLLTTLGPLFRNSQLAQFHFTNRDCDSLKGLCRIMGNGFAGCMLFPHISPCEVRVLMLLYSSKKKIFMGLIPYDQSGFVSAIRQVITTRKQAVGPGGVNSGPVQIVNNKFLAWSGVMEWQEPRPEPNSRSKRWLPSHVYVNQGEILRTEQWPRKLYMQLIPQQLLTTLVPLFRNSRLVQFHFTKDLETLKSLCRIMDNGFAGCVHFSYKASCEIRVLMLLYSSEKKIFIGLIPHDQGNFVNGIRRVIANQQQVLQRNLEQEQQQRGMGG

SEQ ID NO: 193196 - DNA, 1251 bp, Artificial Sequence
  derived and/or modified sequence
atggtgagacccagaagagccccctacagaagcggcgccggcggccccctgggcggcagaggcagaccccccagacccctggtggtgagagccgtgagaagcagaagctggcccgccagccccagaggcccccagccccccagaatcagagccagaagcgccccccccatggagggcgccagagtgttcggcgccctgggccccatcggccccagcagccccggcctgaccctgggcggcctggccgtgagcgagcacagactgagcaacaagctgctggcctggagcggcgtgctggagtggcaggagaagagaagaccctacagcgacagcaccgccaagctgaagagaaccctgccctgccaggcctacgtgaaccagggcgagaacctggagaccgaccagtggccccagaagctgatcatgcagctgatcccccagcagctgctgaccaccctgggccccctgttcagaaacagccagctggcccagttccacttcaccaacagagactgcgacagcctgaagggcctgtgcagaatcatgggcaacggcttcgccggctgcatgctgttcccccacatcagcccctgcgaggtgagagtgctgatgctgctgtacagcagcaagaagaagatcttcatgggcctgatcccctacgaccagagcggcttcgtgagcgccatcagacaggtgatcaccaccagaaagcaggccgtgggccccggcggcgtgaacagcggccccgtgcagatcgtgaacaacaagttcctggcctggagcggcgtgatggagtggcaggagcccagacccgagcccaacagcagaagcaagagatggctgcccagccacgtgtacgtgaaccagggcgagatcctgagaaccgagcagtggcccagaaagctgtacatgcagctgatcccccagcagctgctgaccaccctggtgcccctgttcagaaacagcagactggtgcagttccacttcaccaaggacctggagaccctgaagagcctgtgcagaatcatggacaacggcttcgccggctgcgtgcacttcagctacaaggccagctgcgagatcagagtgctgatgctgctgtacagcagcgagaagaagatcttcatcggcctgatcccccacgaccagggcaacttcgtgaacggcatcagaagagtgatcgccaaccagcagcaggtgctgcagagaaacctggagcaggagcagcagcagagaggcatgggcggctag

SEQ ID NO: 193197 - DNA, 1251 bp, Artificial Sequence
  derived and/or modified sequence
atggtgagaccacgtcgggctccttaccggagcggtgctggaggtcctttgggtggacggggcagacctccaagacccctggtggttcgagctgtgaggagtcgcagttggcccgcctcccctcgcggaccacaacccccacggattcgagctagatccgcccccccaatggagggggcgagagtcttcggggcactgggccctatcggcccgagctcacccggcctgacactcggcggcctagctgtgtcagagcaccggctgtcaaacaagttattagcttggagcggtgtgctggagtggcaagaaaagcggcgcccatactccgactccacagcaaaactcaagaggacactgccatgtcaggcgtacgtgaatcagggagagaacctcgaaactgatcaatggcctcaaaagctaataatgcagttgatccctcagcagcttctaaccacgttgggccctttgttccggaacagccagctcgcccaattccatttcactaatcgggattgtgattccctcaagggcctgtgtagaattatgggtaatggcttcgcgggatgcatgctcttcccccacatcagcccatgcgaagttagggttctaatgcttctttattcctctaagaagaagatctttatgggactcattccttatgatcagagcggtttcgtgagtgctattcgacaggttattactacacggaaacaagccgtcgggcctggcggcgtgaatagtggacctgtccaaatcgtgaataacaagttcctcgcatggagcggcgtaatggagtggcaagaaccacgtcctgaaccgaacagtcgctcaaaacgatggctgcccagccacgtctacgtgaaccagggggagatactgcggactgaacagtggcctagaaaactgtatatgcagctgattccgcagcagcttctgacaaccctggtgcccctgtttaggaattctcgtttagtacagtttcacttcaccaaggatttggagacccttaagtcattgtgtaggatcatggataacggctttgcgggttgcgtccacttctcttataaagcctcgtgtgaaatacgggtgctgatgctcctgtacagtagtgagaagaagatctttattgggctcatccctcatgaccagggaaactttgtcaacggcatcaggcgcgtgatagctaaccagcagcaggtgctccagcgaaatctggaacaagagcaacagcagagagggatgggcggctag

SEQ ID NO: 193198 - DNA, 1251 bp, Artificial Sequence
  derived and/or modified sequence
atggtgcggccccggcgggccccctacagaagtggagctgggggccccctgggcggccggggccggcccccccggcccctggtggtgcgggctgtgcgcagccgctcctggccagccagcccccggggcccccagcccccacgcatccgggcccggagcgccccacccatggagggcgcccgggtgtttggagccctgggccccatcggccccagcagccctggcctgaccctgggcggcctggccgtgtctgagcaccggctgagcaacaagctgctggcctggagcggcgtgctggagtggcaggagaagagaagaccctacagcgacagcacagccaagctgaagaggaccctgccctgccaggcctacgtgaaccagggcgagaacctggagacagaccagtggccccagaagctgatcatgcagctgatcccccagcagctgctgaccaccctgggccccctcttcaggaacagccagctggcccagttccacttcaccaacagagactgtgacagcctgaagggcctgtgccgcatcatgggaaatggatttgctggctgcatgctgttcccccacatcagcccctgtgaggtgcgggtgctgatgctgctgtacagcagcaagaagaagatcttcatgggcctcatcccctatgaccagagcggctttgtgtctgccatccggcaggtgatcaccaccaggaagcaggccgtgggccctgggggcgtgaacagcggccctgtgcagatcgtgaacaacaagttcctggcctggagcggcgtgatggagtggcaggagcccaggcctgagcccaacagccgcagcaagcgctggctgcccagccacgtgtatgtgaaccagggcgagatcctgaggacagagcagtggcccaggaagctgtacatgcagctgatcccccagcagctgctgaccaccctggtgcccctcttcaggaacagccggctggtgcagttccacttcaccaaggacctggagaccctgaagagcctgtgccgcatcatggacaatggatttgctggctgtgtgcacttctcctacaaggccagctgtgagatccgggtgctgatgctgctgtacagcagcgagaagaagatcttcatcggcctcatcccccatgaccagggcaactttgtgaatggcatcagaagagtcatcgccaaccagcagcaggtgctgcagaggaacctggagcaggagcagcagcagaggggcatgggcggctag

SEQ ID NO: 193199 - DNA, 1251 bp, Artificial Sequence
  derived and/or modified sequence
atggtgcggccccggcgggccccctaccggagcggcgccggcggcccgctggggggaagaggacgtccgccgagacccctcgtggtcagggctgtccgaagcaggtcttggcctgcttctcccagagggcctcaaccacctagaatccgcgcgcgctcagcccctcccatggaaggggcccgtgtcttcggcgcgctcggcccgattggccccagcagtccgggtctaacactcggtggcctcgccgttagtgagcatcggctgagcaataagttactagcgtggtcgggagtgctggagtggcaagagaagagaaggccctactcggacagcactgctaagctgaagaggacactgccgtgccaggcctatgtgaatcagggagagaacctggagaccgaccagtggcctcagaaactcatcatgcagcttatcccacagcagctgcttaccactttgggccccctttttcggaatagtcagttggcccagtttcattttaccaaccgtgactgcgattccctcaagggtctctgtcgtatcatgggtaacggattcgctgggtgcatgctgttcccccacattagtccatgtgaagtgcgagtcctgatgcttctatacagctcaaaaaagaagatattcatggggctaatcccttatgaccagagtggatttgtgagtgccatacggcaagtcataacaacaaggaagcaggccgtgggaccaggtggcgttaattccggcccagtacagatcgtgaacaacaagtttctcgcatggtccggggtcatggagtggcaggagcccagaccagagccaaattcacgctcgaaacgatggctgccatcccatgtttatgtcaaccaaggggagattcttagaactgagcagtggcctcgcaaactctacatgcaactcatcccccagcagctgctaacaacgctggttccccttttccgcaattcaaggctggtgcagttccattttacaaaagacctcgaaacactcaagagcctgtgtcgcattatggataatggcttcgctggatgcgttcacttctcttacaaggcatcttgtgagattagagtgctcatgcttctttatagttctgagaagaagatttttatcggcctgatcccacatgatcagggcaattttgttaacggcatcaggcgcgttatcgctaatcagcagcaagtattgcagcgcaacctggagcaggaacagcaacagagggggatgggtggctag

SEQ ID NO: 193200 - DNA, 1875 bp, Artificial Sequence
  derived and/or modified sequence
agtggttcggccgcggcgaccccactccggcggcgcgtcccccgagcttggtacggctcagcccgtctcccccgaagccgcgcgcccgcgcccgcgcccctcagtcggtggagcccgcagccccccttgtggcccgcggcagctccccgcccgctcggcccgcgcccgccatggtccgtccgcgccgtgccccgtaccgctccggcgccgggggccccctcgggggtcgcggccgccctccgcggcccctcgtggtgcgcgccgtccgctcgcgctcctggcctgccagcccccgaggcccgcagcctccgcggatccgggcccgctcggcccctcccatggaaggtgctcgggtcttcggggcactgggtcccatcggtccctcctcacctgggctcaccctcgggggtctggccgtgagcgagcaccggctcagcaacaagctgctggcttggagcggcgtcctcgagtggcaggagaagcgcagaccctactctgactccactgcaaagctgaagcggaccctgccctgccaagcctacgtgaaccaaggcgagaacctggagaccgaccagtggccgcagaagctgatcatgcagctgatccctcagcagctgctgaccaccctgggccccctgttccggaactcccagttggcacagttccacttcaccaacagagactgcgactcgctcaaggggctctgccgcatcatgggcaacggcttcgcgggctgcatgctgttcccccacatctccccctgtgaggtgcgcgtgctcatgctcctgtactcgtccaagaagaagatcttcatgggcctcatcccctacgaccagagcggcttcgtcagtgccatccggcaggtcatcaccacccgcaagcaggcagtgggacctggtggtgtcaactcaggcccagtccagatcgtcaacaacaagtttctggcatggagtggtgtcatggagtggcaggagcccaggcctgagcccaacagtcggtccaagaggtggctgccatcccacgtctacgtgaaccagggggagatcctgaggaccgagcagtggccaaggaagctgtacatgcagctcatcccgcagcagctgctgaccaccctagtgccgctgttccggaactcgcgcctggtccagttccacttcaccaaggacctggagacactgaagagcctgtgccggatcatggacaatggcttcgccggctgcgtgcacttttcctacaaagcatcgtgtgagatccgcgtgcttatgctcctgtactcttcagagaagaaaatcttcattggcctcatcccccatgaccagggcaactttgtcaacggcatccggcgtgtcattgccaaccagcagcaggtcctgcagcggaacctggagcaggagcaacagcaacgagggatgggggggtagtggttaccccgggctgggcccctccaggagtcacagatgaggcccccgcagagactggtgagtggtgaccctgtcatgtacaggagggaccctggggcatgtggggggggtggggttgggaaagaagcagggcgaccttggccttggggagagcagagcagagggagaggcagcagtcccagcggtcctaggctgtcgggaaactgcagcccagcctcagggccatgggaggtggtatccaggcctgggtggggccaggcctctgctcacagggatgtggggtcagtgcttgggagcctgtggccagcagcccccactgcacccctgcccccaggtgacacgcttctgagcaggggcccctggggacttcaactgcccagcaacatggaggatggtgtcctgaggcctccaaggacggtccccacccctctacgtttccccaataaagcctttt

SEQ ID NO: 193201 - DNA, 1251 bp, Artificial Sequence
  derived and/or modified sequence
atggtcagacctaggagggcgccatacaggagcggggcaggcggtccacttggcggacggggacgtcctcccagaccgctcgtggtgcgcgcagttagaagcaggagttggcccgcttctcccaggggccctcaaccgccaaggatcagagcccgtagtgccccaccaatggagggcgctcgggtttttggcgcactggggccaattggccctagcagcccaggactgaccctgggaggactcgctgtatccgagcatcggctcagtaataagttattggcgtggagcggagtattagagtggcaagagaagcggaggccttatagcgacagtactgcaaaactgaaacggactctgccatgccaggcctatgtgaatcagggggagaacctggaaacagatcaatggccgcagaagctgataatgcagctgatccctcagcaactgcttaccacactggggcctctgtttcgtaactcccagttggcgcagtttcacttcacgaaccgtgactgcgacagcctgaagggcctgtgtaggatcatgggcaatggcttcgctggctgcatgctattccctcacatatcaccgtgcgaggtcagagtgctgatgctgttgtattcttcgaagaagaagatattcatgggcctcattccatacgatcaatccggattcgtttccgcgatccggcaagtcataactacacgcaagcaggcagtgggaccagggggtgtaaactccggccctgtgcagatagtaaacaacaaattcctggcttggtccggagtaatggagtggcaggagcccaggccagagcctaatagcaggagtaagcggtggctgccaagccatgtctatgtgaatcagggcgagatccttaggaccgagcagtggcccaggaaactctatatgcaactcattccccaacagctccttacgacgctagtcccactgttcagaaatagccggctggtgcaatttcacttcactaaggatctcgagacccttaaatcgctgtgtagaattatggataacggattcgccggatgcgtgcacttttcttataaggcatcttgtgagattcgggtcctcatgctcctctactctagcgaaaaaaagatcttcatcggcttgatccctcatgaccagggcaattttgtgaatggcattagacgggttattgccaatcagcagcaggtgttgcaaaggaacttggaacaggagcagcagcagcgtgggatggggggatag

SEQ ID NO: 193202 - protein, 712 aa, Artificial Sequence
  derived and/or modified sequence
MDTSSKENIQLFCKTSVQPVGRPSFKTEYPSSEEKQPCCGELKVFLCALSFVYFAKALAEGYLKSTITQIERRFDIPSSLVGVIDGSFEIGNLLVITFVSYFGAKLHRPKIIGAGCVIMGVGTLLIAMPQFFMEQYKYERYSPSSNSTLSISPCLLESSSQLPVSVMEKSKSKISNECEVDTSSSMWIYVFLGNLLRGIGETPIQPLGIAYLDDFASEDNAAFYIGCVQTVAIIGPIFGFLLGSLCAKLYVDIGFVNLDHITITPKDPQWVGAWWLGYLIAGIISLLAAVPFWYLPKSLPRSQSREDSNSSSEKSKFIIDDHTDYQTPQGENAKIMEMARDFLPSLKNLFGNPVYFLYLCTSTVQFNSLFGMVTYKPKYIEQQYGQSSSRANFVIGLINIPAVALGIFSGGIVMKKFRISVCGAAKLYLGSSVFGYLLFLSLFALGCENSDVAGLTVSYQGTKPVSYHERALFSDCNSRCKCSETKWEPMCGENGITYVSACLAGCQTSNRSGKNIIFYNCTCVGIAASKSGNSSGIVGRCQKDNGCPQMFLYFLVISVITSYTLSLGGIPGYILLLRCIKPQLKSFALGIYTLAIRVLAGIPAPVYFGVLIDTSCLKWGFKRCGSRGSCRLYDSNVFRHIYLGLTVILGTVSILLSIAVLFILKKNYVSKHRSFITKRERTMVSTRFQKENYTTSDHLLQPNYWPGKETQL

SEQ ID NO: 193203 - DNA, 2139 bp, Artificial Sequence
  derived and/or modified sequence
atggacaccagcagcaaggagaacatccagctgttctgcaagaccagcgtgcagcccgtgggcagacccagcttcaagaccgagtaccccagcagcgaggagaagcagccctgctgcggcgagctgaaggtgttcctgtgcgccctgagcttcgtgtacttcgccaaggccctggccgagggctacctgaagagcaccatcacccagatcgagagaagattcgacatccccagcagcctggtgggcgtgatcgacggcagcttcgagatcggcaacctgctggtgatcaccttcgtgagctacttcggcgccaagctgcacagacccaagatcatcggcgccggctgcgtgatcatgggcgtgggcaccctgctgatcgccatgccccagttcttcatggagcagtacaagtacgagagatacagccccagcagcaacagcaccctgagcatcagcccctgcctgctggagagcagcagccagctgcccgtgagcgtgatggagaagagcaagagcaagatcagcaacgagtgcgaggtggacaccagcagcagcatgtggatctacgtgttcctgggcaacctgctgagaggcatcggcgagacccccatccagcccctgggcatcgcctacctggacgacttcgccagcgaggacaacgccgccttctacatcggctgcgtgcagaccgtggccatcatcggccccatcttcggcttcctgctgggcagcctgtgcgccaagctgtacgtggacatcggcttcgtgaacctggaccacatcaccatcacccccaaggacccccagtgggtgggcgcctggtggctgggctacctgatcgccggcatcatcagcctgctggccgccgtgcccttctggtacctgcccaagagcctgcccagaagccagagcagagaggacagcaacagcagcagcgagaagagcaagttcatcatcgacgaccacaccgactaccagaccccccagggcgagaacgccaagatcatggagatggccagagacttcctgcccagcctgaagaacctgttcggcaaccccgtgtacttcctgtacctgtgcaccagcaccgtgcagttcaacagcctgttcggcatggtgacctacaagcccaagtacatcgagcagcagtacggccagagcagcagcagagccaacttcgtgatcggcctgatcaacatccccgccgtggccctgggcatcttcagcggcggcatcgtgatgaagaagttcagaatcagcgtgtgcggcgccgccaagctgtacctgggcagcagcgtgttcggctacctgctgttcctgagcctgttcgccctgggctgcgagaacagcgacgtggccggcctgaccgtgagctaccagggcaccaagcccgtgagctaccacgagagagccctgttcagcgactgcaacagcagatgcaagtgcagcgagaccaagtgggagcccatgtgcggcgagaacggcatcacctacgtgagcgcctgcctggccggctgccagaccagcaacagaagcggcaagaacatcatcttctacaactgcacctgcgtgggcatcgccgccagcaagagcggcaacagcagcggcatcgtgggcagatgccagaaggacaacggctgcccccagatgttcctgtacttcctggtgatcagcgtgatcaccagctacaccctgagcctgggcggcatccccggctacatcctgctgctgagatgcatcaagccccagctgaagagcttcgccctgggcatctacaccctggccatcagagtgctggccggcatccccgcccccgtgtacttcggcgtgctgatcgacaccagctgcctgaagtggggcttcaagagatgcggcagcagaggcagctgcagactgtacgacagcaacgtgttcagacacatctacctgggcctgaccgtgatcctgggcaccgtgagcatcctgctgagcatcgccgtgctgttcatcctgaagaagaactacgtgagcaagcacagaagcttcatcaccaagagagagagaaccatggtgagcaccagattccagaaggagaactacaccaccagcgaccacctgctgcagcccaactactggcccggcaaggagacccagctgtag

SEQ ID NO: 193204 - DNA, 2139 bp, Artificial Sequence
  derived and/or modified sequence
atggatacatctagcaaagagaacattcagttgttctgtaaaaccagcgtgcagcctgtgggtcggcccagtttcaaaacggagtatccctcatctgaggaaaagcaaccttgttgtggcgagttgaaagtttttctctgcgcactgagttttgtttactttgccaaggccctggcagaggggtacctgaagtccacaatcacccaaatcgagagaagatttgacatcccgagtagcttagtaggagtgatcgatggctcattcgaaatcggcaatctgctcgtcatcaccttcgtgtcctatttcggcgcaaaattgcaccggcctaagataatcggcgccgggtgtgtgataatgggggttggaacactcctgatcgcaatgccacagtttttcatggaacagtacaaatacgagcgctactccccatcctctaacagcacattgagcatttcaccctgcctgctggagtcctcttcacagctcccagtcagtgtcatggaaaagagtaagagtaagatatctaatgagtgcgaagtcgataccagtagtagcatgtggatctatgtattcttgggcaacctcctgagaggaatcggtgagacgcccatccagcctcttggcatcgcgtacctcgacgattttgcatccgaggacaacgccgcgttttacatcggctgcgttcaaaccgtggccatcatcggccccatcttcggcttcttgctcgggtccctgtgcgccaagctctacgtagatattggcttcgtaaacctggaccatattactatcactccgaaggacccacagtgggtgggggcctggtggctggggtaccttatcgcaggaattatttctttactggctgccgtgcccttctggtatctgcccaagagtttgcctcggtctcagtcccgggaggattccaacagtagtagtgagaagtccaagttcatcattgacgaccatacagattatcaaacccctcagggagaaaatgccaaaattatggagatggctagagacttcctcccatctctgaaaaatcttttcggaaatccagtgtattttctttacctgtgtacatcaacagtgcaattcaactctttatttggtatggtaacatataagcctaaatacatcgagcaacagtacgggcagtcgagctctagagcaaatttcgttataggtctcattaacatccccgcagtcgctctgggcattttctccggaggcattgtgatgaaaaaattccggattagtgtttgtggggctgccaagctatatctcggttcatccgtgttcggttacctgctgttcctgtcactgttcgctctgggctgcgaaaactctgacgtggctggtctgactgtgtcttaccaagggacaaagcccgtgtcatatcacgaacgcgctcttttctcagactgtaacagtaggtgcaagtgttctgaaaccaaatgggagcctatgtgcggggaaaatggcattacctacgtgtccgcctgtcttgccggctgccagacatcgaaccgctctggaaaaaatatcattttttacaactgtacctgtgttggcattgccgcctcaaagagtggcaactcttctggcattgtgggcaggtgccagaaggataacggctgccctcagatgttcctgtattttctagttatcagcgtaattacgagctacacattatcgctcggaggtattcctggctacatcttgctccttagatgcatcaagcctcagctgaaaagcttcgccttaggcatttacaccctcgccataagagtgttagcaggcatcccagctcctgtgtattttggagttctcattgacaccagctgcctgaaatggggcttcaaacgctgtgggagcagggggagttgtcggctatatgacagcaacgtgttcaggcacatctatctcgggttgactgtaattctgggcacagtgtccattctgcttagcatagctgtcctgtttatcctgaaaaaaaattatgtgagcaagcatcggagctttattaccaaaagggagagaaccatggtctccacacgctttcagaaagaaaattacaccacgagcgaccacctcctgcaacctaactactggcctggaaaggagactcagctgtag

SEQ ID NO: 193205 - DNA, 2139 bp, Artificial Sequence
  derived and/or modified sequence
atggacaccagcagcaaagaaaacatccagctgttctgcaagacctctgtgcagcctgtgggccggcccagcttcaagacagagtaccccagcagcgaggagaagcagccctgctgcggggagctgaaggtgttcctgtgtgccctgagctttgtgtactttgccaaggccctggccgagggctacctgaagagcaccatcacccagatcgagaggagatttgacatccccagcagcctggtgggcgtgattgatggcagctttgagatcggcaacctgctggtgatcacctttgtgtcctactttggagccaagctgcaccggcccaagatcatcggggccggctgcgtcatcatgggcgtgggcaccctgctgattgccatgccccagttcttcatggagcagtacaagtatgaaagatacagccccagcagcaacagcaccctgagcatcagcccctgcctgctggagagcagcagccagctgcctgtgtctgtgatggagaagagcaagagcaagatcagcaatgaatgtgaggtggacaccagcagctccatgtggatctacgtgttcctgggcaacctgctgcggggcattggagagacccccatccagcccctgggcatcgcctacctggatgactttgccagcgaggacaatgctgccttctacatcggctgtgtgcagacagtggccatcatcggccccatcttcggcttcctgctgggcagcctgtgtgccaagctgtatgtggacattggatttgtgaacctggaccacatcaccatcacccccaaggacccccagtgggtgggcgcctggtggctgggctacctgattgctggcatcatcagcctgctggccgctgtgcccttctggtacctgcccaagagcctgcccaggagccagagccgggaggacagcaacagcagcagcgagaagagcaagttcatcattgatgaccacacagactaccagaccccccagggagaaaatgccaagatcatggagatggcccgggacttcctgcccagcctgaagaacctgtttggaaatcctgtgtacttcctgtacctgtgcaccagcacagtgcagttcaacagcctgtttggcatggtgacctacaagcccaagtacatcgagcagcagtatggccagagcagcagccgggccaactttgtgattggcctcatcaacatcccagctgtggccctgggcatcttcagcggcggcatcgtgatgaagaagttccgcatctctgtgtgtggggccgccaagctgtacctgggcagctctgtgtttggctacctgctcttcctgagcctgtttgccctgggctgtgagaacagtgatgtggccggcctgactgtgtcctaccagggcaccaagcctgtgtcctaccacgagcgggccctcttcagtgactgcaacagccgctgcaagtgcagcgagaccaagtgggagcccatgtgtggagaaaatggcatcacctacgtgtctgcctgcctggccggctgccagaccagcaacagaagtggcaagaacatcatcttctacaactgcacctgtgtgggcattgctgccagcaagagcggcaacagcagcggcatcgtgggccgctgccagaaggacaatggctgcccccagatgttcctgtacttcctggtgatcagcgtcatcaccagctacaccctgagcctgggcggcatccctggctacatcctgctgctgcgctgcatcaagccccagctgaagagctttgccctgggcatctacaccctggccatccgggtgctggccggcatcccagcccctgtgtactttggagtgctgattgacaccagctgcctgaagtggggcttcaagagatgtggcagccggggcagctgccgcctgtatgacagcaatgtgttccgccacatctacctgggcctgaccgtcatcctgggcaccgtgtccatcctgctgagcattgctgtgctcttcatcctgaagaagaactacgtgtccaagcacaggagcttcatcaccaagcgggagaggaccatggtgtccacccgcttccagaaggagaactacaccaccagtgaccacctgctgcagcccaactactggccaggcaaggagacccagctgtag

SEQ ID NO: 193206 - DNA, 2139 bp, Artificial Sequence
  derived and/or modified sequence
atggacaccagcagcaaggagaacatccagctgttctgcaagaccagtgttcagcccgtgggaagaccatcttttaaaactgagtatcctagcagtgaggagaagcagccatgttgtggcgagctgaaagtattcttgtgcgcactgagctttgtttattttgcgaaagccctggccgagggctatttgaaatcaacgattacacagattgagcggcggtttgacatcccgtcatcactggtgggtgtgattgatgggtcattcgaaatcggcaaccttctggtgatcacttttgtgtcctatttcggagcaaaactccaccgccctaagattatcggcgcgggatgtgtgattatgggtgtggggaccttgctcatcgccatgccccagttttttatggagcagtacaaatacgagagatattccccatcctcaaattccacgttgtcaatcagcccctgtttattggagtcatccagccagttaccagtgtcggttatggaaaagtcaaaaagcaagatatcaaacgaatgcgaggtggacactagctcctccatgtggatctatgtgttcctggggaacctcctgcggggcatcggggaaacacctatccagcccctaggaatagcttacctggacgacttcgcctctgaggacaacgctgccttctacattggctgcgtgcaaactgtggctattatcggtcctatatttggattcctcctgggttcactctgtgctaagctctacgtggatataggattcgttaacttggaccatatcacaattaccccaaaagaccctcagtgggtcggcgcatggtggctcggatatcttatcgcagggataatatccctcctggcagccgttccattctggtacctgcctaagtctttgccaagaagtcagtcccgcgaggattctaactcgagttctgagaaatccaagttcatcatcgacgatcataccgactatcaaacgccacagggggagaatgctaagattatggaaatggcacgggactttttgcccagcctaaagaatttattcgggaaccctgtgtacttcttgtacctgtgcacctccactgtgcagtttaactcacttttcggaatggtgacatataagccgaagtacatagagcaacaatacggtcagagtagctcacgcgccaacttcgtgattggtctgattaacattcccgccgtcgccttggggattttctctggcggaatcgtgatgaagaaattccgaatatccgtgtgtggggcggccaagctgtatcttggttcctcagtcttcggttatctccttttcttatccctctttgcacttggctgcgaaaattcagacgtggcaggcttgacagtgagctaccagggcaccaagccggttagctaccatgaaagggccctgtttagcgactgtaactccagatgtaagtgcagtgaaacgaagtgggagcctatgtgtggcgaaaacggcatcacgtacgtgagtgcctgtcttgccggctgccagaccagcaatcgttcgggtaaaaacattatattttataattgtacatgcgttggaatcgccgcctctaagtccggcaactcgtccggtatagttggcagatgtcagaaggacaacgggtgccctcagatgtttctgtacttcctggttatttccgtgataacctcctacaccctatccctcgggggtatcccagggtatatcctgctcctacgatgtattaaaccacagctgaaatcgttcgcattgggtatctacaccctggccatccgagtgttagccggcattccggcacccgtttattttggcgtgctcatcgatacctcctgtcttaagtggggtttcaagcggtgcggaagtcggggctcttgtaggttatacgactccaacgttttccgacacatatacttgggactcacagtgattcttggaacagtgagcatcttgctgtctatcgccgtcctctttatcctgaaaaaaaattacgtaagtaaacaccggtccttcattacaaagcgtgagcggaccatggtatcaacccgtttccagaaggaaaactacaccacttctgatcatctccttcagccaaactactggcccggaaaggaaactcagctgtag

SEQ ID NO: 193207 - DNA, 2139 bp, Artificial Sequence
  derived and/or modified sequence
atggacacaagcagcaaggagaacattcaattgttctgtaagacttctgtgcaacctgtgggccgtcccagctttaaaacggaataccccagcagtgaggaaaagcagccgtgctgtggcgagcttaaagtgttcctttgcgccctgtctttcgtgtactttgctaaggccctcgcagaggggtacctgaaatctacgatcacccagattgaacggaggttcgacatcccgtcttccttagtgggggtgattgacggctctttcgagatcggtaacctcttggtcataacattcgtttcttattttggagccaaactgcatcggccaaagatcataggcgcaggctgtgtcattatgggagtgggaaccctgttgatcgccatgccacagtttttcatggaacagtataagtatgaacgctactccccatcctcaaactctacgctgagcattagcccctgcttgcttgaatctagctcacaacttccagtatccgtgatggagaaatccaagtcaaaaatttctaatgagtgtgaggtcgacacatcatccagcatgtggatctacgttttcctcggaaatttactccggggtatcggcgagacccctatccagcccctcggaattgcttatctggacgattttgcgagtgaggataatgctgctttttatatcggatgtgtgcagactgtggctatcataggcccaatctttggcttcttgctaggctccctgtgtgccaagctctatgtggatatcggttttgtaaaccttgaccacattaccattacccccaaggacccgcaatgggtgggcgcatggtggcttggctacctcatcgctggtattattagcctcttagcagccgtccctttttggtacctccccaaatctctgccaagaagtcagtcaagggaagactcaaactcctcctctgaaaagtctaagttcattatagatgaccatactgattatcagacaccccaaggggagaacgccaaaataatggagatggctagggatttcctgcctagtttaaaaaacctgttcggtaacccagtgtatttcctctacctctgcacgagtacggttcagtttaacagcttgttcggaatggtaacctacaagcctaaatacatagagcagcagtatggccaatcatctagtcgggctaacttcgtgatcggtctgattaacatacccgctgtggctttaggcattttctctgggggtatcgttatgaagaaatttaggattagcgtgtgcggcgctgccaagctctacctcggttcctcggtgttcggttaccttttatttttaagtcttttcgccctgggttgtgaaaattccgacgtggccggactcactgtttcatatcaaggcaccaagccagtgtcctaccacgagcgagctctgttcagcgattgtaacagccgctgtaaatgctccgagaccaagtgggaaccaatgtgtggagaaaatggcatcacatacgtatctgcctgcctcgccggatgtcaaacttctaaccgctcagggaagaatattattttctataattgtacttgtgtgggcatcgcagcgtccaagtccgggaactcttctggaattgtgggccgttgccagaaggataacggctgcccacaaatgttcctgtacttcttagtgatcagtgtaattacatcttatacgctctcactcggaggtattcccggatacattttattactgaggtgtataaaaccgcagctgaagtcatttgctctcggaatctatactctcgcaattcgggtcctggccggaattccggctcccgtatacttcggagttttaatcgacacttcttgcctaaaatggggcttcaaaaggtgtggatcccggggttcatgcaggctttatgactccaacgtcttcagacacatttaccttggactgaccgttatccttgggactgtttccatcctgttgtctatagccgtgttgtttatccttaagaaaaactacgtctctaaacacagaagctttataactaaaagagagagaacaatggtgagcactcgattccaaaaagaaaattacaccacttccgaccatttgttgcagcctaactattggccaggcaaggagacccagctgtag

SEQ ID NO: 193208 - DNA, 3365 bp, Artificial Sequence
  derived and/or modified sequence
gcaaagaaatggctcaaaagcttcagctctttctgtgccctgggagctgagatgcacgtcagtggccttgccagcgtggccaattctctgctgactgccagaaaaaagaggccaggaagaaagaggaaagagaagagatcgctcaggggtgagaccatgcccttcatcttttcttttccctaatctcctctgcttgtgtccacccacactctccccacctggcaaaattgttcaaaattgctgtggagtttacctcagtttcctctttcagtctgtggtgtgtggtccatcctcttgctgagcacattgaaaggaactggctatctttgatctcttcctccagatcagagtcaaggaatgtgtttataatggacacttcatccaaagaaaatatccagttgttctgcaaaacttcagtgcaacctgttggaaggccttcttttaaaacagaatatccctcctcagaagaaaagcaaccatgctgtggtgaactaaaggtgttcttgtgtgccttgtcttttgtttactttgccaaagcattggcagaaggctatctgaagagcaccatcactcagatagagagaaggtttgatatcccttcttcactggtgggagttattgatggtagttttgaaattgggaatctcttagttataacatttgttagctactttggagccaaacttcacaggccaaaaataattggagcagggtgtgtaatcatgggagttggaacactgctcattgcaatgcctcagttcttcatggagcagtacaaatatgagagatattctccttcctccaattccactctcagcatctctccgtgtctcctagagtcaagcagtcaattaccagtttcagttatggaaaaatcaaaatccaaaataagtaacgaatgtgaagtggacactagctcttccatgtggatttatgttttcctgggcaatcttcttcgtggaataggagaaactcccattcagcctttgggcattgcctacctggatgattttgccagtgaagacaatgcagctttctatattgggtgtgtgcagacggttgcaattataggaccaatctttggtttcctgttaggctcattatgtgccaaactatatgttgacattggctttgtaaacctagatcacataaccattaccccaaaagatccccagtgggtaggagcctggtggcttggctatctaatagcaggaatcataagtcttcttgcagctgtgcctttctggtatttaccaaagagtttaccaagatcccaaagtagagaggattctaattcttcctctgagaaatccaagtttattatagatgatcacacagactaccaaacaccccagggagaaaatgcaaaaataatggaaatggcaagagattttcttccatcactgaagaatctttttggaaacccagtatacttcctatatttatgtacaagcactgttcagttcaattctctgttcggcatggtgacgtacaaaccaaagtacattgagcagcagtatggacagtcatcctccagggccaactttgtgatcgggctcatcaacattccagcagtggcccttggaatattctctggggggatagttatgaaaaaattcagaatcagtgtgtgtggagctgcaaaactctacttgggatcatctgtctttggttacctcctatttctttccctgtttgcactgggctgtgaaaattctgatgtggcaggactaactgtctcctaccaaggaaccaaacctgtctcttatcatgaacgagctctcttttcagattgcaactcaagatgcaaatgttcagagacaaaatgggaacccatgtgcggtgaaaatggaatcacatatgtatcagcttgtcttgctggttgtcaaacctccaacaggagtggaaaaaatattatattttacaactgcacttgtgtgggaattgcagcttctaaatccggaaattcctcaggcatagtgggaagatgtcagaaagacaatggatgtccccaaatgtttctgtatttccttgtaatttcagtcatcacatcctatactttatccctaggtggcatacctggatacatattacttctgaggtgcattaagccacagcttaagtcttttgccttgggtatctacacattagcaataagagttcttgcaggaatcccagctccagtgtattttggagttttgattgatacttcatgcctcaaatggggatttaaaagatgtggaagtagaggatcatgcagattatatgattcaaatgtcttcagacatatatatctgggactaactgtgatactgggcacagtgtcaattctcctaagcattgcagtacttttcattttaaagaaaaattatgtttcaaaacacagaagttttataaccaagagagaaagaacaatggtgtctacaagattccaaaaggaaaattacactacaagtgatcatctgctacaacccaactactggccaggcaaggaaactcaactttagaaacatgatgactggaagtcatgtcttctaattggttgacattttgcaaacaaataaattgtaatcaaaagagctctaaatttgtaatttctttctcctttcaaaaaatgtctactttgttttggtcctaggcattaggtaatataactgataatatactgaaacatataatggaagatgcagatgataaaactaattttgaactttttaatttatataaattattttatatcacttacttatttcactttattttgctttgtgctcattgatatatattagctgtactcctagaagaacaattgtctctattgtcacacatggttatatttaaagtaatttctgaactgtgtaatgtgtctagagtaagcaaatactgctaacaattaactcataccttgggttccttcaagtattactcctatagtattttctcccatagctgtcttcatctgtgtattttaataatgatcttaggatggagcagaacatggagaggaagatttcattttaagctcctccttttctttgaaatacaataatttatatagaaatgtgtagcagcaaattatattggggattagaattttgaattaatagctctcctactattaatttacatgtgctttttgtgtggcgctataagtgactatggttgtaaagtaataaaattgatgttaacatgcccaattattgttcttttatgaatccaatgaatttaaaactattgttaaatataatactgccccactttaatatatgtaagcaacttcctacttatacacgacgtgttcctaaaacatgtttgaaaggtgaatttctgaaagtctacaataaatgtaggtgttacaacaggaa

SEQ ID NO: 193209 - protein, 782 aa, Artificial Sequence
  derived and/or modified sequence
MTSIIKLTTLSGVQEESALCYLLQVDEFRFLLDCGWDEHFSMDIIDSLRKHVHQIDAVLLSHPDPLHLGALPYAVGKLGLNCAIYATIPVYKMGQMFMYDLYQSRHNTEDFTLFTLDDVDAAFDKIQQLKFSQIVNLKGKGHGLSITPLPAGHMIGGTIWKIVKDGEEEIVYAVDFNHKREIHLNGCSLEMLSRPSLLITDSFNATYVQPRRKQRDEQLLTNVLETLRGDGNVLIAVDTAGRVLELAQLLDQIWRTKDAGLGVYSLALLNNVSYNVVEFSKSQVEWMSDKLMRCFEDKRNNPFQFRHLSLCHGLSDLARVPSPKVVLASQPDLECGFSRDLFIQWCQDPKNSIILTYRTTPGTLARFLIDNPSEKITEIELRKRVKLEGKELEEYLEKEKLKKEAAKKLEQSKEADIDSSDESDIEEDIDQPSAHKTKHDLMMKGEGSRKGSFFKQAKKSYPMFPAPEERIKWDEYGEIIKPEDFLVPELQATEEEKSKLESGLTNGDEPMDQDLSDVPTKCISTTESIEIKARVTYIDYEGRSDGDSIKKIINQMKPRQLIIVHGPPEASQDLAECCRAFGGKDIKVYMPKLHETVDATSETHIYQVRLKDSLVSSLQFCKAKDAELAWIDGVLDMRVSKVDTGVILEEGELKDDGEDSEMQVEAPSDSSVIAQQKAMKSLFGDDEKETGEESEIIPTLEPLPPHEVPGHQSVFMNEPRLSDFKQVLLREGIQAEFVGGVLVCNNQVAVRRTETGRIGLEGCLCQDFYRIRDLLYEQYAIV

SEQ ID NO: 193210 - protein, 80 aa, Artificial Sequence
  derived and/or modified sequence
MTSIIKLTTLSGVQEESALCYLLQVDEFRFLLDCGWDEHFSMDIIDSLRKHVHQIDAVLLSHPDPLHLGALPYAVGKLGL

SEQ ID NO: 193211 - DNA, 2349 bp, Artificial Sequence
  derived and/or modified sequence
atgacatctataataaagctaacaactctcagcggcgtgcaggaggagagtgcattatgctatttgctgcaggttgatgagttccggttcctcctggattgcgggtgggacgagcacttttccatggatatcatagactcattgcgaaagcatgtgcatcagatcgacgctgtattgctttctcaccctgaccccctgcacctcggagcgctcccatatgcagtcggaaagcttggccttaattgtgccatatatgcaactattcctgtttacaaaatgggtcagatgtttatgtatgatctctaccaatcaaggcacaatacagaggattttaccttgttcaccctcgatgacgtagacgcagctttcgacaaaatccagcagttaaaattcagtcagatcgtaaaccttaaaggaaagggccatggcttgtctatcactcctctcccagcgggacacatgattggtgggacaatctggaagattgtcaaggatggtgaagaggagattgtgtatgcagtggattttaatcacaaacgggaaattcatcttaacggatgtagcctcgaaatgctgtccaggccgtctcttctgatcaccgattcttttaatgctacttacgtgcagccacggcgcaaacagcgagacgagcagctgctgaccaacgttctcgaaacactgcggggagatgggaacgtgctgatcgccgtggacactgccggaagggtgctcgaattggcccaactgctggatcagatctggagaaccaaagatgcaggcctgggagtttactcactcgcacttctgaataacgtgtcctataatgtagtggagttttccaagtctcaagtggagtggatgtctgacaaattgatgagatgctttgaggataaacggaacaaccccttccaattccggcacctgtcgctctgtcacggcttaagcgacctggcccgggtgcctagcccaaaagtggttcttgcctcccagcccgacctggaatgcggcttcagcagggacctgtttattcagtggtgccaggacccaaagaatagcatcatcctgacctaccgcaccacccctgggactctggcaaggttcttgatcgacaatcctagtgaaaaaattacggaaatcgagctcagaaaacgcgtcaaacttgagggcaaagagctcgaggagtacctagagaaagaaaagctcaagaaagaggctgcaaagaagctggaacagtctaaggaagccgacatcgattcttcagacgaaagtgatattgaagaagatattgatcagccgtcggctcacaagacaaaacatgacctgatgatgaaaggtgaggggagtagaaaggggtcatttttcaagcaggccaagaagtcttaccccatgttcccagcccctgaggaacgaatcaagtgggacgagtatggcgagatcatcaagcctgaagactttctcgtgcccgaactccaggcaaccgaagaagaaaagtctaaactcgaaagcgggctgacgaacggcgacgagccaatggaccaggatctgagtgatgtgcctactaaatgcatctcaacaacggaaagtatcgagattaaggctagggttacctacatcgattatgagggacgatctgacggggactcaattaaaaagattattaaccagatgaaacccaggcagctgattatcgtgcacggaccacctgaagcttcccaggacctagccgaatgctgtcgagcttttgggggtaaggacatcaaggtgtatatgcctaagctgcatgaaacagtggacgcgactagtgaaactcacatctaccaggtcagactgaaagattctctggtgagctcactgcaattctgcaaagccaaggatgccgaactggcttggatcgacggtgtgttggacatgagagtttcgaaagtggacacaggagtcatcctcgaagagggtgagcttaaggatgacggagaagattccgagatgcaagtcgaggccccaagtgactcgagtgtgattgctcaacagaaggcaatgaagtcattatttggggacgatgagaaagaaaccggagaagagtcggaaatcatcccgactctggaaccgttaccgccacacgaggtgccgggccaccagagcgtgtttatgaatgagcctaggctctctgacttcaaacaagttctgctgagggaggggatacaggccgaattcgtggggggtgtgctggtctgcaacaatcaggttgcagtgcgtcgcacggaaaccggcaggatcgggctcgaaggctgcctgtgccaggatttctataggatcagagacctgctgtacgaacagtatgccatagtgtag

SEQ ID NO: 193212 - DNA, 243 bp, Artificial Sequence
  derived and/or modified sequence
atgaccagcatcatcaaacttacaactctgtcaggggtccaggaagaatctgccttatgctacctacttcaggtggatgaattcaggttcctccttgactgtggctgggatgagcacttctcaatggatattatcgattccctccggaaacacgtacatcaaatcgacgccgttttactgtctcaccctgacccattgcacctcggcgccctgccatacgcggtcgggaaactcggcctgtag

SEQ ID NO: 193213 - DNA, 2349 bp, Artificial Sequence
  derived and/or modified sequence
atgaccagcatcatcaagctgaccaccctgtctggagtgcaggaggagagcgccctgtgctacctgctgcaggtggatgagttccgcttcctgctggactgtggctgggatgagcacttctccatggacatcatcgacagcctgaggaagcacgtgcaccagattgatgctgtgctgctgagccacccagaccccctgcacctgggcgccctgccctatgctgtgggcaagctgggcctgaactgtgccatctatgccaccatccctgtgtacaagatgggccagatgttcatgtatgacctgtaccagagccgccacaacacagaggacttcaccctcttcaccctggatgatgtggatgctgcctttgacaagatccagcagctgaagttcagccagatcgtgaacctgaagggcaagggccacggcctgagcatcacccccctgcctgctggccacatgattggaggcaccatctggaagatcgtgaaggatggagaggaggagatcgtgtatgctgtggacttcaaccacaagcgggagatccacctgaatggctgcagcctggagatgctgagccggcccagcctgctgatcacagacagcttcaatgccacctacgtgcagcccaggaggaagcagagagatgagcagctgctgaccaacgtgctggagaccctgcggggagatggaaatgtgctgattgctgtggacacagctggccgggtgctggagctggcccagctgctggaccagatctggaggaccaaggatgctggcctgggcgtgtacagcctggccctgctgaacaacgtgtcctacaacgtggtggagttcagcaagagccaggtggagtggatgtctgacaagctgatgcgctgctttgaggacaagaggaacaaccccttccagttccgccacctgagcctgtgccacggcctgagtgacctggcccgggtgcccagccccaaggtggtgctggccagccagcctgacctggagtgtggcttcagccgggacctcttcatccagtggtgccaggaccccaagaacagcatcatcctgacctaccgcaccaccccaggcaccctggcccgcttcctgattgacaaccccagcgagaagatcacagaaattgagctgaggaagagggtgaagctggagggcaaggagctggaggagtacctggagaaggagaagctgaagaaggaggccgccaagaagctggagcagagcaaggaggccgacatcgacagcagtgatgaaagtgacattgaagaagatattgaccagcccagcgcccacaagaccaagcatgacctgatgatgaagggggagggcagcaggaagggcagcttcttcaagcaggccaagaagagctaccccatgtttcctgcccctgaggagcgcatcaagtgggatgaatatggagagatcatcaagccagaggacttcctggtgcctgagctgcaggccacagaggaggagaagagcaagctggagagcggcctgaccaatggagatgagcccatggaccaggacctgagtgatgtgcccaccaagtgcatcagcaccacagagagcattgagatcaaggcccgggtgacctacatcgactatgagggccgcagtgatggagacagcatcaagaagatcatcaaccagatgaagccccggcagctgatcatcgtgcacggccccccagaggccagccaggacctggccgagtgctgccgggcctttggaggcaaggacatcaaggtgtacatgcccaagctgcacgagaccgtggatgccaccagcgagacccacatctaccaggtgcggctgaaggacagcctggtgagcagcctgcagttctgcaaggccaaggatgctgagctggcctggattgatggagtgctggacatgagggtgtccaaggtggacaccggggtcatcctggaggagggggagctgaaggatgatggagaggacagcgagatgcaggtggaggcccccagcgacagctctgtgattgcccagcagaaggccatgaagagcctgtttggagatgatgagaaggagaccggggaggagagcgagatcatccccaccctggagcccctgccccctcatgaggtgcccggccaccagagcgtcttcatgaatgagccccggctgagtgacttcaagcaggtgctgctgcgggagggcatccaggccgagtttgtgggcggcgtgctggtgtgcaacaaccaggtggccgtgagaagaacagaaacaggccgcatcggcctggagggctgcctgtgccaggacttctaccgcatccgggacctgctgtatgagcagtatgccatcgtgtag

SEQ ID NO: 193214 - DNA, 243 bp, Artificial Sequence
  derived and/or modified sequence
atgaccagcatcatcaagctgaccaccctgtctggagtgcaggaggagagcgccctgtgctacctgctgcaggtggatgagttccgcttcctgctggactgtggctgggatgagcacttctccatggacatcatcgacagcctgaggaagcacgtgcaccagattgatgctgtgctgctgagccacccagaccccctgcacctgggcgccctgccctatgctgtgggcaagctgggcctgtag

SEQ ID NO: 193215 - DNA, 2349 bp, Artificial Sequence
  derived and/or modified sequence
atgaccagcatcatcaagctgaccaccctgagcggcgtgcaggaggaatccgccctctgttacctgctgcaggttgacgaatttagatttctcttggattgcgggtgggacgagcatttctctatggacataattgatagcctgcggaaacacgtgcaccaaatcgacgcagtccttctgagccaccctgatccactccacctgggagcactcccttacgctgtggggaagctggggctcaactgcgcgatctacgccacaatacccgtatacaaaatgggccagatgtttatgtacgatctgtatcagagtcggcacaatactgaggactttaccctgtttacactagacgatgtcgacgctgccttcgacaaaattcagcagctcaaattttcccagatcgttaatttgaaggggaagggacatggcctgtctattacaccacttcccgcgggtcatatgattgggggtactatctggaaaatagtcaaggacggcgaggaggagatcgtctatgccgtcgactttaaccacaaaagggagatccacctcaacggttgtagcctggaaatgttatcacgtccaagtctcctcattacagattcattcaacgccacatatgttcagcctcgccgcaaacagcgggatgagcagctgctgacaaatgttctggagactctcaggggcgatggaaacgtactgattgctgtggataccgcagggcgggtgttagaattggcccagctgctggatcagatttggcgaacgaaggacgccggcttgggcgtctactccctggcactgcttaacaacgtctcctataacgtcgttgagttttctaaaagccaggtggagtggatgtcagacaagctgatgagatgcttcgaagataagcgaaataacccattccagttcagacaccttagcctgtgtcatgggctgagtgacctggcccgcgtgccatccccaaaagtggtgctggcaagtcagcctgacctcgaatgcgggttttctcgagatctgttcatccagtggtgtcaggatcccaagaatagcataatccttacatacagaaccactcccggaaccctggcccgatttcttatcgataacccatcggagaagataacagagatcgagctgaggaagagggtcaagctggaaggtaaagaattggaagagtacctggagaaggagaagcttaagaaagaagcagccaagaaacttgaacaatcaaaggaggccgatattgactcttccgatgagagcgatattgaggaagacattgaccaaccatccgcccacaagactaaacacgatctgatgatgaaaggcgagggctcacgcaaagggtcctttttcaaacaggcaaagaagagctatcccatgtttcccgctccagaagagagaataaaatgggatgagtatggggagatcattaaaccggaggatttccttgtcccggaactccaggcgacggaggaggaaaagtcaaaattggaaagtggcttaacaaatggggacgaacccatggatcaagacttaagtgacgtgcccaccaagtgtatttctactaccgagtcaattgagattaaggcccgagtaacatacatcgattacgaaggtaggtcggatggagactctattaagaagatcattaatcagatgaagccacgacagctcattatcgtacacggccccccggaagcctcccaggatctggccgaatgctgcagggcttttggcgggaaagacatcaaggtgtacatgcccaagttacacgaaactgtggatgccaccagcgaaacccatatataccaggtgcgcctgaaagattccctggtcagtagcttgcagttttgtaaagcaaaggacgccgagctggcttggattgacggggtcttggacatgcgggtttcaaaggttgatactggcgtaattttggaggagggggaactgaaagatgatggtgaggactctgaaatgcaggtcgaagccccttccgactcttctgtcatcgctcaacagaaggcgatgaaatccctgttcggggatgatgagaaagagaccggcgaagaaagtgagattatcccaacactggaaccactgcctccgcatgaggttcctggccaccagtcagtgtttatgaacgagcctcgcctctccgacttcaaacaagtgttgcttcgcgaggggatacaagcggagttcgtcggtggcgtgcttgtgtgtaacaaccaagttgctgttagacggaccgaaaccggtcggatcgggctcgaggggtgtctgtgccaggacttctaccgcattcgcgaccttctgtatgaacagtacgcaatcgtctag

SEQ ID NO: 193216 - DNA, 243 bp, Artificial Sequence
  derived and/or modified sequence
atgaccagcatcatcaagctgaccaccctgagcggcgtgcaggaggagtccgcactttgttatcttttacaggtggacgaatttcgtttccttctcgactgtgggtgggacgagcatttcagcatggatatcattgattctcttcggaagcacgtacaccagattgatgctgtgcttctgtcccaccccgatccacttcacctgggtgctcttccctacgccgtcggcaagctcggtctgtag

SEQ ID NO: 193217 - DNA, 2349 bp, Artificial Sequence
  derived and/or modified sequence
atgacaagcatcattaaacttactaccctgtctggggttcaggaggaatcagcactgtgctacctcctgcaggttgacgaatttcggttcttgttagattgtggctgggatgagcatttctccatggacatcattgacagcctgcgcaagcatgtgcaccaaatagatgcagtgcttttatcccaccccgacccactgcatttaggcgctttgccctacgctgtgggcaagctggggctgaactgtgctatttacgcgacaatccccgtctataaaatgggccagatgtttatgtacgatctgtatcagtcccgccataacaccgaggactttaccttgtttaccttggacgacgtcgatgctgcatttgacaagatccaacagctgaaattctcccagatcgtcaatctgaaaggaaagggacatgggctctcaataacccctttgccagcaggccacatgattggcggaaccatctggaagatcgtcaaagatggagaggaagagattgtgtatgcggtggatttcaaccataaacgggaaattcatctgaatggctgctcactagaaatgctcagtcgaccatctctgcttataacagattccttcaacgctacttacgtgcagccccgacgaaaacaaagagacgagcagctcctaactaacgtgctggaaacattgcgcggtgacggtaacgttttgatagccgtggatactgcagggagagtgctggagcttgcgcagttacttgaccagatctggcggactaaggacgctggcctgggtgtgtattccctcgcattgctcaataacgtgtcttacaacgtggttgaattcagtaaatcacaggtggaatggatgtctgacaagctgatgagatgttttgaagataaaaggaacaaccctttccagttccggcatctgtcactgtgtcacggactttctgacctggcacgggtcccttcacccaaagtggtcctcgcttcccagccggatctggagtgtggattttctagggacctcttcatccagtggtgccaagatcccaaaaattctatcatcctaacataccgaacaactccaggtactctagcgaggtttttgatagataacccaagcgaaaaaattaccgaaattgaacttagaaaaagagtgaagctggaagggaaggaattggaagaataccttgaaaaggaaaaactgaaaaaggaagcagcgaagaaactcgaacagtccaaagaagccgacatagactcttcagacgagtctgacattgaagaggatattgatcagccatcagcacataagacaaagcacgacctgatgatgaagggagaaggatcaaggaaaggcagctttttcaaacaggccaagaaatcatatcccatgtttcccgctccggaggagcgaattaagtgggacgagtacggtgagattatcaagcccgaagatttcttggttcctgaactgcaggccaccgaggaagaaaagtctaagctggagagtggtctcacgaatggtgatgagccaatggaccaggatctctcagacgtgccaactaaatgcatatctacaaccgagagcatcgagattaaggccagggtgacatatatcgattatgaaggcagatcagacggtgacagtatcaagaaaattatcaatcaaatgaagccaagacagctcattattgttcatgggcctcctgaggcaagtcaagacctggccgagtgttgtagagcctttgggggtaaggatataaaggtatatatgcccaaattacacgagaccgtcgacgccacgtccgagacgcacatttaccaggtacgactgaaagattcgttagtgagctccctccagttttgcaaagccaaggatgcagagctggcatggatcgatggcgtgttagacatgagggtatcgaaagtggacaccggcgtgattttggaagagggagagctgaaggatgacggcgaggacagtgaaatgcaggtggaggcgcctagcgattccagtgtgattgcccaacaaaaggccatgaagtccctctttggagacgatgagaaggaaacaggggaagaaagtgagatcatacccacgctcgagcccctgccaccccacgaagtacccggtcatcaatctgtattcatgaatgagccgaggttgagcgactttaagcaggtactcctaagagaagggatccaggctgagttcgtagggggagtgttagtgtgtaataatcaggtggcagtgcggaggacggagacagggaggattgggctcgagggatgcctgtgccaggatttctacagaattagagatctgctttacgagcagtatgcaattgtctag

SEQ ID NO: 193218 - DNA, 243 bp, Artificial Sequence
  derived and/or modified sequence
atgaccagtattatcaaactgactactctttctggcgtgcaagaagagagcgccctttgttatctcttacaagttgatgaattcagattcctccttgattgcggatgggatgagcacttttctatggatattattgacagcctgcggaagcacgtgcaccagatcgacgcagtattgctcagccacccggaccccctgcatctcggtgcactcccgtacgccgtcggaaagctgggactctag

SEQ ID NO: 193219 - DNA, 5301 bp, Artificial Sequence
  derived and/or modified sequence
tggtctcgccctggttcctcctcgtctccgccgctagtctccagctccaaaatggcggctgccactgtggggcttctgccggccggtagtccctggcgctgctgacccagcatcggcttttctacgtcttgaacctggattcgcctaggggttgggaagggctgtggacggcgttgggggaggcctgacgagattaataaagaactcttcagaattcctggtgtttcatcatatatacgactaagatatcaactcttctagcttgctgtttctggaccaaaaaaaatgacgtctattatcaaattaactaccctttctggggtccaagaagaatctgccctttgctatcttctccaagttgatgagtttagatttttattggactgtggctgggatgagcacttttctatggatattattgattccctgaggaagcatgttcaccagattgatgcagtgctgttgtctcaccctgatcctctccaccttggtgccctcccgtatgctgtcggaaagttgggtctgaactgtgctatctatgcaaccattcctgtttataaaatgggacagatgttcatgtatgatctttatcagtctcgacacaatacagaagattttacactctttacattagatgatgtggatgcagcctttgataaaatacagcagctaaaattctctcagattgtgaatttgaaaggtaaaggacatggcctgtctatcacacctctgccagctggtcatatgataggtggaacaatatggaaaatagtcaaagatggagaagaagaaattgtttatgcagttgacttcaaccacaagagggagatccatttaaatggatgttccctggaaatgctaagcaggccttccctacttatcacagattcattcaatgctacatatgtacagcctagaagaaaacagagagatgagcagcttctgacaaatgtcctggaaacacttcgaggtgatggaaatgtgttaatagcagtggacacagcaggcagagttttggaacttgctcaacttcttgatcagatttggaggactaaagatgcaggattgggtgtttactcattggcactcctaaataatgtcagttacaatgtggtggagttttctaagtcccaggtagaatggatgagtgataaattgatgagatgttttgaagacaaaagaaataatccgtttcagtttcgccatctctctttatgtcatggtctttctgacttggcccgtgtacctagccctaaagttgtacttgccagccaacctgacctggaatgcggattttcaagggatctctttattcagtggtgtcaggaccctaaaaactcaatcattctaacctacagaactactcctgggactttagcacgtttcctaattgataatccttctgaaaaaattacagaaatagagttgaggaaacgtgtgaagcttgaagggaaagaacttgaagaatacttggaaaaagagaaactaaagaaagaagctgccaaaaagcttgagcagtcaaaagaggcagatatagattccagtgatgagagtgatattgaggaagatattgaccagccatcagctcataagacgaagcatgacttgatgatgaaaggtgaaggcagtcgtaaaggaagttttttcaaacaggcaaaaaagtcctatcctatgtttcctgccccagaagaaagaattaaatgggatgaatatggagagattatcaaaccagaggatttcttagtgccagagcttcaagctactgaagaagaaaaaagcaaattagaatctggtttgacaaatggagatgaacctatggatcaggatttatctgatgttcctactaaatgtatttctacaacagagtctattgaaataaaagcccgggttacctacatagactatgaaggacgctctgatggggattccattaaaaaaatcattaatcagatgaaaccacgacagttgatcatcgtccatggcccaccagaggccagtcaagatctggcagagtgctgtcgcgcctttggtgggaaagatattaaagtgtacatgccaaagctacatgaaacagttgatgccactagtgaaactcacatctaccaggtgaggttaaaagactcacttgtcagctctcttcagttttgtaaggcaaaagatgctgaattagcttggatagatggtgtcttagatatgagagtttccaaagtggacacaggggttattttagaagaaggagaactaaaggatgatggagaagactcagagatgcaagtggaagctccctcagattctagcgttatagcacaacaaaaggccatgaaaagtctgttcggagatgatgaaaaagaaacaggtgaagaaagtgagatcattcctactttggaacccttgccacctcatgaggttcctggacatcagtcagtttttatgaatgaaccaaggctgtcagacttcaagcaagttctcttacgggaggggattcaagctgaatttgtaggaggtgtacttgtttgcaacaatcaagtagcagtccgcagaacggaaactggacgcattggattagaaggctgcctttgtcaagatttttataggataagagaccttttatatgaacaatatgccattgtataaaggacatgatgtcaagaagtatctgcttgacctttctaagaaaaagggattcttatcttactctgagcttttgatgttttgttttgtaacatacaaaaagaatctgccagaaaaacttacatgtatcagatttttaaaaatataaatagagaacattttgcaaatgctcaaatgagcattctatcttttggctttcagagtgatagagctcctaacaggtgtacaggcccaagagttgaaggtgattggttttctttacagactccttgttctctagaagggctttttacttgaataaaacaatgcaacttagcaaaccaatttatggccttagagaaacatttttgcatgagttcttacaaactgtttgttatattttctggaatgataagtgagaattatttagaaaagacatgctccaaaaaaaaaacaaaactgataaaacagtttttcgaaacttacttttaaaagcatacgtgctatgactctctccagtttgaatatgcaattgttttcacaggcaggatgtctgttttctgcctgtatttcccagtgatttactctagggtaaggtagtacacatttggttcagaaattaatttttatttctcctatatcttgttttatcaagattttgttgtggcatttcaatgtaaattataacaccatcatttgagtatacataattcaaaagaactacttgatgcagtatagtcttaagggttctgcatacattttagaaacatcttagccgtaagttaggtcctgtgttaaactgtttagtgctctgtttttaagaaaacaaatgttgaacctcacacttttatgtggtgacagtgtaatttaattaaaaggtgtaaatgttttcatctcttaggcttgctgtctcctaaggtcacccaagcagtggttggattttatacacattactactaaaataatactgaagttggataaggttatcctttctgtatttgcgtctttcttgtgactaaccaccctgatatagtattaaccactgtgttcaagagtaaaaacaatatatgcaattttcattgaacttaaagagtgaaaaccatgtaaactattgaaactattgtaatccattaatgcttttttagaatggcagaccttgatgtttatttctcaaatggttaagccctcttctttactcttaatttttttttgagacagagtcacccaggctggagtgcagtggtgagattttggctcactataacctcttcctccagggttcaagtgattctcccacctcagcctcccaagtagctgggactacgggcacatgccactgcacctggctaatttttatatttttggtagagacagggtttcaccatgttggccaggctggtctcaaactcctgacctcaagcgatccacccacctaggcctcccaaagtgctgggattacaggcatgaatcaccacaactagcctacccttagatttttggaaggatcgatcttatttaactatgtgtggaacaacccagtaatatcagactcgaattactatttcattctatttcaaatgcttataaagctactattgtagattatagtgttaatgcaaagtttacagacttttgatatggaaaaccagataaaacaatgttacaaaaggcaaatataaagagtatgttttctttttagtgctttggaaaaatttcacttaaactcttattactgtatagattaagccctataatgctatttatattccaggggaacgaaaatctgaatttgttttatgatttaaagcatctggtttgcatattgtattgtaatactgatacagtttggctgtgtccccaccaaattgaattgtgttaatagttcccataatccctacgtgttgtgggagggacccagtgggcagtaatttaatcatggtggtggttaccctcatgctgttcttgtgatggtgagttctcatgagatctgatgggtgtttttttttgttttgttttttgttttttgagatggagttttgctcttgttgcccagactggagtgcaatggcacacgatctcggctcaccgcaacctctgcctcctgggttcaagcgattctcctgcctcagcatctcgagtagctgggattacaggcatgcaccaccacgcccagctaattttgtatttttagtagagacggggtttctccatgttggttaggctggcctcaaactcccgacctcaggtgatccgcccgcctgggcctcccaaagtgctgggattacaggcgtgagccactgctcctggcccaagatctgatggttttgtaagggaattttccccctttgcttggcacttcttcctgctgccatgtgaagaaggatgtgtttgcttccccttccaccatgattgtaagtttcatgaggcctccccagcctgtgggactgtgagtcaattaaacgtgtttactttataaattacccagtctcaggcaattctttatagcagtgtgagaacagactaatatgaataccaatactgaaaaattgtttcttgcctcaccttgtcctatgaacaggaattaaattttaaagtattgccttaagatggctgtgctaaataataatcattgcaagagcaatacttttacctgtttctagatgacaatattactaaaatttctcaaatgaa

SEQ ID NO: 193220 - DNA, 715 bp, Artificial Sequence
  derived and/or modified sequence
agtctccagctccaaaatggcggctgccactgtggggcttctgccggccggtagtccctggcgctgctgacccagcatcggcttttctacgtcttgaacctggattcgcctaggggttgggaagggctgtggacggcgttgggggaggcctgacgaggcaagtgagggcgggagaaaggagcgagcctcgggctggggaaggcggcgtcattggccctccgggagcacggggccccgactccgacccggtctcccccgaggactcgcccccgccgcttcggctgcgactgtcccggtcgttcccggcagaagtggtcagcgagggaaagagaagtgacttctccatgggtttcaagctcccagctgttttgcggcagcccattaataaagaactcttcagaattcctggtgtttcatcatatatacgactaagatatcaactcttctagcttgctgtttctggaccaaaaaaaatgacgtctattatcaaattaactaccctttctggggtccaagaagaatctgccctttgctatcttctccaagttgatgagtttagatttttattggactgtggctgggatgagcacttttctatggatattattgattccctgaggaagcatgttcaccagattgatgcagtgctgttgtctcaccctgatcctctccaccttggtgccctcccgtatgctgtcggaaagttgggtctgaa

SEQ ID NO: 193221 - DNA, 2349 bp, Artificial Sequence
  derived and/or modified sequence
atgaccagcatcatcaagctgaccaccctgagcggcgtgcaggaggagagcgccctgtgctacctgctgcaggtggacgagttcagattcctgctggactgcggctgggacgagcacttcagcatggacatcatcgacagcctgagaaagcacgtgcaccagatcgacgccgtgctgctgagccaccccgaccccctgcacctgggcgccctgccctacgccgtgggcaagctgggcctgaactgcgccatctacgccaccatccccgtgtacaagatgggccagatgttcatgtacgacctgtaccagagcagacacaacaccgaggacttcaccctgttcaccctggacgacgtggacgccgccttcgacaagatccagcagctgaagttcagccagatcgtgaacctgaagggcaagggccacggcctgagcatcacccccctgcccgccggccacatgatcggcggcaccatctggaagatcgtgaaggacggcgaggaggagatcgtgtacgccgtggacttcaaccacaagagagagatccacctgaacggctgcagcctggagatgctgagcagacccagcctgctgatcaccgacagcttcaacgccacctacgtgcagcccagaagaaagcagagagacgagcagctgctgaccaacgtgctggagaccctgagaggcgacggcaacgtgctgatcgccgtggacaccgccggcagagtgctggagctggcccagctgctggaccagatctggagaaccaaggacgccggcctgggcgtgtacagcctggccctgctgaacaacgtgagctacaacgtggtggagttcagcaagagccaggtggagtggatgagcgacaagctgatgagatgcttcgaggacaagagaaacaaccccttccagttcagacacctgagcctgtgccacggcctgagcgacctggccagagtgcccagccccaaggtggtgctggccagccagcccgacctggagtgcggcttcagcagagacctgttcatccagtggtgccaggaccccaagaacagcatcatcctgacctacagaaccacccccggcaccctggccagattcctgatcgacaaccccagcgagaagatcaccgagatcgagctgagaaagagagtgaagctggagggcaaggagctggaggagtacctggagaaggagaagctgaagaaggaggccgccaagaagctggagcagagcaaggaggccgacatcgacagcagcgacgagagcgacatcgaggaggacatcgaccagcccagcgcccacaagaccaagcacgacctgatgatgaagggcgagggcagcagaaagggcagcttcttcaagcaggccaagaagagctaccccatgttccccgcccccgaggagagaatcaagtgggacgagtacggcgagatcatcaagcccgaggacttcctggtgcccgagctgcaggccaccgaggaggagaagagcaagctggagagcggcctgaccaacggcgacgagcccatggaccaggacctgagcgacgtgcccaccaagtgcatcagcaccaccgagagcatcgagatcaaggccagagtgacctacatcgactacgagggcagaagcgacggcgacagcatcaagaagatcatcaaccagatgaagcccagacagctgatcatcgtgcacggcccccccgaggccagccaggacctggccgagtgctgcagagccttcggcggcaaggacatcaaggtgtacatgcccaagctgcacgagaccgtggacgccaccagcgagacccacatctaccaggtgagactgaaggacagcctggtgagcagcctgcagttctgcaaggccaaggacgccgagctggcctggatcgacggcgtgctggacatgagagtgagcaaggtggacaccggcgtgatcctggaggagggcgagctgaaggacgacggcgaggacagcgagatgcaggtggaggcccccagcgacagcagcgtgatcgcccagcagaaggccatgaagagcctgttcggcgacgacgagaaggagaccggcgaggagagcgagatcatccccaccctggagcccctgcccccccacgaggtgcccggccaccagagcgtgttcatgaacgagcccagactgagcgacttcaagcaggtgctgctgagagagggcatccaggccgagttcgtgggcggcgtgctggtgtgcaacaaccaggtggccgtgagaagaaccgagaccggcagaatcggcctggagggctgcctgtgccaggacttctacagaatcagagacctgctgtacgagcagtacgccatcgtgtag

SEQ ID NO: 193222 - DNA, 243 bp, Artificial Sequence
  derived and/or modified sequence
atgaccagcatcatcaagctgaccaccctgagcggcgtgcaggaggagagcgccctgtgctacctgctgcaggtggacgagttcagattcctgctggactgcggctgggacgagcacttcagcatggacatcatcgacagcctgagaaagcacgtgcaccagatcgacgccgtgctgctgagccaccccgaccccctgcacctgggcgccctgccctacgccgtgggcaagctgggcctgtag

SEQ ID NO: 193223 - protein, 714 aa, Artificial Sequence
  derived and/or modified sequence
MPVRFKGLSEYQRNFLWKKSYLSESCNSSVGRKYPWAGLRSDQLGITKEPSFISKRRVPYHDPQISKSLEWNGAISESNVVASPEPEAPETPKSQEAEQKDVTQERVHSLEASRVPKRTRSHSADSRAEGASDVENNEGVTNHTPVNENVELEHSTKVLSENVDNGLDRLLRKKAGLTVVPSYNALRNSEYQRQFVWKTSKETAPAFAANQVFHNKSQFVPPFKGNSVIHETEYKRNFKGLSPVKEPKLRNDLRENRNLETVSPERKSNKIDDRLKLEAEMELKDLHQPKRKLTPWKHQRLGKVNSEYRAKFLSPAQYLYKAGAWTHVKGNMPNQVKELREKAEFYRKRVQGTHFSRDHLNQILSDSNCCWDVSSTTSSEGTVSSNIRALDLAGDPTSHKTLQKCPSTEPEEKGNIVEEQPQKNTTEKLGVSAPTIPVRRRLAWDTENTSEDVQKQPGEKEEEDDNEEEGDRKTGKQAFMGEQEKLDVREKSKADKMKEGSDSSVSSEKGGRLPTPKLRELGGIQRTHHDLTTPAVGGAVLVSPSKMKPPAPEQRKRMTSQDCLETSKNDFTKKESRAVSLLTSPAAGIKTVDPLPLREDSEDNIHKFAEATLPVSKIPKYPTNPPGQLPSPPHVPSYWHPSRRIQGSLRDPEFQHNVGKARMNNLQLPQHEAFNDEDEDRLSEISARSAASSLRAFQTLARAKKRKENFWGKT

SEQ ID NO: 193224 - DNA, 2145 bp, Artificial Sequence
  derived and/or modified sequence
atgcctgttcggtttaaaggcctgtccgagtatcagcggaattttctgtggaaaaagagctacctgagcgagtcttgtaattctagtgtcggccggaaatacccatgggctggcttgcgaagtgaccagctggggatcaccaaggagccaagctttatcagcaaaaggagggtcccttaccatgacccacagatatccaaatcacttgaatggaacggagcaatctctgagagtaacgttgtggccagccccgagccggaagcgcccgagacccctaaaagtcaggaagctgagcagaaggacgtgacgcaagagagagtccattctctggaagccagtagggtgcctaaaagaacccggagccattcagccgatagccgagccgagggggcatctgacgtggagaataatgagggcgtcaccaatcacacccctgtgaatgaaaatgtggagctcgagcattcgaccaaagtactgtcagaaaatgtggataatgggctggataggttgttgcgtaagaaagccgggctgacggtggtgccgtcctataacgcccttaggaattcagagtaccaacggcaattcgtgtggaagacctcaaaagaaaccgcaccagcattcgcagcgaaccaggtttttcacaacaaatctcaatttgtgcccccatttaaaggtaattcagtaattcatgaaactgagtacaagaggaacttcaaaggcttatccccagtgaaggaaccaaagcttaggaacgatctcagggaaaatcggaacttagagacagtgtcccccgaacgtaagtctaataagattgatgacagattaaagctagaggccgagatggagctcaaagatctgcaccagcccaagcgtaagttaactccatggaaacaccaacgactcggaaaagttaactcggagtatagagctaaattcctgagccctgcccagtacctgtataaagcaggggcctggactcatgtgaaggggaatatgcccaatcaagtaaaagagctgagggagaaagctgaattctaccgtaagagagtacagggcacccacttttccagggatcatctgaatcagatcctaagcgactcaaactgctgctgggacgtgagtagcaccacctcaagcgagggtacagtttcatcaaatattcgggccctcgacctcgccggcgacccaactagtcacaaaacactacaaaagtgccccagtacagagccagaggagaagggcaatatcgtggaggaacagccccagaaaaacacaaccgagaagcttggggttagtgcacccacaatcccggtgcgcagaagactggcatgggacactgaaaatactagcgaggacgttcaaaaacagccaggcgaaaaggaggaggaggacgataatgaagaggaaggcgaccgcaagacaggcaaacaggccttcatgggcgagcaagaaaaactcgatgtgcgtgagaagagtaaagccgataaaatgaaagaagggtccgattccagcgtcagttctgagaaagggggtcgattgcctactccaaaactgcgggaactgggcggcatacaaagaacacatcacgaccttacaactccagccgttggtggcgccgtactggtcagtccgagcaaaatgaaacctccagctccggaacagaggaagaggatgactagccaagattgtctagagacctcaaaaaacgattttaccaagaaggaatcccgagcagtttccctgcttacatcacccgcggccggtatcaaaacagtcgatcctttacccctgagagaggattctgaggataacattcataaatttgccgaggctaccctgccagtcagcaagatccccaaatacccaacaaatccccccgggcaattacccagtccccctcacgtgcctagttactggcatccctcgaggaggatccagggcagtctgcgggatcccgaattccaacacaacgtggggaaggctcgaatgaacaaccttcagttgccacagcatgaagcctttaatgatgaagatgaagaccggctttcggagatcagcgcccgaagcgcagcctcttcccttcgcgcgtttcaaactctcgcacgcgctaagaaacgaaaagaaaacttttggggcaaaacctag

SEQ ID NO: 193225 - DNA, 2145 bp, Artificial Sequence
  derived and/or modified sequence
atgcctgtgcgcttcaagggcctgtctgagtaccagaggaacttcctgtggaagaagagctacctgtctgagagctgcaacagctctgtgggcaggaagtacccctgggccggcctgcggagtgaccagctgggcatcaccaaggagcccagcttcatcagcaagagaagagtgccctaccatgacccccagatcagcaagagcctggagtggaatggagccatcagcgagagcaatgtggtggccagccctgagcctgaggcccctgagacccccaagagccaggaggccgagcagaaggatgtgacccaggagcgggtgcacagcctggaggccagccgggtgcccaagaggaccaggagccacagcgctgacagcagagctgagggcgccagtgatgtggagaacaatgaaggagtgaccaaccacacccctgtgaatgaaaatgtggagctggagcacagcaccaaggtgctgtctgaaaatgtggacaatggcctggaccggctgctgaggaagaaggccggcctgactgtggtgcccagctacaatgccctgagaaattctgagtaccagaggcagtttgtgtggaagaccagcaaggagacagccccagcctttgctgccaaccaggtgttccacaacaagagccagtttgtgccccccttcaagggcaacagcgtcatccacgagacagagtacaagaggaacttcaagggcctgagccctgtgaaggagcccaagctgagaaatgacctgagagaaaatagaaacctggagaccgtgtccccagagaggaagagcaacaagattgatgaccggctgaagctggaggccgagatggagctgaaggacctgcaccagcccaagaggaagctgaccccctggaagcaccagaggctgggcaaggtgaacagcgagtaccgggccaagttcctgagccctgcccagtacctgtacaaggccggggcctggacccacgtgaagggcaacatgcccaaccaggtgaaggagctgcgggagaaggccgagttctacaggaagagggtgcagggcacccacttcagccgggaccacctgaaccagatcctgagtgacagcaactgctgctgggatgtgagcagcaccaccagcagcgagggcaccgtgagcagcaacatccgggccctggacctggccggggaccccaccagccacaagaccctgcagaagtgccccagcacagagcctgaggagaagggcaacatcgtggaggagcagccccagaagaacaccacagagaagctgggcgtgtctgcccccaccatccctgtgagaagaaggctggcctgggacacagagaacaccagtgaagatgtgcagaagcagcctggagagaaggaggaggaggatgacaatgaggaggagggggacaggaagacaggcaagcaggccttcatgggagagcaggagaagctggatgtgcgggagaagagcaaggctgacaagatgaaggagggcagtgacagctctgtgtcctctgagaagggcggccgcctgcccacccccaagctgcgggagctgggcggcatccagaggacccaccacgacctgaccaccccagctgtgggcggcgctgtgctggtgagccccagcaagatgaagcccccagcccctgagcagaggaagaggatgaccagccaggactgcctggagaccagcaagaatgacttcaccaagaaggagagcagagctgtgtccctgctgaccagccctgctgctggcatcaagacagtggaccccctgcccctgagagaagattctgaggacaacatccacaagtttgctgaggccaccctgcctgtgtccaagatccccaagtaccccaccaaccccccaggccagctgcccagccccccccacgtgcccagctactggcaccccagccgccgcatccagggcagcctgcgggaccctgagttccagcacaacgtgggcaaggccaggatgaacaacctgcagctgccccagcacgaggccttcaatgatgaagatgaagatcggctgtctgagatcagcgcccggtctgctgccagcagcctgcgggccttccagaccctggcccgggccaagaagaggaaggagaacttctggggcaagacctag

SEQ ID NO: 193226 - DNA, 2918 bp, Artificial Sequence
  derived and/or modified sequence
gctagggaacactgttatcgccccgccccctcggagctttttctccagttaactgtcggagtagcgggggctccggcgccgggcgacatgccggtgcgcttcaaggggctgagtgaataccagaggaacttcctgtggaaaaagtcttatttgtccgagtcttgtaattcctccgtggggcgaaagtacccatgggctggacttagatcagatcaattaggcatcacgaaagagccaagttttatttcaaaaagaagagtcccttaccatgacccacagatttcaaaatctctggagtggaatggagctatctcagagagcaatgtggttgcatcaccagaaccagaagccccggaaacaccaaaatcacaagaagcagaacaaaaggatgttactcaagaaagagttcactcactagaagcttccagggttcccaaaagaaccagatctcactctgcagactccagagctgaaggggcttcagatgtggaaaataatgagggtgtaacaaaccatacaccagttaatgaaaatgtggaactggaacattctaccaaggttctttcagaaaatgtagataatgggttggatagacttctgcgtaagaaagctggattgactgttgttccttcatataatgccttgagaaattctgaatatcaaaggcagtttgtttggaagacttctaaagaaactgctccagcttttgcagccaatcaggttttccacaataaaagccagtttgttccaccattcaaaggtaactcagtcatccatgaaactgaatacaaaagaaatttcaagggtttatctccagtgaaagaaccaaaattaagaaatgatttgagagaaaacagaaatcttgaaacagtgtctcctgaaaggaagagtaataaaatagacgatcgtttaaaattggaagcagagatggaattaaaagacttacaccagcctaaaaggaagcttactccttggaaacatcaaaggcttgggaaggtgaattccgaatatagagcaaaatttctgagcccagctcagtatttatataaagctggggcttggacacatgtaaagggaaacatgccaaatcaggttaaagaactccgagaaaaggctgagttttataggaagcgagttcaggggacgcatttttctcgggaccatctgaatcagattttatctgatagcaactgctgttgggatgtctcctcaaccacaagctcagaaggaaccgttagtagcaacatcagagcattagatcttgctggagatcctacaagccataagactttgcagaaatgtccttctacagaaccagaagaaaaaggaaatatcgtggaagaacagccccagaaaaataccacggagaaattgggtgtgtcagctcccaccatacccgttagaaggcggctggcttgggatacagagaacacaagtgaagacgtacagaaacagcccggggagaaagaggaggaggacgacaatgaagaggaaggggacaggaaaacgggcaagcaggcttttatgggagagcaagagaagttggatgtacgtgagaaatctaaggcagataagatgaaagaagggtcagattcttctgtatcctcagaaaaaggaggccggcttcctactcccaagctgagagaacttggtggaatccagaggactcatcatgatctcactactccagctgttggtggtgctgttttagtgtctccatctaagatgaagcctccagccccagaacagaggaaaagaatgacctctcaggattgtttagaaacttcaaagaatgattttactaagaaagaaagtcgtgctgtatccctactgacttctccagctgctggtataaaaacagttgatcctctgcctttgcgggaagattctgaagacaatatccacaaatttgctgaggcaactcttccagtttcaaaaattccaaaatacccaacaaatccccctggacagttgccttctccaccacatgttccatcctactggcatccctctcgacgaattcagggctctcttagagatccagagtttcagcacaatgtgggaaaagcaaggatgaacaatttgcagttacctcaacatgaagcctttaatgatgaagatgaggacagattgtctgagatttctgctcgctctgcagcttctagtctccgggcttttcaaactctggcacgagctaagaaaaggaaggagaatttctggggtaaaacataaacctagctgagttgcctttatctaaggaaacattggcataatttttctttattgcttactgtgttaaaattttttgagtgaagtttttcctaacgttttctactttgaaatatttaatttccaatagaacagtttacttggaaattgttaacataggcttatacaaatttaacttttaaagaattctttttacatctatcccagagtacaaagacctagattattgaattcttcacatgtaactttcgtaataggtgtcatggatagattttcacctatccagagagtattctaaaaaaataaacaaagtgaagtaaaagttaagatcccagtgtgaagtatatattcccctaagatttgatatatgtatctttataattgatgatgttgtaaaatgaatttgttgttcctttaacctttgctgtagtgtttctttttattttagttccttctatacatgtttgcagtgttaagataattgtactttgaaaacaccagctgtatatatttttcttatttatgtaacaaagtttgctgaaagatatgtatatttttgatctttgagtgtattctatttgtgtaaggactttggcttacatttgaataatgtctagattttgaaaaattacctgtataatggagaattaaaactttgtagacattttgaaataaaaatggatcaagtg

SEQ ID NO: 193227 - DNA, 2145 bp, Artificial Sequence
  derived and/or modified sequence
atgcccgtgcggttcaagggcctgagcgagtaccagcggaacttcctgtggaaaaagtcctacttgtccgaatcctgcaattcttccgtcgggaggaaatacccgtgggctggactgcgaagcgatcagctgggtataaccaaggagcccagcttcatatcaaagcgccgtgtcccctatcacgaccctcagatttccaagtctctggagtggaacggcgccatatcggaatctaacgtggtcgcctcacctgagccggaggcccctgaaacgccgaaatctcaggaagccgaacagaaagacgtgactcaagagcgcgtccattccttggaggcaagcagggttcccaaacggactcgatcccactccgcagattcgagagctgaaggtgccagcgacgtggagaataacgagggagtaactaatcatacgccagtgaatgagaacgttgaacttgaacactcaactaaagtgctaagcgagaatgtcgataacgggctcgaccgcctgctgcggaaaaaggctggactgacagtggtcccgagctacaatgcgctgaggaattcagagtaccaacgccagtttgtgtggaagacttctaaagaaaccgcccctgcattcgcggccaatcaagtctttcataacaagtcccagtttgtgccacctttcaaggggaacagcgtgattcacgaaacggagtacaagagaaattttaagggattatcgccggtaaaggaacctaaactgaggaacgatttgagagagaatcgtaacctcgaaacggtcagccctgagcgcaagagtaataaaatcgacgaccgccttaaactcgaggctgaaatggagctcaaggatctgcaccagccaaaaaggaagttaactccttggaaacaccaacgactcggtaaagtgaactctgagtaccgcgcgaagtttttaagtccggcacagtatttgtataaagcaggggcatggactcacgtgaaggggaacatgccaaatcaggtcaaagaactccgtgagaaggctgagttctatcgcaagcgggtgcagggaacccacttctcacgggaccacctgaatcagatcctatcagacagcaactgctgttgggatgttagtagtacgacaagcagcgagggaaccgtatccagtaatatccgagcacttgacctcgccggcgacccaacctctcataaaacccttcaaaaatgcccaagtactgagcccgaggaaaaaggcaacattgtggaagagcagccacagaagaataccacagagaagctgggtgtgtcagctcctaccattccagtcaggcgccgcttggcatgggatactgagaacacatcggaggatgtgcagaagcagccgggagagaaggaggaggaagatgataatgaagaagaaggagatcggaaaaccggtaagcaggcattcatgggagaacaggagaaactggacgtgagagagaagtctaaagctgacaaaatgaaagagggctccgactccagtgtgtcttccgaaaaaggagggcgcctgccaaccccaaaactgagagagctcgggggtatacagcgcacccatcacgatctgaccactcctgcagtagggggcgctgtactcgtgagtcctagtaagatgaaaccgcctgcgcctgaacagagaaagcggatgacctcacaggactgtctggaaactagtaagaacgacttcacaaagaaggagtctcgggccgtatccctcctgacaagccctgccgccgggatcaagacagtagacccacttccactgagggaggactccgaagacaatatccacaagtttgcagaagctactctgcctgtctcgaagatacctaagtaccccaccaaccctcccggtcagctcccgagtcccccccacgtccccagttactggcatccaagcagacgaattcaggggagcctccgcgatcctgagttccagcacaatgtgggaaaagctcgtatgaacaatctgcaactcccgcagcacgaggcctttaacgatgaagacgaagacaggctctcagagatctctgccaggtcagccgccagctcgctgagagccttccagaccctggcccgggcaaagaagagaaaggaaaacttctgggggaaaacgtag

SEQ ID NO: 193228 - DNA, 2145 bp, Artificial Sequence
  derived and/or modified sequence
atgcctgtgagattcaaaggcctgtcagaataccaacgaaatttcctttggaaaaagagctacctttcagagtcctgtaattcaagcgtgggcagaaaatacccatgggccggacttagatcggatcaactgggcatcacaaaggagccttctttcatttcaaaaagacgggtaccctaccatgaccctcaaattagcaagagtctcgagtggaatggtgccatcagcgagagcaacgtcgtggccagcccagaacccgaggcccctgagactcctaagtctcaggaggctgagcagaaagatgttacccaggagagagtacactctctggaggcctccagggtccccaagaggactcgcagtcactcagccgacagtcgggcagaaggcgcttctgacgtggagaacaacgagggcgttacaaaccacaccccagttaatgagaatgtcgaacttgaacattccacgaaggtcctgtctgagaacgtcgacaacggcctggatcggcttctccgcaagaaagcaggactcacagtggtgccaagttataacgcactgcggaatagcgaataccagcgccagtttgtctggaaaacgtctaaagagactgcaccagcctttgcggctaatcaggtgttccataataagagccagttcgttccaccttttaagggcaacagcgtgatacacgaaacagagtataaacggaatttcaaaggactgtcaccagtcaaagagccaaagctgcggaacgacctgagggaaaacagaaatctggaaaccgtgtcccctgaacggaagtctaacaagatcgacgacagacttaagctcgaggcagagatggagttgaaggatctccatcagcccaagcgaaaactcacgccttggaagcatcaacgtctgggaaaggtgaacagcgaatatcgagcaaagtttttatctcccgcacaatacctgtacaaagctggcgcttggactcatgtcaagggtaacatgcccaaccaagtcaaagagttgagagaaaaggcggagttctatagaaagcgcgttcagggcacgcacttctcccgagaccacctgaatcagatacttagtgactcaaactgctgctgggatgtttcctccacaacgagctccgaaggcaccgtgagtagcaacataagagcgctggacctcgccggagacccaacctcccataagacgctgcagaaatgtcccagcaccgagccggaagaaaagggaaacatagtagaggaacagccccagaagaataccacagagaagcttggagtgtccgccccaactattccagtgaggcgtcgcctggcttgggatactgagaacactagcgaggacgtacagaagcagcctggtgaaaaagaggaagaggacgacaacgaggaagaaggtgataggaaaaccggcaaacaggcattcatgggggagcaggaaaagcttgatgtgagggagaaatctaaggccgacaaaatgaaagaaggtagtgactctagtgtcagtagcgaaaagggcggtcgactgcccacaccaaaactgagagagcttggtggaatccagcggacccatcacgatctcacaaccccagccgtgggaggtgctgtcctggttagtcccagtaagatgaaacctccagctccggagcagcgtaagcgtatgactagtcaagactgtctggagacctccaagaatgacttcaccaaaaaggagtctcgagcggtcagcctgttaacttctcccgctgccggaataaagacagtggatcctcttccgcttagagaggattccgaggacaacatacacaagtttgctgaagccactctgcctgtgagcaagattccaaaatacccgacaaaccctccaggccaactcccgtccccaccgcacgtgccatcctactggcatccgtctcggagaattcaggggtctctgcgggaccccgaatttcagcacaacgtggggaaggctaggatgaataacctacaactaccccagcacgaggcttttaacgacgaagacgaagacaggttgtccgaaatcagcgcccgtagtgccgcttccagcttgcgtgctttccagacactcgcaagagcaaaaaaaagaaaggaaaacttttggggtaaaacatag

SEQ ID NO: 193229 - DNA, 2145 bp, Artificial Sequence
  derived and/or modified sequence
atgcccgtgagattcaagggcctgagcgagtaccagagaaacttcctgtggaagaagagctacctgagcgagagctgcaacagcagcgtgggcagaaagtacccctgggccggcctgagaagcgaccagctgggcatcaccaaggagcccagcttcatcagcaagagaagagtgccctaccacgacccccagatcagcaagagcctggagtggaacggcgccatcagcgagagcaacgtggtggccagccccgagcccgaggcccccgagacccccaagagccaggaggccgagcagaaggacgtgacccaggagagagtgcacagcctggaggccagcagagtgcccaagagaaccagaagccacagcgccgacagcagagccgagggcgccagcgacgtggagaacaacgagggcgtgaccaaccacacccccgtgaacgagaacgtggagctggagcacagcaccaaggtgctgagcgagaacgtggacaacggcctggacagactgctgagaaagaaggccggcctgaccgtggtgcccagctacaacgccctgagaaacagcgagtaccagagacagttcgtgtggaagaccagcaaggagaccgcccccgccttcgccgccaaccaggtgttccacaacaagagccagttcgtgccccccttcaagggcaacagcgtgatccacgagaccgagtacaagagaaacttcaagggcctgagccccgtgaaggagcccaagctgagaaacgacctgagagagaacagaaacctggagaccgtgagccccgagagaaagagcaacaagatcgacgacagactgaagctggaggccgagatggagctgaaggacctgcaccagcccaagagaaagctgaccccctggaagcaccagagactgggcaaggtgaacagcgagtacagagccaagttcctgagccccgcccagtacctgtacaaggccggcgcctggacccacgtgaagggcaacatgcccaaccaggtgaaggagctgagagagaaggccgagttctacagaaagagagtgcagggcacccacttcagcagagaccacctgaaccagatcctgagcgacagcaactgctgctgggacgtgagcagcaccaccagcagcgagggcaccgtgagcagcaacatcagagccctggacctggccggcgaccccaccagccacaagaccctgcagaagtgccccagcaccgagcccgaggagaagggcaacatcgtggaggagcagccccagaagaacaccaccgagaagctgggcgtgagcgcccccaccatccccgtgagaagaagactggcctgggacaccgagaacaccagcgaggacgtgcagaagcagcccggcgagaaggaggaggaggacgacaacgaggaggagggcgacagaaagaccggcaagcaggccttcatgggcgagcaggagaagctggacgtgagagagaagagcaaggccgacaagatgaaggagggcagcgacagcagcgtgagcagcgagaagggcggcagactgcccacccccaagctgagagagctgggcggcatccagagaacccaccacgacctgaccacccccgccgtgggcggcgccgtgctggtgagccccagcaagatgaagccccccgcccccgagcagagaaagagaatgaccagccaggactgcctggagaccagcaagaacgacttcaccaagaaggagagcagagccgtgagcctgctgaccagccccgccgccggcatcaagaccgtggaccccctgcccctgagagaggacagcgaggacaacatccacaagttcgccgaggccaccctgcccgtgagcaagatccccaagtaccccaccaacccccccggccagctgcccagccccccccacgtgcccagctactggcaccccagcagaagaatccagggcagcctgagagaccccgagttccagcacaacgtgggcaaggccagaatgaacaacctgcagctgccccagcacgaggccttcaacgacgaggacgaggacagactgagcgagatcagcgccagaagcgccgccagcagcctgagagccttccagaccctggccagagccaagaagagaaaggagaacttctggggcaagacctag

SEQ ID NO: 193230 - protein, 1186 aa, Artificial Sequence
  derived and/or modified sequence
  misc_feature (1)..(1): Xaa can be any naturally occurring amino acid
XCAAPAPLTSAERELQQIRINEVKTEISVESKHQTLQGLAFPLQPEAQRALQQLKQKMVNYIQMKLDLERETIELVHTEPTDVAQLPSRVPRDAARYHFFLYKHTHEGDPLESVVFIYSMPGYKCSIKERMLYSSCKSRLLDSVEQDFHLEIAKKGFCRSALHPLSLLVQAIMLAMTLALGTLPAFLPCELQPHGLVNCNWLFLKSVPHFSMAAPRGNVTSLSLSSNRIHHLHDSDFAHLPSLRHLNLKWNCPPVGLSPMHFPCHMTIEPSTFLAVPTLEELNLSYNNIMTVPALPKSLISLSLSHTNILMLDSASLAGLHALRFLFMDGNCYYKNPCRQALEVAPGALLGLGNLTHLSLKYNNLTVVPRNLPSSLEYLLLSYNRIVKLAPEDLANLTALRVLDVGGNCRRCDHAPNPCMECPRHFPQLHPDTFSHLSRLEGLVLKDSSLSWLNASWFRGLGNLRVLDLSENFLYKCITKTKAFQGLTQLRKLNLSFNYQKRVSFAHLSLAPSFGSLVALKELDMHGIFFRSLDETTLRPLARLPMLQTLRLQMNFINQAQLGIFRAFPGLRYVDLSDNRISGASELTATMGEADGGEKVWLQPGDLAPAPVDTPSSEDFRPNCSTLNFTLDLSRNNLVTVQPEMFAQLSHLQCLRLSHNCISQAVNGSQFLPLTGLQVLDLSHNKLDLYHEHSFTELPRLEALDLSYNSQPFGMQGVGHNFSFVAHLRTLRHLSLAHNNIHSQVSQQLCSTSLRALDFSGNALGHMWAEGDLYLHFFQGLSGLIWLDLSQNRLHTLLPQTLRNLPKSLQVLRLRDNYLAFFKWWSLHFLPKLEVLDLAGNQLKALTNGSLPAGTRLRRLDVSCNSISFVAPGFFSKAKELRELNLSANALKTVDHSWFGPLASALQILDVSANPLHCACGAAFMDFLLEVQAAVPGLPSRVKCGSPGQLQGLSIFAQDLRLCLDEALSWDCFALSLLAVALGLGVPMLHHLCGWDLWYCFHLCLAWLPWRGRQSGRDEDALPYDAFVVFDKTQSAVADWVYNELRGQLEECRGRWALRLCLEERDWLPGKTLFENLWASVYGSRKTLFVLAHTDRVSGLLRASFLLAQQRLLEDRKDVVVLVILSPDGRRSRYVRLRQRLCRQSVLLWPHQPSGQRSFWAQLGMALTRDNHHFYNRNFCQGPTAE

SEQ ID NO: 193231 - protein, 1032 aa, Artificial Sequence
  derived and/or modified sequence
MGFCRSALHPLSLLVQAIMLAMTLALGTLPAFLPCELQPHGLVNCNWLFLKSVPHFSMAAPRGNVTSLSLSSNRIHHLHDSDFAHLPSLRHLNLKWNCPPVGLSPMHFPCHMTIEPSTFLAVPTLEELNLSYNNIMTVPALPKSLISLSLSHTNILMLDSASLAGLHALRFLFMDGNCYYKNPCRQALEVAPGALLGLGNLTHLSLKYNNLTVVPRNLPSSLEYLLLSYNRIVKLAPEDLANLTALRVLDVGGNCRRCDHAPNPCMECPRHFPQLHPDTFSHLSRLEGLVLKDSSLSWLNASWFRGLGNLRVLDLSENFLYKCITKTKAFQGLTQLRKLNLSFNYQKRVSFAHLSLAPSFGSLVALKELDMHGIFFRSLDETTLRPLARLPMLQTLRLQMNFINQAQLGIFRAFPGLRYVDLSDNRISGASELTATMGEADGGEKVWLQPGDLAPAPVDTPSSEDFRPNCSTLNFTLDLSRNNLVTVQPEMFAQLSHLQCLRLSHNCISQAVNGSQFLPLTGLQVLDLSHNKLDLYHEHSFTELPRLEALDLSYNSQPFGMQGVGHNFSFVAHLRTLRHLSLAHNNIHSQVSQQLCSTSLRALDFSGNALGHMWAEGDLYLHFFQGLSGLIWLDLSQNRLHTLLPQTLRNLPKSLQVLRLRDNYLAFFKWWSLHFLPKLEVLDLAGNQLKALTNGSLPAGTRLRRLDVSCNSISFVAPGFFSKAKELRELNLSANALKTVDHSWFGPLASALQILDVSANPLHCACGAAFMDFLLEVQAAVPGLPSRVKCGSPGQLQGLSIFAQDLRLCLDEALSWDCFALSLLAVALGLGVPMLHHLCGWDLWYCFHLCLAWLPWRGRQSGRDEDALPYDAFVVFDKTQSAVADWVYNELRGQLEECRGRWALRLCLEERDWLPGKTLFENLWASVYGSRKTLFVLAHTDRVSGLLRASFLLAQQRLLEDRKDVVVLVILSPDGRRSRYVRLRQRLCRQSVLLWPHQPSGQRSFWAQLGMALTRDNHHFYNRNFCQGPTAE

SEQ ID NO: 193232 - DNA, 3561 bp, Artificial Sequence
  derived and/or modified sequence
tgatgcgccgcccccgcccccctgaccagcgccgagagagagctgcagcagatcagaatcaacgaggtgaagaccgagatcagcgtggagagcaagcaccagaccctgcagggcctggccttccccctgcagcccgaggcccagagagccctgcagcagctgaagcagaagatggtgaactacatccagatgaagctggacctggagagagagaccatcgagctggtgcacaccgagcccaccgacgtggcccagctgcccagcagagtgcccagagacgccgccagataccacttcttcctgtacaagcacacccacgagggcgaccccctggagagcgtggtgttcatctacagcatgcccggctacaagtgcagcatcaaggagagaatgctgtacagcagctgcaagagcagactgctggacagcgtggagcaggacttccacctggagatcgccaagaagggcttctgcagaagcgccctgcaccccctgagcctgctggtgcaggccatcatgctggccatgaccctggccctgggcaccctgcccgccttcctgccctgcgagctgcagccccacggcctggtgaactgcaactggctgttcctgaagagcgtgccccacttcagcatggccgcccccagaggcaacgtgaccagcctgagcctgagcagcaacagaatccaccacctgcacgacagcgacttcgcccacctgcccagcctgagacacctgaacctgaagtggaactgcccccccgtgggcctgagccccatgcacttcccctgccacatgaccatcgagcccagcaccttcctggccgtgcccaccctggaggagctgaacctgagctacaacaacatcatgaccgtgcccgccctgcccaagagcctgatcagcctgagcctgagccacaccaacatcctgatgctggacagcgccagcctggccggcctgcacgccctgagattcctgttcatggacggcaactgctactacaagaacccctgcagacaggccctggaggtggcccccggcgccctgctgggcctgggcaacctgacccacctgagcctgaagtacaacaacctgaccgtggtgcccagaaacctgcccagcagcctggagtacctgctgctgagctacaacagaatcgtgaagctggcccccgaggacctggccaacctgaccgccctgagagtgctggacgtgggcggcaactgcagaagatgcgaccacgcccccaacccctgcatggagtgccccagacacttcccccagctgcaccccgacaccttcagccacctgagcagactggagggcctggtgctgaaggacagcagcctgagctggctgaacgccagctggttcagaggcctgggcaacctgagagtgctggacctgagcgagaacttcctgtacaagtgcatcaccaagaccaaggccttccagggcctgacccagctgagaaagctgaacctgagcttcaactaccagaagagagtgagcttcgcccacctgagcctggcccccagcttcggcagcctggtggccctgaaggagctggacatgcacggcatcttcttcagaagcctggacgagaccaccctgagacccctggccagactgcccatgctgcagaccctgagactgcagatgaacttcatcaaccaggcccagctgggcatcttcagagccttccccggcctgagatacgtggacctgagcgacaacagaatcagcggcgccagcgagctgaccgccaccatgggcgaggccgacggcggcgagaaggtgtggctgcagcccggcgacctggcccccgcccccgtggacacccccagcagcgaggacttcagacccaactgcagcaccctgaacttcaccctggacctgagcagaaacaacctggtgaccgtgcagcccgagatgttcgcccagctgagccacctgcagtgcctgagactgagccacaactgcatcagccaggccgtgaacggcagccagttcctgcccctgaccggcctgcaggtgctggacctgagccacaacaagctggacctgtaccacgagcacagcttcaccgagctgcccagactggaggccctggacctgagctacaacagccagcccttcggcatgcagggcgtgggccacaacttcagcttcgtggcccacctgagaaccctgagacacctgagcctggcccacaacaacatccacagccaggtgagccagcagctgtgcagcaccagcctgagagccctggacttcagcggcaacgccctgggccacatgtgggccgagggcgacctgtacctgcacttcttccagggcctgagcggcctgatctggctggacctgagccagaacagactgcacaccctgctgccccagaccctgagaaacctgcccaagagcctgcaggtgctgagactgagagacaactacctggccttcttcaagtggtggagcctgcacttcctgcccaagctggaggtgctggacctggccggcaaccagctgaaggccctgaccaacggcagcctgcccgccggcaccagactgagaagactggacgtgagctgcaacagcatcagcttcgtggcccccggcttcttcagcaaggccaaggagctgagagagctgaacctgagcgccaacgccctgaagaccgtggaccacagctggttcggccccctggccagcgccctgcagatcctggacgtgagcgccaaccccctgcactgcgcctgcggcgccgccttcatggacttcctgctggaggtgcaggccgccgtgcccggcctgcccagcagagtgaagtgcggcagccccggccagctgcagggcctgagcatcttcgcccaggacctgagactgtgcctggacgaggccctgagctgggactgcttcgccctgagcctgctggccgtggccctgggcctgggcgtgcccatgctgcaccacctgtgcggctgggacctgtggtactgcttccacctgtgcctggcctggctgccctggagaggcagacagagcggcagagacgaggacgccctgccctacgacgccttcgtggtgttcgacaagacccagagcgccgtggccgactgggtgtacaacgagctgagaggccagctggaggagtgcagaggcagatgggccctgagactgtgcctggaggagagagactggctgcccggcaagaccctgttcgagaacctgtgggccagcgtgtacggcagcagaaagaccctgttcgtgctggcccacaccgacagagtgagcggcctgctgagagccagcttcctgctggcccagcagagactgctggaggacagaaaggacgtggtggtgctggtgatcctgagccccgacggcagaagaagcagatacgtgagactgagacagagactgtgcagacagagcgtgctgctgtggccccaccagcccagcggccagagaagcttctgggcccagctgggcatggccctgaccagagacaaccaccacttctacaacagaaacttctgccagggccccaccgccgagtag

SEQ ID NO: 193233 - DNA, 3561 bp, Artificial Sequence
  derived and/or modified sequence
tagtgcgctgcaccagcaccactgaccagcgcagaacgcgaactgcagcaaatccgcattaacgaagttaaaactgaaatcagcgtggagagcaagcaccaaacgcttcaaggcttggcatttccgctccaacccgaggcccagcgtgcactgcaacagctcaaacagaagatggtgaactacatccagatgaagttggacctggagcgggagacaatcgagctcgtgcataccgagccaactgatgtggctcaactgccaagtagagtgccacgggacgcggcccggtatcactttttcttgtataaacatacacacgaaggggaccccctcgaatcggtggtgttcatttattctatgccaggatacaagtgtagcatcaaagaaaggatgctctatagctcctgcaaaagccgacttttagactctgttgaacaagactttcacctggaaattgcgaagaaggggttctgtcgctctgccttgcacccactgtctctactcgtgcaggcaatcatgttggccatgacactggcacttggtactctcccagcctttctcccgtgtgagctccagccccatggattggtcaactgcaattggctcttcctgaaaagcgtcccacacttctcgatggctgctcctcgcggaaacgtaacctctctctcactcagctccaacaggatccatcatctccatgatagtgactttgcccacctgccgtccctcaggcacctgaacctgaaatggaactgtcctccggttggattgtcacctatgcacttcccatgtcatatgaccatcgaaccatcgactttcctcgccgtccctactttggaagagttgaatcttagttataataatatcatgacagtgcccgccctacccaaaagtctcatctctctgtccctgtctcacactaatattctgatgttggactcagccagcctggctggattgcatgccctccggttcttgttcatggacggcaattgctattataaaaatccgtgcaggcaggccctggaagttgcccccggagccttactcggcttaggcaacctgactcatcttagcctcaagtataacaacttgactgtggtgcctcgcaatttaccctcctcattggaatacctcctcctgtcatataaccgtatcgtcaaattggctcctgaagacctggccaacctgaccgccctgagagtcctcgatgtgggtggtaattgcagacggtgcgatcacgcgcccaacccgtgcatggagtgtcccaggcacttcccgcagttacaccctgatactttcagtcatctgtctaggctggaggggcttgtgttgaaggattctagtctcagttggttgaacgcgtcttggtttagggggcttggcaacctgcgagtcctggacctgtctgaaaactttctatacaaatgcattaccaaaaccaaagcctttcaggggcttacccagctcaggaaacttaatctcagttttaactaccagaaacgggtatcctttgcacatctcagccttgcaccaagttttggatccctggtcgccttgaaggaactggacatgcatgggattttctttcgctcactggatgagacaaccctcagacctctggcaaggctgccaatgctccagacccttaggttacagatgaatttcattaatcaagcccagctggggattttcagggcattcccggggttacgatatgtggacttaagcgataaccgcatctcgggtgcctccgaattgacggcaactatgggtgaagcagacggcggtgagaaggtgtggttgcagccaggtgacctggcccccgctcccgttgacacacctagtagcgaggacttcagacccaattgtagtacactcaactttacgctcgatctcagccggaacaatctagtcacagtgcaaccagaaatgtttgcccagttgagccatctgcagtgtttgagactgtctcacaactgcatttcccaagcagttaacgggtcccagtttttaccgcttaccgggctgcaggtgctggatctttctcataacaagctggacctgtatcacgaacactcttttacagagctaccaagactggaagccctggatctgtcgtacaattcccaacccttcggaatgcagggagtcggccacaacttcagcttcgtggctcatctgaggaccctccgtcacctcagcctcgcccataacaatatacattcacaggtgtcccagcagctgtgctctactagcctgagggcacttgacttctccggcaacgccctggggcatatgtgggccgagggcgatctgtacctccacttctttcagggcctgagcgggctcatttggttggatctgtctcagaaccgactccatacgcttttgccacagaccctgaggaatctcccaaagtctctgcaggtcctgcggctccgggacaattacctggcctttttcaagtggtggtctttgcacttcctgccaaaactcgaggtgctggatctggccggaaatcagctgaaggccttgacgaatggcagtctgcccgcaggaacacgattgagacgtctagatgtgagttgcaacagtatcagcttcgtcgcccccggattcttttcaaaagccaaagagctgcgagaactgaatctttctgcaaatgccctcaagactgtggaccactcctggttcggacctctggcgagcgccctgcagatcttggatgtgtctgccaatccattacattgtgcctgtggcgccgcattcatggatttcctcctcgaggtccaagcagcagtgcccggtctgccgagcagagttaaatgtggcagtcctgggcagcttcaaggactctctatcttcgcccaggacctgagactgtgtcttgatgaagctctgagttgggattgtttcgccctttctctgctggcagtggctttggggctcggcgttcctatgctccaccatttatgcggctgggatttgtggtactgtttccatttgtgcctggcttggctgccatggcgtggtaggcaaagtggcagagacgaggacgccctcccttatgatgctttcgtcgtttttgataaaactcagagcgccgtagcggactgggtctataatgaactcaggggccaactggaagaatgtcggggacgttgggccttaagactgtgtttggaggaacgggattggttgcctggtaaaactctatttgaaaatctttgggccagcgtctacggatctcgaaagacgctgttcgtcctggcccatacagatagggtgtcaggactgctccgggcatcattcctgctggcccaacaaaggctactcgaagaccggaaggacgtggtggttctggtaatcctttcgccggatggcagacgctcacgatatgtgaggctgaggcagcgactgtgcaggcagagtgtgcttctgtggcctcatcaacccagcggccagaggagcttttgggcccagcttgggatggctcttacccgggacaatcatcacttctacaatcggaacttctgtcagggccccactgccgagtag

SEQ ID NO: 193234 - DNA, 3561 bp, Artificial Sequence
  derived and/or modified sequence
tgatgtgccgccccagcccccctgaccagcgctgagcgggagctgcagcagatccgcatcaatgaggtgaagacagagatctctgtggagagcaagcaccagaccctgcagggcctggccttccccctgcagcctgaggcccagagggccctgcagcagctgaagcagaagatggtgaactacatccagatgaagctggacctggagcgggagaccatcgagctggtgcacacagagcccacagatgtggcccagctgcccagccgggtgcccagagatgctgcccgctaccacttcttcctgtacaagcacacccatgaaggagaccccctggagagcgtggtgttcatctacagcatgcctggctacaagtgcagcatcaaggagaggatgctgtacagcagctgcaagagccggctgctggacagcgtggagcaggacttccacctggagatcgccaagaagggcttctgccgcagcgccctgcaccccctgagcctgctggtgcaggccatcatgctggccatgaccctggccctgggcaccctgcctgccttcctgccctgtgagctgcagccccacggcctggtgaactgcaactggctgttcctgaagtctgtgccccacttctccatggccgcccccagaggaaatgtgaccagcctgagcctgagcagcaaccgcatccaccacctgcatgacagcgactttgcccacctgcccagcctgcggcacctgaacctgaagtggaactgcccccctgtgggcctgagccccatgcacttcccctgccacatgaccatcgagcccagcaccttcctggccgtgcccaccctggaggagctgaacctgagctacaacaacatcatgacagtgcctgccctgcccaagagcctcatcagcctgagcctgagccacaccaacatcctgatgctggacagcgccagcctggccggcctgcacgccctgcgcttcctgttcatggatggcaactgctactacaagaacccctgccggcaggccctggaggtggcccctggggccctgctgggcctgggcaacctgacccacctgagcctgaagtacaacaacctgactgtggtgcccaggaacctgcccagcagcctggagtacctgctgctgagctacaaccgcatcgtgaagctggcccctgaggacctggccaacctgacagccctgcgggtgctggatgtgggcggcaactgccgccgctgtgaccacgcccccaacccctgcatggagtgccccaggcacttcccccagctgcacccagacaccttcagccacctgagccggctggagggcctggtgctgaaggacagcagcctgtcctggctgaatgcctcctggttccggggcctgggcaacctgcgggtgctggacctgtctgagaacttcctgtacaagtgcatcaccaagaccaaggccttccagggcctgacccagctgaggaagctgaacctgtccttcaactaccagaagagggtgtcctttgcccacctgagcctggcccccagctttggcagcctggtggccctgaaggagctggacatgcacggcatcttcttccgcagcctggatgagaccaccctgcggcccctggcccggctgcccatgctgcagaccctgcggctgcagatgaacttcatcaaccaggcccagctgggcatcttccgggccttccctggcctgcgctacgtggacctgagtgacaaccgcatcagcggggccagcgagctgacagccaccatgggagaggctgatggaggagagaaggtgtggctgcagcccggggacctggccccagcccctgtggacacccccagcagcgaggacttccggcccaactgcagcaccctgaacttcaccctggacctgagcaggaacaacctggtgacagtgcagcctgagatgtttgcccagctgagccacctgcagtgcctgcggctgagccacaactgcatcagccaggccgtgaatggcagccagttcctgcccctgaccggcctgcaggtgctggacctgagccacaacaagctggacctgtaccacgagcacagcttcacagagctgccccggctggaggccctggacctgagctacaacagccagcccttcggcatgcagggcgtgggccacaacttctcctttgtggcccacctgcggaccctgcggcacctgagcctggcccacaacaacatccacagccaggtgtcccagcagctgtgcagcaccagcctgcgggccctggacttctctggaaatgccctgggccacatgtgggccgagggggacctgtacctgcacttcttccagggcctgagcggcctcatctggctggacctgagccagaaccggctgcacaccctgctgccccagaccctgaggaacctgcccaagagcctgcaggtgctgcggctgcgggacaactacctggccttcttcaagtggtggagcctgcacttcctgcccaagctggaggtgctggacctggccggcaaccagctgaaggccctgaccaacggcagcctgcctgctggcacccggctgcggcggctggatgtgtcctgcaacagcatcagctttgtggcccctggcttcttcagcaaggccaaggagctgcgggagctgaacctgagcgccaatgccctgaagacagtggaccacagctggtttggccccctggccagcgccctgcagatcctggatgtgtctgccaaccccctgcactgtgcctgtggggccgccttcatggacttcctgctggaggtgcaggccgctgtgcccggcctgcccagccgggtgaagtgtggcagccctggccagctgcagggcctgagcatctttgcccaggacctgcggctgtgcctggatgaggccctgtcctgggactgctttgccctgagcctgctggccgtggccctgggcctgggcgtgcccatgctgcaccacctgtgtggctgggacctgtggtactgcttccacctgtgcctggcctggctgccctggaggggccggcagagcggcagagatgaagatgccctgccctatgatgcctttgtggtgtttgacaagacccagagcgctgtggccgactgggtgtacaatgagctgcggggccagctggaggagtgccggggccgctgggccctgcggctgtgcctggaggagcgggactggctgcccgggaagaccctgtttgagaacctgtgggcctctgtgtatggcagcaggaagaccctgtttgtgctggcccacacagacagagtgtctggcctgctgcgggccagcttcctgctggcccagcagaggctgctggaggacaggaaggatgtggtggtgctggtgatcctgagcccagatggccgccgcagccgctacgtgcggctgcggcagaggctgtgccggcagagcgtgctgctgtggccccaccagcccagcggccagaggagcttctgggcccagctgggcatggccctgacccgggacaaccaccacttctacaacagaaacttctgccagggccccacagctgagtag

SEQ ID NO: 193235 - DNA, 3561 bp, Artificial Sequence
  derived and/or modified sequence
tgatgcgccgcccccgcccccctgaccagcgccgagcgggagctgcagcagatacggatcaatgaggtgaagacagaaatatctgtggaatccaagcaccagaccttacaggggcttgccttccccctacagcccgaggctcaacgcgctctccagcagctcaagcagaagatggttaactacatccagatgaaactggacctcgaaagggaaacaatcgagctggtgcataccgaaccaacagatgtggcccagttaccgtcaagggttcccagggacgcggccagataccattttttcctatataaacatactcacgagggggatcccctggagtcagtggtgttcatatactcaatgcccggttataaatgctctatcaaagagaggatgctttactctagctgcaagtctagactactggatagcgtggagcaggactttcacttggaaattgccaaaaaagggttttgtaggagcgccctgcatccactgagcttgcttgtccaggcgatcatgctggccatgacattagcgctcggcaccctgccagctttcctaccatgtgaactgcagccacacgggctcgtcaactgcaattggctattcttgaagagcgtgccacacttttccatggctgcccccagagggaatgtcacatcactcagcctgtcatctaaccgaatccatcatctgcatgacagcgatttcgcccatctaccttccctgcggcatctcaacctcaaatggaactgcccacccgttggcctgagccctatgcatttcccctgtcatatgacaattgaaccctccaccttcctggctgtgcctacactagaagagctgaacctgtcctacaataacatcatgactgtgcccgccctgccaaaaagccttatttcactgtcgctatctcacacaaatatactgatgttggattccgcctctcttgcggggttgcacgcactacggtttctattcatggacggaaactgctattataaaaacccgtgtagacaggccctcgaggttgcgccaggcgccctgcttgggctgggcaacctgacccacttatcacttaagtacaacaacctgaccgtagtccctcgcaatctgccatcgagcctggaatacctgctgctaagctacaacagaatagtaaagctggcaccagaggacttggccaatctgacagcattaagggtgttggacgtgggcggcaattgccggagatgcgatcatgctcctaacccatgtatggagtgcccacggcacttccctcaactgcatccggacaccttctcccacctatctcgcttagagggtttggttctcaaggatagcagtttgtcctggctgaacgctagctggtttagagggctcggcaaccttcgtgtacttgatctatccgagaattttttgtacaagtgcattactaagaccaaggccttccaaggactgacacagcttcgtaagctgaacctcagttttaattatcagaaacgcgtgagttttgcccacttgtcgctcgcgccctccttcggttcattggtggccctgaaggaactagatatgcatggaatattttttcgaagcctggacgagaccacccttcgccctttagcaagactgcctatgctgcagaccctacggttgcagatgaacttcatcaaccaggcacaacttggcatcttcagggcattcccaggattgagatatgtggacctatccgataatcggatttctggtgcctctgagctgactgcgacaatgggtgaggccgatggaggggagaaggtttggctgcagccaggggacctggcgcctgcccctgtagacactcctagctctgaagacttccgccccaattgctctactctgaatttcaccctggacctgtctcgcaacaaccttgtgaccgtacaaccagagatgttcgcccaactgtctcacctccaatgcctgcgtctgagccacaactgcatttcacaagccgtcaacgggtcgcagttcctgccactgaccggactccaggttctcgatctgtcgcataacaagctcgacctgtaccatgagcacagctttactgaactgcctagattggaggccttggatctgagctataatagccagccattcgggatgcagggggtcggacacaacttttcttttgtggcccaccttcgcactctgagacatctgtcactagcccacaacaatattcacagtcaggtgtcccagcagctgtgtagcaccagtctcagagccctcgacttctccggaaacgctcttgggcatatgtgggctgagggcgacctttacttgcacttttttcaggggctctccggattgatctggctggatctatctcagaatcgcttacacacactgctgccccagacccttcgaaatctccctaaatctctacaggttctgcgtttgagagataattacttggcattcttcaaatggtggagtctgcactttctcccaaaactcgaagttctggacctggcaggaaatcagttgaaggcacttaccaatgggagtctccccgccggaacacggctcaggaggctggacgtgtcatgtaactccatctctttcgttgctccaggttttttttcaaaagctaaagaactgagagagctcaatttgtctgcgaacgctcttaaaactgtggaccactcttggtttgggccattggcctctgctttgcagattctggacgtgtcagccaacccgctgcattgcgcttgcggagccgccttcatggacttcctgctagaggtgcaggccgccgtgcccggcctccctagcagggtgaagtgcggctcacctggccagctgcaaggactctcgatcttcgcccaggaccttagattgtgtctcgacgaggcgctgtcttgggattgtttcgcactctcactcctcgcagtggctcttggactgggagtgcctatgcttcatcacctgtgcggctgggacctatggtattgcttccacttatgtctggcgtggctcccctggagaggacgtcagagcggcagggatgaggatgcgctaccctatgatgctttcgtcgtatttgataaaacccagagcgctgtcgccgattgggtatacaacgaactcaggggccagctcgaagaatgtcgcggacggtgggcccttcggctgtgcctagaagaacgggattggctgccagggaaaactctattcgagaacttgtgggccagtgtatacgggtccagaaaaacactattcgtcctagctcacactgacagggtgtcagggctgttgagagcctcgtttctgttagcacagcagaggctgctggaggacaggaaggatgtagtcgttcttgtcatccttagccccgacggccgacggtcaagatacgtgagacttagacaacggttatgcagacaaagcgttctgctgtggccccatcagccctcgggtcagcgttccttctgggcccagcttggaatggccctgacacgtgacaaccaccatttttataatcggaatttctgtcaggggccgactgctgagtag

SEQ ID NO: 193236 - DNA, 3561 bp, Artificial Sequence
  derived and/or modified sequence
tgatgcgccgcaccagctcccctcacgagtgcggaacgcgagctgcagcagataaggatcaatgaggtgaagacggagattagtgtggagtctaagcatcagactctacagggactggctttcccactgcagccggaggcccagagggccttgcagcaactgaaacagaagatggtgaattacatccagatgaaacttgatttggaaagagagactatcgaactggtgcacaccgaacccacagacgttgctcagctcccaagtcgggtaccaagagacgccgctagataccacttctttctctataaacacacacatgaaggagaccctttggagtcagttgtttttatttacagtatgccagggtacaaatgctccattaaagaacgcatgctttattcttcctgcaagtcccgccttctggactcagtcgaacaggactttcacttggagattgctaaaaagggcttctgtagaagtgccctgcatccattaagcctgctggtccaggccatcatgcttgctatgacactggcactggggaccctcccagctttcttaccttgcgagcttcagccccatggactggtaaactgcaattggttgttcctgaaaagtgtccctcacttctctatggcagcacccagaggcaatgtgacaagcttgtcccttagcagtaaccgtattcatcatttgcatgattccgatttcgcccatttgccctctctgaggcatctcaacttaaagtggaattgtcctcccgtaggcctgagtcctatgcatttcccatgccatatgacgattgagccaagtacctttctagcagttcccaccttggaagagctcaacctgtcttacaacaacattatgacggtacctgctttgccaaaaagtctcattagtttgagcctgtctcacactaacatcttgatgttagattcagcttctctcgccggtctgcacgccttgcgattcctctttatggatggcaactgctattacaaaaatccttgtcggcaggccctggaggtagctcctggtgctttgctgggacttgggaacctgacccacctctcgctgaaatataataatctcacagttgttccccgaaatctccccagctctctggagtatctcctcttgagctacaataggattgtgaaacttgccccagaggacctggccaacctgactgccctccgcgtgctggacgtggggggaaactgcaggcggtgcgaccatgccccaaatccgtgtatggagtgtcccagacactttccacaattgcatccagatactttcagccatctctccagactcgagggactggtgctgaaagattcaagtctgtcgtggctgaatgcatcctggttccggggtctaggcaacctgagagtgctggatctctcggagaattttctctataaatgtatcacaaagacgaaggcctttcagggccttacccagttacgaaagcttaacctgtcctttaattaccagaagcgagtctcctttgcgcatctgagcctggccccatcctttgggtccctcgtagctcttaaggagctggatatgcacggtatatttttcagatctctggatgaaactacgctccgccctctggctcgcctcccaatgctccagacactgagactccaaatgaatttcatcaaccaggcgcagcttggaattttcagggcgttccccggactgagatatgttgacctgtcagacaataggatttctggcgcaagtgaactgactgcaaccatgggcgaagctgacggcggtgagaaggtgtggctccagcccggagacctcgcaccagcccctgttgataccccgtcatcagaagactttcgaccaaattgttccacactgaactttaccctggatctatccaggaataatctggtcacggtacaacctgagatgtttgcccagctgtcacaccttcaatgcctcaggctctcgcacaactgcattagccaagccgttaatggctctcagtttctgcccttaaccggcttgcaggtgctcgatctttctcacaataaactggatctataccacgagcatagcttcacagagctgccgaggctagaagccctggatttgagctacaattcgcagccatttggcatgcagggggtaggacataacttctcctttgtcgcacatctgcggaccctaagacacttgagtctggcacacaacaacatccacagccaagtgtcacagcagctgtgctctaccagtttaagagctctggatttcagtgggaacgccttggggcatatgtgggcagaaggcgatctgtatctgcacttcttccagggcctctcaggcctgatctggcttgacctgtctcagaatcggcttcatacactgttgccccagaccctgcgcaatcttcccaagtctcttcaagtgctgcgactacgtgacaattacttggccttcttcaaatggtggtcactgcacttcctgccgaagctggaagtcctagatctggctggtaaccagcttaaggctcttactaacgggtccctgcctgccggtacaaggctccgcagactggatgtatcttgtaatagcatcagtttcgtggccccaggtttctttagtaaggcgaaggaactcagggaactgaacctgtctgccaatgcccttaaaacagtggaccatagctggttcggaccgctcgcctcagcccttcagatacttgacgtgtctgccaacccgcttcactgtgcatgcggcgctgctttcatggacttcttacttgaggtccaggctgcggtgcccggattgcccagtagagtaaagtgtgggagtccgggtcagctgcagggattgtctatttttgcccaagacttacgtctgtgcctcgatgaagcgctgtcttgggattgtttcgccctgagccttctggcagtggccttaggcctaggcgtcccaatgctacaccacctatgcggatgggacctgtggtactgcttccacctatgtctcgcttggttgccttggcgaggcaggcagtcgggcagagacgaagatgcccttccatacgatgctttcgtggtgttcgataaaacccagagtgcggtcgcagactgggtgtataatgaacttcggggacagcttgaagaatgccgaggccgatgggccttgcggctgtgcctagaggagagagattggctgcccggtaaaacgttatttgaaaacttatgggcgagcgtgtacggctccaggaagaccttgtttgtgttggctcacacagacagggtctccggcttattgagggcatcttttctcctggcccagcagaggctgctcgaggatcgaaaggacgtagtcgtgcttgttattctgtccccagacgggaggcgatcccgatacgtgagattgcgtcagcggctttgccgccaaagcgtcctgctatggccacaccagccctccgggcagcgctctttctgggcccagctaggtatggctttgacgagagataaccatcacttttacaatcgcaacttctgtcagggacctacagccgaatag

SEQ ID NO: 193237 - DNA, 3695 bp, Artificial Sequence
  derived and/or modified sequence
ctgtgcggcacctgccccgctgacctcggctgagagagagctccagcagatccgcattaacgaggtgaagacagagatcagtgtggaaagcaagcaccagaccctgcagggcctcgccttccccctgcagcctgaggcccagcgggcactccagcagctcaagcagaaaatggtcaactacatccagatgaagctggacctagagcgggaaaccattgagctggtgcacacagagcccacggatgtggcccagctgccctcccgggtgccccgagatgctgcccgctaccacttcttcctctacaagcacacccatgagggcgacccccttgagtctgtagtgttcatctactccatgccggggtacaagtgcagcatcaaggagcgaatgctctactccagctgcaagagccgcctcctcgactccgtggagcaggacttccatctggagatcgccaagaaaggtttctgccgcagcgccctgcacccgctgtctctcctggtgcaggccatcatgctggccatgaccctggccctgggtaccttgcctgccttcctaccctgtgagctccagccccacggcctggtgaactgcaactggctgttcctgaagtctgtgccccacttctccatggcagcaccccgtggcaatgtcaccagcctttccttgtcctccaaccgcatccaccacctccatgattctgactttgcccacctgcccagcctgcggcatctcaacctcaagtggaactgcccgccggttggcctcagccccatgcacttcccctgccacatgaccatcgagcccagcaccttcttggctgtgcccaccctggaagagctaaacctgagctacaacaacatcatgactgtgcctgcgctgcccaaatccctcatatccctgtccctcagccataccaacatcctgatgctagactctgccagcctcgccggcctgcatgccctgcgcttcctattcatggacggcaactgttattacaagaacccctgcaggcaggcactggaggtggccccgggtgccctccttggcctgggcaacctcacccacctgtcactcaagtacaacaacctcactgtggtgccccgcaacctgccttccagcctggagtatctgctgttgtcctacaaccgcatcgtcaaactggcgcctgaggacctggccaatctgaccgccctgcgtgtgctcgatgtgggcggaaattgccgccgctgcgaccacgctcccaacccctgcatggagtgccctcgtcacttcccccagctacatcccgataccttcagccacctgagccgtcttgaaggcctggtgttgaaggacagttctctctcctggctgaatgccagttggttccgtgggctgggaaacctccgagtgctggacctgagtgagaacttcctctacaaatgcatcactaaaaccaaggccttccagggcctaacacagctgcgcaagcttaacctgtccttcaattaccaaaagagggtgtcctttgcccacctgtctctggccccttccttcgggagcctggtcgccctgaaggagctggacatgcacggcatcttcttccgctcactcgatgagaccacgctccggccactggcccgcctgcccatgctccagactctgcgtctgcagatgaacttcatcaaccaggcccagctcggcatcttcagggccttccctggcctgcgctacgtggacctgtcggacaaccgcatcagcggagcttcggagctgacagccaccatgggggaggcagatggaggggagaaggtctggctgcagcctggggaccttgctccggccccagtggacactcccagctctgaagacttcaggcccaactgcagcaccctcaacttcaccttggatctgtcacggaacaacctggtgaccgtgcagccggagatgtttgcccagctctcgcacctgcagtgcctgcgcctgagccacaactgcatctcgcaggcagtcaatggctcccagttcctgccgctgaccggtctgcaggtgctagacctgtcccacaataagctggacctctaccacgagcactcattcacggagctaccgcgactggaggccctggacctcagctacaacagccagccctttggcatgcagggcgtgggccacaacttcagcttcgtggctcacctgcgcaccctgcgccacctcagcctggcccacaacaacatccacagccaagtgtcccagcagctctgcagtacgtcgctgcgggccctggacttcagcggcaatgcactgggccatatgtgggccgagggagacctctatctgcacttcttccaaggcctgagcggtttgatctggctggacttgtcccagaaccgcctgcacaccctcctgccccaaaccctgcgcaacctccccaagagcctacaggtgctgcgtctccgtgacaattacctggccttctttaagtggtggagcctccacttcctgcccaaactggaagtcctcgacctggcaggaaaccagctgaaggccctgaccaatggcagcctgcctgctggcacccggctccggaggctggatgtcagctgcaacagcatcagcttcgtggcccccggcttcttttccaaggccaaggagctgcgagagctcaaccttagcgccaacgccctcaagacagtggaccactcctggtttgggcccctggcgagtgccctgcaaatactagatgtaagcgccaaccctctgcactgcgcctgtggggcggcctttatggacttcctgctggaggtgcaggctgccgtgcccggtctgcccagccgggtgaagtgtggcagtccgggccagctccagggcctcagcatctttgcacaggacctgcgcctctgcctggatgaggccctctcctgggactgtttcgccctctcgctgctggctgtggctctgggcctgggtgtgcccatgctgcatcacctctgtggctgggacctctggtactgcttccacctgtgcctggcctggcttccctggcgggggcggcaaagtgggcgagatgaggatgccctgccctacgatgccttcgtggtcttcgacaaaacgcagagcgcagtggcagactgggtgtacaacgagcttcgggggcagctggaggagtgccgtgggcgctgggcactccgcctgtgcctggaggaacgcgactggctgcctggcaaaaccctctttgagaacctgtgggcctcggtctatggcagccgcaagacgctgtttgtgctggcccacacggaccgggtcagtggtctcttgcgcgccagcttcctgctggcccagcagcgcctgctggaggaccgcaaggacgtcgtggtgctggtgatcctgagccctgacggccgccgctcccgctacgtgcggctgcgccagcgcctctgccgccagagtgtcctcctctggccccaccagcccagtggtcagcgcagcttctgggcccagctgggcatggccctgaccagggacaaccaccacttctataaccggaacttctgccagggacccacggccgaatagccgtgagccggaatcctgcacggtgccacctccacactcacctcacctctgcctgcctggtctgaccctcccctgctcgcctccctcaccccacacctgacacagagcaggcactcaataaatgctaccgaaggct

SEQ ID NO: 193238 - DNA, 3099 bp, Artificial Sequence
  derived and/or modified sequence
atgggcttctgcagaagcgccctgcaccccctgagcctgctggtgcaggccatcatgctggccatgaccctggccctgggcaccctgcccgccttcctgccctgcgagctgcagccccacggcctggtgaactgcaactggctgttcctgaagagcgtgccccacttcagcatggccgcccccagaggcaacgtgaccagcctgagcctgagcagcaacagaatccaccacctgcacgacagcgacttcgcccacctgcccagcctgagacacctgaacctgaagtggaactgcccccccgtgggcctgagccccatgcacttcccctgccacatgaccatcgagcccagcaccttcctggccgtgcccaccctggaggagctgaacctgagctacaacaacatcatgaccgtgcccgccctgcccaagagcctgatcagcctgagcctgagccacaccaacatcctgatgctggacagcgccagcctggccggcctgcacgccctgagattcctgttcatggacggcaactgctactacaagaacccctgcagacaggccctggaggtggcccccggcgccctgctgggcctgggcaacctgacccacctgagcctgaagtacaacaacctgaccgtggtgcccagaaacctgcccagcagcctggagtacctgctgctgagctacaacagaatcgtgaagctggcccccgaggacctggccaacctgaccgccctgagagtgctggacgtgggcggcaactgcagaagatgcgaccacgcccccaacccctgcatggagtgccccagacacttcccccagctgcaccccgacaccttcagccacctgagcagactggagggcctggtgctgaaggacagcagcctgagctggctgaacgccagctggttcagaggcctgggcaacctgagagtgctggacctgagcgagaacttcctgtacaagtgcatcaccaagaccaaggccttccagggcctgacccagctgagaaagctgaacctgagcttcaactaccagaagagagtgagcttcgcccacctgagcctggcccccagcttcggcagcctggtggccctgaaggagctggacatgcacggcatcttcttcagaagcctggacgagaccaccctgagacccctggccagactgcccatgctgcagaccctgagactgcagatgaacttcatcaaccaggcccagctgggcatcttcagagccttccccggcctgagatacgtggacctgagcgacaacagaatcagcggcgccagcgagctgaccgccaccatgggcgaggccgacggcggcgagaaggtgtggctgcagcccggcgacctggcccccgcccccgtggacacccccagcagcgaggacttcagacccaactgcagcaccctgaacttcaccctggacctgagcagaaacaacctggtgaccgtgcagcccgagatgttcgcccagctgagccacctgcagtgcctgagactgagccacaactgcatcagccaggccgtgaacggcagccagttcctgcccctgaccggcctgcaggtgctggacctgagccacaacaagctggacctgtaccacgagcacagcttcaccgagctgcccagactggaggccctggacctgagctacaacagccagcccttcggcatgcagggcgtgggccacaacttcagcttcgtggcccacctgagaaccctgagacacctgagcctggcccacaacaacatccacagccaggtgagccagcagctgtgcagcaccagcctgagagccctggacttcagcggcaacgccctgggccacatgtgggccgagggcgacctgtacctgcacttcttccagggcctgagcggcctgatctggctggacctgagccagaacagactgcacaccctgctgccccagaccctgagaaacctgcccaagagcctgcaggtgctgagactgagagacaactacctggccttcttcaagtggtggagcctgcacttcctgcccaagctggaggtgctggacctggccggcaaccagctgaaggccctgaccaacggcagcctgcccgccggcaccagactgagaagactggacgtgagctgcaacagcatcagcttcgtggcccccggcttcttcagcaaggccaaggagctgagagagctgaacctgagcgccaacgccctgaagaccgtggaccacagctggttcggccccctggccagcgccctgcagatcctggacgtgagcgccaaccccctgcactgcgcctgcggcgccgccttcatggacttcctgctggaggtgcaggccgccgtgcccggcctgcccagcagagtgaagtgcggcagccccggccagctgcagggcctgagcatcttcgcccaggacctgagactgtgcctggacgaggccctgagctgggactgcttcgccctgagcctgctggccgtggccctgggcctgggcgtgcccatgctgcaccacctgtgcggctgggacctgtggtactgcttccacctgtgcctggcctggctgccctggagaggcagacagagcggcagagacgaggacgccctgccctacgacgccttcgtggtgttcgacaagacccagagcgccgtggccgactgggtgtacaacgagctgagaggccagctggaggagtgcagaggcagatgggccctgagactgtgcctggaggagagagactggctgcccggcaagaccctgttcgagaacctgtgggccagcgtgtacggcagcagaaagaccctgttcgtgctggcccacaccgacagagtgagcggcctgctgagagccagcttcctgctggcccagcagagactgctggaggacagaaaggacgtggtggtgctggtgatcctgagccccgacggcagaagaagcagatacgtgagactgagacagagactgtgcagacagagcgtgctgctgtggccccaccagcccagcggccagagaagcttctgggcccagctgggcatggccctgaccagagacaaccaccacttctacaacagaaacttctgccagggccccaccgccgagtag

SEQ ID NO: 193239 - DNA, 3099 bp, Artificial Sequence
  derived and/or modified sequence
atgggcttttgtagatcggcactgcacccactatctctcctcgtgcaggccatcatgttagcaatgaccttagccttgggaacactacctgcattcttgccctgtgaactgcaacctcatggtctcgtcaactgcaactggcttttccttaagagtgtcccacatttcagcatggcagctccaagggggaatgtgacttctttatccctgtcctctaatcggattcaccatttacatgatagcgactttgcgcacctgcccagcttgcgccatttaaatctcaagtggaactgccctcccgtgggcctctctcctatgcacttcccatgccatatgactatcgagccctcgacatttttggccgtgcccactctcgaagagcttaatctgtcatacaataacattatgacggttccggcccttcctaaatctctgatctccctgtcactcagccatacaaacatcctgatgttggactctgcaagcctcgcaggccttcacgcccttcgctttttatttatggacggtaattgttattataagaacccatgtcggcaagctttagaggtcgctccaggggcactgctcggactagggaatcttacgcatctgagcctgaagtacaataacctaaccgtcgtgcctcgaaacctgccttcttcccttgagtacctcctcctgtcatataacaggattgtcaagctggcaccagaggacctggcaaatctcacagccctcagagtcctggatgtggggggcaactgccggcggtgtgaccacgcccccaatccctgcatggaatgtccgagacacttccctcagctgcaccctgacactttctcacacttgagtcggctcgaaggcctggtcctgaaggattctagtctgtcttggctcaacgcttcttggttccgcggtttgggtaatttgagagtcctggatctgagcgaaaatttcctgtataagtgcattaccaagacaaaagcctttcaggggctaacccagctgcggaagctgaatctgagcttcaattatcaaaaacgtgtgagcttcgcacacctgagtctggcccctagctttggctcactcgtggcactcaaagagttagacatgcatggtatattcttccggtccctggacgaaaccactcttcgcccgctcgcccgtctgccaatgctgcagacgctgcgcttacagatgaacttcatcaaccaggcccaattaggaatttttcgggcctttcccggtctgcggtacgtggatctctccgataatcggatatctggggcaagcgaactgacggcaacaatgggcgaggccgatggaggagagaaggtgtggctccagcccggggatctggccccagccccagtcgacacaccaagctccgaagactttcgacccaattgcagtaccttgaattttaccctggatttgtctcggaataaccttgtaactgtgcagcctgaaatgttcgcccagctgtctcatctccaatgtctccgactctcccacaattgcatttcccaggccgtcaatggttctcagtttctcccccttactggcctgcaagttctggacctctcccataacaagctggatctctaccatgagcattccttcaccgagctgccccgactggaggcattggatttgagctacaactctcagccttttggaatgcagggcgttggccataatttcagctttgtggcgcatctccgtacactccggcatcttagtttggctcataacaatattcacagccaagtaagtcaacagctttgttcaacgtctcttcgagcattagacttttctgggaatgccctcggccacatgtgggccgagggggacctgtacctgcatttctttcaaggcctttccggattgatttggttagatctctcacaaaatcgtcttcacaccttactgcctcaaactctccggaatttgcctaagagtcttcaggtcctcagactgcgggataattatctggccttctttaaatggtggagccttcactttctcccaaaacttgaggtactggacttggctggcaatcagctgaaggccctcacaaacggaagccttcccgcaggtaccaggcttaggcgcctcgacgtctcctgtaatagtattagcttcgtcgcccccggtttcttcagcaaagccaaagagctcagggagcttaacctgtccgctaatgctctgaagacagtggatcactcttggtttggtcccttagctagtgccctgcagattctcgatgtgtcagccaatccactgcactgtgcatgcggtgccgcctttatggattttttgctggaggtgcaagctgccgtccccggcctgccttccagagtcaaatgtggtagtccaggacaactgcaaggcctgtcaatctttgcgcaagacctcaggttgtgcctcgacgaagcactatcgtgggattgcttcgctttgtccttactcgcagtcgcattggggctcggagtgcctatgctgcatcacctgtgtggctgggatctgtggtactgcttccatctgtgtttggcatggctcccttggagagggaggcagagtggacgagatgaagacgcgctaccctacgatgcttttgtggtcttcgacaaaacgcagtcagctgttgctgactgggtgtacaacgaactgaggggacagcttgaagagtgccggggaaggtgggccttgaggttatgcctcgaggagagggactggctgcctggcaaaaccctgttcgagaacctctgggctagcgtatatgggagtaggaagacactgttcgtgcttgcgcacaccgatcgagtatcaggactgcttcgtgcaagtttcctactggcacagcagagactgttagaggataggaaagatgtcgtagtgttggtgatcctgagccctgacggtcgacgaagtaggtatgtccgactgcgtcagcggctgtgtcggcagagcgtgttactctggccccatcagccttccggacagagaagcttctgggcccaacttggcatggcccttaccagagataaccaccacttctataacagaaatttttgtcaaggaccgacagcggagtag

SEQ ID NO: 193240 - DNA, 3099 bp, Artificial Sequence
  derived and/or modified sequence
atgggcttctgccgcagcgccctgcaccccctgagcctgctggtgcaggccatcatgctggccatgaccctggccctgggcaccctgcctgccttcctgccctgtgagctgcagccccacggcctggtgaactgcaactggctgttcctgaagtctgtgccccacttctccatggccgcccccagaggaaatgtgaccagcctgagcctgagcagcaaccgcatccaccacctgcatgacagcgactttgcccacctgcccagcctgcggcacctgaacctgaagtggaactgcccccctgtgggcctgagccccatgcacttcccctgccacatgaccatcgagcccagcaccttcctggccgtgcccaccctggaggagctgaacctgagctacaacaacatcatgacagtgcctgccctgcccaagagcctcatcagcctgagcctgagccacaccaacatcctgatgctggacagcgccagcctggccggcctgcacgccctgcgcttcctgttcatggatggcaactgctactacaagaacccctgccggcaggccctggaggtggcccctggggccctgctgggcctgggcaacctgacccacctgagcctgaagtacaacaacctgactgtggtgcccaggaacctgcccagcagcctggagtacctgctgctgagctacaaccgcatcgtgaagctggcccctgaggacctggccaacctgacagccctgcgggtgctggatgtgggcggcaactgccgccgctgtgaccacgcccccaacccctgcatggagtgccccaggcacttcccccagctgcacccagacaccttcagccacctgagccggctggagggcctggtgctgaaggacagcagcctgtcctggctgaatgcctcctggttccggggcctgggcaacctgcgggtgctggacctgtctgagaacttcctgtacaagtgcatcaccaagaccaaggccttccagggcctgacccagctgaggaagctgaacctgtccttcaactaccagaagagggtgtcctttgcccacctgagcctggcccccagctttggcagcctggtggccctgaaggagctggacatgcacggcatcttcttccgcagcctggatgagaccaccctgcggcccctggcccggctgcccatgctgcagaccctgcggctgcagatgaacttcatcaaccaggcccagctgggcatcttccgggccttccctggcctgcgctacgtggacctgagtgacaaccgcatcagcggggccagcgagctgacagccaccatgggagaggctgatggaggagagaaggtgtggctgcagcccggggacctggccccagcccctgtggacacccccagcagcgaggacttccggcccaactgcagcaccctgaacttcaccctggacctgagcaggaacaacctggtgacagtgcagcctgagatgtttgcccagctgagccacctgcagtgcctgcggctgagccacaactgcatcagccaggccgtgaatggcagccagttcctgcccctgaccggcctgcaggtgctggacctgagccacaacaagctggacctgtaccacgagcacagcttcacagagctgccccggctggaggccctggacctgagctacaacagccagcccttcggcatgcagggcgtgggccacaacttctcctttgtggcccacctgcggaccctgcggcacctgagcctggcccacaacaacatccacagccaggtgtcccagcagctgtgcagcaccagcctgcgggccctggacttctctggaaatgccctgggccacatgtgggccgagggggacctgtacctgcacttcttccagggcctgagcggcctcatctggctggacctgagccagaaccggctgcacaccctgctgccccagaccctgaggaacctgcccaagagcctgcaggtgctgcggctgcgggacaactacctggccttcttcaagtggtggagcctgcacttcctgcccaagctggaggtgctggacctggccggcaaccagctgaaggccctgaccaacggcagcctgcctgctggcacccggctgcggcggctggatgtgtcctgcaacagcatcagctttgtggcccctggcttcttcagcaaggccaaggagctgcgggagctgaacctgagcgccaatgccctgaagacagtggaccacagctggtttggccccctggccagcgccctgcagatcctggatgtgtctgccaaccccctgcactgtgcctgtggggccgccttcatggacttcctgctggaggtgcaggccgctgtgcccggcctgcccagccgggtgaagtgtggcagccctggccagctgcagggcctgagcatctttgcccaggacctgcggctgtgcctggatgaggccctgtcctgggactgctttgccctgagcctgctggccgtggccctgggcctgggcgtgcccatgctgcaccacctgtgtggctgggacctgtggtactgcttccacctgtgcctggcctggctgccctggaggggccggcagagcggcagagatgaagatgccctgccctatgatgcctttgtggtgtttgacaagacccagagcgctgtggccgactgggtgtacaatgagctgcggggccagctggaggagtgccggggccgctgggccctgcggctgtgcctggaggagcgggactggctgcccgggaagaccctgtttgagaacctgtgggcctctgtgtatggcagcaggaagaccctgtttgtgctggcccacacagacagagtgtctggcctgctgcgggccagcttcctgctggcccagcagaggctgctggaggacaggaaggatgtggtggtgctggtgatcctgagcccagatggccgccgcagccgctacgtgcggctgcggcagaggctgtgccggcagagcgtgctgctgtggccccaccagcccagcggccagaggagcttctgggcccagctgggcatggccctgacccgggacaaccaccacttctacaacagaaacttctgccagggccccacagctgagtag

SEQ ID NO: 193241 - DNA, 3099 bp, Artificial Sequence
  derived and/or modified sequence
atgggcttctgccggagcgccctgcaccccctgagcctgctggtgcaggcgattatgctggcgatgacgctggccctggggaccctgccagcctttctgccatgcgagttgcagcctcatggtctggtaaactgcaattggttgttccttaagagtgtcccccatttctcgatggcagctccgagaggtaatgttacaagcctgagtctatcctccaaccggatccaccatctgcatgattccgactttgctcacctgccgtcattgcgacatctcaacctaaaatggaattgtcctccagtggggttatccccaatgcatttcccatgtcatatgacgattgagcctagcacatttctggccgtgcccactcttgaagagctgaatttgagttataacaacatcatgactgtgcctgcattaccgaaatccttaatttcattgtccctgtcgcacacgaatattctgatgctagattcagcttctcttgctggcctacatgctctgcggttcctgtttatggatggcaattgctactacaagaacccttgtcgacaggcattggaggtggctccaggtgccctgctcggcctgggaaatctcacccacttatccctgaagtataataatttaactgtggtcccccgcaacctgcctagctccttggaatatctgcttctgagctacaacaggattgttaaattagcacctgaggaccttgctaacctgacagccttaagggtcctcgatgtgggcggaaattgtagaagatgtgaccatgctccaaacccttgtatggaatgtcctcggcattttccccaacttcatcccgataccttctctcacctttcaaggctcgaaggcctggtgcttaaagacagctcattaagttggttgaatgcgagctggttccggggactgggcaacttgagagtgctggatcttagcgaaaatttcctgtacaagtgtatcactaagactaaggccttccaaggcttaacgcagctgcggaaactcaatctctcgttcaactaccagaaacgggtctcattcgcacacctgtctctcgccccatcctttggaagtttggtcgcgctcaaagagctggacatgcacggcattttctttcggtcactcgacgagaccaccctgagacccttggcaaggctcccgatgctgcagacattgcgccttcagatgaacttcattaaccaggcccaattgggcatttttagggcatttcctgggctgagatatgtggatctatcagataaccggattagtggtgcaagtgagctcaccgccactatgggagaggcggatgggggcgagaaggtctggcttcaaccaggggatctggcgcccgcgcccgtcgacactccatcctcagaggacttccggcctaattgtagcaccctgaatttcacattggacctgagccgcaataatcttgtgaccgttcaacctgaaatgttcgctcagctatcccatctccagtgcctgaggttatcccataattgcattagccaggcagtgaacggcagtcaatttctgccattaacaggtctgcaggttctcgatctgtcccataataaactagacctgtatcacgaacatagtttcaccgagctcccccggctcgaggccctcgacctgtcttataattcacaaccattcggcatgcagggcgttggccacaatttcagctttgtggcccacttgcgcaccctgagacacctgtccttagcacataacaatatccacagccaagtatctcagcagctgtgtagtacgtccctccgggcgcttgacttctcagggaatgccctgggtcacatgtgggctgagggggatctctatttgcatttttttcagggcctcagtggactcatttggctggatttgagccagaaccgcctccacacactgctccctcaaacattaaggaatctacccaagagtctccaggtacttcgccttcgggataactaccttgctttcttcaaatggtggtccttgcactttctgcctaaactggaggtcttagacctcgctggtaatcagctgaaggccctgactaatgggtcacttcctgccggcacacgcttgcggaggctcgacgtatcctgtaattccatctcgttcgtcgccccggggttcttcagtaaagctaaggaactacgggaactcaacctaagtgcaaatgcgctgaaaacagttgaccacagctggtttggtcccctcgcctccgccctccagatcctggacgttagcgcgaatcccctacattgcgcgtgtggtgcggcttttatggactttctgcttgaggtgcaggccgctgtgccagggttgcctagtcgggtcaagtgcggctctccgggtcagctgcagggtctatccatcttcgcccaagacctgaggctgtgcctggacgaggccctttcctgggattgtttcgcgctgtccctattagctgtggccctgggtctgggagtgccgatgctgcaccacctatgcggatgggacctctggtattgttttcacctgtgtctagcctggctcccttggcgcggaaggcaatcaggcagggacgaggacgccctgccatacgatgctttcgtggtgttcgataaaacccaaagcgcggtggccgactgggtgtacaacgagctacggggtcaacttgaggagtgtcgaggacgttgggccctgcgactgtgcctagaggagagagactggctcccgggaaaaacattattcgagaacctgtgggctagtgtctacggatccagaaaaaccctgtttgtgctggcccatacagaccgtgtctccgggctgctaagagcttcattcctgcttgcccagcagcgcctgcttgaagatcgtaaggatgtagtcgtgcttgtgattctgtctccagacgggcgccggagccggtatgtgaggctgcgccagagactttgtcgacagagtgtgctcctctggccacatcaaccgtccgggcagcgctcattttgggcccagctaggaatggccctgacccgggataatcatcatttttacaatcggaacttctgccagggtcccaccgctgagtag

SEQ ID NO: 193242 - DNA, 3099 bp, Artificial Sequence
  derived and/or modified sequence
atgggcttctgccggtctgcacttcatcccctgtctctgctggtacaggctattatgctggctatgaccctagctctggggacccttcccgcattcctcccctgtgagcttcagccccacgggctggtgaattgtaactggctttttttgaagtccgtgccccacttttctatggcggcacctcggggaaatgtcacatccctatccttgagctcgaaccgcatacaccacttgcacgactcggacttcgctcatcttccatctctgcgccacctgaacctgaaatggaattgtcctcctgtgggcttgtcccccatgcactttccttgtcatatgaccattgagccgtctacatttcttgcggtccccactctcgaagaactgaatttgtcatacaacaatatcatgaccgtgcctgctttacccaaatccttaatttccttatctctgagtcacacaaatatccttatgctagattctgcgagcctagccggtctccacgccctaagatttctgttcatggatggtaattgctattacaagaatccatgccgtcaggcactcgaggtggccccaggggctctcctgggactaggaaacctgactcacctttccctgaagtataacaatctgaccgtcgttcctcggaatctcccttcgagtctggagtacctcctgctgagctacaatcggatcgttaagctggccccagaagatctggctaatctgaccgctttgcgcgtgctggatgtgggaggcaactgccgcagatgcgatcatgcacctaatccttgtatggagtgcccaaggcactttccccagttgcaccctgacacattcagccatttaagccggctggagggcctggtactcaaggattcttcactctcgtggctgaacgctagctggttcaggggcttaggaaacttgcgagtgctggacctgagtgagaattttttgtacaaatgtattaccaagacgaaagcattccaggggttgacacagctgagaaaactgaatttatcctttaattaccaaaaaagagtttctttcgcccacctcagtctagctcctagtttcggcagcttggtggctctgaaggagttggacatgcacggtattttctttcgttcgttggatgagaccactcttcggcctctggcccgacttccaatgctgcagacgttgcgtctccagatgaacttcataaatcaggctcagctggggattttcagggcctttcctgggttacgctacgtggacctctcagataatcggatttctggggcaagcgaactgacggccactatgggagaggcagatggcggagagaaagtttggctgcaacccggtgacctagccccagccccagtggatacccccagctccgaggactttaggccgaattgctcaaccctgaatttcaccctggacctaagcagaaacaatctggttaccgtgcagcccgaaatgtttgcgcagctctctcacctccaatgcctgagattatcccacaactgtatttcccaggcagtcaacggcagtcagtttctccccctaacgggtttgcaggttctcgacctgagtcataataaactggatctgtaccacgaacactcattcacggagctgccgcgactagaggcactagacctgagttataactctcagcccttcgggatgcagggagtgggccacaactttagttttgtcgcccatctccggaccttgaggcacctgtcccttgcccacaacaacatccacagtcaggtgagccagcagctgtgtagcacatctctgcgtgctctagatttcagtggaaatgcccttggccacatgtgggcggaaggggacttatacttacacttttttcaagggctctctggtctcatttggctggatctgtcgcagaatagactgcacactctgttgccacaaacactgagaaatctccccaagagtttgcaagtcttaaggctgcgagataactacctggctttcttcaaatggtggtccctgcatttcctgcctaaactcgaggtattagacctcgccggtaaccagctaaaggcgctgaccaacggctctctccctgcaggtactcgccttcgccgactggatgtgtcttgtaattccatctctttcgtcgcgcctggcttcttcagcaaagccaaggaactgcgggaactgaacctgtccgcaaacgctctgaaaacagtcgatcattcatggttcggccctctggcctcagccctgcaaatcctcgacgtaagcgccaaccctctgcattgtgcatgcggagccgcttttatggactttctcctcgaggtccaggcagccgtgcccggacttcctagcagagttaagtgtggttccccaggacaactgcaagggctcagtatttttgcacaggatctgcgcctgtgtttggatgaagccctgagctgggattgcttcgccctgagtctgttggccgtggccttagggttgggggtaccaatgctgcatcatttgtgtggatgggacttgtggtattgtttccatctgtgcctggcgtggctgccatggcgaggcagacagtccggacgggacgaggacgctctcccatacgacgcattcgttgtgtttgataagacacaaagcgctgtcgcagattgggtgtacaatgaacttcggggacagcttgaggagtgtaggggacgctgggctctgcgcctctgcctggaggaacgcgactggttacctggtaaaaccctctttgaaaacctgtgggcgtcggtatacgggagcagaaagacactctttgtgctggctcatacggatcgcgtgtctgggctactgcgggcaagttttttactcgcacagcaaagactgttagaagaccggaaagatgtggtggtactggtaattctctcccctgatggcagacgttctaggtacgtgcggcttagacaacgcttgtgtcggcagagtgtgctcctgtggccccaccagcccagcggccaacgatcattctgggcacaactgggcatggccctcactagagacaaccatcacttttacaaccgcaacttttgccagggccctaccgccgagtag

SEQ ID NO: 193243 - DNA, 3870 bp, Artificial Sequence
  derived and/or modified sequence
ggaggtcttgtttccggaagatgttgcaaggctgtggtgaaggcaggtgcagcctagcctcctgctcaagctacaccctggccctccacgcatgaggccctgcagaactctggagatggtgcctacaagggcagaaaaggacaagtcggcagccgctgtcctgagggcaccagctgtggtgcaggagccaagacctgagggtggaagtgtcctcttagaatggggagtgcccagcaaggtgtacccgctactggtgctatccagaattcccatctctccctgctctctgcctgagctctgggccttagctcctccctgggcttggtagaggacaggtgtgaggccctcatgggatgtaggctgtctgagaggggagtggaaagaggaaggggtgaaggagctgtctgccatttgactatgcaaatggcctttgactcatgggaccctgtcctcctcactgggggcagggtggagtggagggggagctactaggctggtataaaaatcttacttcctctattctctgagccgctgctgcccctgtgggaagggacctcgagtgtgaagcatccttccctgtagctgctgtccagtctgcccgccagaccctctggagaagcccctgccccccagcatgggtttctgccgcagcgccctgcacccgctgtctctcctggtgcaggccatcatgctggccatgaccctggccctgggtaccttgcctgccttcctaccctgtgagctccagccccacggcctggtgaactgcaactggctgttcctgaagtctgtgccccacttctccatggcagcaccccgtggcaatgtcaccagcctttccttgtcctccaaccgcatccaccacctccatgattctgactttgcccacctgcccagcctgcggcatctcaacctcaagtggaactgcccgccggttggcctcagccccatgcacttcccctgccacatgaccatcgagcccagcaccttcttggctgtgcccaccctggaagagctaaacctgagctacaacaacatcatgactgtgcctgcgctgcccaaatccctcatatccctgtccctcagccataccaacatcctgatgctagactctgccagcctcgccggcctgcatgccctgcgcttcctattcatggacggcaactgttattacaagaacccctgcaggcaggcactggaggtggccccgggtgccctccttggcctgggcaacctcacccacctgtcactcaagtacaacaacctcactgtggtgccccgcaacctgccttccagcctggagtatctgctgttgtcctacaaccgcatcgtcaaactggcgcctgaggacctggccaatctgaccgccctgcgtgtgctcgatgtgggcggaaattgccgccgctgcgaccacgctcccaacccctgcatggagtgccctcgtcacttcccccagctacatcccgataccttcagccacctgagccgtcttgaaggcctggtgttgaaggacagttctctctcctggctgaatgccagttggttccgtgggctgggaaacctccgagtgctggacctgagtgagaacttcctctacaaatgcatcactaaaaccaaggccttccagggcctaacacagctgcgcaagcttaacctgtccttcaattaccaaaagagggtgtcctttgcccacctgtctctggccccttccttcgggagcctggtcgccctgaaggagctggacatgcacggcatcttcttccgctcactcgatgagaccacgctccggccactggcccgcctgcccatgctccagactctgcgtctgcagatgaacttcatcaaccaggcccagctcggcatcttcagggccttccctggcctgcgctacgtggacctgtcggacaaccgcatcagcggagcttcggagctgacagccaccatgggggaggcagatggaggggagaaggtctggctgcagcctggggaccttgctccggccccagtggacactcccagctctgaagacttcaggcccaactgcagcaccctcaacttcaccttggatctgtcacggaacaacctggtgaccgtgcagccggagatgtttgcccagctctcgcacctgcagtgcctgcgcctgagccacaactgcatctcgcaggcagtcaatggctcccagttcctgccgctgaccggtctgcaggtgctagacctgtcccacaataagctggacctctaccacgagcactcattcacggagctaccgcgactggaggccctggacctcagctacaacagccagccctttggcatgcagggcgtgggccacaacttcagcttcgtggctcacctgcgcaccctgcgccacctcagcctggcccacaacaacatccacagccaagtgtcccagcagctctgcagtacgtcgctgcgggccctggacttcagcggcaatgcactgggccatatgtgggccgagggagacctctatctgcacttcttccaaggcctgagcggtttgatctggctggacttgtcccagaaccgcctgcacaccctcctgccccaaaccctgcgcaacctccccaagagcctacaggtgctgcgtctccgtgacaattacctggccttctttaagtggtggagcctccacttcctgcccaaactggaagtcctcgacctggcaggaaaccagctgaaggccctgaccaatggcagcctgcctgctggcacccggctccggaggctggatgtcagctgcaacagcatcagcttcgtggcccccggcttcttttccaaggccaaggagctgcgagagctcaaccttagcgccaacgccctcaagacagtggaccactcctggtttgggcccctggcgagtgccctgcaaatactagatgtaagcgccaaccctctgcactgcgcctgtggggcggcctttatggacttcctgctggaggtgcaggctgccgtgcccggtctgcccagccgggtgaagtgtggcagtccgggccagctccagggcctcagcatctttgcacaggacctgcgcctctgcctggatgaggccctctcctgggactgtttcgccctctcgctgctggctgtggctctgggcctgggtgtgcccatgctgcatcacctctgtggctgggacctctggtactgcttccacctgtgcctggcctggcttccctggcgggggcggcaaagtgggcgagatgaggatgccctgccctacgatgccttcgtggtcttcgacaaaacgcagagcgcagtggcagactgggtgtacaacgagcttcgggggcagctggaggagtgccgtgggcgctgggcactccgcctgtgcctggaggaacgcgactggctgcctggcaaaaccctctttgagaacctgtgggcctcggtctatggcagccgcaagacgctgtttgtgctggcccacacggaccgggtcagtggtctcttgcgcgccagcttcctgctggcccagcagcgcctgctggaggaccgcaaggacgtcgtggtgctggtgatcctgagccctgacggccgccgctcccgctacgtgcggctgcgccagcgcctctgccgccagagtgtcctcctctggccccaccagcccagtggtcagcgcagcttctgggcccagctgggcatggccctgaccagggacaaccaccacttctataaccggaacttctgccagggacccacggccgaatagccgtgagccggaatcctgcacggtgccacctccacactcacctcacctctgcctgcctggtctgaccctcccctgctcgcctccctcaccccacacctgacacagagcaggcactcaataaatgctaccgaaggcta

SEQ ID NO: 193244 - protein, 147 aa, Artificial Sequence
  derived and/or modified sequence
MAERPEDLNLPNAVITRIIKEALPDGVNISKEARSAISRAASVFVLYATSCANNFAMKGKRKTLNASDVLSAMEEMEFQRFVTPLKEALEAYRREQKGKKEASEQKKKDKDKKTDSEEQDKSRDEDNDEDEERLEEEEQNEEEEVDN

SEQ ID NO: 193245 - DNA, 444 bp, Artificial Sequence
  derived and/or modified sequence
atggcagagaggccagaggatctgaacctccccaatgccgttatcacccgcattataaaagaagcccttcccgacggggtcaatataagcaaggaagctcggtctgccatatctagggccgcttcagtctttgtgttgtatgctacctcatgcgcaaataactttgcgatgaaagggaagcggaagacattgaacgccagcgatgttctttctgcgatggaggagatggagttccaaaggttcgtgacgcctctcaaggaggcactggaagcctacagacgggagcagaagggtaagaaggaagctagcgagcagaagaaaaaggataaggacaaaaaaacagatagtgaagaacaggacaagagccgggacgaggataatgacgaagatgaggaacgcttggaggaagaggagcagaacgaagaagaagaagtcgataactag

SEQ ID NO: 193246 - DNA, 444 bp, Artificial Sequence
  derived and/or modified sequence
atggcagagagaccagaggacttaaacctgcccaatgccgtgattacccgtatcataaaagaagccctcccagacggggttaacatatctaaggaggctaggagcgctatctctagggcagcgagtgtcttcgtgctctacgccacgtcttgcgcgaataatttcgccatgaaaggaaagagaaaaacactgaatgcttctgacgtacttagcgccatggaggagatggagttccagcggtttgtcactccactcaaagaagccctagaggcgtatagacgggaacagaaggggaagaaagaagcgtcagagcagaagaaaaaggacaaagataagaagaccgattcggaggagcaggacaaatcgagggacgaagataacgatgaagacgaggaacgactggaagaagaagagcagaacgaggaagaagaggtagacaactag

SEQ ID NO: 193247 - DNA, 444 bp, Artificial Sequence
  derived and/or modified sequence
atggccgagaggcctgaggacctgaacctgcccaatgctgtgatcacccgcatcatcaaggaggccctgcctgatggagtgaacatcagcaaggaggcccggagcgccatcagccgggccgcctctgtgtttgtgctgtatgccaccagctgtgccaacaactttgccatgaagggcaagaggaagaccctgaatgccagtgatgtgctgagcgccatggaggagatggagttccagagatttgtgacccccctgaaggaggccctggaggcctacagaagagagcagaagggcaagaaggaggccagcgagcagaagaagaaggacaaggacaagaagacagacagcgaggagcaggacaagagcagagatgaagataatgatgaagatgaggagcggctggaggaggaggagcagaatgaggaggaggaggtggacaactag

SEQ ID NO: 193248 - DNA, 444 bp, Artificial Sequence
  derived and/or modified sequence
atggccgagcggcccgaggacctgaacctgcccaacgccgtgatcacaagaatcatcaaagaagccctccctgacggggtcaacatctctaaggaagctcgtagtgccatctcaagagccgcaagcgtcttcgtgttatacgctacatcatgcgctaacaacttcgccatgaaaggcaaacggaaaactctgaatgcgtctgatgttttgtcggccatggaagagatggagtttcagaggtttgttacaccactgaaggaagccctggaggcctacagaagggagcagaaagggaagaaagaagcatcggagcagaagaagaaagataaagataaaaagactgatagtgaagagcaggacaaatcccgggacgaggataatgatgaggatgaggagagattggaggaggaagaacagaacgaggaggaggaggtggataactag

SEQ ID NO: 193249 - DNA, 444 bp, Artificial Sequence
  derived and/or modified sequence
atggccgagcggcccgaggacctgaacctgcccaacgccgtgatcacgcgcataatcaaggaggctctgcctgacggcgtgaacatctcaaaggaagcacgatctgcgatcagccgtgccgcatctgttttcgttctgtacgctacctcatgcgccaataacttcgccatgaaagggaaacgtaaaaccctcaacgcctccgacgtgctcagtgcaatggaagagatggagttccaacggttcgttaccccactgaaggaggcccttgaggcctaccggcgggaacaaaaaggtaagaaggaggcctctgaacaaaaaaaaaaagacaaggacaaaaagaccgactcagaagaacaagacaagagccgagacgaggataacgacgaggacgaggaacgtctggaagaggaagaacagaacgaagaggaggaggtagacaattag

SEQ ID NO: 193250 - DNA, 2109 bp, Artificial Sequence
  derived and/or modified sequence
gcagggtcagaccgtagcgacgcgggaagtccggacgcagtagctccctgaagcggaggcgaaggggagtttaagccccagcggcggcaatggcggagaggcccgaggacctaaacctgcccaatgccgtgatcaccaggatcatcaaggaggcgctcccggacggtgtcaacatctccaaggaggcccggagcgccatctcccgcgccgccagcgtcttcgtgctgtacgccacatcctgtgctaacaactttgcaatgaaaggaaagcggaagacgctgaatgccagtgatgtgctctcagccatggaagagatggagttccagcggttcgttaccccattgaaagaagctctggaagcatataggcgggagcagaaaggcaagaaggaggcctcagagcaaaagaagaaggacaaagacaaaaaaacagactcggaagagcaagacaagagcagggatgaggacaatgatgaagacgaagaaaggctggaagaagaagaacagaatgaagaggaagaagtagacaactgaaaagggcgggagactgtggcaccttggaaggtaccacttgaaatgagacgtgctacgtgtttctgtgaagcttttccatgctgggcagagtagtctcaggcaaaagtgcctgaaaagatcagaataaaaactgactagaaataccgtcaaaaccagcacttaccaaactcagagcatctgagtagcagaatcctgttttgcttcatcaatctgaaggttatggccttttgacaagagggattctgaacgactaaattagtcagtttgctcgcttttgtttacttaaatgtatggttagatggtttttgatctgcagtcttccctagtcccccaaataagtaataataacttccatgctgcctgctgtgttccagatcacagaggcagccaaggctcaggaaaaactggggctttgcttatggtcagcctatgtttgattgcacagtctttgacaatagtagcttactaagactgctcagaatgagtaagctttaggaaactactaaaatgctgtgggagaataacaaaatccgttctctctcttcacttgacagaagcattaactgaattttgtttttcatagacccacttggcccaaaacctttctatattgcctgtagatgatcggcctgctggtgtggtagtaatctgatcacagatattcttaaatcagcagtgtggaatggtattagtcaaacatggtgccagtgtcttttacaaaaacagatggcatagtgtcagatgtaccttactctctgctactgtacagctttaggatttgtcatcacctcccggaaggtgtaaaaccccaggcttcctcttcttgtagtccatctcccagacttgtgactatggcttttcattcttcaattcatgacgagtgccaaacttgattttctctaggcacagctttctccctctgtgcctcctgcttcctttctctctcctgcctctcctctgctccccatcccactttctcatctgcctccttttctcacttctgtcagtctgtaagctttgataacctgcttaatactccaaagtgtgagttcctctgatctcttgattccttagttctaatctcacgttttgtttttaagagatggagtctctcactctgtggcccaggctggagtgcagtggcatgatcatagctcattgcatccttgaaatcctgggctcaggtgatcctcccgcctgagcctcctgagtatctgggactacagatgcgtgccaccaagcctggctaattttgtctcatgtcttctaaaaattattttgtgaagccccttcacaaaaaaccttaagggaaatctgatggtgctcaggaatctaactctccctaaaccatcctctttaactgcttctaaaatatctctgttggcctttcttagcctttttctgtttccattcagtgctccaagcgctttttgtttctaagttgagtgcttggggtttgacaggtagtgacgtgtagtttgacactgttaacttgttaaatacagtgaaaagtttgtgagtgaagaatgctgagaagattgtaatgctttgtacaaataaaagtcttgttaaaaaa

SEQ ID NO: 193251 - DNA, 2191 bp, Artificial Sequence
  derived and/or modified sequence
agcggcgcagggcaccatgggaaacggacggaagctccattgagccaaataagttggccacgtggggcggaacggaaacctcgcagggtcagaccgtagcgacgcgggaagtccggacgcagtagctccctgaagcggaggcgaaggggagtttaagccccagcggcggcaatggcggagaggcccgaggacctaaacctgcccaatgccgtgatcaccaggatcatcaaggaggcgctcccggacggtgtcaacatctccaaggaggcccggagcgccatctcccgcgccgccagcgtcttcgtgctgtacgccacatcctgtgctaacaactttgcaatgaaaggaaagcggaagacgctgaatgccagtgatgtgctctcagccatggaagagatggagttccagcggttcgttaccccattgaaagaagctctggaagcatataggcgggagcagaaaggcaagaaggaggcctcagagcaaaagaagaaggacaaagacaaaaaaacagactcggaagagcaagacaagagcagggatgaggacaatgatgaagacgaagaaaggctggaagaagaagaacagaatgaagaggaagaagtagacaactgaaaagggcgggagactgtggcaccttggaaggtaccacttgaaatgagacgtgctacgtgtttctgtgaagcttttccatgctgggcagagtagtctcaggcaaaagtgcctgaaaagatcagaataaaaactgactagaaataccgtcaaaaccagcacttaccaaactcagagcatctgagtagcagaatcctgttttgcttcatcaatctgaaggttatggccttttgacaagagggattctgaacgactaaattagtcagtttgctcgcttttgtttacttaaatgtatggttagatggtttttgatctgcagtcttccctagtcccccaaataagtaataataacttccatgctgcctgctgtgttccagatcacagaggcagccaaggctcaggaaaaactggggctttgcttatggtcagcctatgtttgattgcacagtctttgacaatagtagcttactaagactgctcagaatgagtaagctttaggaaactactaaaatgctgtgggagaataacaaaatccgttctctctcttcacttgacagaagcattaactgaattttgtttttcatagacccacttggcccaaaacctttctatattgcctgtagatgatcggcctgctggtgtggtagtaatctgatcacagatattcttaaatcagcagtgtggaatggtattagtcaaacatggtgccagtgtcttttacaaaaacagatggcatagtgtcagatgtaccttactctctgctactgtacagctttaggatttgtcatcacctcccggaaggtgtaaaaccccaggcttcctcttcttgtagtccatctcccagacttgtgactatggcttttcattcttcaattcatgacgagtgccaaacttgattttctctaggcacagctttctccctctgtgcctcctgcttcctttctctctcctgcctctcctctgctccccatcccactttctcatctgcctccttttctcacttctgtcagtctgtaagctttgataacctgcttaatactccaaagtgtgagttcctctgatctcttgattccttagttctaatctcacgttttgtttttaagagatggagtctctcactctgtggcccaggctggagtgcagtggcatgatcatagctcattgcatccttgaaatcctgggctcaggtgatcctcccgcctgagcctcctgagtatctgggactacagatgcgtgccaccaagcctggctaattttgtctcatgtcttctaaaaattattttgtgaagccccttcacaaaaaaccttaagggaaatctgatggtgctcaggaatctaactctccctaaaccatcctctttaactgcttctaaaatatctctgttggcctttcttagcctttttctgtttccattcagtgctccaagcgctttttgtttctaagttgagtgcttggggtttgacaggtagtgacgtgtagtttgacactgttaacttgttaaatacagtgaaaagtttgtgagtgaagaatgctgagaagattgtaatgctttgtacaaataaaagtcttgttaaaaaa

SEQ ID NO: 193252 - DNA, 444 bp, Artificial Sequence
  derived and/or modified sequence
atggcggaaagaccagaggacctgaatctaccaaacgccgtcatcacacgcatcattaaagaagctctgcccgacggagtaaatatatcaaaagaggccagatctgctatttctagggctgcgagtgtgttcgtcctctatgccactagctgcgctaataattttgctatgaagggaaagcgcaagacgctgaatgctagcgacgttctgagtgccatggaggaaatggaatttcagaggttcgtcacgcccctgaaagaggccctagaagcgtataggagggagcagaaaggtaaaaaggaggcatccgagcaaaaaaagaaagacaaagataagaagacggatagcgaagaacaggataagtctagagacgaggataacgacgaggacgaagagcggctcgaggaagaggagcaaaatgaagaagaggaggtggacaattag

SEQ ID NO: 193253 - DNA, 444 bp, Artificial Sequence
  derived and/or modified sequence
atggcagagcgaccagaagacttaaatcttcctaatgcagtgatcacgcggatcatcaaagaggctctgcccgatggcgtgaatatctcgaaagaagcgcgtagcgctatttcgcgagccgcttccgttttcgttttgtacgccacctcctgtgctaacaattttgccatgaagggcaaacgtaagaccctcaatgcttccgacgtgctctccgcaatggaggaaatggaattccagcgcttcgtgacgcctctcaaggaggccctggaagcctaccgacgcgaacaaaaaggtaagaaagaagcctccgagcagaagaagaaagataaagataagaagaccgactccgaggagcaggacaagtcaagggacgaagataatgacgaagacgaagaacgtctcgaagaggaggagcaaaacgaggaggaggaggttgataattag

SEQ ID NO: 193254 - DNA, 444 bp, Artificial Sequence
  derived and/or modified sequence
atggccgagagacccgaggacctgaacctgcccaacgccgtgatcaccagaatcatcaaggaggccctgcccgacggcgtgaacatcagcaaggaggccagaagcgccatcagcagagccgccagcgtgttcgtgctgtacgccaccagctgcgccaacaacttcgccatgaagggcaagagaaagaccctgaacgccagcgacgtgctgagcgccatggaggagatggagttccagagattcgtgacccccctgaaggaggccctggaggcctacagaagagagcagaagggcaagaaggaggccagcgagcagaagaagaaggacaaggacaagaagaccgacagcgaggagcaggacaagagcagagacgaggacaacgacgaggacgaggagagactggaggaggaggagcagaacgaggaggaggaggtggacaactag

SEQ ID NO: 193255 - protein, 131 aa, Artificial Sequence
  derived and/or modified sequence
MADVVVGKDKGGEQRLISLPLSRIRVIMKSSPEVSSINQEALVLTAKATELFVQCLATYSYRHGSGKEKKVLTYSDLANTAQQSETFQFLADILPKKILASKYLKMLKEEKREEDEENDNDNESDHDEADS

SEQ ID NO: 193256 - DNA, 2488 bp, Artificial Sequence
  derived and/or modified sequence
atgcgcagatcgggggcgcgaggcctcacggagctcgtagtttcccggacgggccgctcccggcctcgcggcctcgcctccccacactacaactcccacggggcagcgggcgcggctccccgtacccaccagctggccgggcagggcagccacttcgcggtcgggcccgccggctgcgggcacccgcgcgacgggcgggaagatggcggacgtggtcgtgggtaaagacaagggcggggagcagcggctcatctcgctgcctctatcccgcatccgggtcatcatgaagagctcccccgaggtgtccagcatcaaccaggaggcgttggtgctcacggccaaggccacggagctctttgttcaatgcctagccacctattcctacagacacggcagtggaaaggaaaagaaagtactgacttacagtgatttagcaaacactgcacagcaatcagaaacttttcagtttcttgcagatatattaccaaagaagattttagctagtaaatacctgaaaatgcttaaagaggaaaagagggaagaagatgaggagaatgacaatgataatgaaagtgaccatgatgaagctgactcctaaaccaaaagtgctttaaaaaccagcctggcgaggacagccctggacccactccactgtctctaagtaaacacagcactgcccgcttttagcgtcttcacttcttcacagagttccagtgtgtggtattctttcgaggtattctttccaggccgagattgagcacctcatgtacctacgccacagacagccagagggaaagcgacccagacagcagcccctcctcgacaggcccaccctgcagctcaggcaccaagaaaacagccgatactggcagccattgcagctccaaactgcagaggcaaggccaattttaacttttcaatttacagtcgattttgaagagcttctacatatcggttatgtaaattcatatatgtatattttggaatcagttcttataaacagctcgattcagttttagctaaatttatagtttaggtagtatgttacatttgaatttttgtcttaagaaaagttgactgttcagatatttttctactgtaaagaaatatacttttctattaaagatctgtacatatttttacagtaaaatgctttatggaactagttttagagccctctatggctttaaggccttgcttactgcctgcaaattttgagaaatttaaaaataagcattctaacacttttattcccacagaaaaattccaagtcaaattatcaaatcaaatacaaaaataagtcttacctcttgtataagcatgttgtactaaaaaaaaattttgaaacattttgtatattggagatctctctcatcttactgttctttgctttaaattcctggcacttctttttactgtctataagagaaaacctatcataagcccaattttttttttccacttagggtaaatgtttggctcctctcatttcattatctttttttttttttttttaaagacagattctcactcagttgcccaggctggattgcggtggcgctgtctcagctcactgcaacctccgcctcccaggttcaagtgattctcctgcctcatcctcctgagtagctgggattacaggcgtgtgccaccatgcccaacctatttttgtattttttagtagagacggggttcaccatgttggccaggcttgtctcaaactcctaacctcaactgatccacctgcctcagcctcccaaagtgccgccgggattacaggcgtgagccaccatgcctggccttcattatctcttttttaaaaatgaaaaagtttataatttacattcagtaaaatcaccctttttagtgtctagtctgtgaattttgacaaatgcatggttttgtaaccaatcgataggacagttctgccacccaggacattcccctctgttcctctgttcctctcttctcctgccccctagcaaccactggtgttttctgtccctcttgttcattgacatttattttaaaataaaatattttaaaatctactttttggtgtacagttctgagttttggcaaatgcagtcaagtcactaccaccaccacaattaacagctatatcaccctccagtaaattccctgtggtcagctccttccccaccttttaccgtggcaaccgtcaagctattctctgtccctataccaggtgtcatcaaatttttttctggaaagggccatgcagtaaatagttcaagctttgtgggcttttatagtctctgttgctgctgctgaactcagctgttgtagcacgaaagcagccaggtaattactagatgaaggaatgcaggtggctgtgtttcaatagagctttatttctgcaaactgaaacttgagttttgtgtaattttcatgtgtcatgaaatactgttttctccaaccatttaataatgtaaatacttgctagcttatgtgccattaaaaaatg

SEQ ID NO: 193257 - DNA, 396 bp, Artificial Sequence
  derived and/or modified sequence
atggcagatgttgtagtagggaaagataagggaggcgagcagaggctcatctcactgcccctgtctagaatacgcgtaatcatgaaaagttccccagaggttagttctatcaatcaagaggccctcgttctcaccgctaaagctactgaactattcgtgcagtgtctggctacttactcttatcgacatggatctggcaaagaaaaaaaagtgttgacttatagcgatctggcgaacaccgcacagcagtccgagacgttccaattcctggcggacatcctgcctaagaaaattctggcctcaaagtaccttaagatgctgaaggaggaaaaacgggaagaggacgaggagaatgataatgacaacgaatcggaccacgacgaagccgactcctag

SEQ ID NO: 193258 - DNA, 396 bp, Artificial Sequence
  derived and/or modified sequence
atggctgatgtggtggtgggcaaggacaagggcggggagcagaggctcatcagcctgcccctgagccgcatccgggtcatcatgaagagcagccctgaggtgagcagcatcaaccaggaggccctggtgctgacagccaaggccacagagctgtttgtgcagtgcctggccacctacagctacagacatggcagcggcaaggagaagaaggtgctgacctacagcgacctggccaacacagcccagcagagcgagaccttccagttcctggccgacatcctgcccaagaagatcctggccagcaagtacctgaagatgctgaaggaggagaagcgggaggaggatgaagaaaatgacaatgacaatgaaagtgaccatgatgaagctgacagctag

SEQ ID NO: 193259 - DNA, 396 bp, Artificial Sequence
  derived and/or modified sequence
atggccgacgtggtggtgggcaaggacaagggcggcgagcagcggctgattagtctacccctgtccaggattcgtgtgataatgaagtcaagtccagaagtttctagcatcaaccaggaggccctagtcttaacggccaaggcaacagaacttttcgtgcaatgtcttgcaacctacagttaccgccacggatcaggaaaagagaagaaagtcctcacttattctgacctggcaaatacagctcaacagtccgagacattccagtttctggctgatattctgcctaagaagattttggcatctaaatacttgaagatgctgaaggaagagaaacgggaagaggacgaagagaacgataacgataacgagagtgaccacgacgaggccgattcttag

SEQ ID NO: 193260 - DNA, 396 bp, Artificial Sequence
  derived and/or modified sequence
atggccgatgtggtggtgggaaaggacaaagggggagaacaacgactgatctcccttccccttagccggatccgcgttatcatgaaatcatccccagaggttagcagtatcaaccaggaggctttagtcctgaccgccaaagccactgagctgtttgtgcagtgccttgccacctacagctacagacacggtagtggcaaagagaaaaaggtcctaacttattctgatttagccaacacagcccagcagtctgagactttccagttcctggcagacatcctccccaaaaagatcctggcgagtaaatacctaaaaatgcttaaggaggaaaagcgcgaggaggacgaggaaaatgataacgacaatgaatcagaccacgatgaggctgattcttag

SEQ ID NO: 193261 - DNA, 396 bp, Artificial Sequence
  derived and/or modified sequence
atggccgacgtggtggtgggcaaggacaagggcggcgagcagagactgatcagcctgcccctgagcagaatcagagtgatcatgaagagcagccccgaggtgagcagcatcaaccaggaggccctggtgctgaccgccaaggccaccgagctgttcgtgcagtgcctggccacctacagctacagacacggcagcggcaaggagaagaaggtgctgacctacagcgacctggccaacaccgcccagcagagcgagaccttccagttcctggccgacatcctgcccaagaagatcctggccagcaagtacctgaagatgctgaaggaggagaagagagaggaggacgaggagaacgacaacgacaacgagagcgaccacgacgaggccgacagctag

SEQ ID NO: 193262 - protein, 296 aa, Artificial Sequence
  derived and/or modified sequence
MNEEEQFVNIDLNDDNICSVCKLGTDKETLSFCHICFELNIEGVPKSDLLHTKSLRGHKDCFEKYHLIANQGCPRSKLSKSTYEEVKTILSKKINWIVQYAQNKDLDSDSECSKNPQHHLFNFRHKPEEKLLPQFDSQVPKYSAKWIDGSAGGISNCTQRILEQRENTDFGLSMLQDSGATLCRNSVLWPHSHNQAQKKEETISSPEANVQTQHPHYSREELNSMTLGEVEQLNAKLLQQIQVFEELTHQVQEKDSLASQLHVRHVAIEQLLKNCSKLPCLQVGRTGMKSHLPINN

SEQ ID NO: 193263 - protein, 242 aa, Artificial Sequence
  derived and/or modified sequence
MNEEEQFVNIDLNDDNICSVCKLGTDKETLSFCHICFELNIEGVPKSDLLHTKSLRGHKDCFEKYHLIANQGCPRSKLSKSTYEEVKTILSKKINWIVQYAQNKDLDSDSECSKNPQHHLFNFRHKPEEKLLPQFDSQVPKYSAKWIDGSAGGISNCTQRILEQRENTDFGLSMLQDSGATLCRNSVLWPHSHNQAQKKEETISSPEANVQTQHPHYSREELNSMTLGEVEQLNAKLLQQIQ

SEQ ID NO: 193264 - DNA, 1593 bp, Artificial Sequence
  derived and/or modified sequence
gcggccgcctctgctgcggccggaaacaatagtggaggaacccgagccgcacggaacggcggtggtggcccgcggagccggacggggcactatgaacgaagaggagcagtttgtaaacattgatttgaatgatgacaacatttgcagtgtttgtaaactgggaacagacaaagaaacactctccttctgccacatttgttttgagctaaatattgagggggtaccaaagtctgatctcttgcacaccaaatcattaaggggccataaagactgctttgaaaaataccatttaattgcaaaccagggttgtcctcgatctaagctttcaaaaagtacttatgaagaagttaaaaccattttgagtaagaagataaactggattgtgcagtatgcacaaaataaggatctggattcagattctgaatgttctaaaaacccccagcatcatctgtttaatttcaggcataagccagaagaaaaattactcccacagtttgactcccaagtaccaaaatattctgcaaaatggatagatggaagtgcaggtggcatctctaactgtacacaaagaattttggagcagagggaaaatacagactttggactttctatgttacaagattcaggtgccactttatgtcgtaacagtgtattgtggcctcatagtcacaaccaggcacagaaaaaagaagagacaatctctagtccagaggctaatgtccagacccagcatccacattacagcagagaggaattgaattcgatgactcttggtgaggtagagcaactgaatgcaaagctcctacagcaaatccaggtttttgaagagttaactcaccaagtgcaagaaaaagattctttggcctcacagctccatgtccgccacgttgccatcgaacagcttctgaagaactgttctaagttaccatgtctgcaagtagggcgaacaggaatgaagtcgcacctacccataaacaactgacctaaacagacttacttcgtatgccctgccctttattggtctcccagacatgcaaactttgaagaagtttgaagaaagttgtggtccgtttttttatggtcattaaatttgccaaacataaggcagtatttaacatctttgtcaaataaagcagatcattatactctagtcttctagggctaatcattttggctcatttggggactcttttttcccagaattactaaacaaattttatcacatgtgactacttaaatatactgttacagtgtcattttattaaacattttaattcacctgtcaaaacaacagattaactccttagtgtaaactactagagataatttttaagagggaaatggaattcatatcacctcttatttattatgagcaatattttaatataaaaattttatatgtgaaaatgctattttaggtactttgccattctctttataaatgtgtatttgagtggttctgtatatttatttacattatcatgtgtgaatatgttcacccatatttcaggtcactgcattttattctcttaatacaatgttttcacaacggttaccttgctttccaaagataaatatattttggattagaaa

SEQ ID NO: 193265 - DNA, 896 bp, Artificial Sequence
  derived and/or modified sequence
cccggagcgatgggacgaggctctcccgcccgccgggctccaggatgccgcggctctcccagctccggcttgggcccctccggcggtgcccggccggtaccgtgaagccgccgctcggccttcggtgtagttgccccggacacggcgggacgccctccccgggggcactatgaacgaagaggagcagtttgtaaacattgatttgaatgatgacaacatttgcagtgtttgtaaactgggaacagacaaagaaacactctccttctgccacatttgttttgagctaaatattgagggggtaccaaagtctgatctcttgcacaccaaatcattaaggggccataaagactgctttgaaaaataccatttaattgcaaaccagggttgtcctcgatctaagctttcaaaaagtacttatgaagaagttaaaaccattttgagtaagaagataaactggattgtgcagtatgcacaaaataaggatctggattcagattctgaatgttctaaaaacccccagcatcatctgtttaatttcaggcataagccagaagaaaaattactcccacagtttgactcccaagtaccaaaatattctgcaaaatggatagatggaagtgcaggtggcatctctaactgtacacaaagaattttggagcagagggaaaatacagactttggactttctatgttacaagattcaggtgccactttatgtcgtaacagtgtattgtggcctcatagtcacaaccaggcacagaaaaaagaagagacaatctctagtccagaggctaatgtccagacccagcatccacattacagcagagaggaattgaattcgatgactcttggtgaggtagagcaactgaatgcaaagctcctacagcaaatccagg

SEQ ID NO: 193266 - DNA, 1090 bp, Artificial Sequence
  derived and/or modified sequence
gcggccgcctctgctgcggccggaaacaatagtggaggaacccgagccgcacggaacggcggtggtggcccgcggagccggacggggcactatgaacgaagaggagcagtttgtaaacattgatttgaatgatgacaacatttgcagtgtttgtaaactgggaacagacaaagaaacactctccttctgccacatttgttttgagctaaatattgagggggtaccaaagtctgatctcttgcacaccaaatcattaaggggccataaagactgctttgaaaaataccatttaattgcaaaccagggttgtcctcgatctaagctttcaaaaagtacttatgaagaagttaaaaccattttgagtaagaagataaactggattgtgcagtatgcacaaaataaggatctggattcagattctgaatgttctaaaaacccccagcatcatctgtttaatttcaggcataagccagaagaaaaattactcccacagtttgactcccaagtaccaaaatattctgcaaaatggatagatggaagtgcaggtggcatctctaactgtacacaaagaattttggagcagagggaaaatacagactttggactttctatgttacaagattcaggtgccactttatgtcgtaacagtgtattgtggcctcatagtcacaaccaggcacagaaaaaagaagagacaatctctagtccagaggctaatgtccagacccagcatccacattacagcagagaggaataagtttttgaagagttaactcaccaagtgcaagaaaaagattctttggcctcacagctccatgtccgccacgttgccatcgaacagcttctgaagaactgttctaagttaccatgtctgcaagtagggcgaacaggaatgaagtcgcacctacccataaacaactgacctaaacagacttacttcgtatgccctgccctttattggtctcccagacatgcaaactttgaagaagtttgaagaaagttgtggtccgtttttttatggtcattaaatttgccaaacataaggcagtatttaacatctttgtcaaataaagcagatcattatactcta

SEQ ID NO: 193267 - DNA, 891 bp, Artificial Sequence
  derived and/or modified sequence
atgaacgaggaggagcagttcgtgaacatcgacctgaacgacgacaacatctgcagcgtgtgcaagctgggcaccgacaaggagaccctgagcttctgccacatctgcttcgagctgaacatcgagggcgtgcccaagagcgacctgctgcacaccaagagcctgagaggccacaaggactgcttcgagaagtaccacctgatcgccaaccagggctgccccagaagcaagctgagcaagagcacctacgaggaggtgaagaccatcctgagcaagaagatcaactggatcgtgcagtacgcccagaacaaggacctggacagcgacagcgagtgcagcaagaacccccagcaccacctgttcaacttcagacacaagcccgaggagaagctgctgccccagttcgacagccaggtgcccaagtacagcgccaagtggatcgacggcagcgccggcggcatcagcaactgcacccagagaatcctggagcagagagagaacaccgacttcggcctgagcatgctgcaggacagcggcgccaccctgtgcagaaacagcgtgctgtggccccacagccacaaccaggcccagaagaaggaggagaccatcagcagccccgaggccaacgtgcagacccagcacccccactacagcagagaggagctgaacagcatgaccctgggcgaggtggagcagctgaacgccaagctgctgcagcagatccaggtgttcgaggagctgacccaccaggtgcaggagaaggacagcctggccagccagctgcacgtgagacacgtggccatcgagcagctgctgaagaactgcagcaagctgccctgcctgcaggtgggcagaaccggcatgaagagccacctgcccatcaacaactag

SEQ ID NO: 193268 - DNA, 729 bp, Artificial Sequence
  derived and/or modified sequence
atgaacgaggaggagcagttcgtgaacatcgacctgaacgacgacaacatctgcagcgtgtgcaagctgggcaccgacaaggagaccctgagcttctgccacatctgcttcgagctgaacatcgagggcgtgcccaagagcgacctgctgcacaccaagagcctgagaggccacaaggactgcttcgagaagtaccacctgatcgccaaccagggctgccccagaagcaagctgagcaagagcacctacgaggaggtgaagaccatcctgagcaagaagatcaactggatcgtgcagtacgcccagaacaaggacctggacagcgacagcgagtgcagcaagaacccccagcaccacctgttcaacttcagacacaagcccgaggagaagctgctgccccagttcgacagccaggtgcccaagtacagcgccaagtggatcgacggcagcgccggcggcatcagcaactgcacccagagaatcctggagcagagagagaacaccgacttcggcctgagcatgctgcaggacagcggcgccaccctgtgcagaaacagcgtgctgtggccccacagccacaaccaggcccagaagaaggaggagaccatcagcagccccgaggccaacgtgcagacccagcacccccactacagcagagaggagctgaacagcatgaccctgggcgaggtggagcagctgaacgccaagctgctgcagcagatccagtag

SEQ ID NO: 193269 - DNA, 891 bp, Artificial Sequence
  derived and/or modified sequence
atgaacgaggaagagcagtttgtgaacatcgacctgaacgatgacaatatctgtagcgtctgcaagctgggcactgataaggaaaccctgagtttttgtcacatttgtttcgaactgaatatcgagggggtgcccaaatctgatcttcttcatacgaaatctctccgcggccacaaggattgtttcgaaaaataccacctcatcgcaaaccagggctgccctcgttctaagttgtccaagtcaacgtatgaggaggtgaagactatcctgtcaaaaaagattaactggattgtccaatacgcgcagaacaaggatttggacagcgattccgagtgctcaaagaatccccaacatcacctttttaatttcagacataaacctgaggagaaattactgcctcaattcgactcccaggtgccaaagtattccgcgaagtggatagatgggtctgcaggagggatatccaattgtacacagcgaattctggagcaaagggaaaataccgactttgggctgtccatgttacaggactccggggccacgctgtgcagaaacagcgtgctttggccccattcacataaccaggcacaaaagaaggaggaaactatctcctcccctgaggctaatgtgcagactcagcatccgcactattcccgagaggagctgaactcaatgacactcggagaggtggagcagctcaatgcgaagctgctgcaacagattcaggtttttgaggagttaacccatcaggtgcaggagaaagacagtctggcaagccaactccacgtcagacacgttgctatcgagcagcttttaaagaactgctctaagctcccctgccttcaagtaggtcgtaccgggatgaaatcacaccttcccattaacaattag

SEQ ID NO: 193270 - DNA, 729 bp, Artificial Sequence
  derived and/or modified sequence
atgaacgaagaagaacagtttgtcaacatcgatttaaacgatgacaatatttgttctgtctgtaaactcggcaccgacaaggaaacactgtccttctgtcacatttgttttgagctaaacatcgaaggcgtgccaaaatcagaccttctccacacgaagagcttacgcggccataaggactgctttgagaaatatcacctgatcgccaaccagggatgcccgaggtcaaaactgtccaagtctacctatgaggaagttaaaacaatcctaagcaagaaaattaactggattgtgcagtacgcacagaataaagacctggatagcgattccgagtgttccaagaacccacagcaccacctgttcaacttccgccacaagcccgaggagaagcttctcccccaattcgactcacaggtccctaagtatagcgccaagtggatcgacggatctgctggcggcatttccaactgcactcaacggattttagagcagagggaaaatacagacttcgggctctctatgctccaggattctggagctaccctgtgcaggaacagtgtactgtggccccactcgcataaccaggcacagaagaaagaggagaccatctctagcccagaggccaacgtccagacccaacaccctcactacagccgggaggagctcaactctatgacgctgggtgaggtagagcagttgaacgccaaattgctccagcaaattcagtag

SEQ ID NO: 193271 - DNA, 891 bp, Artificial Sequence
  derived and/or modified sequence
atgaatgaggaggagcagtttgtgaacatcgacctgaatgatgacaacatctgcagcgtgtgcaagctgggcacagacaaggagaccctgtccttctgccacatctgctttgagctgaacattgaaggagtgcccaagagtgacctgctgcacaccaagagcctgcggggccacaaggactgctttgagaagtaccacctgattgccaaccagggctgccccaggagcaagctgagcaagagcacctatgaggaggtgaagaccatcctgagcaagaagatcaactggatcgtgcagtatgcccagaacaaggacctggacagcgacagtgaatgttccaagaacccccagcaccacctgttcaacttccgccacaagccagaggagaagctgctgccccagtttgacagccaggtgcccaagtacagcgccaagtggattgatggcagcgctgggggcatcagcaactgcacccagaggatcctggagcagcgggagaacacagactttggcctgtccatgctgcaggacagcggggccaccctgtgcaggaacagcgtgctgtggccccacagccacaaccaggcccagaagaaggaggagaccatcagcagccctgaggccaacgtgcagacccagcacccccactacagccgggaggagctgaacagcatgaccctgggggaggtggagcagctgaatgccaagctgctgcagcagatccaggtgtttgaggagctgacccaccaggtgcaggagaaggacagcctggccagccagctgcacgtgagacatgtggccatcgagcagctgctgaagaactgcagcaagctgccctgcctgcaggtgggccgcacaggcatgaagagccacctgcccatcaacaactag

SEQ ID NO: 193272 - DNA, 729 bp, Artificial Sequence
  derived and/or modified sequence
atgaatgaggaggagcagtttgtgaacatcgacctgaatgatgacaacatctgcagcgtgtgcaagctgggcacagacaaggagaccctgtccttctgccacatctgctttgagctgaacattgaaggagtgcccaagagtgacctgctgcacaccaagagcctgcggggccacaaggactgctttgagaagtaccacctgattgccaaccagggctgccccaggagcaagctgagcaagagcacctatgaggaggtgaagaccatcctgagcaagaagatcaactggatcgtgcagtatgcccagaacaaggacctggacagcgacagtgaatgttccaagaacccccagcaccacctgttcaacttccgccacaagccagaggagaagctgctgccccagtttgacagccaggtgcccaagtacagcgccaagtggattgatggcagcgctgggggcatcagcaactgcacccagaggatcctggagcagcgggagaacacagactttggcctgtccatgctgcaggacagcggggccaccctgtgcaggaacagcgtgctgtggccccacagccacaaccaggcccagaagaaggaggagaccatcagcagccctgaggccaacgtgcagacccagcacccccactacagccgggaggagctgaacagcatgaccctgggggaggtggagcagctgaatgccaagctgctgcagcagatccagtag

SEQ ID NO: 193273 - DNA, 891 bp, Artificial Sequence
  derived and/or modified sequence
atgaacgaggaggagcagttcgtgaacatcgacctgaacgacgacaacatatgctcagtttgcaaactggggactgataaagagacgctttctttttgtcacatatgctttgaactaaatatcgaaggtgtgcctaaatctgatttgcttcatacaaagtctctgcggggccacaaggactgtttcgagaagtatcacttaatcgccaatcagggctgtccaagaagcaagctctctaaaagtacttacgaagaggtcaaaaccatcttgtcgaagaagattaattggattgtacagtatgcccagaataaggatctggattcagactccgagtgcagcaaaaatccacagcatcacctgttcaatttcaggcacaagccagaggagaagctgctgccgcagttcgattcacaggttccgaaatattccgcgaagtggatcgacggcagcgctgggggcatctcaaattgcacgcagaggattttagaacaacgcgagaacacggactttggcttgtcaatgctgcaagacagtggggccacactctgtcgtaatagcgtgttatggccacatagtcataatcaggcgcagaagaaggaggaaaccatttctagccccgaggcaaatgtacaaacacagcacccacattatagccgggaagagttgaactcaatgacattaggagaagtcgagcagctgaacgccaaactgcttcaacagatccaggttttcgaagagcttacacaccaggtgcaggaaaaggattctctggccagtcaacttcatgtccgacacgtggcaattgaacagctcctaaagaattgctctaaactgccctgccttcaggtgggaaggactggcatgaagagtcacttaccaatcaataactag

SEQ ID NO: 193274 - DNA, 729 bp, Artificial Sequence
  derived and/or modified sequence
atgaacgaggaggagcagttcgtgaacatcgacctgaacgacgacaacatctgttcagtctgcaaactggggacagacaaggagacattatcgttctgtcatatttgcttcgagctcaatatagagggcgtgcccaaaagtgatctccttcacactaaatcccttagaggtcataaggattgtttcgaaaagtaccatctgattgccaaccagggctgccccaggtctaaactgagcaaaagcacgtatgaggaagtgaaaaccattttatccaagaaaatcaattggatcgtgcagtatgcccaaaataaagatctggattcagactctgagtgctccaagaacccgcagcatcatttgtttaattttcgtcacaagccggaagaaaagctgctaccacaattcgactctcaggtcccaaagtattcggctaaatggatcgatggctcagctgggggcatatcaaactgcactcagagaattcttgagcagagagaaaatactgattttggtttgtcaatgctacaggactccggagccaccttgtgccgaaactcggtattatggcctcactcccacaatcaggcccagaagaaagaggagacgatctcgagtccagaagcaaacgttcagactcagcatccacactactctagggaagagctcaatagcatgactctcggcgaagtggaacaactaaacgccaagctactccaacagatccagtag

SEQ ID NO: 193275 - DNA, 891 bp, Artificial Sequence
  derived and/or modified sequence
atgaacgaagaagagcagtttgtaaatatagacctgaatgatgacaacatatgttccgtctgtaagttgggcactgataaagagacgctgtccttttgtcacatctgctttgagttgaacattgaaggcgtccccaagtctgacctcctgcataccaaatctctgagaggtcacaaggattgtttcgagaagtatcacctgatcgcaaatcagggttgcccacgctcaaagctcagtaagtctacgtacgaggaggtcaagactatcttgagcaagaagattaattggatagttcaatatgctcagaataaggacttggatagtgattcagagtgtagtaaaaatcctcaacaccacctgtttaacttccggcacaagcctgaagaaaaattgctgccccagttcgatagccaggtcccgaagtattccgccaagtggattgatggaagtgctggcggtatctctaactgcacacaacgtattcttgaacaaagggagaacacagactttgggttaagtatgctgcaggactcaggggcaaccctttgccgaaactcagtgctttggccccattcacataatcaagcccagaagaaggaagagactatttcaagcccagaagcaaacgtacaaacacaacatccgcattactcccgtgaggagctgaactctatgactttgggcgaggttgagcagttgaacgctaaactgttacagcagatacaggtgtttgaggagctcacacaccaggtgcaggagaaggattccctggcctcccagttacacgtgcgacatgttgcgatcgagcagttactgaagaactgctctaaattaccgtgcctccaggtgggcagaacggggatgaagtcacaccttcctattaataattag

SEQ ID NO: 193276 - DNA, 729 bp, Artificial Sequence
  derived and/or modified sequence
atgaatgaagaggagcaatttgtgaacattgacctgaacgatgataacatctgttctgtgtgtaagttgggtacggataaggaaaccttgtctttttgccacatctgctttgagttgaatattgagggcgtgccgaagtctgacttactccacactaaaagccttagaggacataaggactgcttcgagaaatatcacctgattgccaaccaggggtgtccgaggtccaagttgtctaagtcgacctacgaggaggtcaaaactatcctatccaaaaagatcaactggatcgtccagtacgctcagaataaggacctggattccgactctgaatgttcgaaaaacccccagcaccatctgttcaactttcggcacaagcccgaagaaaagctgcttcctcagttcgattctcaggtgccaaaatattctgccaagtggatcgatgggtctgccggaggcataagcaattgtacccagaggatcctggagcagcgggagaacacggactttgggctcagcatgctgcaggattctggggcaaccctgtgtcggaacagcgtcctctggcctcattcccataaccaggcccagaagaaagaagaaactatcagttccccagaagctaacgtccagacccaacacccacactatagccgcgaagagctcaattcaatgactctgggagaggtggagcagctcaacgctaaactcttgcaacagattcaatag

SEQ ID NO: 193277 - protein, 332 aa, Artificial Sequence
  derived and/or modified sequence
MSTVKEQLIEKLIEDDENSQCKITIVGTGAVGMACAISILLKDLADELALVDVALDKLKGEMMDLQHGSLFFSTSKITSGKDYSVSANSRIVIVTAGARQQEGETRLALVQRNVAIMKSIIPAIVHYSPDCKILVVSNPVDILTYIVWKISGLPVTRVIGSGCNLDSARFRYLIGEKLGVHPTSCHGWIIGEHGDSSVPLWSGVNVAGVALKTLDPKLGTDSDKEHWKNIHKQVIQSAYEIIKLKGYTSWAIGLSVMDLVGSILKNLRRVHPVSTMVKGLYGIKEELFLSIPCVLGRNGVSDVVKINLNSEEEALFKKSAETLWNIQKDLIF

SEQ ID NO: 193278 - DNA, 999 bp, Artificial Sequence
  derived and/or modified sequence
atgagcaccgtgaaggagcagctcattgagaagctaatagaggatgatgagaacagccagtgcaagatcacaattgtcggtactggggccgttggaatggcttgtgccatctccatcctgctcaaagatctagccgatgagctcgccctggtcgatgttgcgctggacaagcttaagggcgaaatgatggatctccagcacgggtccctgtttttttctacctcaaaaattacctctggtaaggactatagtgtctccgccaatagcaggattgtcatagtcacagcaggcgctcgtcagcaggagggcgaaacgcggctagctctcgtacagcgaaatgtagccatcatgaaatccattatcccagctatcgtgcactattccccagactgtaagattctcgtggtgagtaaccctgtggacatcctgacgtacatagtttggaaaatttctggtctcccagtgactcgagtgattgggagcgggtgtaacctcgacagcgccaggttccgataccttattggcgagaagcttggggtacatcctacatcctgccacggatggatcatcggagagcacggagacagctctgtgcctctttggtcaggggtaaacgtagctggggtggcattgaaaacactggatcccaagctgggcaccgattccgataaagagcactggaagaacatacacaagcaggtgatccagagcgcctacgagatcattaaactgaagggctacactagctgggcaatagggctttccgtgatggacctcgtgggctccatcctgaagaatcttaggcgcgtacacccagtgagtacaatggtgaaaggactctacggcattaaggaggagctctttctatctataccttgtgtccttgggcggaatggggtgagcgacgtcgttaaaattaatctgaactcggaggaggaggccttattcaagaagagcgcagaaactctgtggaatattcagaaggacctaattttttag

SEQ ID NO: 193279 - DNA, 999 bp, Artificial Sequence
  derived and/or modified sequence
atgtccactgttaaagagcagctcatagagaaactcattgaagacgacgagaacagccagtgcaagatcactatcgttgggaccggagccgtggggatggcatgtgcaatctcaattctgttaaaggacctggccgatgagttggcactggtggacgtggcactagacaagctcaagggggaaatgatggatctccagcatggatctctgttcttttcgacctctaagataacaagcggcaaggattactcagtctctgccaactcccgtatcgtaatagtgactgccggcgcaagacaacaagagggggaaacaaggctggccctggtgcaaagaaacgttgctattatgaaatccattattccagccatcgtccattattcaccagactgcaaaatcctcgtggtgagcaatcccgtcgatatcctcacctacattgtttggaagatctcaggactccccgtcacccgagttatagggagtggatgcaacttagacagcgcccgctttcgatacctcatcggagagaaactgggcgtgcaccctacctcttgtcacgggtggataattggcgagcatggagacagcagcgtcccactgtggagtggagttaacgtggctggcgtagcactgaaaaccctggatccaaagttaggcactgacagcgacaaggagcactggaaaaacatccataaacaggtcatccagagcgcttatgagatcatcaagttaaagggctacacatcttgggccatcggcctcagtgtgatggacctggtgggatccatcctcaagaatcttagacgggtgcaccccgtgtctacaatggtgaagggattgtatgggataaaggaggagctattcctctcaatcccatgtgtcttgggccgcaacggagtttctgacgtggtgaaaatcaatctcaattcggaggaagaagcgttgtttaagaagtctgccgagacattgtggaatatccagaaagacttgattttctag

SEQ ID NO: 193280 - DNA, 1256 bp, Artificial Sequence
  derived and/or modified sequence
ggcaaccgtcgacgggcttagcgcctcaactgtcgttggtgtatttttctggtgtcacttctgtgccttccttcaaaggtggtgctttgtccctgtgggtcatctgtactgattgcgccaagcaaagcatttgttctccaaatgtcaactgtcaaggagcagctaattgagaagctaattgaggatgatgaaaactcccagtgtaaaattactattgttggaactggtgccgtaggcatggcttgtgctattagtatcttactgaaggatttggctgatgaacttgcccttgttgatgttgcattggacaaactgaagggagaaatgatggatcttcagcatggcagtcttttctttagtacttcaaagattacttctggaaaagattacagtgtatctgcaaactccagaatagttattgtcacagcaggtgcaaggcagcaggagggagaaactcgccttgccctggtccaacgtaatgtggctataatgaaatcaatcattcctgccatagtccattatagtcctgattgtaaaattcttgttgtttcaaatccagtggatattttgacatatatagtctggaagataagtggcttacctgtaactcgtgtaattggaagtggttgtaatctagactctgcccgtttccgttacctaattggagaaaagttgggtgtccaccccacaagctgccatggttggattattggagaacatggtgattctagtgtgcccttatggagtggggtgaatgttgctggtgttgctctgaagactctggaccctaaattaggaacggattcagataaggaacactggaaaaatatccataaacaagttattcaaagtgcctatgaaattatcaagctgaaggggtatacctcttgggctattggactgtctgtgatggatttggtaggatccattttgaaaaatcttaggagagtgcacccagtttccaccatggttaagggattatatggaataaaagaagaactctttctcagtatcccttgtgtcttggggcggaatggtgtctcagatgttgtgaaaattaacttgaattctgaggaggaggcccttttcaagaagagtgcagaaacactttggaatattcaaaaggatctaatattttaaattaaagccttctaatgttccactgtttggagaacagaagatagcaggctgtgtattttaaattttgaaagtattttcatttgatctttaaaaaataaaaacaaattggagacctg

SEQ ID NO: 193281 - DNA, 2041 bp, Artificial Sequence
  derived and/or modified sequence
gtgcgtgtctcgagtcgcacggagggcaaccgtcgacgggcttagcgcctcaactgtcgttggtgtatttttctggtgtcacttctgtgccttccttcaaaggttctccaaatgtcaactgtcaaggagcagctaattgagaagctaattgaggatgatgaaaactcccagtgtaaaattactattgttggaactggtgccgtaggcatggcttgtgctattagtatcttactgaaggatttggctgatgaacttgcccttgttgatgttgcattggacaaactgaagggagaaatgatggatcttcagcatggcagtcttttctttagtacttcaaagattacttctggaaaagattacagtgtatctgcaaactccagaatagttattgtcacagcaggtgcaaggcagcaggagggagaaactcgccttgccctggtccaacgtaatgtggctataatgaaatcaatcattcctgccatagtccattatagtcctgattgtaaaattcttgttgtttcaaatccagtggatattttgacatatatagtctggaagataagtggcttacctgtaactcgtgtaattggaagtggttgtaatctagactctgcccgtttccgttacctaattggagaaaagttgggtgtccaccccacaagctgccatggttggattattggagaacatggtgattctagtgtgcccttatggagtggggtgaatgttgctggtgttgctctgaagactctggaccctaaattaggaacggattcagataaggaacactggaaaaatatccataaacaagttattcaaagtgcctatgaaattatcaagctgaaggggtatacctcttgggctattggactgtctgtgatggatttggtaggatccattttgaaaaatcttaggagagtgcacccagtttccaccatggttaagggattatatggaataaaagaagaactctttctcagtatcccttgtgtcttggggcggaatggtgtctcagatgttgtgaaaattaacttgaattctgaggaggaggcccttttcaagaagagtgcagaaacactttggaatattcaaaaggatctaatattttaaattaaagccttctaatgttccactgtttggagaacagaagatagcaggctgtgtattttaaattttgaaagtattttcatttgatctttaaaaaataaaaacaaattggagacctgtgacataactctagtctctcaagattagaacgagcaaatggtaaagagattttcctctttaagaatcatttatagctctattctaatgatacccaatctgtacaggtgtaagttatacttctgaggtatgtcacatatgttagagtgccttcagatgtagtagaatatgtataatcactataatacagagctttgattcttttcacaaaccaagccctttttctagtattacaattttatcttgtactttcatccgttagagtaccagcatattcacttcattacattagcgtcatatgtttatgtataatcattataaatgtggccgggcactgcagcctgggtgaaagagtgaggctctgtctcaaaaaaaatcattataaatgcttatttttaagaccatatatatcaaaaagaaataaaaagctgagtgctgtggctcatggctgtaatcccagtgctttgggagggtgaggcaagaggatcacatgagtccaggagtttgagaccagccttggcaacatagcaacaccccatctctacaaaaataaagaaattagatgtggtggcctgcatctgtagtccagctacttgggagactgagaccagtagataacttgagcccaggagttcaaggctatgattgtgtcactgcactccagcctgggccacagaggaagactcagactcaaaagaagaagaagaacacagaagaaaagcagaaacaagaagaagatacagatgtaactttacgatgtaaaaaatctaaataagattgtattcaactctgcaagtattatactagtcatataaac

SEQ ID NO: 193282 - DNA, 999 bp, Artificial Sequence
  derived and/or modified sequence
atgagcacagtgaaggagcagctgattgagaagctgattgaagatgatgagaacagccagtgcaagatcaccatcgtgggcaccggggctgtgggcatggcctgtgccatcagcatcctgctgaaggacctggctgatgagctggccctggtggatgtggccctggacaagctgaagggggagatgatggacctgcagcacggcagcctcttcttcagcaccagcaagatcaccagcggcaaggactacagcgtgtctgccaacagcagaattgtgattgtgacagctggggcccggcagcaggagggggagacccggctggccctggtgcagagaaatgtggccatcatgaagagcatcatcccagccatcgtgcactacagcccagactgcaagatcctggtggtgagcaaccctgtggacatcctgacctacatcgtgtggaagatcagcggcctgcctgtgaccagggtgattggcagcggctgcaacctggacagcgcccgcttccgctacctgattggagagaagctgggcgtgcaccccaccagctgccacggctggatcatcggggagcacggggacagctctgtgcccctgtggagcggcgtgaatgtggccggcgtggccctgaagaccctggaccccaagctgggcacagacagcgacaaggagcactggaagaacatccacaagcaggtgatccagagcgcctatgagatcatcaagctgaagggctacacctcctgggccatcggcctgtctgtgatggacctggtgggcagcatcctgaagaacctgcggcgggtgcaccctgtgtccaccatggtgaagggcctgtatggcatcaaggaggagctgttcctgagcatcccctgtgtgctgggcagaaatggagtgtctgatgtggtgaagatcaacctgaacagcgaggaggaggccctcttcaagaagtctgctgagaccctgtggaacatccagaaggacctgatcttctag

SEQ ID NO: 193283 - DNA, 999 bp, Artificial Sequence
  derived and/or modified sequence
atgagcaccgtgaaggagcagctgatcgagaagctgatcgaggacgatgagaatagccagtgcaaaatcactatagttggcacgggcgccgttggcatggcctgcgcaatctctattctgctgaaggacctggcggacgagttggccttggtagacgtggcactcgacaaactgaagggagaaatgatggacctgcaacatggatctctctttttcagcacatccaaaataacctccggtaaagactattcagtcagtgccaattcacgaattgtgatagtgaccgctggtgcaagacaacaggagggcgagacacgcctcgcactggtacagagaaacgtggcaataatgaagagcatcattccggccatcgtgcactacagtccagattgtaaaatcctcgttgttagcaatccagtggacattctgacatatatagtgtggaaaatatctggccttcccgttacaagagtcattggatccgggtgtaacttggattcagcacgcttccgatacctcatcggcgagaagctgggcgttcaccctaccagctgtcacgggtggattatcggtgaacatggagatagcagtgtgcctctgtggtcaggagtcaatgtcgccggcgtggctctgaaaaccctggaccccaaattaggaactgattctgataaagagcactggaagaatatccacaagcaagtgatacagtccgcctacgagatcattaaactcaagggttacacatcctgggctatcggattgagcgtgatggacctggtaggctctatattgaagaacctccgccgtgtgcatcccgtgagtaccatggtcaaaggtctgtacggcatcaaggaggaactgtttctgagtattccttgcgtgctcggtcggaatggtgtctccgacgtggttaaaatcaaccttaattctgaggaggaggctctgtttaagaaaagcgccgagactctgtggaacatccagaaagacttgatcttttag

SEQ ID NO: 193284 - DNA, 999 bp, Artificial Sequence
  derived and/or modified sequence
atgagcaccgtgaaggagcagctgatcgagaagctgatcgaggacgacgagaattcccagtgcaaaatcaccatcgtgggtacaggagctgtggggatggcctgcgcaatatccatccttttaaaagacttggctgatgaattggccctggtggatgtagcacttgacaaacttaagggggagatgatggatttgcagcacggcagcctcttcttctcaaccagcaaaataaccagtgggaaagactacagtgtgagcgctaacagccgaattgttatcgtaaccgccggagctcgtcagcaggaaggggagacccgacttgctctagtgcagagaaatgttgccattatgaagtccatcattcccgccatcgtgcactattcccccgactgcaaaatcctggtcgtatccaacccggtggacattctgacatacatagtgtggaaaattagtggcttgcccgtgactagggttatcggttccggttgtaacctggacagtgccaggtttagatatttaatcggagagaagctcggcgtgcacccgacgtcttgccatggctggatcatcggtgagcacggggactcctctgtgccactctggagcggcgttaatgttgcaggcgtggccctgaaaacactcgatcccaagctgggcacagattccgataaagagcactggaaaaacattcacaagcaagttatccaaagcgcatatgaaatcatcaagctgaaaggctacacaagttgggcaatcggcctgtcagtcatggacctcgtcgggtctatcctgaagaacctcagacgggttcaccctgtgtctaccatggtgaagggactgtacgggattaaggaagagctattcttgtccataccgtgcgtcctgggaagaaatggggtgagcgacgtggtcaaaatcaacctcaattctgaggaggaggccctattcaaaaagtcagctgaaactctgtggaatattcagaaggacctaatattttag

SEQ ID NO: 193285 - DNA, 999 bp, Artificial Sequence
  derived and/or modified sequence
atgtcaactgtcaaagagcagctcatcgagaagctgatcgaggacgacgaaaactcccagtgcaaaataactattgtggggaccggcgctgtgggaatggcttgtgcgattagcattctgctgaaggaccttgcagatgagcttgccctggtcgatgtcgctctggacaagctgaagggtgaaatgatggatctgcaacacggctccctgttctttagcactagcaaaatcacatcagggaaggattatagtgtcagcgccaattctcggatagtcattgtgacagcgggtgctcgccaacaggagggcgaaacccgattggccctcgttcagaggaatgttgccattatgaaatccatcatcccggcaattgtccattactcccccgattgtaaaatcttagtggtgtctaaccctgtggatatcttgacctacattgtttggaaaatctctgggctgccagtcactagagtgatcggctctggctgtaacctcgactcagcacggtttcgttatctgatcggggaaaaattaggcgtgcatccaacgtcctgccacggatggatcattggagagcatggggattcaagcgtacccctttggagcggggtcaatgtcgccggtgtagccttaaaaacccttgatcccaagctcggaacagattctgacaaagaacattggaagaatatacataaacaagttattcagtcagcctatgaaattattaagctgaaagggtacacaagctgggccatcggtttgagtgtcatggacctggtaggcagcatcctcaaaaacttgaggagggtgcatcccgtcagtacaatggtcaaagggctgtatggaatcaaagaagagcttttcctgtcgattccgtgcgtgctcggaagaaatggtgtcagcgacgttgtcaaaattaacctcaatagtgaggaagaagcattattcaaaaaaagtgcagaaaccctctggaatattcagaaagatctgattttctag

SEQ ID NO: 193286 - DNA, 999 bp, Artificial Sequence
  derived and/or modified sequence
atgtcaaccgtcaaggaacagctgattgaaaagcttattgaggacgacgaaaacagccagtgcaaaattacgatcgtggggacaggagcagtgggaatggcctgtgctatctctatccttcttaaagacttagccgacgagcttgcactcgttgacgttgctttagataagctgaaaggagagatgatggacctacaacatggatctctcttcttttccacatcgaagatcacgtctggtaaagactattctgtgtccgcaaactcacgcatagtcatcgtgacggccggagccagacagcaggagggagagactcggctggctctggtccagcgaaatgtcgcaataatgaaaagcatcatacccgctattgtgcactacagtccagattgcaaaatcctggttgtttcaaatccagtggatatactaacgtacatcgtgtggaaaatttctggcctccccgtgactcgcgtcattggaagcgggtgtaatctcgattccgcccgattccggtatttgattggagaaaaacttggcgtccaccctacctcttgtcacggttggatcattggcgagcatggggattctagtgtacctctgtggtcgggcgtcaacgtggccggtgtagcccttaagaccctggatcccaagttggggaccgatagcgataaagaacactggaagaacatccacaagcaggtcatccagtccgcctatgaaatcattaagctgaagggttacacatcatgggccattggtctgtcggtgatggatttggtcggcagtatcctgaaaaatctacgccgtgtgcaccccgtctccaccatggtgaagggcttatacgggataaaggaagagctgttcctgagtatcccatgcgtgctgggcaggaacggggtgtcagatgtcgtgaaaataaatctcaattccgaggaggaagccctctttaagaagtccgccgagacgctctggaatatccagaaggacctgattttctag

SEQ ID NO: 193287 - DNA, 999 bp, Artificial Sequence
  derived and/or modified sequence
atgagcaccgtgaaggagcagctgatcgagaagctgatcgaggacgacgagaacagccagtgcaagatcaccatcgtgggcaccggcgccgtgggcatggcctgcgccatcagcatcctgctgaaggacctggccgacgagctggccctggtggacgtggccctggacaagctgaagggcgagatgatggacctgcagcacggcagcctgttcttcagcaccagcaagatcaccagcggcaaggactacagcgtgagcgccaacagcagaatcgtgatcgtgaccgccggcgccagacagcaggagggcgagaccagactggccctggtgcagagaaacgtggccatcatgaagagcatcatccccgccatcgtgcactacagccccgactgcaagatcctggtggtgagcaaccccgtggacatcctgacctacatcgtgtggaagatcagcggcctgcccgtgaccagagtgatcggcagcggctgcaacctggacagcgccagattcagatacctgatcggcgagaagctgggcgtgcaccccaccagctgccacggctggatcatcggcgagcacggcgacagcagcgtgcccctgtggagcggcgtgaacgtggccggcgtggccctgaagaccctggaccccaagctgggcaccgacagcgacaaggagcactggaagaacatccacaagcaggtgatccagagcgcctacgagatcatcaagctgaagggctacaccagctgggccatcggcctgagcgtgatggacctggtgggcagcatcctgaagaacctgagaagagtgcaccccgtgagcaccatggtgaagggcctgtacggcatcaaggaggagctgttcctgagcatcccctgcgtgctgggcagaaacggcgtgagcgacgtggtgaagatcaacctgaacagcgaggaggaggccctgttcaagaagagcgccgagaccctgtggaacatccagaaggacctgatcttctag

SEQ ID NO: 193288 - protein, 282 aa, Artificial Sequence
  derived and/or modified sequence
MSGSSLPSALALSLLLVSGSLLPGPGAAQNEPRIVTSEEVIIRDSPVLPVTLQCNLTSSSHTLTYSYWTKNGVELSATRKNASNMEYRINKPRAEDSGEYHCVYHFVSAPKANATIEVKAAPDITGHKRSENKNEGQDATMYCKSVGYPHPDWIWRKKENGMPMDIVNTSGRFFIINKENYTELNIVNLQITEDPGEYECNATNAIGSASVVTVLRVRSHLAPLWPFLGILAEIIILVVIIVVYEKRKRPDEVPDDDEPAGPMKTNSTNNHKDKNLRQRNTN

SEQ ID NO: 193289 - DNA, 849 bp, Artificial Sequence
  derived and/or modified sequence
atgagcggttcatcccttccctccgctctagcactctctctcctcctagtcagcgggtcactacttcctgggcctggggcagcgcagaacgaacctcggatcgtgactagtgaggaagtgatcatccgtgactcacccgtcctgcctgtgacccttcagtgcaatttgacctctagctcacatactctgacgtacagctattggactaaaaacggcgtcgagctgagcgccactcgcaagaacgctagtaatatggagtacaggattaataaaccccgagccgaagactctggggagtaccactgcgtgtatcattttgtgtcggcaccaaaggcgaacgctacaatcgaagtgaaggccgccccagatattactggacacaaacgaagcgaaaacaaaaacgaaggccaggacgccaccatgtactgcaagtccgtgggttatccccaccctgactggatctggcgtaagaaggaaaacggaatgcccatggacatcgtgaacacttctggacggttttttatcattaataaggagaactatacagagttgaacatcgtgaatctgcaaattaccgaagatccaggcgagtacgagtgtaatgccacaaacgctataggcagcgcctcagtggtgactgtgttacgcgtgcgttctcaccttgctccactgtggcctttcctgggcatactggctgaaattatcatcctcgtggtgatcatcgttgtgtacgagaaacggaaacggccagatgaggtgcctgatgatgacgaaccggcaggtccaatgaagacgaatagcaccaataaccataaggataagaacctgcgccagcggaacacaaactag

SEQ ID NO: 193290 - DNA, 582 bp, Artificial Sequence
  derived and/or modified sequence
atgagcggtagttccctgcccagtgccctcgccctatctctgctgttggtgagcggttctctcttgcctggacccggtgccgcccagaatgcggcccctgacattaccggccacaagcgctctgaaaataagaacgaaggtcaagatgcaacaatgtactgcaaaagcgtcggctacccccatcctgactggatctggaggaagaaagaaaacgggatgcctatggatatagtcaacacctctgggagattttttataatcaataaggagaactataccgagttgaatattgtgaacttgcagatcaccgaggacccgggagaatatgagtgtaatgccacaaacgcaatagggagcgccagcgtggttacggtgctaagagtccggtcacatctggcgcctttatggcccttcttgggtattcttgccgaaatcatcattcttgtggtgatcattgtggtgtacgagaaacggaagcggcccgatgaagtgcccgacgacgatgagcctgcagggccaatgaagacaaacagtacgaacaaccacaaggataagaaccttcgccagcgcaacaccaattag

SEQ ID NO: 193291 - DNA, 849 bp, Artificial Sequence
  derived and/or modified sequence
atgagcggcagcagcctgcccagcgccctggccctgagcctgctgctggtgtctggcagcctgctgcccggccctggagctgcccagaatgagccccgcatcgtgaccagcgaggaggtgatcatccgggacagccctgtgctgcctgtgaccctgcagtgcaacctgaccagcagcagccacaccctgacctacagctactggaccaagaatggagtggagctgagcgccaccaggaagaatgccagcaacatggagtaccgcatcaacaagcccagggcagaagattctggagagtaccactgtgtgtaccactttgtgtctgcccccaaggccaatgccaccatcgaggtgaaggccgccccagacatcaccggccacaagagaagtgagaacaagaatgaaggccaggatgccaccatgtactgcaagtctgtgggctacccccacccagactggatctggaggaagaaggaaaatggcatgcccatggacatcgtgaacaccagcggccgcttcttcatcatcaacaaggagaactacacagagctgaacatcgtgaacctgcagatcacagaagatcctggagaatatgaatgtaatgccaccaatgccatcggcagcgcctctgtggtgacagtgctgcgggtgcgcagccacctggcccccctgtggcccttcctgggcatcctggccgagatcatcatcctggtggtgatcatcgtggtgtatgagaagaggaagaggccagatgaggtgcctgatgatgatgagcccgccggccccatgaagaccaacagcaccaacaaccacaaggacaagaacctgcggcagaggaacaccaactag

SEQ ID NO: 193292 - DNA, 582 bp, Artificial Sequence
  derived and/or modified sequence
atgagcggcagcagcctgcccagcgccctggccctgagcctgctgctggtgtctggcagcctgctgcccggccctggagctgcccagaatgctgccccagacatcaccggccacaagaggtctgagaacaagaatgaaggccaggatgccaccatgtactgcaagtctgtgggctacccccacccagactggatctggaggaagaaggaaaatggcatgcccatggacatcgtgaacaccagcggccgcttcttcatcatcaacaaggagaactacacagagctgaacatcgtgaacctgcagatcacagaggaccccggggagtatgagtgcaatgccaccaatgccatcggcagcgcctctgtggtgacagtgctgcgggtgcgcagccacctggcccccctgtggcccttcctgggcatcctggccgagatcatcatcctggtggtgatcatcgtggtgtatgagaagaggaagaggccagatgaggtgcctgatgatgatgagcctgctggccccatgaagaccaacagcaccaacaaccacaaggacaagaacctgcggcagaggaacaccaactag

SEQ ID NO: 193293 - DNA, 849 bp, Artificial Sequence
  derived and/or modified sequence
atgagcggcagcagcctgcccagcgccctggccctgagcctgctgcttgtgtcgggttctctcctccccggacccggagccgctcagaacgagccgcgcatcgtgacctccgaggaggtgatcatcagggattccccagttctgccagttacgcttcagtgcaatttgaccagtagttctcataccctgacctactcttattggaccaaaaacggggttgagctgagtgcaacgcggaagaacgcatcaaacatggaataccgaataaataagcctcgagcagaggactcaggtgagtatcactgcgtgtatcactttgtgagcgctccgaaggccaatgctacaatcgaggtcaaagccgctcccgatattaccgggcataaacgctctgagaataagaatgagggccaggacgccaccatgtattgcaaatctgtgggatatccccaccctgactggatctggagaaaaaaggagaatgggatgccaatggacattgtcaatacgtccggtcggttttttatcattaacaaggagaactatacagagctgaacattgtgaatctgcaaattacagaagatcccggagagtacgagtgcaatgccactaacgccattggatccgcctcggtcgtgaccgtcctaagagttcgctcacatcttgcacctctttggccattcctcggaattttggcagaaatcattattcttgtcgtgatcatagtggtctatgagaagcgaaaacgcccagacgaagtgcccgacgacgacgagcctgccggcccgatgaagaccaattctactaataaccataaggacaagaatctgaggcagaggaatacgaactag

SEQ ID NO: 193294 - DNA, 582 bp, Artificial Sequence
  derived and/or modified sequence
atgagcggcagcagcctgcccagcgccctggccctgagcctgctgctggtgtcaggctctttacttcccggtcctggggcggcccagaacgctgccccagacattacgggacacaagagaagcgagaacaagaacgaaggtcaagacgccacgatgtattgtaagagcgtcggatatccccatcccgattggatctggagaaagaaggagaacggaatgcctatggacatcgtgaacacatccggcagatttttcattatcaataaggagaactacaccgaactcaatatcgttaatttacagattactgaagaccccggcgaatatgaatgcaacgcaaccaatgccatcggaagcgcctcagttgttactgttctgagggttaggtcccacctggcccctttatggcccttcttagggatattggcagaaattataatcctagtcgtaattattgtcgtctacgagaagcgtaaaagaccagacgaggtgcctgatgatgatgaaccagccggtcctatgaaaacaaactctaccaacaaccataaagacaagaatttgcgccagcgcaataccaattag

SEQ ID NO: 193295 - DNA, 2098 bp, Artificial Sequence
  derived and/or modified sequence
cccacgacccggagcgaaggtctcgcgaggcctgggcgctgcggcggcaggaggaggacggggaaggacggagccgagccgcggctgcctccctcgctcactccctcgcgcactcgcccgccccctccctccctcccctcccttccccggccccggctctggccccggcccattcgctgttgggtcttctgctagggaggatgtcgggttcgtcgctgcccagcgccctggccctctcgctgttgctggtctctggctccctcctcccagggccaggcgccgctcagaacgagccaaggattgtcaccagtgaagaggtcattattcgagacagccctgttctccctgtcaccctgcagtgtaacctcacctccagctctcacacccttacatacagctactggacaaagaatggggtggaactgagtgccactcgtaagaatgccagcaacatggagtacaggatcaataagccgagagctgaggattcaggcgaataccactgcgtatatcactttgtcagcgctcctaaagcaaacgccaccattgaagtgaaagccgctcctgacatcactggccataaacggagtgagaacaagaatgaagggcaggatgccactatgtattgcaagtcagttggctacccccacccagactggatatggcgcaagaaggagaacgggatgcccatggacattgtcaatacctctggccgcttcttcatcatcaacaaggaaaattacactgagttgaacattgtgaacctgcagatcacggaagaccctggcgagtatgaatgtaatgccaccaacgccattggctccgcctctgttgtcactgtcctcagggtgcggagccacctggccccactctggcctttcttgggaattctggctgaaattatcatccttgtggtgatcattgttgtgtatgagaagaggaagaggccagatgaggttcctgacgatgatgaaccagctggaccaatgaaaaccaactctaccaacaatcacaaagataaaaacttgcgccagagaaacacaaattaagtactgcttacaatatctttaggttcctgaaactggtggcaacatgacctgctaaaattttctgcttggacctctttggttctctcccctttcaagtgagcaacaccacaatgactgtctaaagcatgccttatttagcctctcctgtaagggtgatctagccaggtacattttaaacaatgcttcagtgtagaaggtgtaaactattttgggcttgatgtgctgtgaatgttgcttttttttttcctttgttaaaatatttaaatagaagtgaaaaggtcctctgaggatcagatcatgcatgcgccattttttacttaatgcagctgttaaattggcaaagctctaaaatgcactgctgccatctagtgatacacttttgtaaagtacagcaaaacctacagatatatacagtatataaatatatatatatatatatttatatttttgggggtgggagaaatccaaaataaagtaaatgcttgtttcatttttaagctgctgatattcattccttattgtatgttgtcagatgaggaaattgtgcagttctggtacataaagatgagtaatataaactgaaatctataattttaagggcttaacctgtgactttaataagctggaacagtccactgaatgggtataatgaattgcagtatatacgtatgattgctttttaagtgattatcttttcttctgttaagtcatgtaaattcataaatccttttgcactgatgtgttgaaccttattcttgtacattcattcaatcaaggcaaacttttataatttttcttttgtttccaatgaccttgaaatgttatagcatggtaatattctatgcaactatagttatactttttggtttgacactgtattttttcacattgatttactggttgatgatagattttataacctaacggttctcatgcggtgcgtaattgtagatgcatgtacttgtgtgttttgtgtaattattgaagtgcaatgatgtataaaaaagtggattcacctgtttttaaaaataaaacattgataaaaggtg

SEQ ID NO: 193296 - DNA, 858 bp, Artificial Sequence
  derived and/or modified sequence
cattcgctgttgggtcttctgctagggaggatgtcgggttcgtcgctgcccagcgccctggccctctcgctgttgctggtctctggctccctcctcccagggccaggcgccgctcagaacgccgctcctgacatcactggccataaacggagtgagaacaagaatgaagggcaggatgccactatgtattgcaagtcagttggctacccccacccagactggatatggcgcaagaaggagaacgggatgcccatggacattgtcaatacctctggccgcttcttcatcatcaacaaggaaaattacactgagttgaacattgtgaacctgcagatcacggaagaccctggcgagtatgaatgtaatgccaccaacgccattggctccgcctctgttgtcactgtcctcagggtgcggagccacctggccccactctggcctttcttgggaattctggctgaaattatcatccttgtggtgatcattgttgtgtatgagaagaggaagaggccagatgaggttcctgacgatgatgaaccagctggaccaatgaaaaccaactctaccaacaatcacaaagataaaaacttgcgccagagaaacacaaattaagtactgcttacaatatctttaggttcctgaaactggtggcaacatgacctgctaaaattttctgcttggacctctttggttctctcccctttcaagtgagcaacaccacaatgactgtctaaagcatgccttatttagcctctcctgtaagggtgatctagccaggtacattttaaacaatgcttcagtgtagaaggtgtaaactattttgggcttgatgtgctgtgaatgttgcttttttttttc

SEQ ID NO: 193297 - DNA, 849 bp, Artificial Sequence
  derived and/or modified sequence
atgagcggctcctctctcccaagcgctctagcactgtcattgctccttgtctcaggctcactgctccctggccctggcgcagcgcagaacgagccacgcattgtgacctctgaggaggtcataattagggatagccccgtactgccagtcacactccagtgtaacctcacttcttcaagtcatacacttacttacagctactggacgaaaaacggcgtggagctctctgccaccagaaaaaacgcctcaaacatggaataccgtatcaataagcctcgggctgaggactcaggcgaatatcactgtgtgtatcactttgtcagcgcacccaaggctaacgccactattgaggtgaaagcagcgccagacatcactggtcacaaacggagcgaaaataagaatgagggccaggatgctaccatgtactgtaaaagcgttggttacccccatcctgactggatctggcgcaaaaaggagaacgggatgcctatggatatcgtgaacacctctggtaggttttttattattaacaaggaaaactataccgagttaaacatcgtgaacctacagataactgaggacccaggtgagtatgagtgtaatgctactaatgccattggaagcgctagcgtagtaactgtgcttagggtaagaagtcaccttgctccattatggccatttttgggcattctggccgagataatcatcctggtggtgatcatagtagtgtatgagaaacgcaagaggccggatgaggtgcccgatgacgacgagcccgctggaccgatgaagactaactccactaacaaccacaaggacaagaacctgcggcaaagaaatacaaactag

SEQ ID NO: 193298 - DNA, 582 bp, Artificial Sequence
  derived and/or modified sequence
atgtccgggtcctctctgccctcggccctggccctcagtctgctgcttgtgagcggatctctgcttcctgggccaggggcagcccagaatgccgctccggacattacaggccacaagcggagcgagaacaagaacgagggtcaggatgctacgatgtactgtaagtctgtgggataccctcatccagactggatctggagaaagaaagagaatgggatgccaatggacattgtgaacacgagtggaagattttttatcatcaataaagaaaattatactgagctgaatatagtgaatctccagatcacagaagatccgggagaatacgaatgtaacgctacaaatgcaattggcagtgcatccgtagtaactgtgctgagagtgcgatcacatttagcccctttgtggcctttcttgggcatactggccgagatcattattctggtggtgatcatcgttgtctacgagaagagaaaaagacctgatgaagtgccagatgacgatgagcccgcaggaccgatgaagaccaattctactaataatcacaaagataaaaatctgagacagcgaaataccaattag

SEQ ID NO: 193299 - DNA, 849 bp, Artificial Sequence
  derived and/or modified sequence
atgagcggcagcagcctgcccagcgccctggccctgagcctgctgctggtgagcggcagcctgctgcccggccccggcgccgcccagaacgagcccagaatcgtgaccagcgaggaggtgatcatcagagacagccccgtgctgcccgtgaccctgcagtgcaacctgaccagcagcagccacaccctgacctacagctactggaccaagaacggcgtggagctgagcgccaccagaaagaacgccagcaacatggagtacagaatcaacaagcccagagccgaggacagcggcgagtaccactgcgtgtaccacttcgtgagcgcccccaaggccaacgccaccatcgaggtgaaggccgcccccgacatcaccggccacaagagaagcgagaacaagaacgagggccaggacgccaccatgtactgcaagagcgtgggctacccccaccccgactggatctggagaaagaaggagaacggcatgcccatggacatcgtgaacaccagcggcagattcttcatcatcaacaaggagaactacaccgagctgaacatcgtgaacctgcagatcaccgaggaccccggcgagtacgagtgcaacgccaccaacgccatcggcagcgccagcgtggtgaccgtgctgagagtgagaagccacctggcccccctgtggcccttcctgggcatcctggccgagatcatcatcctggtggtgatcatcgtggtgtacgagaagagaaagagacccgacgaggtgcccgacgacgacgagcccgccggccccatgaagaccaacagcaccaacaaccacaaggacaagaacctgagacagagaaacaccaactag

SEQ ID NO: 193300 - DNA, 582 bp, Artificial Sequence
  derived and/or modified sequence
atgagcggcagcagcctgcccagcgccctggccctgagcctgctgctggtgagcggcagcctgctgcccggccccggcgccgcccagaacgccgcccccgacatcaccggccacaagagaagcgagaacaagaacgagggccaggacgccaccatgtactgcaagagcgtgggctacccccaccccgactggatctggagaaagaaggagaacggcatgcccatggacatcgtgaacaccagcggcagattcttcatcatcaacaaggagaactacaccgagctgaacatcgtgaacctgcagatcaccgaggaccccggcgagtacgagtgcaacgccaccaacgccatcggcagcgccagcgtggtgaccgtgctgagagtgagaagccacctggcccccctgtggcccttcctgggcatcctggccgagatcatcatcctggtggtgatcatcgtggtgtacgagaagagaaagagacccgacgaggtgcccgacgacgacgagcccgccggccccatgaagaccaacagcaccaacaaccacaaggacaagaacctgagacagagaaacaccaactag

SEQ ID NO: 193301 - protein, 397 aa, Artificial Sequence
  derived and/or modified sequence
MEEDDSYVPSDLTAEERQELENIRRRKQELLADIQRLKDEIAEVANEIENLGSTEERKNMQRNKQVAMGRKKFNMDPKKGIQFLIENDLLKNTCEDIAQFLYKGEGLNKTAIGDYLGERDEFNIQVLHAFVELHEFTDLNLVQALRQFLWSFRLPGEAQKIDRMMEAFAQRYCQCNNGVFQSTDTCYVLSFAIIMLNTSLHNPNVKDKPTVERFIAMNRGINDGGDLPEELLRNLYESIKNEPFKIPEDDGNDLTHTFFNPDREGWLLKLGGRVKTWKRRWFILTDNCLYYFEYTTDKEPRGIIPLENLSIREVEDSKKPNCFELYIPDNKDQVIKACKTEADGRVVEGNHTVYRISAPTPEEKEEWIKCIKAAISRDPFYEMLAARKKKVSSTKRH

SEQ ID NO: 193302 - DNA, 1194 bp, Artificial Sequence
  derived and/or modified sequence
atggaggaggacgacagctacgtgcccagcgacctgaccgccgaggagagacaggagctggagaacatcagaagaagaaagcaggagctgctggccgacatccagagactgaaggacgagatcgccgaggtggccaacgagatcgagaacctgggcagcaccgaggagagaaagaacatgcagagaaacaagcaggtggccatgggcagaaagaagttcaacatggaccccaagaagggcatccagttcctgatcgagaacgacctgctgaagaacacctgcgaggacatcgcccagttcctgtacaagggcgagggcctgaacaagaccgccatcggcgactacctgggcgagagagacgagttcaacatccaggtgctgcacgccttcgtggagctgcacgagttcaccgacctgaacctggtgcaggccctgagacagttcctgtggagcttcagactgcccggcgaggcccagaagatcgacagaatgatggaggccttcgcccagagatactgccagtgcaacaacggcgtgttccagagcaccgacacctgctacgtgctgagcttcgccatcatcatgctgaacaccagcctgcacaaccccaacgtgaaggacaagcccaccgtggagagattcatcgccatgaacagaggcatcaacgacggcggcgacctgcccgaggagctgctgagaaacctgtacgagagcatcaagaacgagcccttcaagatccccgaggacgacggcaacgacctgacccacaccttcttcaaccccgacagagagggctggctgctgaagctgggcggcagagtgaagacctggaagagaagatggttcatcctgaccgacaactgcctgtactacttcgagtacaccaccgacaaggagcccagaggcatcatccccctggagaacctgagcatcagagaggtggaggacagcaagaagcccaactgcttcgagctgtacatccccgacaacaaggaccaggtgatcaaggcctgcaagaccgaggccgacggcagagtggtggagggcaaccacaccgtgtacagaatcagcgcccccacccccgaggagaaggaggagtggatcaagtgcatcaaggccgccatcagcagagaccccttctacgagatgctggccgccagaaagaagaaggtgagcagcaccaagagacactag

SEQ ID NO: 193303 - DNA, 3286 bp, Artificial Sequence
  derived and/or modified sequence
cggcgggacgcgagcggcgagccggagcgcggagcccggctcccgcaccatggaggaggacgacagctacgttcccagtgacctgacagcagaggagcgtcaagaactggagaacatccgacggagaaaacaggagctgctggctgacattcagaggctgaaggatgagatagcagaagtagctaatgaaattgaaaacctgggatccacagaggaaaggaaaaacatgcagaggaacaaacaggtagccatgggcaggaaaaaatttaatatggaccctaaaaaggggatccagttcttaatagagaacgacctcctgaagaacacttgtgaagacattgcccagttcttatataaaggcgaagggctcaacaagacagccatcggcgactacctaggggagagagatgagtttaatatccaggttcttcatgcatttgtggagctgcatgagttcactgatcttaatctcgtccaggcactacggcagttcctgtggagcttccggctacccggagaggcccagaagatcgaccggatgatggaggcgtttgcccagcgatattgtcagtgcaataatggcgtgttccagtccacggatacttgttacgtcctctcctttgccatcatcatgttgaacaccagtctgcacaaccccaatgtcaaagataagcccactgtggagaggttcattgccatgaaccgaggcatcaatgatgggggagacctgccggaggagctcctccggaatctctatgagagcataaaaaatgaaccctttaaaatcccagaagacgacgggaatgacctcactcacactttcttcaatccagaccgagaaggctggctattgaaactcggtggcagggtaaagacttggaagagacgctggttcattctgactgacaactgcctttactactttgagtataccacggataaggagccccgtggaatcatccctttagagaatctgagtatccgggaagtggaggactccaaaaaaccaaactgctttgagctttatatccccgacaataaagaccaagttatcaaggcctgcaagaccgaggctgacgggcgggtggtggaggggaaccacactgtttaccggatctcagctccgacgcccgaggagaaggaggagtggattaagtgcattaaagcagccatcagcagggaccctttctacgaaatgctcgcagcacggaaaaagaaggtctcctccacgaagcgacactgagcgtgcagccaagggcgttggtctgcgggggccttggagctcctgctcttctcccgcacctccatggatgcactgctgccgagcagagcgtcctctgccaggccccgccctggattcctagagactagcttcagcttttgctattttttttaagtgggagaagggtgggcagttatcactggggaagagaggaccggccacctgtccagcatgggctccagagccttcctctctcacagggcagagctcttgtcggcagggcagcctcctggccagtttctctgctcagtgttctggtagcagagctcagagccaactgtttacctcttggttgtccccgtgaagaagccttcaaaccctgcaccataaatacatgtgtccatatattattatatgttaagagaaaaaggtggaaaggaagagaagccacatactataaagatctatttttttttttttaagagagaacgtagggctgttcaggtgcattctgccctggctgcgctggggagcttctccctggagaagagcacctggggctgcggccaaggggcatcagcctgggcccgcggcagggcctggcctgcctctcctgtgctgtgggagctcgctgcctggtgcttgtctgggcgagatggacaggtgaggtcgaggacgcagagggcagaggcccagtggagcctcagacggcacagtcagagtcgggggcctgccctggccggggtcgcagtcggcagcagcgtgcagtccggcatctcccgcggatgcttttccatcccaagtgcctgcggagcgccgaggagaggagagagctgactggacgcttacgttattttcctccttcagaatccaagttcttgttgggctttaaagtagaaagtcagcattttccttgagctaaatacctaataaccaaaactgtgaggaaggttatcgggacagaggttccggataacctgtttcattttgggttttcttcctcttccccagactccagtcctcgttctagaggaaggagtaggacttccccgatccccgtagggcttcagctttttctgcctcaaaaccagccctaactggactactctggatgcattttgtggtgggccccctagaggggaagatgggcctttatctgctccgtggggtgcactggagtgaggggggtggccgggctgcctctcgcatctctgtcttcccctgcaggcgctgtgtgagctggccctgcccctcctcattacagtatgaagggagccgtgacacgcagcattttcctgccgttctctcagggactctcagggcagctcctgccactccgccagggccagcatgccagtccaggcagagcaggtggctggctgtctggccgtctcgccccgcccctccacaggaccctggaccagggcggtgcagggcgcagccctgaggaggcaggtggaggagctgcgggttttcacagggccgcgtcgccacggctcctctgatcctttagggttggcgagcatctctggaaatagcttttgcagaggagtggtgggaggaatagagggggacagtctgtcacctccctccccgccactttgtgtagatcctacctggagggaatggctttaggcacttttgtgccagagcttgtgagggtgacagaagagggtccaggctggaaacctgaactttctgggtgggagaaccaggtggtgcctgccgaggtctgggcgtgtttgggccggtgctggagcctgtccagctggcccgggccctggcctggttctcaagtgtttcctagacagagaggcacctgggtcagtattagtctatttatcagaggtgtaaataatctatgtatagtttttctccttttagattattttgtatttgtttaaaagaagttttgtcaaaatacaaaaatataaagaaatgactgaaagttgttgacagggtttttaagaaataattattctaattgtttttgtttgtttgtttttgccttgtaaactagcgccaaggaactgcagcaaataaactccaactctgcccaagcca

SEQ ID NO: 193304 - DNA, 1194 bp, Artificial Sequence
  derived and/or modified sequence
atggaagaagatgatagctacgtgccttcagacctgaccgccgaagaacgacaggagttggaaaatattcggcggaggaagcaggaacttttagctgatattcaacgtctaaaagacgagatcgcagaagtggctaatgaaatcgagaaccttggatcaactgaggaaaggaagaacatgcagcgcaataagcaagtcgctatgggtcgcaagaaattcaacatggatccaaagaaagggattcaatttctgattgagaacgatctgctcaagaacacatgtgaagatatcgctcagtttctgtataaaggggaaggtttgaataaaactgctatcggagactacttgggcgagcgggatgagtttaatatccaggtgctgcacgcgttcgtggagttgcacgagttcacagaccttaacctggtgcaggcacttcgacagtttctttggtcttttagacttcctggggaggcacaaaaaatcgatcgcatgatggaagcctttgcccagcgctactgccagtgtaataacggtgtctttcagtccacagatacgtgctacgttctgtctttcgccatcattatgctgaatacctccctgcacaacccaaatgtcaaggataagcccactgtggaaagattcatcgccatgaaccgaggcatcaacgatggaggggatcttcccgaggaactgttgagaaacctctacgagtcaataaaaaacgagcccttcaaaattccagaggacgacggtaatgatttgactcatacattcttcaaccctgaccgagagggttggctgctcaagttgggcgggcgcgtgaagacctggaaacggcgatggtttattctcactgacaactgtttatactactttgaatatacaacagataaagaaccaagaggcattataccattggagaacttatcaattagggaggtagaggacagtaagaagccaaattgtttcgaattatatatcccggataacaaggatcaggttattaaggcttgcaaaaccgaggccgacgggagggttgtcgaggggaatcacactgtttatcgcatctctgcgcctactcccgaggagaaagaagagtggattaagtgcattaaagccgcaattagcagggatcctttctacgaaatgctggccgcccgcaaaaagaaagtgtcaagcaccaaaaggcattag

SEQ ID NO: 193305 - DNA, 1194 bp, Artificial Sequence
  derived and/or modified sequence
atggaggaggatgacagctatgtgcccagcgacctgacagctgaggagcggcaggagctggagaacatcagaagaaggaagcaggagctgctggccgacatccagaggctgaaggatgaaattgctgaggtggccaatgaaattgagaacctgggcagcacagaggagaggaagaacatgcagaggaacaagcaggtggccatgggcaggaagaagttcaacatggaccccaagaagggcatccagttcctgattgaaaatgacctgctgaagaacacctgtgaagatattgcccagttcctgtacaagggggagggcctgaacaagacagccatcggggactacctgggggagagagatgagttcaacatccaggtgctgcacgcctttgtggagctgcacgagttcacagacctgaacctggtgcaggccctgcggcagttcctgtggagcttccggctgcctggagaggcccagaagattgacaggatgatggaggcctttgcccagcgctactgccagtgcaacaatggagtcttccagagcacagacacctgctacgtgctgagctttgccatcatcatgctgaacaccagcctgcacaaccccaacgtgaaggacaagcccaccgtggagcgcttcatcgccatgaacagaggcatcaatgatggaggagacctgcctgaggagctgctgaggaacctgtatgagagcatcaagaatgagcccttcaagatcccagaagatgatggaaatgacctgacccacaccttcttcaacccagaccgggagggctggctgctgaagctgggcggccgggtgaagacctggaagaggcgctggttcatcctgacagacaactgcctgtactactttgagtacaccacagacaaggagccccggggcatcatccccctggagaacctgagcatccgggaggtggaggacagcaagaagcccaactgctttgagctgtacatcccagacaacaaggaccaggtgatcaaggcctgcaagacagaagcagatggccgggtggtggagggcaaccacacagtgtaccgcatcagcgcccccaccccagaggagaaggaggagtggatcaagtgcatcaaggccgccatcagccgggaccccttctatgagatgctggccgccaggaagaagaaggtgagcagcaccaagaggcactag

SEQ ID NO: 193306 - DNA, 1194 bp, Artificial Sequence
  derived and/or modified sequence
atggaggaggacgacagctacgtgcccagcgacctgaccgccgaggaaaggcaggaactggaaaacattcggagacgaaagcaggagttgcttgcagacattcaacggctgaaagacgaaattgctgaggtggccaacgagatcgagaatcttggatctaccgaagagagaaagaacatgcagcgcaacaagcaggtcgccatgggccgcaaaaaatttaatatggacccaaaaaaaggaatacagttcctgattgagaatgacctgctcaaaaacacctgtgaggatattgcacaattcctgtataagggcgagggattgaacaagaccgcgatcggtgactacctgggcgagcgtgatgagtttaacatccaagtgctccacgccttcgttgaattgcatgagtttacggaccttaatctggtgcaagcactgaggcagttcctctggtcattcaggctccccggggaagcccaaaaaatcgatcggatgatggaggcttttgcccagaggtactgtcagtgcaacaatggggtttttcagtctactgacacttgctatgttctttcttttgcaattattatgcttaacaccagcctgcataaccccaacgtgaaggataagccaacagtcgagagattcatcgcaatgaacaggggaatcaatgacggaggggacttgccggaagaacttctccgtaacctgtatgaatccatcaaaaatgagcctttcaaaattccagaggacgacgggaacgacttaacccatacatttttcaaccctgatcgcgagggctggctgttgaagctgggtggacgcgtgaaaacttggaagcgccgttggttcatactgactgataactgtctgtattattttgaatatacaaccgataaggagccaaggggcatcatcccattagaaaacctctctatacgtgaggttgaggattcaaagaagccaaactgtttcgagctgtatatccccgacaataaggatcaggtgatcaaggcttgcaagacagaggccgacggccgggtggtagagggtaatcataccgtataccgcatatccgctcccacccctgaagagaaagaggagtggatcaagtgtataaaggctgccatcagtagagaccctttttacgagatgctcgccgcgaggaaaaagaaggtttcaagtaccaagagacattag

SEQ ID NO: 193307 - DNA, 1194 bp, Artificial Sequence
  derived and/or modified sequence
atggaagaggatgactcttacgtgcctagtgacctaaccgcggaggagaggcaggagttagagaacattcgaagaagaaagcaagagctgctcgcagatatccagagacttaaagatgaaatcgctgaagttgccaatgaaatcgagaatctgggatcaacggaagaaagaaagaacatgcagaggaataagcaggtggcaatgggccgtaaaaaattcaacatggacccaaagaaagggattcagtttctgattgagaatgatctgctgaagaatacatgcgaggatatcgctcagttcctctacaagggggaagggctcaacaaaaccgcaatcggcgattatctcggtgaaagagatgagtttaatatccaggtgctgcacgctttcgtggagctccacgagttcactgatctcaatctcgtccaggctctcagacagtttttgtggtcttttagattaccaggggaagcgcagaagatagaccgtatgatggaagccttcgcacagagatattgtcaatgtaataatggagtttttcaatccaccgatacgtgttatgtgctatcgttcgccatcattatgcttaatacaagcctccacaatcctaacgttaaggacaaaccgacagttgagagattcatagctatgaaccgcggaatcaacgacggcggagacctccccgaggagctcttgagaaacttgtatgagtcaatcaagaatgagccattcaaaatacctgaggatgacggaaacgatctcacccacaccttctttaatcccgatagagaaggctggttgctaaaactgggcggaagggtcaagacctggaagcggaggtggttcatcctgaccgataattgtctgtactactttgaatacactactgacaaggagcctcgcggtattatccctctagagaacttatctataagggaggttgaggactctaaaaagccgaattgtttcgagctgtacattcccgacaataaggatcaggtaatcaaagcatgcaagacagaagcagacgggagagtggtcgagggaaatcacactgtctaccggataagtgcccctacccccgaggagaaggaagaatggatcaagtgcatcaaggctgcaatcagtcgcgatccattctatgaaatgctcgcggcaaggaaaaagaaagtgagctccacaaaacgacactag

SEQ ID NO: 193308 - DNA, 1194 bp, Artificial Sequence
  derived and/or modified sequence
atggaagaagatgacagttacgtccctagtgacctgaccgccgaggagaggcaggagcttgaaaacatccggcgacggaaacaagagctgcttgctgacatccagaggcttaaggatgaaattgctgaggtcgctaatgagatcgagaacctggggagtacagaagagcgtaagaacatgcaacgaaacaagcaggtcgctatgggtagaaagaaatttaatatggaccccaaaaaagggattcagttcctgattgagaatgatctgctgaagaatacatgtgaggatatagcgcagttcctgtacaaaggggaaggactgaataaaacagccatcggtgactacctgggagagcgcgacgagtttaacatccaggttctacatgctttcgtcgagcttcacgagttcactgacttgaacctggtgcaagccctccgccagttcttatggtccttccgccttccaggagaggctcaaaaaatagacagaatgatggaggcgttcgcgcagcgctactgtcagtgtaacaacggggtcttccagtccactgatacctgttacgttctgtctttcgccatcatcatgcttaatacttcgctccacaatcccaacgtaaaagataagcctaccgtggaacggtttattgcgatgaacaggggaattaacgacggcggagacctgcccgaagaattgttgaggaatctctacgagtcaatcaagaatgaaccgtttaaaatcccggaagatgacggcaacgaccttactcatacgttctttaatcccgatagagaggggtggctccttaaattgggaggacgagtcaaaacctggaaaagacgctggttcatcttgacggataattgtttatattatttcgaatacacaaccgacaaggagccccggggcattatcccactggaaaatctcagtatacgcgaggtcgaagattccaaaaagccaaattgttttgaactgtacattccagataataaagatcaggtcattaaggcttgtaaaaccgaggccgacggccgggtcgtggaggggaatcatactgtgtaccgaatcagcgctccgacgccagaagagaaggaagaatggataaagtgtattaaggccgctatctccagagatcctttttatgagatgctggcggcaagaaagaaaaaagttagcagcactaaacgtcattag

SEQ ID NO: 193309 - DNA, 1194 bp, Artificial Sequence
  derived and/or modified sequence
atggaggaggacgacagctacgtgcccagcgacctgaccgccgaggaaaggcaggaactggagaatattcgccgcaggaagcaagagctgctcgctgacattcaacggctcaaggacgagattgcagaagtggcgaacgagatcgagaatctgggtagcacagaagagcggaagaacatgcagaggaataagcaggttgcaatgggtagaaagaaattcaatatggatcccaagaaaggaatacagttcctaatcgaaaacgacctgctgaagaacacctgcgaggacatcgcccagttcctgtacaagggagagggactgaacaagaccgcaattggtgactacctcggtgagagagacgaatttaacattcaggtgctccacgcttttgtggagctccatgagtttaccgacctgaacctggtgcaggccctgagacagtttctctggtcttttagattaccaggggaagctcagaagatcgaccgcatgatggaggccttcgcacagaggtactgccaatgcaacaacggtgtgtttcaatctactgacacttgctacgtgcttagtttcgccatcatcatgctaaacacttccttgcacaaccccaacgttaaggacaaaccaacagttgagcggtttattgctatgaaccgcggaatcaacgacgggggcgatttacctgaggaattgctgcgtaacctgtatgaatcaattaaaaacgagcctttcaagataccggaggatgatggtaacgaccttacccatactttctttaatcctgatcgggaaggttggctgcttaagctgggcgggcgagtgaagacctggaaacggcgctggtttatccttaccgacaactgcttgtattacttcgagtacaccactgacaaggagcccagaggcatcataccccttgagaacctaagtatcagggaggtagaagattcaaaaaagcctaattgttttgaactgtacattccagataacaaggaccaagtgattaaggcttgtaagactgaggcagatggccgggtggtcgaggggaaccacactgtgtatcgaattagtgcccccacccctgaagaaaaagaggagtggatcaagtgcattaaagcggccatctcacgcgatcctttctacgaaatgctggccgcaagaaaaaaaaaagtttccagcacaaagcgccactag

SEQ ID NO: 193310 - DNA, 1194 bp, Artificial Sequence
  derived and/or modified sequence
atggaggaggatgactcctatgtgccatctgatctgacagctgaggagcggcaggagttggaaaatattagacgccgtaaacaggagctgctggccgatattcagcggctgaaggatgaaattgccgaagtggcgaacgagattgaaaacctgggttcaactgaagaacgcaaaaacatgcagcggaataagcaggtcgcaatgggcagaaaaaagttcaatatggaccctaagaagggtatacagtttctgatcgagaatgacctactcaagaatacgtgcgaggacatcgcccagtttctgtacaagggggaagggttaaacaaaacagcgatcggggactatctcggggagagggatgaattcaatatccaggtgctccacgcattcgtggagcttcatgagttcaccgatctgaatctcgtccaggctctcaggcagtttctgtggagctttcgcctaccgggagaagcacagaagattgatagaatgatggaagcatttgcacagcgttactgccagtgcaacaatggcgttttccagagcaccgatacttgttacgttctttcatttgcgatcataatgctcaacacatcgctccacaatcccaatgtgaaggataagcctaccgttgaacggttcatagctatgaatcgtgggatcaacgacgggggtgatctccccgaagaactgctaaggaatctgtacgagtcaatcaagaacgagccctttaaaattccggaagacgacgggaatgatctgacacacaccttcttcaaccctgacagggaaggttggctgttgaaacttgggggaagagtgaaaacgtggaagcgtaggtggtttatccttacggacaactgcctctactactttgaatacaccacagacaaagaacccagaggtattatacctttggagaatctttcaattcgcgaggtggaggattccaagaagcctaattgcttcgaactgtatatccctgataataaagatcaggttattaaagcctgcaagacagaggcagatggaagagtcgtggaggggaaccacacagtatatagaattagcgctccaacacccgaggaaaaagaagagtggattaagtgcatcaaagccgcaattagtcgggatcctttttacgagatgctggcagcccgtaagaaaaaggtttcctcaaccaaaagacactag

SEQ ID NO: 193311 - DNA, 1298 bp, Artificial Sequence
  derived and/or modified sequence
cggcgggacgcgagcggcgagccggagcgcggagcccggctcccgcaccatggaggaggacgacagctacgttcccagtgacctgacagcagaggagcgtcaagaactggagaacatccgacggagaaaacaggagctgctggctgacattcagaggctgaaggatgagatagcagaagtagctaatgaaattgaaaacctgggatccacagaggaaaggaaaaacatgcagaggaacaaacaggtagccatgggcaggaaaaaatttaatatggaccctaaaaaggggatccagttcttaatagagaacgacctcctgaagaacacttgtgaagacattgcccagttcttatataaaggcgaagggctcaacaagacagccatcggcgactacctaggggagagagatgagtttaatatccaggttcttcatgcatttgtggagctgcatgagttcactgatcttaatctcgtccaggcactacggcagttcctgtggagcttccggctacccggagaggcccagaagatcgaccggatgatggaggcgtttgcccagcgatattgtcagtgcaataatggcgtgttccagtccacggatacttgttacgtcctctcctttgccatcatcatgttgaacaccagtctgcacaaccccaatgtcaaagataagcccactgtggagaggttcattgccatgaaccgaggcatcaatgatgggggagacctgccggaggagctcctccggaatctctatgagagcataaaaaatgaaccctttaaaatcccagaagacgacgggaatgacctcactcacactttcttcaatccagaccgagaaggctggctattgaaactcggtggcagggtaaagacttggaagagacgctggttcattctgactgacaactgcctttactactttgagtataccacggataaggagccccgtggaatcatccctttagagaatctgagtatccgggaagtggaggactccaaaaaaccaaactgctttgagctttatatccccgacaataaagaccaagttatcaaggcctgcaagaccgaggctgacgggcgggtggtggaggggaaccacactgtttaccggatctcagctccgacgcccgaggagaaggaggagtggattaagtgcattaaagcagccatcagcagggaccctttctacgaaatgctcgcagcacggaaaaagaaggtctcctccacgaagcgacactgagcgtgcagccaagggcgttggtctgcgggggccttggagctcctgctcttctccc

SEQ ID NO: 193312 - protein, 893 aa, Artificial Sequence
  derived and/or modified sequence
MATEEFIIRIPPYHYIHVLDQNSNVSRVEVGPKTYIRQDNERVLFAPMRMVTVPPRHYCTVANPVSRDAQGLVLFDVTGQVRLRHADLEIRLAQDPFPLYPGEVLEKDITPLQVVLPNTALHLKALLDFEDKDGDKVVAGDEWLFEGPGTYIPRKEVEVVEIIQATIIRQNQALRLRARKECWDRDGKERVTGEEWLVTTVGAYLPAVFEEVLDLVDAVILTEKTALHLRARRNFRDFRGVSRRTGEEWLVTVQDTEAHVPDVHEEVLGVVPITTLGPHNYCVILDPVGPDGKNQLGQKRVVKGEKSFFLQPGEQLEQGIQDVYVLSEQQGLLLRALQPLEEGEDEEKVSHQAGDHWLIRGPLEYVPSAKVEVVEERQAIPLDENEGIYVQDVKTGKVRAVIGSTYMLTQDEVLWEKELPPGVEELLNKGQDPLADRGEKDTAKSLQPLAPRNKTRVVSYRVPHNAAVQVYDYREKRARVVFGPELVSLGPEEQFTVLSLSAGRPKRPHARRALCLLLGPDFFTDVITIETADHARLQLQLAYNWHFEVNDRKDPQETAKLFSVPDFVGDACKAIASRVRGAVASVTFDDFHKNSARIIRTAVFGFETSEAKGPDGMALPRPRDQAVFPQNGLVVSSVDVQSVEPVDQRTRDALQRSVQLAIEITTNSQEAAAKHEAQRLEQEARGRLERQKILDQSEAEKARKELLELEALSMAVESTGTAKAEAESRAEAARIEGEGSVLQAKLKAQALAIETEAELQRVQKVRELELVYARAQLELEVSKAQQLAEVEVKKFKQMTEAIGPSTIRDLAVAGPEMQVKLLQSLGLKSTLITDGSTPINLFNTAFGLLGMGPEGQPLGRRVASGPSPGEGISPQSAQAPQAPGDNHVVPVLR

SEQ ID NO: 193313 - DNA, 2682 bp, Artificial Sequence
  derived and/or modified sequence
atggccaccgaagagtttatcattagaattccaccctaccactacattcatgtgctcgatcagaatagcaacgtcagcagggtggaagtgggacccaagacatatatcagacaggacaacgagagagtcctgtttgcaccgatgcgaatggttaccgtccccccacgccactattgcactgtggcgaaccccgtatcaagggatgcccaagggttggtcctctttgatgtcacaggacaggtgcgtctacgtcatgcggacttggaaatacggcttgcccaggatcccttccctctatacccaggggaggtgcttgagaaggatatcacacctcttcaggtcgttctgcctaacacagcgctgcatctgaaggctttactggacttcgaagacaaggacggcgacaaggttgtcgctggggacgagtggcttttcgagggacccggtacatatatcccacgtaaagaagtggaagtcgtggagatcatccaggctacaataattagacagaaccaggctttgagattacgggccaggaaggaatgctgggacagggatggcaaggagcgcgtgactggcgaggaatggttagtgacaacagtgggggcttacctacccgcagtttttgaggaggtgctcgatctggtcgatgccgtgattctcaccgagaaaactgccctgcacctgagggcacgccgcaatttcagggacttcagaggggtgagccggcgaactggcgaagaatggctagtgaccgtccaggatactgaagctcatgtacccgacgtgcacgaggaggtattgggcgtggtgcctattactacactgggaccccacaactactgcgtgatactggatccagtcggaccagacggaaaaaaccagctggggcagaagcgggtggtgaagggtgaaaagagtttttttctgcagccaggggaacagcttgagcagggtatacaggacgtttacgtacttagcgaacaacaagggctcctattgcgggcccttcaaccattggaggagggagaggatgaagaaaaggtgagccaccaggccggagaccactggcttattagaggtcctctagagtacgttccttcagccaaagtcgaagttgtggaagagaggcaagcaattccactggacgaaaatgaaggcatctacgttcaggacgtaaagactggcaaggtgagagctgttatcggcagcacgtatatgcttacccaggatgaggtcctttgggaaaaggagctgccccctggcgtagaagaattgcttaataagggtcaagatcctctggctgatcggggcgagaaagatactgcaaaaagcctgcaaccccttgcccctagaaataaaactcgggtagtttcctatcgggttccacataatgccgccgtgcaggtatatgactacagggaaaaacgagccagagtcgtcttcggaccagagttagtttcgctgggcccggaggagcagttcactgtcctctctttaagtgctgggaggcccaaaagaccacacgcccggagggcattatgccttttactgggcccagacttctttaccgacgtgatcacaatcgagaccgccgatcacgctaggctgcagctccagttggcatataattggcatttcgaggttaacgacagaaaggacccccaggaaacagcgaagttattctccgtgccagacttcgtgggggatgcctgtaaggcaatagccagccgagtaagaggggcagtggcctcagtaacttttgacgatttccacaagaatagtgccaggatcatccggactgctgtgttcgggttcgagactagcgaagctaaaggaccagatgggatggccctgccacggcctcgggatcaggcagtgttcccccagaacggactcgtcgtctcttcagtggatgtgcaatcagtggagcctgtagatcagagaacccgagatgcactccagagaagtgtccagctggctatcgaaattacaaccaattcccaagaggctgccgctaagcacgaggctcagcgactcgagcaagaagcaaggggaaggctcgaacgacaaaaaatactcgatcagagcgaagccgaaaaagcgcggaaagagctgttggagcttgaagccctgtccatggccgtcgagagtaccggaacggccaaggccgaggccgagagcagagccgaggccgctcgaatcgaaggcgaaggatcagttcttcaagccaagttgaaggctcaggccctggctatagaaaccgaagcagagctgcaacgagtccagaaggtgcgtgagcttgaactggtttacgctcgggcccagctagaacttgaagttagcaaggcccagcaactggccgaagtagaagtgaagaagttcaagcagatgacggaagccattggtccctcaacaattcgagacttggccgtggccggaccggaaatgcaggtcaagctgctccagagcttggggttaaagagcaccctcattaccgacggatctacccccattaacctgttcaacacagcctttggacttctgggcatgggaccggaagggcagccgctggggcgacgagttgcgtccggtccaagccccggagagggcatctccccacagagtgcccaagcaccccaggcgcccggggacaatcatgtcgtccccgtcctgcgctag

SEQ ID NO: 193314 - DNA, 2682 bp, Artificial Sequence
  derived and/or modified sequence
atggcaacagaggagtttatcatccgaatccctccctatcactacatacacgtgctggatcagaactctaatgtgagccgggtcgaggtcgggcccaagacatacattaggcaggacaatgagcgggtattgttcgcccctatgcggatggtgactgttcccccccgccactactgcaccgttgctaaccccgtgtcgcgtgacgcacagggcttggtgctcttcgatgtcacgggccaagtccgcttgcgtcatgctgacctggagattagacttgcacaggacccctttccactctatcctggagaggtgctggaaaaggacatcacaccccttcaggtcgtgctacccaacaccgccctccatctcaaggcgctgttagatttcgaggataaagatggcgacaaggttgtcgcaggagatgaatggctatttgagggcccaggaacttatatccctcgcaaagaggtggaggtcgtcgaaattattcaggcaactatcataagacagaatcaagctctccgtctacgagcacgcaaagagtgttgggatcgcgatgggaaggagcgcgtgaccggggaagagtggttggtgacaactgtgggcgcctacctgcccgccgtgtttgaggaagtacttgacctggtggatgctgtgatcctcaccgagaaaacagccctccacctaagggcacggcgcaattttagggatttcagaggcgtgagtcggcgaacaggggaagagtggttagtcacagtgcaggacaccgaggcccacgttccagacgttcatgaagaggtgctgggtgtggtcccgattaccaccttaggtcctcacaactattgtgtgatcctggaccccgtgggcccagacggaaaaaaccagctgggccagaaaagagtcgtgaagggagagaagtctttctttttacagccgggggaacaacttgagcagggtatacaggacgtgtacgtcttatcagagcaacaaggtcttctccttagagcactccagcctctggaagagggagaagacgaggaaaaagtgtctcaccaggccggagaccactggcttatcagagggcctctcgagtacgtcccaagcgccaaggttgaagtcgtggaggagcggcaggccatacctctggatgagaacgaaggcatatacgtgcaagacgttaaaaccggcaaagtgcgggctgtgatcgggagcacctatatgctcactcaggacgaggtcctgtgggaaaaagagttacccccgggagtggaggagctgctgaacaaagggcaggatcccctcgccgaccgcggggaaaaagatacggccaagtcgctacagccattagccccacgcaacaagacacgggtggtcagttaccgggttccacataatgccgcagttcaggtgtatgactatcgggagaaaagagctcgtgttgtgttcggacccgaactggtgtccctcggacctgaggagcagttcactgtactatctctatcagcaggacgacccaagaggccacacgcaagacgtgcactttgcctgctgttgggcccggactttttcaccgatgttataaccattgagactgcagatcacgctagacttcagctccaactggcctacaattggcacttcgaagtgaacgatcggaaggacccccaggagaccgcaaaactgttcagcgtgcccgattttgtaggagatgcatgtaaagctatagcctctcgggtccgaggagctgtagcgtccgtaactttcgacgacttccataaaaattctgcacgaatcattcggacagctgtgtttggcttcgagacatccgaggccaagggccccgacggcatggcactaccaagacctcgagaccaggcagtattccctcagaatggactcgtggtgagcagcgtggacgtgcaaagcgtagaacctgtagaccagcggacaagagatgccctgcaacggagtgtgcagcttgctatcgaaatcacaacaaattcccaggaagccgcagcaaaacacgaggctcaacgactggagcaggaagcacggggccggctcgagcgccagaagatcttagaccagagcgaagccgagaaggctcgcaaggagttgctggagctcgaggccctctctatggccgtagaatcgaccggtaccgcaaaagcggaggctgaatctagagccgaggctgcacgcatagaaggcgaaggctctgtattgcaggctaaactgaaggctcaggctctcgcaatcgagacagaagcagaactccaaagggtgcagaaggtgagagaactggaattggtctatgcccgtgcccagcttgagttagaagtctccaaggcacagcaacttgccgaggttgaagtgaaaaagttcaaacagatgacggaagctatcggtccatctacaatcagggaccttgcagttgccggccccgagatgcaggtaaagctcctgcaatcgctgggcctgaagtctactttgatcaccgacggctctacacctattaatctgttcaacaccgcctttggactgctcggcatggggcccgagggtcagcctctcgggcggagggttgcgtccggcccctctccaggagagggaatatcacctcagtcagcccaagcaccacaggcgcctggtgataaccacgtggtgccggtgttgcggtag

SEQ ID NO: 193315 - DNA, 2682 bp, Artificial Sequence
  derived and/or modified sequence
atggccacagaggagttcatcatccgcatccccccctaccactacatccacgtgctggaccagaacagcaatgtgtcccgggtggaggtgggccccaagacctacatccggcaggacaatgaaagagtgctgtttgcccccatgaggatggtgacagtgccccccaggcactactgcaccgtggccaaccctgtgtccagagatgcccagggcctggtgctgtttgatgtgacaggccaggtgcggctgcggcatgctgacctggagatccggctggcccaggaccccttccccctgtacccaggagaggtgctggagaaggacatcacccccctgcaggtggtgctgcccaacacagccctgcacctgaaggccctgctggactttgaggacaaggatggagacaaggtggtggccggagatgagtggctgtttgagggccctggcacctacatccccaggaaggaggtggaggtggtggagatcatccaggccaccatcatccggcagaaccaggccctgcggctgcgggccaggaaagaatgctgggacagagatggcaaggagcgggtgactggagaggagtggctggtgaccaccgtgggcgcctacctgcctgctgtgtttgaggaggtgctggacctggtggatgctgtgatcctgacagagaagacagccctgcacctgcgggcccggaggaacttccgggacttccggggcgtgtccagaagaactggagaggagtggctggtgacagtgcaggacacagaggcccacgtgcctgatgtgcatgaggaggtgctgggcgtggtgcccatcaccaccctgggcccccacaactactgcgtcatcctggaccctgtgggcccagatggcaagaaccagctgggccagaagagggtggtgaagggggagaagagcttcttcctgcagcccggggagcagctggagcagggcatccaggatgtgtatgtgctgtctgagcagcagggcctgctgctgcgggccctgcagcccctggaggagggggaggatgaggagaaggtgagccaccaggccggggaccactggctgatccggggccccctggagtatgtgcccagcgccaaggtggaggtggtggaggagcggcaggccatccccctggatgaaaatgaaggcatctacgtgcaggatgtgaagacaggcaaggtgcgggccgtcatcggcagcacctacatgctgacccaggatgaggtgctgtgggagaaggagctgcccccaggagtggaggagctgctgaacaagggccaggaccccctggccgacagaggagagaaggacacagccaagagcctgcagcccctggcccccaggaacaagaccagggtggtgtcctacagagtgccccacaatgctgctgtgcaggtgtatgactaccgggagaagagggcccgggtggtgtttggacctgagctggtgtccctgggccctgaggagcagttcaccgtgctgagcctgtctgctggccggcccaagaggcctcatgcccggcgggccctgtgcctgctgctgggccctgacttcttcacagatgtgatcaccattgaaacagctgaccacgcccggctgcagctgcagctggcctacaactggcactttgaggtgaatgacaggaaggacccccaggagacagccaagctgttctctgtgcctgactttgtgggagatgcctgcaaggccatcgccagccgggtgagaggagctgtggcctctgtgacctttgatgacttccacaagaacagcgcccgcatcatcagaacagctgtgtttggatttgagaccagcgaggccaagggcccagatggcatggccctgccccggccccgggaccaggccgtgttcccccagaatggcctggtggtgtcctctgtggatgtgcagagcgtggagcctgtggaccagaggaccagagatgccctgcagaggtctgtgcagctggccatcgagatcaccaccaacagccaggaggccgccgccaagcatgaggcccagaggctggagcaggaggcccggggccgcctggagcggcagaagatcctggaccagagcgaggccgagaaggccaggaaggagctgctggagctggaggccctgtccatggctgtggagagcactggaacagccaaggccgaggccgagagcagagctgaggccgccagaattgaaggagagggctctgtgctgcaggccaagctgaaggcccaggccctggccattgaaacagaagctgagctgcagagggtgcagaaggtgcgggagctggagctggtgtatgcccgggcccagctggagctggaggtgtccaaggcccagcagctggccgaggtggaggtgaagaagttcaagcagatgacagaggccatcggccccagcaccatccgggacctggccgtggccggccctgagatgcaggtgaagctgctgcagagcctgggcctgaagagcaccctcatcacagatggcagcacccccatcaacctcttcaacacagccttcggcctgctgggcatgggccctgagggccagcccctgggccggcgggtggccagcggccccagccctggagagggcatcagcccccagagcgcccaggccccccaggcccctggggacaaccacgtggtgcctgtgctgaggtag

SEQ ID NO: 193316 - DNA, 2865 bp, Artificial Sequence
  derived and/or modified sequence
acccctgggcttggcctgccttgccctgccgggaagtgatccccaaggcagggtgagagttccccatctgaggcgtttgttgcagctacctgcacttctagattcatcttcttgtgagccctgggcttaggagtcaccatggcaactgaagagttcatcatccgcatccccccataccactatatccatgtgctggaccagaacagcaacgtgtcccgtgtggaggtcgggccaaagacctacatccggcaggacaatgagagggtactgtttgcccccatgcgcatggtgaccgtccccccacgtcactactgcacagtggccaaccctgtgtctcgggatgcccagggcttggtgctgtttgatgtcacagggcaagttcggcttcgccacgctgacctcgagatccggctggcccaggaccccttccccctgtacccaggggaggtgctggaaaaggacatcacacccctgcaggtggttctgcccaacactgccctccatctaaaggcgctgcttgattttgaggataaagatggagacaaggtggtggcaggagatgagtggcttttcgagggacctggcacgtacatcccccggaaggaagtggaggtcgtggagatcattcaggccaccatcatcaggcagaaccaggctctgcggctcagggcccgcaaggagtgctgggaccgggacggcaaggagagggtgacaggggaagaatggctggtcaccacagtaggggcgtacctcccagcggtgtttgaggaggttctggatttggtggacgccgtcatccttacggaaaagacagccctgcacctccgggctcggcggaacttccgggacttcaggggagtgtcccgccgcactggggaggagtggctggtaacagtgcaggacacagaggcccacgtgccagatgtccacgaggaggtgctgggggttgtgcccatcaccaccctgggcccccacaactactgcgtgattctcgaccctgtcggaccggatggcaagaatcagctggggcagaagcgcgtggtcaagggagagaagtcttttttcctccagccaggagagcagctggaacaaggcatccaggatgtgtatgtgctgtcggagcagcaggggctgctgctgagggccctgcagcccctggaggagggggaggatgaggagaaggtctcacaccaggctggggaccactggctcatccgcggacccctggagtatgtgccatctgccaaagtggaggtggtggaggagcgccaggccatccctctagacgagaacgagggcatctatgtgcaggatgtcaagaccggaaaggtgcgcgctgtgattggaagcacctacatgctgacccaggacgaagtcctgtgggagaaagagctgcctcccggggtggaggagctgctgaacaaggggcaggaccctctggcagacaggggtgagaaggacacagctaagagcctccagcccttggcgccccggaacaagacccgtgtggtcagctaccgcgtgccccacaacgctgcggtgcaggtgtacgactaccgagagaagcgagcccgcgtggtcttcgggcctgagctggtgtcgctgggtcctgaggagcagttcacagtgttgtccctctcagctgggcggcccaagcgtccccatgcccgccgtgcgctctgcctgctgctggggcctgacttcttcacagacgtcatcaccatcgaaacggcggatcatgccaggctgcaactgcagctggcctacaactggcactttgaggtgaatgaccggaaggacccccaagagacggccaagctcttttcagtgccagactttgtaggtgatgcctgcaaagccatcgcatcccgggtgcggggggccgtggcctctgtcactttcgatgacttccataagaactcagcccgcatcattcgcactgctgtctttggctttgagacctcggaagcgaagggccccgatggcatggccctgcccaggccccgggaccaggctgtcttcccccaaaacgggctggtggtcagcagtgtggacgtgcagtcagtggagcctgtggatcagaggacccgggacgccctgcaacgcagcgtccagctggccatcgagatcaccaccaactcccaggaagcggcggccaagcatgaggctcagagactggagcaggaagcccgcggccggcttgagcggcagaagatcctggaccagtcagaagccgagaaagctcgcaaggaacttttggagctggaggctctgagcatggccgtggagagcaccgggactgccaaggcggaggccgagtcccgtgcggaggcagcccggattgagggagaagggtccgtgctgcaggccaagctaaaagcacaggccttggccattgaaacggaggctgagctccagagggtccagaaggtccgagagctggaactggtctatgcccgggcccagctggagctggaggtgagcaaggctcagcagctggctgaggtggaggtgaagaagttcaagcagatgacagaggccataggccccagcaccatcagggaccttgctgtggctgggcctgagatgcaggtaaaactgctccagtccctgggcctgaaatcaaccctcatcaccgatggctccactcccatcaacctcttcaacacagcctttgggctgctggggatggggcccgagggtcagcccctgggcagaagggtggccagtgggcccagccctggggaggggatatccccccagtctgctcaggcccctcaagctcctggagacaaccacgtggtgcctgtactgcgctaactcctgattaatacaatggaagtttctgggcatttacaatttcaa

SEQ ID NO: 193317 - DNA, 2833 bp, Artificial Sequence
  derived and/or modified sequence
ttccccatctgaggcgtttgttgcagctacctgcacttctagatgctccccaggttcatcctgtgtcgtctcccccacctaccagtcatcttcttgtgagccctgggcttaggagtcaccatggcaactgaagagttcatcatccgcatccccccataccactatatccatgtgctggaccagaacagcaacgtgtcccgtgtggaggtcgggccaaagacctacatccggcaggacaatgagagggtactgtttgcccccatgcgcatggtgaccgtccccccacgtcactactgcacagtggccaaccctgtgtctcgggatgcccagggcttggtgctgtttgatgtcacagggcaagttcggcttcgccacgctgacctcgagatccggctggcccaggaccccttccccctgtacccaggggaggtgctggaaaaggacatcacacccctgcaggtggttctgcccaacactgccctccatctaaaggcgctgcttgattttgaggataaagatggagacaaggtggtggcaggagatgagtggcttttcgagggacctggcacgtacatcccccggaaggaagtggaggtcgtggagatcattcaggccaccatcatcaggcagaaccaggctctgcggctcagggcccgcaaggagtgctgggaccgggacggcaaggagagggtgacaggggaagaatggctggtcaccacagtaggggcgtacctcccagcggtgtttgaggaggttctggatttggtggacgccgtcatccttacggaaaagacagccctgcacctccgggctcggcggaacttccgggacttcaggggagtgtcccgccgcactggggaggagtggctggtaacagtgcaggacacagaggcccacgtgccagatgtccacgaggaggtgctgggggttgtgcccatcaccaccctgggcccccacaactactgcgtgattctcgaccctgtcggaccggatggcaagaatcagctggggcagaagcgcgtggtcaagggagagaagtcttttttcctccagccaggagagcagctggaacaaggcatccaggatgtgtatgtgctgtcggagcagcaggggctgctgctgagggccctgcagcccctggaggagggggaggatgaggagaaggtctcacaccaggctggggaccactggctcatccgcggacccctggagtatgtgccatctgccaaagtggaggtggtggaggagcgccaggccatccctctagacgagaacgagggcatctatgtgcaggatgtcaagaccggaaaggtgcgcgctgtgattggaagcacctacatgctgacccaggacgaagtcctgtgggagaaagagctgcctcccggggtggaggagctgctgaacaaggggcaggaccctctggcagacaggggtgagaaggacacagctaagagcctccagcccttggcgccccggaacaagacccgtgtggtcagctaccgcgtgccccacaacgctgcggtgcaggtgtacgactaccgagagaagcgagcccgcgtggtcttcgggcctgagctggtgtcgctgggtcctgaggagcagttcacagtgttgtccctctcagctgggcggcccaagcgtccccatgcccgccgtgcgctctgcctgctgctggggcctgacttcttcacagacgtcatcaccatcgaaacggcggatcatgccaggctgcaactgcagctggcctacaactggcactttgaggtgaatgaccggaaggacccccaagagacggccaagctcttttcagtgccagactttgtaggtgatgcctgcaaagccatcgcatcccgggtgcggggggccgtggcctctgtcactttcgatgacttccataagaactcagcccgcatcattcgcactgctgtctttggctttgagacctcggaagcgaagggccccgatggcatggccctgcccaggccccgggaccaggctgtcttcccccaaaacgggctggtggtcagcagtgtggacgtgcagtcagtggagcctgtggatcagaggacccgggacgccctgcaacgcagcgtccagctggccatcgagatcaccaccaactcccaggaagcggcggccaagcatgaggctcagagactggagcaggaagcccgcggccggcttgagcggcagaagatcctggaccagtcagaagccgagaaagctcgcaaggaacttttggagctggaggctctgagcatggccgtggagagcaccgggactgccaaggcggaggccgagtcccgtgcggaggcagcccggattgagggagaagggtccgtgctgcaggccaagctaaaagcacaggccttggccattgaaacggaggctgagctccagagggtccagaaggtccgagagctggaactggtctatgcccgggcccagctggagctggaggtgagcaaggctcagcagctggctgaggtggaggtgaagaagttcaagcagatgacagaggccataggccccagcaccatcagggaccttgctgtggctgggcctgagatgcaggtaaaactgctccagtccctgggcctgaaatcaaccctcatcaccgatggctccactcccatcaacctcttcaacacagcctttgggctgctggggatggggcccgagggtcagcccctgggcagaagggtggccagtgggcccagccctggggaggggatatccccccagtctgctcaggcccctcaagctcctggagacaaccacgtggtgcctgtactgcgctaactcctgattaatacaatggaagtttctgggc

SEQ ID NO: 193318 - DNA, 2682 bp, Artificial Sequence
  derived and/or modified sequence
atggccaccgaggagttcatcatccggatccccccctaccactacattcacgtcctggatcaaaattcaaatgtttcaagagtggaggtggggccaaagacctacatccgacaggataacgaaagggtgctctttgcacctatgagaatggttaccgtgccccctcgccattactgcaccgtggccaacccagtcagccgggacgcccaggggctggtcctattcgacgtgaccgggcaggtgcggctgcgccatgcagaccttgagattcggctcgcccaagacccctttcccctttacccaggtgaggtgctggaaaaggatataaccccactgcaggtggtgctgcccaacactgctttgcacctgaaggccctgctcgacttcgaagataaggatggcgataaagtagtggctggagacgaatggctgttcgagggacccggtacttatatcccaaggaaagaggtcgaagtcgttgagataatccaggccaccataataagacaaaatcaagccctgcgtttgagggctcgaaaagaatgctgggatcgtgacggaaaagagcgcgtgacgggtgaagaatggttagtgacaaccgtgggggcctacttgcccgccgtgttcgaggaagtactggacctggtggacgctgtgattcttactgaaaagaccgccctgcacctacgtgcccgacgaaattttagagatttcaggggcgtatcccgtaggaccggggaagaatggctggtaacggtgcaagacaccgaagctcatgtgccagatgtgcacgaagaagtcctgggagtcgtgccaataacaaccttagggccacataattactgcgtgattctcgatcccgtcggtcctgatgggaagaaccaattaggacagaaaagggtggtaaagggagaaaaatcattctttctccaaccgggggaacaactcgagcagggcattcaggacgtgtatgtgctgagcgagcagcaggggctgctgctgcgagcccttcagcccttagaggagggcgaggacgaggaaaaagtgtcacaccaagccggtgaccactggctcattagaggacctctcgagtacgtacccagcgccaaggtggaggtggtcgaggagagacaagcaatcccgttggacgaaaatgaaggcatttacgtccaagacgtgaagacaggtaaggtgagggccgtgatcggatctacatacatgttgacccaggacgaagtgctctgggagaaggaactgccccccggcgtagaagaattacttaataaggggcaagatcctttagccgatcgaggcgaaaaggacaccgccaaatcattacagcctctcgccccccgaaacaaaacccgtgtcgtctcttatcgggtaccccataacgccgccgtgcaggtgtatgactatagggagaagcgtgcccgggttgttttcggacccgaactggtgtccctgggtcctgaggagcaattcaccgttttaagcctgtccgcaggacgccctaagcgtccacatgctagaagagccctatgtctgctcttggggcccgattttttcacggacgtgattacgatcgaaaccgccgaccacgcccggctgcagctgcagcttgcctataattggcactttgaagtgaatgatcgtaaagatccacaggaaacagctaaacttttcagcgtgcctgattttgtgggagacgcttgtaaggcgatcgcttcccgggtccggggtgcagtggcctctgtaactttcgatgatttccacaagaattccgccagaattatcaggactgcggtgtttgggttcgaaaccagcgaggctaaaggcccagatggaatggctctacctaggccaagagaccaagcagtcttccctcagaacggcctggtggtgtcttcagtggacgtgcagtctgtggagcctgtggaccagcgtacacgcgacgcactccagagaagcgtccagctggccatcgagataaccaccaattctcaagaagcggcagctaaacatgaagcccagagactcgaacaggaggcccgcggaagactggagcgtcagaagatcctggatcagtccgaagccgaaaaggccaggaaggagcttctcgagctggaagccttatccatggccgtggagtctacgggtactgctaaagccgaagccgaatctagagctgaagcagcgaggatagagggtgaaggatccgtgctccaggctaaacttaaggcacaagctcttgctattgagactgaggctgaattacagcgggtgcaaaaggtgcgtgaacttgagctggtgtacgccagagctcaactggagttggaggtttctaaggctcagcagcttgcagaggtggaggtaaaaaagtttaaacagatgactgaggcaattgggccgagtactatccgggatctcgcagtggctggccctgaaatgcaagtaaagttgttacagtcactcggactgaaatctactctgatcacagatggatcgactcccattaacctgttcaacacagccttcggtctgctggggatgggtcctgagggccaacccctgggccggcgggtcgcctctggacctagcccgggagaaggaatctccccccagtctgcccaggcaccccaggcgcccggagacaaccacgttgtaccagtcctgcgctag

SEQ ID NO: 193319 - DNA, 2682 bp, Artificial Sequence
  derived and/or modified sequence
atggccaccgaggagttcatcatccggatccccccctaccactacatccatgtcttggaccagaatagtaacgtctcaagggtggaagttgggcctaagacatatatcagacaagacaacgaaagggtgctgtttgcccccatgaggatggtcacagtgccccctaggcactactgcacagttgcgaatccagtcagtcgggatgcccaaggcctggtcttgtttgacgttactgggcaagtgcggttacggcatgccgacctggaaattcgcttggctcaggatccttttccactttaccctggcgaagtcctcgaaaaagatattacccctcttcaggtagtgcttcccaacactgcgcttcatttgaaggccttgctggattttgaggataaagatggcgataaggtggtggctggggatgaatggttgttcgaggggcccggaacttatattccccgcaaagaagtggaggtggtggagattatccaagctactattatccgccagaatcaggccttgagattacgtgcccgcaaagagtgctgggaccgtgatggtaaagagcgcgtgacgggggaagagtggctggtcacgacggtgggagcctaccttccagctgttttcgaagaagttctggacctggtcgatgccgtcatcttaactgaaaaaacggctctgcaccttcgggcccgtaggaatttcagagactttcggggtgtctcgcgtcgtacgggtgaggaatggctggtgaccgtgcaggacaccgaggctcacgtgcccgacgtgcacgaagaggttttaggcgtggtgcccatcacaaccctaggaccacataactactgcgtaattcttgatccagtgggccccgatggtaaaaatcagctaggccagaaaagggtcgtcaagggggagaagtctttttttctccagcctggagaacagctcgagcagggcatccaagacgtgtacgtactgtccgaacaacagggactcctgctgcgggccctgcaacccctagaagagggtgaagatgaggagaaggtgtcccatcaagccggggatcactggcttatcagagggccactcgaatacgtgccttctgctaaggtcgaggtcgttgaggaaagacaagcaattccattggacgaaaacgaggggatttacgtgcaggacgttaaaactggcaaggtgcgtgcagtcattggctccacatatatgctcacccaggacgaggtgctctgggagaaagagctgcctccaggcgtggaagaactgctgaataaaggtcaggatccccttgctgataggggagagaaggatactgctaagagcttacagccactggcgcccaggaataagacgcgtgtggtgagctatcgggtcccgcataacgcggctgtacaggtctatgattaccgggagaaaagagcgcgagtggtgttcgggcctgaactcgtctctttgggccctgaggaacaattcaccgtcctgagtctatcagcgggcagaccaaaacgcccacacgcgcggcgtgccttgtgcctacttctgggtccggactttttcaccgacgtcatcaccatcgagaccgcggatcacgcccgcctacagctgcagctggcttataactggcatttcgaagtgaatgacaggaaagacccacaggaaacagcaaagttattttcggtgcccgattttgtcggagatgcctgtaaggcaatcgctagtagggtcaggggagctgtggctagcgttacatttgatgattttcacaagaacagcgctcggatcattagaaccgcagtgtttggcttcgaaaccagtgaagctaaggggccagatggaatggctctgcctaggcctcgagatcaggcagtattcccccagaatggactggttgtctcaagcgtggatgttcagtcagtggagccagtcgaccagcgcactagggatgctcttcaacgcagtgtccagctggccattgagatcaccactaatagccaggaggctgcggctaaacacgaggcccagcgcctggagcaggaggctcggggccgcctcgagcgacagaagatcctcgaccagagcgaggcagagaaggcgcgcaaggagttattggaactggaggccctctcgatggcggtggagtcgactgggacagctaaggccgaagccgagtctagggctgaggctgctcgtatcgagggagagggaagcgtgctgcaggccaagctgaaggcgcaggccctggcgatagagaccgaggccgagcttcagcgcgtgcagaaggtccgagaactggagctcgtgtacgcccgcgcccagctggagcttgaagtctctaaggcgcagcagctggccgaagtagaggtcaaaaaattcaaacagatgaccgaagcaatcggcccatccacaattagggacttagctgtggccggacctgaaatgcaggtcaagctgcttcagtctctgggtttgaaaagtacactgataacagacggttccacccccataaatttatttaacacagccttcggcctccttggaatgggtcctgaaggccagcccttgggacgccgtgtcgcctctggaccctcacccggcgaagggatctcaccacagtctgcgcaggcaccccaggcccccggggacaaccacgttgtccccgttctccgctag

SEQ ID NO: 193320 - DNA, 2682 bp, Artificial Sequence
  derived and/or modified sequence
atggcaacagaggagtttatcattcggatccctccctatcactatattcacgtcttggatcaaaactcaaacgtgtctcgagtggaggtcgggcctaagacctatattcggcaagacaacgaaagggtgctctttgcaccaatgcggatggtcacagtgccacctagacactactgtaccgtcgcaaatccagtgagtcgggacgcccaggggctagtcctgttcgacgtgacggggcaagttaggttacgccacgcagacctggagataagattagcacaggatcctttccctctttatcctggagaggttttggagaaggacatcacgcctctccaggtggtactgcccaatacagcgttgcatctgaaggccctcctggactttgaggacaaggatggcgataaggttgtagccggtgacgaatggctctttgagggcccagggacatatatcccaaggaaggaagtcgaggtggttgagatcatacaggctaccataattcgccagaaccaggctctgcgactcagggctcgtaaggagtgctgggacagggatggtaaggagcgggtcacaggtgaagagtggctggttaccacggtgggggcttatctccccgctgtatttgaggaggtcctcgatcttgtcgacgccgtgattttgaccgaaaagactgctttgcacttgcgggcaaggcggaacttccgcgacttcaggggcgttagcagaagaaccggagaagaatggcttgtgacggtccaagataccgaagcccatgtgcctgacgtgcacgaggaggtcctcggagtggtgcctatcactacactcgggccacacaactactgcgtgattctcgatcccgttggtcccgatggcaagaaccagttaggacaaaaacgcgtggtaaagggagagaagagcttttttttgcagccaggcgagcagttggagcaagggattcaagacgtttatgtgttgtctgaacagcagggtctgctgttgagggcactgcaaccactggaagaaggggaagatgaagagaaggtttcccaccaggctggcgaccattggctgatcagagggcctctcgaatacgtgccctccgccaaggtggaagtggtggaagaaagacaagccataccactagacgaaaacgagggaatttacgtgcaggacgtcaagactggcaaggtaagggccgtgatcggatcaacttatatgttaactcaggacgaggtcctctgggagaaggagctgccccctggcgtcgaggagttgctgaataaaggccaggaccctctcgcagatcgcggtgaaaaggacacggctaagagcctgcagcctttggcccctagaaacaagacccgggttgttagctatcgcgttcctcataatgccgctgttcaggtgtacgattatagggaaaaacgcgctcgagtcgtttttggccctgagcttgtatcgctgggccctgaagagcagtttaccgtcctcagcctttccgcaggaaggcccaaaaggccccacgcccgtagagccctctgcctactgctgggcccagactttttcacagacgtcattaccatcgaaactgccgatcacgcccgtctgcagctgcaattggcatacaactggcactttgaggtgaacgacagaaaggacccccaggaaacagcaaaactattctccgtgcccgacttcgtgggcgatgcatgtaaagccattgcgtctagagtaaggggggcagttgcaagcgtgaccttcgacgatttccacaagaattccgcccgaatcatcagaacggccgtgtttgggttcgagacctctgaagctaaaggtccagacggaatggcactacccaggcctcgagaccaggctgtttttccacagaatgggctcgtggtgagcagcgtcgatgtgcagtccgtggaacctgtcgaccagaggactagagatgcgctacagcgtagcgtacaattggctatagagattacaactaatagtcaggaagccgctgcaaaacacgaggcccagcgcttagaacaggaggctcggggaagacttgaacgacaaaagatactggaccagagcgaggctgaaaaagccaggaaggaactgctagagctcgaagccctaagcatggccgtggaaagcaccggaaccgctaaagcggaggccgagtcgagggcggaagctgctcgcattgagggggaagggagcgtgctgcaagccaaattgaaggcccaggccctggcgatagagacagaagccgagcttcagagggtgcagaaagttcgggaattagaactggtttatgctagggcccaactggagctcgaagttagcaaggctcagcaactggctgaagtagaagtgaaaaaatttaagcagatgactgaagctattggaccctctacaatcagggatcttgccgtggctggccctgaaatgcaggtgaaattgttgcaatcgctggggctcaaaagcacgctcatcaccgatggatctacaccaatcaatctgtttaatacagccttcgggctgcttggcatgggcccagaagggcagcctctgggaagacgggtggcaagcggtccgtcacccggagagggcattagcccacagtcagcgcaagcgccacaggctcctggcgacaaccacgtcgttcccgttctgcgctag

SEQ ID NO: 193321 - DNA, 2682 bp, Artificial Sequence
  derived and/or modified sequence
atggccacagaagagtttattattcggatccccccttaccactatattcacgtgttggatcagaactctaacgttagtcgcgtggaggtggggccaaagacatatatcagacaggataatgagagggtgctgttcgccccaatgcggatggtcacagtgcctcctagacactactgcacagtagcaaaccctgtctctagggatgctcagggcctggtcctctttgatgtgacggggcaggtaagactgaggcacgccgatctcgagatcaggttggcccaggacccctttcccctgtacccaggggaagttttagagaaagatataacccctctccaggtggtactacccaacaccgcccttcacctcaaggccctcttggacttcgaagataaagacggagataaagtggtggcaggcgacgagtggctatttgaggggccaggaacctacatcccaagaaaagaggtcgaagtagttgagatcatccaggccactatcattcggcagaatcaggcgttgcggctgcgcgcacggaaggaatgttgggaccgtgacgggaaggagcgtgtgactggcgaagaatggctggttaccacagtgggagcctatctgccagccgtgttcgaggaggtgctggatctggtagacgctgtaatccttactgaaaaaactgctcttcaccttagggctcggcgaaactttcgagacttccgcggagtttctagaagaacaggcgaagagtggctcgtaactgttcaagatactgaggcccatgtgcccgatgttcacgaagaggtgctgggcgtagtcccgatcactacattaggaccacataattattgcgtgatcctggaccctgtaggacccgacggaaagaaccagcttgggcagaagcgggttgtcaagggagagaaaagcttcttcctccaacccggtgagcagctagaacagggaattcaagatgtgtatgtgctgagcgagcagcaaggcctcctcttgagagctcttcaaccccttgaagaaggcgaagatgaggaaaaggttagtcaccaagccggagatcactggcttatccggggtccgctggaatatgttccttccgcaaaggtggaagtggtggaagagcgtcaggccattcccctggacgaaaatgaaggcatctatgtccaggacgttaaaaccggaaaagtgagagccgtgatcggtagcacctacatgttaacccaagacgaagttctgtgggagaaagagctcccgccaggtgtggaagaactgctaaacaaaggtcaggatcccctagctgaccggggtgagaaagacaccgccaaatcactgcaacctttggcaccccgtaacaagactcgggtcgtgagctacagagttccacataatgccgcagttcaagtgtacgactatagagaaaagcgtgccagggtggttttcggccctgaactggtgtctctaggtcccgaggagcaattcacagtgctctctcttagtgccggtagaccaaaacgtcctcatgcgagacgcgcactttgtctgctgttggggcctgacttcttcacagatgtgatcaccatcgaaacggccgatcatgcacgccttcagttgcaactcgcctacaattggcattttgaggttaacgatagaaaagaccctcaggaaaccgctaagttgttcagtgtgcctgactttgtcggagacgcgtgcaaagccatcgccagtagagtgcgtggcgctgtcgcttccgtaaccttcgatgatttccataaaaattctgctaggatcatccgcaccgcagtctttggatttgagacaagcgaagccaaggggcctgacggtatggcgctccctagaccaagagatcaggctgtgttcccccagaatggattggtagtgtccagtgtggatgttcagtccgtcgagcctgtggatcagaggactcgcgacgccctgcagagaagcgtgcagctcgcaattgaaataaccaccaactcccaggaggccgctgctaaacatgaggctcagcggctcgaacaggaggcaaggggcaggcttgagaggcagaagattctagaccagtctgaagcagaaaaagctcggaaggaacttctggaattggaggctctgtcaatggccgttgaatctacaggcaccgctaaagccgaggcagagtcccgtgccgaggccgcaaggatcgaaggggagggctccgtcttacaggctaaactaaaggcccaagctctagctatagagactgaagctgagctacagcgcgtgcagaaagtccgggagctggagttggtctatgcccgagctcagctcgagctcgaggtgagcaaagctcaacagctggcggaggtggaagtgaaaaagtttaagcagatgaccgaagcaattgggccatctactattagggaccttgcggttgctggacctgaaatgcaggttaagcttctacaatctttgggactcaaatccaccctcatcaccgacggatccacaccaataaatttgttcaatacggcctttggactgctaggaatgggacctgaggggcagccgctcggtagacgtgtcgcctcaggcccttccccaggggagggcatctctccccagtcagcccaggctccccaggctcctggcgataatcacgtcgtgccggtcctgcgctag

SEQ ID NO: 193322 - DNA, 2682 bp, Artificial Sequence
  derived and/or modified sequence
atggccaccgaggagttcatcatcagaatccccccctaccactacatccacgtgctggaccagaacagcaacgtgagcagagtggaggtgggccccaagacctacatcagacaggacaacgagagagtgctgttcgcccccatgagaatggtgaccgtgccccccagacactactgcaccgtggccaaccccgtgagcagagacgcccagggcctggtgctgttcgacgtgaccggccaggtgagactgagacacgccgacctggagatcagactggcccaggaccccttccccctgtaccccggcgaggtgctggagaaggacatcacccccctgcaggtggtgctgcccaacaccgccctgcacctgaaggccctgctggacttcgaggacaaggacggcgacaaggtggtggccggcgacgagtggctgttcgagggccccggcacctacatccccagaaaggaggtggaggtggtggagatcatccaggccaccatcatcagacagaaccaggccctgagactgagagccagaaaggagtgctgggacagagacggcaaggagagagtgaccggcgaggagtggctggtgaccaccgtgggcgcctacctgcccgccgtgttcgaggaggtgctggacctggtggacgccgtgatcctgaccgagaagaccgccctgcacctgagagccagaagaaacttcagagacttcagaggcgtgagcagaagaaccggcgaggagtggctggtgaccgtgcaggacaccgaggcccacgtgcccgacgtgcacgaggaggtgctgggcgtggtgcccatcaccaccctgggcccccacaactactgcgtgatcctggaccccgtgggccccgacggcaagaaccagctgggccagaagagagtggtgaagggcgagaagagcttcttcctgcagcccggcgagcagctggagcagggcatccaggacgtgtacgtgctgagcgagcagcagggcctgctgctgagagccctgcagcccctggaggagggcgaggacgaggagaaggtgagccaccaggccggcgaccactggctgatcagaggccccctggagtacgtgcccagcgccaaggtggaggtggtggaggagagacaggccatccccctggacgagaacgagggcatctacgtgcaggacgtgaagaccggcaaggtgagagccgtgatcggcagcacctacatgctgacccaggacgaggtgctgtgggagaaggagctgccccccggcgtggaggagctgctgaacaagggccaggaccccctggccgacagaggcgagaaggacaccgccaagagcctgcagcccctggcccccagaaacaagaccagagtggtgagctacagagtgccccacaacgccgccgtgcaggtgtacgactacagagagaagagagccagagtggtgttcggccccgagctggtgagcctgggccccgaggagcagttcaccgtgctgagcctgagcgccggcagacccaagagaccccacgccagaagagccctgtgcctgctgctgggccccgacttcttcaccgacgtgatcaccatcgagaccgccgaccacgccagactgcagctgcagctggcctacaactggcacttcgaggtgaacgacagaaaggacccccaggagaccgccaagctgttcagcgtgcccgacttcgtgggcgacgcctgcaaggccatcgccagcagagtgagaggcgccgtggccagcgtgaccttcgacgacttccacaagaacagcgccagaatcatcagaaccgccgtgttcggcttcgagaccagcgaggccaagggccccgacggcatggccctgcccagacccagagaccaggccgtgttcccccagaacggcctggtggtgagcagcgtggacgtgcagagcgtggagcccgtggaccagagaaccagagacgccctgcagagaagcgtgcagctggccatcgagatcaccaccaacagccaggaggccgccgccaagcacgaggcccagagactggagcaggaggccagaggcagactggagagacagaagatcctggaccagagcgaggccgagaaggccagaaaggagctgctggagctggaggccctgagcatggccgtggagagcaccggcaccgccaaggccgaggccgagagcagagccgaggccgccagaatcgagggcgagggcagcgtgctgcaggccaagctgaaggcccaggccctggccatcgagaccgaggccgagctgcagagagtgcagaaggtgagagagctggagctggtgtacgccagagcccagctggagctggaggtgagcaaggcccagcagctggccgaggtggaggtgaagaagttcaagcagatgaccgaggccatcggccccagcaccatcagagacctggccgtggccggccccgagatgcaggtgaagctgctgcagagcctgggcctgaagagcaccctgatcaccgacggcagcacccccatcaacctgttcaacaccgccttcggcctgctgggcatgggccccgagggccagcccctgggcagaagagtggccagcggccccagccccggcgagggcatcagcccccagagcgcccaggccccccaggcccccggcgacaaccacgtggtgcccgtgctgagatag

SEQ ID NO: 193323 - protein, 503 aa, Artificial Sequence
  derived and/or modified sequence
MALIPDLAMETWLLLAVSLVLLYLYGTHSHGLFKKLGIPGPTPLPFLGNILSYHKGFCMFDMECHKKYGKVWGFYDGQQPVLAITDPDMIKTVLVKECYSVFTNRRPFGPVGFMKSAISIAEDEEWKRLRSLLSPTFTSGKLKEMVPIIAQYGDVLVRNLRREAETGKPVTLKDVFGAYSMDVITSTSFGVNIDSLNNPQDPFVENTKKLLRFDFLDPFFLSITVFPFLIPILEVLNICVFPREVTNFLRKSVKRMKESRLEDTQKHRVDFLQLMIDSQNSKETESHKALSDLELVAQSIIFIFAGYETTSSVLSFIMYELATHPDVQQKLQEEIDAVLPNKAPPTYDTVLQMEYLDMVVNETLRLFPIAMRLERVCKKDVEINGMFIPKGVVVMIPSYALHRDPKYWTEPEKFLPERFSKKNKDNIDPYIYTPFGSGPRNCIGMRFALMNMKLALIRVLQNFSFKPCKETQIPLKLSLGGLLQPEKPVVLKVESRDGTVSGA

SEQ ID NO: 193324 - protein, 353 aa, Artificial Sequence
  derived and/or modified sequence
MALIPDLAMETWLLLAVSLVLLYLVFGAYSMDVITSTSFGVNIDSLNNPQDPFVENTKKLLRFDFLDPFFLSITVFPFLIPILEVLNICVFPREVTNFLRKSVKRMKESRLEDTQKHRVDFLQLMIDSQNSKETESHKALSDLELVAQSIIFIFAGYETTSSVLSFIMYELATHPDVQQKLQEEIDAVLPNKAPPTYDTVLQMEYLDMVVNETLRLFPIAMRLERVCKKDVEINGMFIPKGVVVMIPSYALHRDPKYWTEPEKFLPERFSKKNKDNIDPYIYTPFGSGPRNCIGMRFALMNMKLALIRVLQNFSFKPCKETQIPLKLSLGGLLQPEKPVVLKVESRDGTVSGA

SEQ ID NO: 193325 - DNA, 1512 bp, Artificial Sequence
  derived and/or modified sequence
atggccttgatccctgacctagcaatggagacttggttgttattggccgtgtcgttggtactgctctatctgtacgggacacatagccatgggctttttaagaaacttggcatcccaggcccaaccccccttccattcctaggcaacattctgagctatcataagggtttctgtatgttcgacatggaatgccacaaaaaatatggaaaagtgtggggcttttacgacgggcaacaacccgtccttgcaattacagacccagacatgataaagactgtgcttgtgaaggaatgctatagcgtgttcaccaaccggcgaccctttggccctgtgggctttatgaagtcagcgatatcaatcgctgaagacgaggagtggaaaagactgcgttcactgctttcgcctacattcacctccggaaagttaaaggaaatggttccaattattgcccagtacggagacgtactggttagaaatttgagacgggaagcggagactggaaaacctgtgacgttaaaagatgtgttcggagcatattccatggatgttataaccagcacgagcttcggagtgaacatagacagtctcaataatccacaagacccctttgtggagaataccaagaagctgcttaggttcgattttctcgacccattttttctctccattaccgtcttcccttttctgatcccaatcttggaggtgctgaatatctgtgtcttcccaagagaggtgacaaacttcctgcgtaagtcggtaaaacggatgaaggaatccaggttggaagacacccaaaaacatcgtgtggacttcttgcaactcatgattgacagccagaactcaaaggagacagagtcccataaagccctgtcagatctagagctagttgctcaaagcattatcttcattttcgcagggtacgagacaacatcctcagtgctctcttttattatgtatgaactagcgacccatcctgatgtgcagcagaaactccaggaagagatagacgctgtgctgcctaacaaagcaccccctacatacgatactgtgctacagatggagtatctagatatggtcgttaacgagaccctgcggctgttccccatcgcaatgaggctggagcgagtatgcaaaaaggacgtcgagattaacggcatgtttatcccaaagggggtagtagtgatgatacctagctacgccctgcatcgggaccctaaatactggacagaaccagagaagtttctacctgaacgattttctaagaagaacaaagacaacattgacccttatatttacaccccgtttggatcaggcccccggaattgtattggaatgcgctttgcacttatgaatatgaaacttgccctgattcgggtcctccagaacttttctttcaagccttgtaaagagactcagattcctcttaagttgagtctgggcggcctgctgcagcctgagaaacccgtagtgcttaaagtagagagccgtgatggaaccgtgtcaggcgcctag

SEQ ID NO: 193326 - DNA, 1062 bp, Artificial Sequence
  derived and/or modified sequence
atggctctcattccagatctggcgatggaaacctggctcttgctcgctgtttctctggtcttattatacttggtctttggggcatactcaatggatgtgatcacatcaacttcatttggcgtgaatatcgacagtctgaacaatccacaggatccattcgtggaaaataccaaaaaactgctaagattcgatttccttgacccttttttcctctccattactgtattcccgttcttgattccaatcctcgaagtgttgaatatatgcgttttccccagagaggttactaattttctgcgtaagagcgtgaaacgcatgaaagagtcacggctcgaggacacacagaagcaccgggtcgacttccttcaattgatgatagacagtcagaacagtaaggaaactgaaagccacaaggccttatccgatcttgagttagtcgcccagagtattattttcatttttgctggatacgagaccactagttctgtcctctcctttattatgtatgagctggcgacccatcctgacgtccagcagaagttacaagaggagattgatgcagtcttgcctaacaaagctccccctacctacgataccgtcctgcagatggaatatctggacatggtggtaaacgaaaccctgagactgttcccgatagccatgagacttgaacgcgtgtgcaaaaaggacgttgaaatcaatggcatgttcatcccgaaaggagttgtagttatgatcccgtcatatgcactgcaccgggacccaaaatattggaccgagccagaaaagtttctgcctgaaaggtttagcaaaaaaaataaagacaacattgatccttatatatacacaccattcggcagcggacccaggaattgcattggcatgaggttcgcccttatgaacatgaagctggcactcatcagggtgctgcagaatttctctttcaagccctgcaaagagactcaaatcccacttaaattatctctgggaggtctgctccaaccagaaaaaccagtggtgctgaaagtcgagtctcgcgacggtacggtctccggagcttag

SEQ ID NO: 193327 - DNA, 1512 bp, Artificial Sequence
  derived and/or modified sequence
atggccctgatcccagacctggccatggagacctggctgctgctggccgtgtccctggtgctgctgtacctgtatggcacccacagccacggcctcttcaagaagctgggcatccctggccccacccccctgcccttcctgggcaacatcctgagctaccacaagggcttctgcatgtttgacatggagtgccacaagaagtatggcaaggtgtggggcttctatgatggccagcagcctgtgctggccatcacagatcctgacatgatcaagacagtgctggtgaaggagtgctacagcgtcttcaccaacagaagacccttcggccctgtgggcttcatgaagagcgccatcagcattgctgaagatgaggagtggaagaggctgcggagcctgctgagccccaccttcaccagcggcaagctgaaggagatggtgcccatcatcgcccagtatggagatgtgctggtgaggaacctgcggcgggaggccgagaccgggaagcctgtgaccctgaaggatgtgtttggagcctacagcatggatgtgatcaccagcaccagctttggagtgaacatcgacagcctgaacaacccccaggacccctttgtggagaacaccaagaagctgctgcgctttgacttcctggaccccttcttcctgagcatcaccgtcttccccttcctgatccccatcctggaggtgctgaacatctgtgtgttcccccgggaggtgaccaacttcctgaggaagtctgtgaagaggatgaaggagagccggctggaggacacccagaagcaccgggtggacttcctgcagctgatgattgacagccagaacagcaaggagacagagagccacaaggccctgagtgacctggagctggtggcccagagcatcatcttcatctttgctggctatgagaccaccagctctgtgctgtccttcatcatgtatgagctggccacccacccagatgtgcagcagaagctgcaggaggagattgatgctgtgctgcccaacaaggccccacccacctatgacacagtgctgcagatggagtacctggacatggtggtgaatgagaccctgcggctcttccccatcgccatgaggctggagcgggtgtgcaagaaggatgtggagatcaatggcatgttcatccccaagggcgtggtggtgatgatccccagctatgccctgcaccgggaccccaagtactggacagagcctgagaagttcctgcctgagcgcttcagcaagaagaacaaggacaacatcgacccctacatctacaccccatttggaagtggccccaggaactgcatcggcatgagatttgccctgatgaacatgaagctggccctgatccgggtgctgcagaacttctccttcaagccctgcaaggagacccagatccccctgaagctgagcctgggcggcctgctgcagcctgagaagcctgtggtgctgaaggtggagagcagagatggcaccgtgtctggggcctag

SEQ ID NO: 193328 - DNA, 1062 bp, Artificial Sequence
  derived and/or modified sequence
atggccctgatcccagacctggccatggagacctggctgctgctggccgtgtccctggtgctgctgtacctggtgtttggagcctacagcatggatgtgatcaccagcaccagctttggagtgaacatcgacagcctgaacaacccccaggacccctttgtggagaacaccaagaagctgctgcgctttgacttcctggaccccttcttcctgagcatcaccgtcttccccttcctgatccccatcctggaggtgctgaacatctgtgtgttcccccgggaggtgaccaacttcctgaggaagtctgtgaagaggatgaaggagagccggctggaggacacccagaagcaccgggtggacttcctgcagctgatgattgacagccagaacagcaaggagacagagagccacaaggccctgagtgacctggagctggtggcccagagcatcatcttcatctttgctggctatgagaccaccagctctgtgctgtccttcatcatgtatgagctggccacccacccagatgtgcagcagaagctgcaggaggagattgatgctgtgctgcccaacaaggccccacccacctatgacacagtgctgcagatggagtacctggacatggtggtgaatgagaccctgcggctcttccccatcgccatgaggctggagcgggtgtgcaagaaggatgtggagatcaatggcatgttcatccccaagggcgtggtggtgatgatccccagctatgccctgcaccgggaccccaagtactggacagagcctgagaagttcctgcctgagcgcttcagcaagaagaacaaggacaacatcgacccctacatctacaccccatttggaagtggccccaggaactgcatcggcatgagatttgccctgatgaacatgaagctggccctgatccgggtgctgcagaacttctccttcaagccctgcaaggagacccagatccccctgaagctgagcctgggcggcctgctgcagcctgagaagcctgtggtgctgaaggtggagagcagagatggcaccgtgtctggggcctag

SEQ ID NO: 193329 - DNA, 1512 bp, Artificial Sequence
  derived and/or modified sequence
atggccctgatccccgacctggccatggagacctggctgctgctggccgtttctcttgtgctcctgtacctttacggaactcactcccacggccttttcaaaaaattggggattcccggcccgacccccttacccttcctgggtaatatccttagctaccacaagggtttctgtatgtttgacatggaatgtcataaaaagtatgggaaggtgtggggcttttacgacggtcagcaaccggtcctagccatcacagaccctgacatgatcaagaccgtgctggtgaaagagtgttactctgtcttcactaatagacgcccattcggtcccgtcgggttcatgaagtcagccatttccatcgcagaggatgaagagtggaaaagattacgatcgttactaagtcctacatttacaagcggcaaactgaaagagatggtcccaatcattgcgcaatatggggacgtgctggtaaggaatctgcgaagggaagctgaaaccggaaaaccagtgactctcaaagacgtattcggcgcttacagcatggatgttattacatctaccagtttcggcgtcaacatagattcgctgaacaacccgcaggatccgttcgttgagaataccaagaaactgttgaggttcgattttctggatccattctttctgagcatcacagtgttccccttcctaattcccattctggaagtactaaacatctgcgtgtttcccagagaggtgaccaacttcttgaggaaatctgtcaagagaatgaaggagtccaggctggaagacacgcaaaaacatagagtagacttcctccaactgatgattgatagccaaaactcaaaagagaccgagagccacaaggcactttcggacttagagctggtcgcccagagcatcatcttcatatttgcagggtacgaaaccaccagctctgtgctgagctttatcatgtacgaactggccacgcaccccgacgttcagcaaaagctgcaggaagagatcgatgctgtcttgccaaataaagccccacccacctatgacaccgttctgcagatggagtacctagatatggtagtgaacgagaccttacgcctgttcccaatcgcaatgagactcgagagagtgtgtaagaaggatgtggagatcaacggtatgtttattcctaaaggagtagtggtgatgattccctcctacgctctgcatcgggatccaaagtactggaccgagcccgagaagtttctccccgagcgttttagtaaaaaaaacaaggataatatcgacccctatatctacacacccttcggatctggccctcggaactgcattggaatgaggttcgcactcatgaacatgaagctggctttgatcagggttctccagaacttctccttcaaaccttgcaaggagactcagatccctcttaaattgagcctgggtggcctgctacagcccgagaagcctgttgtcttgaaggtggagagcagagacggcactgtctcaggcgcatag

SEQ ID NO: 193330 - DNA, 1062 bp, Artificial Sequence
  derived and/or modified sequence
atggccctgatccccgacctggccatggagacctggctgctgctggccgtgtctctcgtactgctgtatctggtcttcggagcatactctatggatgtgatcacaagtactagctttggcgtgaatatagattcactcaacaatcctcaagatccttttgttgagaatacaaagaagcttttaagatttgatttcctggatcccttctttctgtcaatcactgtcttcccatttcttattcctatactggaagttcttaatatctgcgtgtttccacgggaagttactaactttcttagaaaatcagttaagcggatgaaggagtcccggttggaagatacacagaagcatcgcgtcgacttcctgcagctgatgattgactctcaaaactctaaggaaactgaatctcacaaggcactatctgatctcgaactcgtggcacagagcattatattcatttttgcaggctatgaaaccactagcagcgtgctctccttcatcatgtatgagctcgcgacacaccctgacgtgcaacaaaaactgcaagaagagattgatgcagtgttaccaaacaaggctccccccacctacgacactgtgctgcagatggaatacctagacatggtggttaatgagactctccgactgttccccattgctatgcgcctagagcgggtctgtaagaaggatgtggagattaatggcatgttcattcccaaaggcgtggtcgttatgattccttcatatgccttacatcgcgatccaaaatactggaccgagccagagaagttcctgcctgagcgtttctccaaaaaaaacaaagacaatatcgacccgtacatatacacaccatttggaagtggcccacggaactgcatcggcatgcgcttcgccttgatgaacatgaaactggccctcatacgcgtcctgcaaaacttttccttcaagccgtgcaaagagacccagatccccctgaaactctcgctcggcggcctgctgcagcccgagaaaccagtggttctcaaagttgaatcccgtgatggaacagtgtccggagcctag

SEQ ID NO: 193331 - DNA, 1512 bp, Artificial Sequence
  derived and/or modified sequence
atggcccttatacctgatctggctatggaaacctggctgctgctggccgtgtctttagtgctgctgtatctctacggcactcattcacacgggctgtttaagaagctcggtataccaggacccactcccctaccatttctgggcaacattctctcctaccacaaaggattctgtatgttcgatatggaatgtcacaagaagtacggcaaggtttgggggttttacgatggtcagcaacctgtgctggcaattactgacccggacatgatcaaaaccgtgctcgtgaaggagtgctattccgttttcaccaatcgcaggccatttggaccggttggcttcatgaagtcagccatcagcatcgccgaagacgaggagtggaaaaggctgcggagtctgctgtcccccactttcacaagcggaaaactgaaagaaatggttccgataatcgcccagtatggcgacgtattggtgaggaatctgcgacgagaggcagagacggggaagcctgttaccctcaaggatgtgtttggagcctacagcatggacgtcatcaccagcacgtctttcggggtgaatatcgattcactgaacaacccacaggatcccttcgtcgagaacaccaaaaagttgctgagatttgatttcttggatccatttttcctttccataaccgtgttcccctttttgataccaattctggaggtactcaatatttgcgtcttcccaagggaggtgactaatttccttaggaaaagcgtgaaacggatgaaagagtctagactggaagacacacaaaagcatcgggtcgacttcctccagcttatgattgactctcagaactccaaagagactgagtctcataaggctctctctgacctggaactagtggctcaatctattatattcatctttgccggttatgaaactacttcttcagtcctgtctttcatcatgtatgaactggcaacccatcctgacgtgcagcagaaactgcaggaggagatcgatgccgtgctgcccaacaaggcaccccctacatacgatactgttctgcagatggaatatctggacatggtggtaaacgaaactcttcgactgttcccaatcgctatgcgcctcgagagagtgtgtaagaaagacgtcgagattaacggtatgtttatccctaagggcgtggttgtaatgattcctagctacgctctgcaccgcgaccctaagtactggaccgaacccgagaaattcctacctgaacgcttcagtaagaagaataaagacaatatcgacccttatatttataccccatttggatccggccctagaaactgtatcggcatgaggttcgcactgatgaacatgaagctggctctcatcagggtgcttcaaaacttcagcttcaaaccgtgtaaggagacccaaatccctctgaagttgagcctcggtggcctgctgcagccagaaaagcccgtcgttctcaaggtggaatcgcgggatggcaccgtgtccggcgcttag

SEQ ID NO: 193332 - DNA, 1062 bp, Artificial Sequence
  derived and/or modified sequence
atggccttaatccccgatctcgctatggaaacatggttactgctggctgtaagcttagtgttgctgtatttagtgtttggcgcatactccatggatgtgattacctctacttctttcggcgtgaatatagatagcctgaataatccccaggacccctttgtcgagaacacgaagaaacttctccgctttgacttccttgatcccttttttttgtctattactgttttcccattccttatcccaatcttagaagttctcaatatctgcgtttttcctcgtgaggtcaccaactttctgcgaaaatccgtaaagagaatgaaggagagcaggctagaggacacccagaaacaccgggtggattttttgcagttgatgatcgattcacaaaactcaaaggagactgagagtcacaaggcactgtccgatctggagctcgtggcccagtccatcattttcatattcgccggttacgaaacaaccagctctgtactgagttttattatgtatgaactggcaacacacccagacgtccagcagaagctgcaggaggagattgatgctgtgctcccaaacaaagcgcctcccacttacgacaccgtgttgcagatggagtatttggatatggtggttaatgaaacgctcagattattcccgatcgctatgcggctggaaagagtgtgcaagaaagacgtggagatcaacgggatgttcattcccaaaggagtagtagtaatgatccccagctacgcgctccacagagatccaaagtactggacagaacctgagaagtttttaccagaaagatttagtaagaagaataaggacaacattgatccctatatatatacaccttttggaagcggcccacggaactgtattgggatgaggtttgcactgatgaacatgaaactcgccctgatacgggtcctgcagaactttagcttcaaaccttgtaaagaaacacagatcccactcaaattatcgttaggagggctgcttcaaccagagaagccagtggtgctgaaagtggaaagtagggacggcactgtaagtggtgcatag

SEQ ID NO: 193333 - DNA, 2153 bp, Artificial Sequence
  derived and/or modified sequence
acaggtggccctgctactggctgcagctccagccctgcctccttctctagcatataaacaatccaacagcctcactgaatcactgctgtgcagggcaggaaagctccatgcacatagcccagcaaagagcaacacagagctgaaaggaagactcagaggagagagataagtaaggaaagtagtgatggctctcatcccagacttggccatggaaacctggcttctcctggctgtcagcctggtgctcctctatctatatggaacccattcacatggactttttaagaagcttggaattccagggcccacacctctgccttttttgggaaatattttgtcctaccataagggcttttgtatgtttgacatggaatgtcataaaaagtatggaaaagtgtggggcttttatgatggtcaacagcctgtgctggctatcacagatcctgacatgatcaaaacagtgctagtgaaagaatgttattctgtcttcacaaaccggaggccttttggtccagtgggatttatgaaaagtgccatctctatagctgaggatgaagaatggaagagattacgatcattgctgtctccaaccttcaccagtggaaaactcaaggagatggtccctatcattgcccagtatggagatgtgttggtgagaaatctgaggcgggaagcagagacaggcaagcctgtcaccttgaaagacgtctttggggcctacagcatggatgtgatcactagcacatcatttggagtgaacatcgactctctcaacaatccacaagacccctttgtggaaaacaccaagaagcttttaagatttgattttttggatccattctttctctcaataacagtctttccattcctcatcccaattcttgaagtattaaatatctgtgtgtttccaagagaagttacaaattttttaagaaaatctgtaaaaaggatgaaagaaagtcgcctcgaagatacacaaaagcaccgagtggatttccttcagctgatgattgactctcagaattcaaaagaaactgagtcccacaaagctctgtccgatctggagctcgtggcccaatcaattatctttatttttgctggctatgaaaccacgagcagtgttctctccttcattatgtatgaactggccactcaccctgatgtccagcagaaactgcaggaggaaattgatgcagttttacccaataaggcaccacccacctatgatactgtgctacagatggagtatcttgacatggtggtgaatgaaacgctcagattattcccaattgctatgagacttgagagggtctgcaaaaaagatgttgagatcaatgggatgttcattcccaaaggggtggtggtgatgattccaagctatgctcttcaccgtgacccaaagtactggacagagcctgagaagttcctccctgaaagattcagcaagaagaacaaggacaacatagatccttacatatacacaccctttggaagtggacccagaaactgcattggcatgaggtttgctctcatgaacatgaaacttgctctaatcagagtccttcagaacttctccttcaaaccttgtaaagaaacacagatccccctgaaattaagcttaggaggacttcttcaaccagaaaaacccgttgttctaaaggttgagtcaagggatggcaccgtaagtggagcctgaattttcctaaggacttctgctttgctcttcaagaaatctgtgcctgagaacaccagagacctcaaattactttgtgaatagaactctgaaatgaagatgggcttcatccaatggactgcataaataaccggggattctgtacatgcattgagctctctcattgtctgtgtagagtgttatacttgggaatataaaggaggtgaccaaatcagtgtgaggaggtagatttggctcctctgcttctcacgggactatttccaccacccccagttagcaccattaactcctcctgagctctgataagagaatcaacatttctcaataatttcctccacaaattattaatgaaaataagaattattttgatggctctaacaatgacatttatatcacatgttttctctggagtattctataagttttatgttaaatcaataaagaccactttacaaaagta

SEQ ID NO: 193334 - DNA, 2318 bp, Artificial Sequence
  derived and/or modified sequence
cactgctgtgcagggcaggaaagctccatgcacatagcccagcaaagagcaacacagagctgaaaggaagactcagaggagagagataagtaaggaaagtagtgatggctctcatcccagacttggccatggaaacctggcttctcctggctgtcagcctggtgctcctctatctcgtctttggggcctacagcatggatgtgatcactagcacatcatttggagtgaacatcgactctctcaacaatccacaagacccctttgtggaaaacaccaagaagcttttaagatttgattttttggatccattctttctctcaataacagtctttccattcctcatcccaattcttgaagtattaaatatctgtgtgtttccaagagaagttacaaattttttaagaaaatctgtaaaaaggatgaaagaaagtcgcctcgaagatacacaaaagcaccgagtggatttccttcagctgatgattgactctcagaattcaaaagaaactgagtcccacaaagctctgtccgatctggagctcgtggcccaatcaattatctttatttttgctggctatgaaaccacgagcagtgttctctccttcattatgtatgaactggccactcaccctgatgtccagcagaaactgcaggaggaaattgatgcagttttacccaataaggcaccacccacctatgatactgtgctacagatggagtatcttgacatggtggtgaatgaaacgctcagattattcccaattgctatgagacttgagagggtctgcaaaaaagatgttgagatcaatgggatgttcattcccaaaggggtggtggtgatgattccaagctatgctcttcaccgtgacccaaagtactggacagagcctgagaagttcctccctgaaagattcagcaagaagaacaaggacaacatagatccttacatatacacaccctttggaagtggacccagaaactgcattggcatgaggtttgctctcatgaacatgaaacttgctctaatcagagtccttcagaacttctccttcaaaccttgtaaagaaacacagatccccctgaaattaagcttaggaggacttcttcaaccagaaaaacccgttgttctaaaggttgagtcaagggatggcaccgtaagtggagcctgaattttcctaaggacttctgctttgctcttcaagaaatctgtgcctgagaacaccagagacctcaaattactttgtgaatagaactctgaaatgaagatgggcttcatccaatggactgcataaataaccggggattctgtacatgcattgagctctctcattgtctgtgtagagtgttatacttgggaatataaaggaggtgaccaaatcagtgtgaggaggtagatttggctcctctgcttctcacgggactatttccaccacccccagttagcaccattaactcctcctgagctctgataagagaatcaacatttctcaataatttcctccacaaattattaatgaaaataagaattattttgatggctctaacaatgacatttatatcacatgttttctctggagtattctataagttttatgttaaatcaataaagaccactttacaaaagtattatcagatgctttcctgcacattaaggagaaatctatagaactgaatgagaaccaacaagtaaatatttttggtcattgtaatcactgttggcgtggggcctttgtcagaactagaatttgattattaacataggtgaaagttaatccactgtgactttgcccattgtttagaaagaatattcatagtttaattatgccttttttgatcaggcacagtggctcacgcctgtaatcctagcagtttgggaggctgagccgggtggatcgcctgaggtcaggagttcaagacaagcctggcctacatggttgaaaccccatctctactaaaaatacacaaattagctaggcatggtggactcgcctgtaatctcactacacaggaggctgaggcaggagaatcacttgaacctgggaggcggatgttgaagtgagctgagattgcaccactgcactccagtctgggtgagagtgagactcagtcttaaaaaaatatgcctttttgaagcacgtacattttgtaacaaagaactgaagctcttattatattattagttttgatttaatgttttcagcccatctcctttcatatttctgggagacagaaaacatgtttccctacacctcttgcattccatcctcaacacccaactgtctcgatgcaatgaacacttaataaaaaacagtcgattggtc

SEQ ID NO: 193335 - DNA, 1361 bp, Artificial Sequence
  derived and/or modified sequence
acggatctcattccaaacttggctgtggaaacctggcttctccttactaaactagaatttcacacagcttttatgatggtcaacagcctgtgctggctatcacagatcctgacatgatcaaaacagtgctagtgaaagaatgttattctgtcttcacaaaccggaggccttttggtccagtgggatttatgaaaagtgccatctctatagctgaggatgaagaatggaagagattacgatcattgctgtctccaaccttcaccagtggaaaactcaaggagatggtccctatcattgcccagtatggagatgtgttggtgagaaatctgaggcgggaagcagagacaggcaagcctgtcaccttgaaagacgtctttggggcctacagcatggatgtgatcactagcacatcatttggagtgaacatcgactctctcaacaatccacaagacccctttgtggaaaacaccaagaagcttttaagatttgattttttggatccattctttctctcaataacagtctttccattcctcatcccaattcttgaagtattaaatatctgtgtgtttccaagagaagttacaaattttttaagaaaatctgtaaaaaggatgaaagaaagtcgcctcgaagatacacaaaagcaccgagtggatttccttcagctgatgattgactctcagaattcaaaagaaactgagtcccacaaagctctgtccgatctggagctcgtggcccaatcaattatctttatttttgctggctatgaaaccacgagcagtgttctctccttcattatgtatgaactggccactcaccctgatgtccagcagaaactgcaggaggaaattgatgcagttttacccaataaggcaccacccacctatgatactgtgctacagatggagtatcttgacatggtggtgaatgaaacgctcagattattcccaattgctatgagacttgagagggtctgcaaaaaagatgttgagatcaatgggatgttcattcccaaaggggtggtggtgatgattccaagctatgctcttcaccgtgacccaaagtactggacagagcctgagaagttcctccctgaaagattcagcaagaagaacaaggacaacatagatccttacatatacacaccctttggaagtggacccagaaactgcattggcatgaggtttgctctcatgaacatgaaacttgctctaatcagagtccttcagaacttctccttcaaaccttgtaaagaaacacagatccccctgaaattaagcttaggaggacttcttcaaccagaaaaacccgttgttctaaaggttgagtcaagggatggcaccgtaagtggagcctga

SEQ ID NO: 193336 - DNA, 1512 bp, Artificial Sequence
  derived and/or modified sequence
atggccctgatccccgacctggccatggagacctggctgctgctggccgtgagcctggtgctgctgtacctgtacggcacccacagccacggcctgttcaagaagctgggcatccccggccccacccccctgcccttcctgggcaacatcctgagctaccacaagggcttctgcatgttcgacatggagtgccacaagaagtacggcaaggtgtggggcttctacgacggccagcagcccgtgctggccatcaccgaccccgacatgatcaagaccgtgctggtgaaggagtgctacagcgtgttcaccaacagaagacccttcggccccgtgggcttcatgaagagcgccatcagcatcgccgaggacgaggagtggaagagactgagaagcctgctgagccccaccttcaccagcggcaagctgaaggagatggtgcccatcatcgcccagtacggcgacgtgctggtgagaaacctgagaagagaggccgagaccggcaagcccgtgaccctgaaggacgtgttcggcgcctacagcatggacgtgatcaccagcaccagcttcggcgtgaacatcgacagcctgaacaacccccaggaccccttcgtggagaacaccaagaagctgctgagattcgacttcctggaccccttcttcctgagcatcaccgtgttccccttcctgatccccatcctggaggtgctgaacatctgcgtgttccccagagaggtgaccaacttcctgagaaagagcgtgaagagaatgaaggagagcagactggaggacacccagaagcacagagtggacttcctgcagctgatgatcgacagccagaacagcaaggagaccgagagccacaaggccctgagcgacctggagctggtggcccagagcatcatcttcatcttcgccggctacgagaccaccagcagcgtgctgagcttcatcatgtacgagctggccacccaccccgacgtgcagcagaagctgcaggaggagatcgacgccgtgctgcccaacaaggccccccccacctacgacaccgtgctgcagatggagtacctggacatggtggtgaacgagaccctgagactgttccccatcgccatgagactggagagagtgtgcaagaaggacgtggagatcaacggcatgttcatccccaagggcgtggtggtgatgatccccagctacgccctgcacagagaccccaagtactggaccgagcccgagaagttcctgcccgagagattcagcaagaagaacaaggacaacatcgacccctacatctacacccccttcggcagcggccccagaaactgcatcggcatgagattcgccctgatgaacatgaagctggccctgatcagagtgctgcagaacttcagcttcaagccctgcaaggagacccagatccccctgaagctgagcctgggcggcctgctgcagcccgagaagcccgtggtgctgaaggtggagagcagagacggcaccgtgagcggcgcctag

SEQ ID NO: 193337 - DNA, 1062 bp, Artificial Sequence
  derived and/or modified sequence
atggccctgatccccgacctggccatggagacctggctgctgctggccgtgagcctggtgctgctgtacctggtgttcggcgcctacagcatggacgtgatcaccagcaccagcttcggcgtgaacatcgacagcctgaacaacccccaggaccccttcgtggagaacaccaagaagctgctgagattcgacttcctggaccccttcttcctgagcatcaccgtgttccccttcctgatccccatcctggaggtgctgaacatctgcgtgttccccagagaggtgaccaacttcctgagaaagagcgtgaagagaatgaaggagagcagactggaggacacccagaagcacagagtggacttcctgcagctgatgatcgacagccagaacagcaaggagaccgagagccacaaggccctgagcgacctggagctggtggcccagagcatcatcttcatcttcgccggctacgagaccaccagcagcgtgctgagcttcatcatgtacgagctggccacccaccccgacgtgcagcagaagctgcaggaggagatcgacgccgtgctgcccaacaaggccccccccacctacgacaccgtgctgcagatggagtacctggacatggtggtgaacgagaccctgagactgttccccatcgccatgagactggagagagtgtgcaagaaggacgtggagatcaacggcatgttcatccccaagggcgtggtggtgatgatccccagctacgccctgcacagagaccccaagtactggaccgagcccgagaagttcctgcccgagagattcagcaagaagaacaaggacaacatcgacccctacatctacacccccttcggcagcggccccagaaactgcatcggcatgagattcgccctgatgaacatgaagctggccctgatcagagtgctgcagaacttcagcttcaagccctgcaaggagacccagatccccctgaagctgagcctgggcggcctgctgcagcccgagaagcccgtggtgctgaaggtggagagcagagacggcaccgtgagcggcgcctag

SEQ ID NO: 193338 - protein, 559 aa, Artificial Sequence
  derived and/or modified sequence
MSEETVPEAASPPPPQGQPYFDRFSEDDPEYMRLRNRAADLRQDFNLMEQKKRVTMILQSPSFREELEGLIQEQMKKGNNSSNIWALRQIADFMASTSHAVFPTSSMNVSMMTPINDLHTADSLNLAKGERLMRCKISSVYRLLDLYGWAQLSDTYVTLRVSKEQDHFLISPKGVSCSEVTASSLIKVNILGEVVEKGSSCFPVDTTGFCLHSAIYAARPDVRCIIHLHTPATAAVSAMKWGLLPVSHNALLVGDMAYYDFNGEMEQEADRINLQKCLGPTCKILVLRNHGVVALGDTVEEAFYKIFHLQAACEIQVSALSSAGGVENLILLEQEKHRPHEVGSVQWAGSTFGPMQKSRLGEHEFEALMRMLDNLGYRTGYTYRHPFVQEKTKHKSEVEIPATVTAFVFEEDGAPVPALRQHAQKQQKEKTRWLNTPNTYLRVNVADEVQRSMGSPRPKTTWMKADEVEKSSSGMPIRIENPNQFVPLYTDPQEVLEMRNKIREQNRQDVKSAGPQSQLLASVIAEKSRSPVEQRLPLTGGETCLPSGSSVPGAGLQDP

SEQ ID NO: 193339 - DNA, 297 bp, Artificial Sequence
  derived and/or modified sequence
atgagcgaagaaacagttcccgaagctgcctcacctccccctccacagggacagccatattttgatagatttagcgaggatgaccccgaatacatgaggttgaggaacagagccgccgatctccggcaagattttaatctgatggagcaaaagaagagagtcactatgatcctgcaaagcccctcctttagggaggaactagaaggtctaattcaagagcagatgaagaaggagtacaaaaaggaggtggagcgcaagaagctggagctggacgcacctgggtggttctcaagttag

SEQ ID NO: 193340 - DNA, 1680 bp, Artificial Sequence
  derived and/or modified sequence
atgagcgaagagactgttcctgaagcagcgtccccccctccaccacaagggcagccttattttgaccgcttctcagaagatgatcccgaatacatgcgccttcgaaaccgggctgctgacctccgacaggacttcaacctgatggagcagaagaaacgcgtcacaatgattcttcaaagtcccagcttccgcgaagaactagagggcctcatccaggaacaaatgaaaaagggaaacaactcctccaatatttgggccctgcgccagattgcagactttatggcttctacctctcacgccgtcttccccacaagttccatgaacgtttctatgatgaccccaattaatgacctgcacacagcagatagccttaacctggctaagggagaacggctcatgagatgtaagatctcatctgtctatcgcctcctcgacctctatggatgggcccagttgtctgacacatacgttactctgagggtgagtaaagagcaggaccacttcctgatcagcccaaaaggggtttcttgcagcgaggtcacagcctcctccctgatcaaggtaaacattctgggcgaggtagtggaaaaggggtcaagctgtttcccggtggacacgaccggcttttgtctgcacagcgcgatttacgccgctcgccccgacgtcagatgcatcattcacctccacactcctgctaccgccgcagtgagcgcaatgaaatggggtcttctgccagttagccacaacgctctgctagttggagatatggcatattacgattttaacggcgaaatggaacaggaggccgatagaatcaatttgcagaaatgccttgggccaacatgtaagattctcgtgctgagaaaccacggggtggtagccttgggcgataccgtcgaggaggcgttttacaaaattttccatctgcaagctgcttgcgagattcaagtaagcgctctgagcagtgcagggggcgtggagaacctcatcctgctcgaacaggagaagcataggcctcacgaagtcggctctgttcagtgggctgggtccaccttcggcccgatgcagaagagtcgtctgggtgagcacgaattcgaggcacttatgaggatgctggacaacttgggatacaggactgggtatacttaccggcacccgttcgtccaggaaaagactaaacataaaagcgaggtggaaatcccggccactgtaaccgccttcgttttcgaggaggatggagctccggttcccgccctcaggcagcatgcccagaaacagcagaaggaaaagactaggtggttgaatacccctaacacctacctcagggtcaacgtagctgacgaagtgcagcggtccatgggctccccccgacccaaaacgacctggatgaaggcggatgaagtggagaaatctagcagcggcatgcctatacgcatcgaaaaccccaaccagttcgttccactgtatacggatccgcaggaagtgcttgagatgaggaacaaaatccgtgagcagaatagacaggacgtgaagagcgctggacctcagtctcagctgctagcctcagtgattgctgaaaaatcacggtcccccgttgaacagcggctgcccctgacggggggagagacttgccttccttcagggagttctgtccccggggcaggactgcaggacccatag

SEQ ID NO: 193341 - DNA, 681 bp, Artificial Sequence
  derived and/or modified sequence
atgtccgaagagactgtgcccgaagccgcttcaccccctcccccacagggtcagccttatttcgaccggtttagcgaagacgacccagagtatatgagactgcggaacagagctgcggacttacgacaagatttcaatctgatggagcagaaaaagagagtcacaatgattctgcagtcgccatcctttcgcgaagagctggagggcttgattcaggagcagatgaaaaagggaaacaactcctccaacatttgggccttgcggcaaattgctgatttcatggcctcgactagccatgctgtgtttcccacaagctccatgaacgtgtctatgatgaccccaatcaacgacctgcataccgccgacagtctgaacttggctaagggcgagcggttaatgaggtgtaagattagtagtgtgtataggctgcttgatctctacggctgggcccaactgagtgacacctatgttacactcagagtcagcaaagagcaagatcactttctcatctccccaaagggagtgtcatgttccgaggtaacagctagctccctcataaaggttaatattttgggcgaggtagttgagaaaggctcatcgtgctttcctgtggacaccacaggcttctgtctgcatagtgcaatatacgccgccagaccggacgtgagatgtataatctag

SEQ ID NO: 193342 - DNA, 432 bp, Artificial Sequence
  derived and/or modified sequence
atgtcagaggagactgtgcccgaggccgcctcacctccaccaccacaggggcagccctatttcgataggttttcagaagatgatcccgaatatatgcgactcaggaacagggccgccgatcttaggcaggattttaatttgatggagcagaaaaagcgggtcacaatgattctccagtccccctccttccgcgaggaactagaaggcctgatccaagaacaaatgaaaaagggaaataacagtagtaatatttgggctctgaggcaaatcgcagatttcatggctagcacttcacacgccgtctttccaacttcgagtatgaatgtgtccatgatgacgcctatcaatgacctgcataccgctgattccctaaatttggccaagggggagaggctgatgcgctgtaaaatatcttcggtatacagactgtag

SEQ ID NO: 193343 - DNA, 846 bp, Artificial Sequence
  derived and/or modified sequence
atgagtgaagaaacagtacctgaagccgcaagccctcctccccctcagggccagccttatttcgacaggttttcagaagatgacccagaatatatgcgccttcgaaatagggccgccgacttgcggcaagattttaacttgatggaacagaaaaagagggtgacgatgattctgcaatcaccctcatttcgagaagagctcgagggactcatccaagagcagatgaagaaagggaataattccagcaacatctgggccctgaggcagattgcggatttcatggcctccacatcccacgctgttttcccaacttccagcatgaatgttagcatgatgaccccaatcaacgatctacacaccgctgattctcttaacctggcaaagggcgagcggctgatgaggtgcaagatctcgtccgtgtaccgcttgctggacttgtacgggtgggcgcagctcagtgacacctatgtgactctgcgggtcagcaaggaacaggatcatttccttattagcccaaagggagtgtcctgcagcgaagtaacagcctcctctctcgtcagtgaggttctggagatgcgcaacaagattcgagaacagaatcgtcaggacgtcaagtctgctggtcctcagtctcagttgcttgcctctgtgatagccgagaagtctaggtccccctctacggagagccagctgatgtccaaaggcgacgaggacaccaaggacgacagtgaggagactgtgccaaatccattcagccagttaacagaccaagaattagaagagtacaaaaaagaagttgaacgcaaaaaacttgagctcgacgcaccggggtggttctcatcctag

SEQ ID NO: 193344 - DNA, 297 bp, Artificial Sequence
  derived and/or modified sequence
atgtctgaggagaccgtgcctgaggccgccagccccccaccaccccagggccagccctactttgaccgcttctctgaagatgatcctgagtacatgaggctgaggaacagagctgctgacctgcggcaggacttcaacctgatggagcagaagaagagggtgaccatgatcctgcagagccccagcttccgggaggagctggagggcctcatccaggagcagatgaagaaggagtacaagaaggaggtggagaggaagaagctggagctggatgcccctggctggttcagcagctag

SEQ ID NO: 193345 - DNA, 1680 bp, Artificial Sequence
  derived and/or modified sequence
atgtctgaggagaccgtgcctgaggccgccagccccccaccaccccagggccagccctactttgaccgcttctctgaagatgatcctgagtacatgaggctgaggaacagagctgctgacctgcggcaggacttcaacctgatggagcagaagaagagggtgaccatgatcctgcagagccccagcttccgggaggagctggagggcctcatccaggagcagatgaagaagggcaacaacagcagcaacatctgggccctgcggcagattgctgacttcatggccagcaccagccatgctgtgttccccaccagctccatgaatgtgtccatgatgacccccatcaatgacctgcacacagctgacagcctgaacctggccaagggggagcggctgatgcgctgcaagatcagctctgtgtaccgcctgctggacctgtatggctgggcccagctgagtgacacctacgtgaccctgcgggtgtccaaggagcaggaccacttcctgatcagccccaagggcgtgtcctgcagcgaggtgacagccagcagcctcatcaaggtgaacatcctgggggaggtggtggagaagggcagcagctgcttccctgtggacaccaccggcttctgcctgcacagcgccatctatgctgcccggccagatgtgcgctgcatcatccacctgcacaccccagccacagctgctgtgtctgccatgaagtggggcctgctgcctgtgagccacaatgccctgctggtgggggacatggcctactatgacttcaacggggagatggagcaggaggccgaccgcatcaacctgcagaagtgcctgggccccacctgcaagatcctggtgctgaggaaccacggcgtggtggccctgggggacacagtggaggaggccttctacaagatcttccacctgcaggccgcctgtgagatccaggtgtctgccctgagcagcgctggaggagtggagaacctgatcctgctggagcaggagaagcaccggccccatgaggtgggctctgtgcagtgggccggcagcaccttcggccccatgcagaagagccggctgggggagcatgaatttgaggccctgatgaggatgctggacaacctgggctacagaacaggctacacctaccgccacccctttgtgcaggagaagaccaagcacaagtctgaggtggagatcccagccaccgtgacagcctttgtgtttgaagaagatggagcccctgtgcctgccctgcggcagcacgcccagaagcagcagaaggagaagacccgctggctgaacacccccaacacctacctgcgggtgaatgtggctgatgaggtgcagaggtccatgggcagcccccggcccaagaccacctggatgaaggcagatgaggtggagaagagcagcagcggcatgcccatcagaattgagaaccccaaccagtttgtgcccctgtacacagacccccaggaggtgctggagatgaggaacaagatccgggagcagaaccggcaggatgtgaagtctgctggcccccagagccagctgctggcctctgtgattgctgagaagagccgcagccctgtggagcagaggctgcccctgactggaggagagacctgcctgcccagcggcagctctgtgcctggggccggcctgcaggacccctag

SEQ ID NO: 193346 - DNA, 681 bp, Artificial Sequence
  derived and/or modified sequence
atgtctgaggagaccgtgcctgaggccgccagccccccaccaccccagggccagccctactttgaccgcttctctgaagatgatcctgagtacatgaggctgaggaacagagctgctgacctgcggcaggacttcaacctgatggagcagaagaagagggtgaccatgatcctgcagagccccagcttccgggaggagctggagggcctcatccaggagcagatgaagaagggcaacaacagcagcaacatctgggccctgcggcagattgctgacttcatggccagcaccagccatgctgtgttccccaccagctccatgaatgtgtccatgatgacccccatcaatgacctgcacacagctgacagcctgaacctggccaagggggagcggctgatgcgctgcaagatcagctctgtgtaccgcctgctggacctgtatggctgggcccagctgagtgacacctacgtgaccctgcgggtgtccaaggagcaggaccacttcctgatcagccccaagggcgtgtcctgcagcgaggtgacagccagcagcctcatcaaggtgaacatcctgggggaggtggtggagaagggcagcagctgcttccctgtggacaccaccggcttctgcctgcacagcgccatctatgctgcccggccagatgtgcgctgcatcatctag

SEQ ID NO: 193347 - DNA, 432 bp, Artificial Sequence
  derived and/or modified sequence
atgtctgaggagaccgtgcctgaggccgccagccccccaccaccccagggccagccctactttgaccgcttctctgaagatgatcctgagtacatgaggctgaggaacagagctgctgacctgcggcaggacttcaacctgatggagcagaagaagagggtgaccatgatcctgcagagccccagcttccgggaggagctggagggcctcatccaggagcagatgaagaagggcaacaacagcagcaacatctgggccctgcggcagattgctgacttcatggccagcaccagccatgctgtgttccccaccagctccatgaatgtgtccatgatgacccccatcaatgacctgcacacagctgacagcctgaacctggccaagggggagcggctgatgcgctgcaagatcagctctgtgtaccgcctgtag

SEQ ID NO: 193348 - DNA, 846 bp, Artificial Sequence
  derived and/or modified sequence
atgtctgaggagaccgtgcctgaggccgccagccccccaccaccccagggccagccctactttgaccgcttctctgaagatgatcctgagtacatgaggctgaggaacagagctgctgacctgcggcaggacttcaacctgatggagcagaagaagagggtgaccatgatcctgcagagccccagcttccgggaggagctggagggcctcatccaggagcagatgaagaagggcaacaacagcagcaacatctgggccctgcggcagattgctgacttcatggccagcaccagccatgctgtgttccccaccagctccatgaatgtgtccatgatgacccccatcaatgacctgcacacagctgacagcctgaacctggccaagggggagcggctgatgcgctgcaagatcagctctgtgtaccgcctgctggacctgtatggctgggcccagctgagtgacacctacgtgaccctgcgggtgtccaaggagcaggaccacttcctgatcagccccaagggcgtgtcctgcagcgaggtgacagccagcagcctggtgtctgaggtgctggagatgaggaacaagatccgggagcagaaccggcaggatgtgaagtctgctggcccccagagccagctgctggcctctgtgattgctgagaagagccgcagccccagcacagagagccagctgatgagcaaaggagatgaggacaccaaggatgattctgaggagaccgtgcccaaccccttcagccagctgacagaccaggagctggaggagtacaagaaggaggtggagaggaagaagctggagctggatgcccctggctggttcagcagctag

SEQ ID NO: 193349 - DNA, 297 bp, Artificial Sequence
  derived and/or modified sequence
atgagcgaggagaccgtgcccgaggccgccagccccccccccccccagggacaaccttacttcgacaggttttcggaggatgaccccgagtatatgcggctccgaaatcgcgcggccgacctccgtcaggactttaatctaatggagcagaaaaaacgcgtgactatgattctgcagagtccaagcttcagagaagagttggaagggctgatccaggagcagatgaagaaagaatacaagaaagaagtggagcgcaagaagcttgaactggatgcacctggatggtttagctcttag

SEQ ID NO: 193350 - DNA, 1680 bp, Artificial Sequence
  derived and/or modified sequence
atgagcgaggagaccgtgcccgaggccgccagccccccccccccccaggggcagccatatttcgaccggttttctgaagatgatcctgagtacatgcgcctgcggaacagagcagccgacctcagacaggactttaaccttatggaacaaaagaagagggtcacaatgattctgcaatctccttcttttagggaagaactggagggcctgatccaggaacagatgaaaaagggaaacaattcctccaacatctgggccctaaggcagattgccgatttcatggctagcacttctcatgctgtctttcctactagcagtatgaatgtgagcatgatgacccccataaatgacctgcatactgctgactctctcaatttggctaaaggcgagcgcctgatgcggtgtaaaatctcaagtgtttatcgtctgctcgatctttacggctgggctcagctcagcgacacctatgtaaccctgcgcgtgtcaaaggagcaagaccatttcctgatttcgccaaaaggagtgtcatgttcagaagtgacagcatcttcactcatcaaggtcaatatcttgggcgaagtggtggaaaaaggcagctcttgttttccagtggacacaaccgggttctgcctgcacagtgcgatatatgcagccaggcccgacgtgcgatgtatcattcacttacatacgccggccaccgccgctgtatctgcaatgaagtggggcttgttacctgtcagccataacgcccttctggtgggcgatatggcttactacgacttcaacggagaaatggagcaggaggccgatcgtattaatctgcaaaagtgcctgggccctacatgcaagatcttagtactccgaaaccacggcgtggtcgctctgggcgacacggttgaagaggccttctacaagattttccacctgcaggccgcctgtgaaattcaggtgtccgccttgtctagcgccggcggcgttgagaacctgatccttctagagcaggaaaagcaccggcctcatgaggtggggagtgtccagtgggccgggtcaacttttggccccatgcagaagagcagactgggggagcacgaatttgaggccctaatgcggatgctcgataatttaggctatcggacaggatatacgtaccggcatccattcgtacaagagaaaaccaaacacaagtctgaagttgaaattcctgctaccgtgacagcttttgtgttcgaagaagatggcgcccctgtccccgcgcttaggcagcacgcccaaaaacagcagaaggaaaaaaccaggtggctaaacactccgaatacatacctcagagtgaacgtggctgatgaggtccagagatcaatggggagcccgcgcccaaagacaacttggatgaaggctgatgaggtagagaaatcctcgtctggtatgccaatccgaatcgagaacccaaaccaattcgtcccgctgtataccgatccccaagaggtgcttgagatgcggaataaaatacgcgaacagaaccgccaggatgtcaaaagcgctgggccgcagagccagttgctggcgagtgtgattgctgagaaaagtcgcagcccagtagaacaacgcctccccctgacaggaggcgagacttgcttaccttccggcagctctgtccctggcgcgggattacaagacccctag

SEQ ID NO: 193351 - DNA, 681 bp, Artificial Sequence
  derived and/or modified sequence
atgagcgaggagaccgtgcccgaggccgccagccccccccccccccaggggcaaccctactttgatagattttcagaggatgacccagagtacatgagactccggaatcgcgcggctgatctcaggcaggacttcaatctcatggagcaaaagaaaagagtgactatgatcctgcagtcaccatctttcagggaggaactcgagggtctgatacaggagcagatgaagaagggtaacaactcctcgaacatctgggctctgagacaaatcgccgacttcatggccagcacttctcacgctgtgttccccactagctccatgaacgttagtatgatgacgcccattaatgacttgcacactgccgacagtctgaacctggccaaaggggaacgcttgatgagatgcaaaattagcagtgtatatagacttctggatctgtacggatgggcccaattaagtgatacctacgtgaccctgagagtgtcaaaggagcaagaccatttcctcatttctcccaaaggggttagctgttccgaagtgacagccagttccctcattaaggttaatattctgggggaggtggtggaaaaagggtcgtcctgtttcccagtggatacaacaggattctgtttgcattccgctatatacgctgcccggccggatgtgcgttgtattatctag

SEQ ID NO: 193352 - DNA, 432 bp, Artificial Sequence
  derived and/or modified sequence
atgagcgaggagaccgtgcccgaggccgccagccccccccccccccaggggcaaccctacttcgacagattctctgaggatgacccagagtacatgcgccttcggaaccgggccgcggatctgcgtcaggatttcaacctgatggagcaaaagaagagggtgaccatgattttgcagagccccagctttagagaagagcttgaggggttgatacaggagcagatgaagaagggaaacaattccagcaatatttgggctctgaggcagattgcagactttatggcttcgaccagccatgccgtcttccctaccagcagcatgaatgtgtccatgatgactcctattaatgatctccacacggctgactcactgaatctcgccaaaggcgaaagattgatgcggtgtaaaatttcaagcgtgtatcgcctctag

SEQ ID NO: 193353 - DNA, 846 bp, Artificial Sequence
  derived and/or modified sequence
atgagcgaggagaccgtgcccgaggccgccagccccccccccccccagggacaaccgtattttgataggttctcagaagacgatccggaatatatgcgcctgagaaatcgggccgccgacctacgccaagactttaacctaatggaacaaaaaaagagagtcacaatgattttgcaaagccctagcttcagagaggaattggagggtctgattcaggagcagatgaaaaagggcaacaactcctcaaacatctgggccctccgccaaatcgcagattttatggcttccaccagccatgccgtgttcccaacatcaagcatgaatgtcagcatgatgacgcctataaacgacttgcatacagcggactctttaaatctggccaaaggagagcgcctgatgcgctgcaagataagtagtgtgtataggctgctggatttatatggctgggcccagctctccgatacttatgtaacgttacgagtcagcaaggaacaggaccatttcctgatatctccgaaaggtgtttcctgttctgaggtgacggcttcatccctggtctctgaagtactggagatgcgcaataagatccgggaacagaaccgccaggacgtgaaaagcgcgggtccacaatcccaactcctcgcatctgtcatcgcagaaaagagtaggtccccttcgaccgagagccagcttatgtcaaaaggcgacgaggacactaaggacgactccgaagaaacagtgccaaacccgtttagccaactaactgaccaagaactcgaagagtacaagaaggaagtcgagagaaagaaactcgagctggatgccccaggttggttttcatcctag

SEQ ID NO: 193354 - DNA, 297 bp, Artificial Sequence
  derived and/or modified sequence
atgtccgaggagaccgtccccgaggcagcaagcccaccaccaccccagggtcaaccttatttcgataggttctccgaggatgatcccgaatacatgagattgagaaacagggccgcagacttgcgccaggatttcaatctgatggagcagaaaaagagagtcactatgattctacaatccccctcatttcgagaagaacttgaaggtctgatacaagagcagatgaagaaggagtataagaaagaagtggaacggaagaagctggagctcgacgcacccggatggttctcctcttag

SEQ ID NO: 193355 - DNA, 1680 bp, Artificial Sequence
  derived and/or modified sequence
atgtccgaagaaacggtccccgaagctgccagccctccaccacctcagggccagccttatttcgaccgctttagcgaggacgacccagagtatatgcgcctgaggaacagggccgcagacctgcgccaggacttcaaccttatggaacagaagaagcgtgttacgatgatactccagagcccgtccttccgcgaggaactggaagggttgattcaggaacagatgaagaaggggaacaattcttccaacatatgggccctccgccagattgctgacttcatggcctcaacctcacacgccgtgttcccaacgagttccatgaatgtatccatgatgacccccattaatgatctgcacacggccgactcgctcaacctggcgaaaggagaaaggctgatgcggtgtaagattagctcggtctaccggctattagatctgtacggctgggctcagctctccgacacctatgtgaccctgagggtgagtaaggagcaggaccacttcctgatctcccctaagggagtaagttgctcagaagtgacagcatccagtttaatcaaggtgaacatcttaggtgaagtcgtcgagaaaggatcctcatgcttcccagtggacaccaccggattctgtttgcactctgcaatttatgcagccagaccagacgtgaggtgcattatacacctgcatactcccgctaccgccgcagtgtctgcaatgaaatgggggctcctccccgttagtcataacgcactgttggtgggagacatggcttactatgacttcaacggggaaatggagcaagaagctgataggattaaccttcagaagtgcttgggccctacctgtaagatccttgtattacgcaatcatggcgtggtagccctgggcgatacggtcgaggaggcattttacaaaatcttccacctccaggctgcgtgtgaaattcaggtctctgccctatcatccgccggtggtgtggaaaatctgatcctgttagaacaagaaaaacatcggccacacgaagtcggctcagtccagtgggcaggcagcaccttcgggccaatgcagaaaagcagattgggggagcatgagtttgaagctttgatgaggatgctggacaacttgggatatagaactgggtatacgtatagacatccattcgtacaggagaaaacgaaacacaaaagcgaagttgagattcccgctaccgtgactgcttttgtattcgaagaagatggcgcacctgtgcccgctctgaggcagcacgcccagaagcagcagaaagagaagacacggtggttgaatactccgaacacttacctgcgggtgaacgtggcagacgaagtacagcggagcatgggatctcctcgccctaaaacgacttggatgaaagccgatgaagtggagaaatcaagttccgggatgcctatcaggatcgaaaacccaaaccagttcgtgcctctttatactgatccccaagaagttctggaaatgcgcaataaaatcagggagcagaacagacaggacgtaaaatccgctggaccacaatctcagctcctcgcaagcgtgatcgccgagaagtcaaggtcacccgtggaacagcgcttacccctgaccggcggagaaacatgcctaccttccggaagttccgttcccggtgccggactccaagacccttag

SEQ ID NO: 193356 - DNA, 681 bp, Artificial Sequence
  derived and/or modified sequence
atgtcagaagagaccgtgcctgaagccgcttcgcctccacctccccagggacagccttacttcgacaggtttagcgaagacgaccccgagtatatgagactccggaaccgtgccgctgatctcagacaggatttcaacctcatggagcaaaaaaaacgtgttaccatgatactccaatccccgtccttcagggaggagctggagggccttatccaggagcaaatgaaaaaaggtaacaattcaagtaacatatgggcgctcaggcaaatcgccgatttcatggcgtctacctcccacgcagtgtttcccacaagttcgatgaacgtcagcatgatgacgcccataaatgacctgcacactgccgacagtctcaatctggccaagggggaacggctgatgaggtgcaaaatcagctccgtgtacagactgttagatctctatgggtgggcccagttgagcgacacatatgtaaccctccgtgtgagcaaggagcaggatcacttcttgatcagtccaaagggggtgagctgcagcgaagttaccgcatcctccctgatcaaggttaacatcctcggcgaagtagtggaaaagggctccagctgcttccctgtggacaccaccggcttctgtctacattccgctatttatgctgctcgcccagatgtgcggtgcatcatatag

SEQ ID NO: 193357 - DNA, 432 bp, Artificial Sequence
  derived and/or modified sequence
atgtcagaggagactgtgcctgaagctgcctcccctccccctccacagggacagccttacttcgatcgattcagtgaagacgatccggagtacatgaggctgcgaaatcgagccgcagatctccggcaggactttaacctgatggagcagaagaagagggttactatgattctccagtccccatcttttcgggaagagcttgagggcttaattcaggagcagatgaaaaaagggaataacagcagcaacatttgggccctgcggcagatcgccgactttatggcatcaacctctcacgcagtcttccctacctcaagtatgaatgtcagcatgatgacgcctatcaatgacctgcacaccgctgatagcctgaacctggccaaaggtgaacggttgatgcggtgcaaaattagctccgtgtatcgcttatag
